United States Patent Application Publication US 2011/0183924 A1 - sequence listing, part 208

SEQ ID NO: 504791 - DNA, 1793 bp, Homo sapiens
  misc_feature (163)..(163): n is a, c, g, or t
  misc_feature (670)..(670): n is a, c, g, or t
ctcagtttatggatatcccattactctttttgtggcagcacaggcaacgtgcatcaacagcaagtcaagcgcatgcatgcaggctgcacagcacaacaggcacagcacccacagcacagcacagcaacacacagcaacacacagcaagcagcaacagcagtcnggcacagcagcaaaccctgcaacattgcacagcatgttggttcctcgcatgcaggcacagcacacacagcacaggcatgcgtgcaccaagcacagcacagcacagcacagcacagcatctcaagtgcacacacagatcacccatccgcatcgacaagcacagcaagactcacaaaccaacaaaccaacaagcaccaatactgggcaccccagcacacatcccgcgcaccgcatcattcacgtcacatgcaggagcagatcacggcaggcaaatctctcaatcacaagacagcttctggacacccaaactcgcactggcgagcacagcaatcccaacctaggcgaccacgacgcacacgccaatcacacacacccagacacaagcacaagggcaccagacacgcgacacaagcccacgcaggaccacctcactaccaatcaagcgtcgcacccaacgaaaacgggtggccagtcgcaatcagacctacgcagattcaatgggttcctngaccacacaacacccgcggacacgacaggcacaccgagcgacacgcaaccaccacaacagtacctaccacacgcaactactggcacaactcgagtcacagcaccaaggacaagagttgcagtaccacaagatcacaagtgagggcaacatcacaaccatgcagagccaacgggcaagaacgatacaaagtccgcccctggcacaagtgacatcacgttgcacaccagccttacccaactaccaacgcaccggcggggcgatcgaggcaacagaacagacccacagaaagcagcaacaaccaccacccacacacctcacacacccctataacaataccacccagatcagaacgcaaatcagaaccgagcacacacccaccaaaaagccagcacaacagtcgtaccggcacagacagctacacctgacacaacggagacacaagacaccaaacagagcacgcacagcaaacaacagggctcacagaacacaccacaccgacgacaacactggcaacacacatgacacagagacaacaagagaagcacaacaacgacgagacgaaaccgaacacgacacgacccaaatatgcacaccggcacaccaacgaatcgagcccaacacaacacaacacgaagactgagaaaacacacacgaacagacacaatccacaaacaacacgcaaccaaaacgagccaaacaaccgcgcgacacaagggacacacaaaacaaaagagccacagaggagtcagcgacaacaaggacacagcacaacacacaggaaccacaaggagacacacaaaagaaacaacacccgagcaacatgacaacaagaaataacaaacggaacgccacagagcacacaaaaaaaaataagaaaacaccggaacaacacaccgaaccaccgcgcacaaggaccaaataagcagcccaaaaacaagacggacacaaagagacaacaagacagagacaagacgacgccacaacaccaaacacacaaacaagagaaaagacgaaaaaagaacacaaacggcaacacaatagacaagacggagcacacagaacaacaacagaaagcaacgatagaacagagcacacagagcacacaccacacacacagagcaag

SEQ ID NO: 504792 - DNA, 798 bp, Homo sapiens
  misc_feature (798)..(798): n is a, c, g, or t
taactaagcttttaatttatctggcatattttccacttttaaaaatgaattaggtctattaggataattaggagttggatcccatcaacactattctggtagcagttaggaatctggagctatttttttttctcatacgattactatagtccagtttaccaaagttttcttaaaaatgtcggataatctggagatgatggcgttaccttaaagggtatagaagggatcacttaattttttggaaaaatgaaataggggtgaagctgaataaagttctacttacggtattaacgggcaacagtggagttccttaagatctgaatggcggtgtatgtacgctgttttcagaaccagtttctaaccagccggtgagatgggaagttttttccccataatggggatgaaacctttcatccaggtatctcggaactcgacggcgtctgtgtggttggtacccttgtgggatgcccgtggctgtgacatcctgaactcttctatgtaccgttgaacttcgcaggtgccgtcacttaccgggtctacgctggcggggggggcaaattctaccacgtcctttattgaaagaataatggctggccaaatattgtgcttccacctgggcggcgaaaacaaaacacccacacgacaacacatcaaaaacaaaaagtgggcggccgcgccaaaaaatttaaacactggggcggcggcccagtaacacagcgccacgggtccgaaaccgcgcaaggcgcttcccaaaacgcgcggcgctgaacccaccgctgggcaagacgccacccgggn

SEQ ID NO: 504793 - DNA, 286 bp, Homo sapiens
ggttaaggaaaatacagttttaatacaagatgtgtgatttagagcccaatcatgtaaataaacatttaaccctatatgtatgtgtgcataagttatacatatatatattatgtgtagaatagcacataatgtacacacaacatgcataagctgtacatgtacatctagtaccacatatattatctttaaaatgtattccaacatggtacgtagctagttcctagggcagatggagctggtggaaaagccataatcaattattggttaccttccttatttctttacc

SEQ ID NO: 504794 - DNA, 136 bp, Homo sapiens
taactgaatattaccttctgtaggaataggtggtaaataagcatctagaaggttgttgtgaatgactctgtgcttgcataaatgcttgaaacctctatatttctgtcgttcataatagttaaaggtcaaatttttc

SEQ ID NO: 504795 - DNA, 779 bp, Homo sapiens
aaaaaaaaaaaaaaaaaaaaaaaaaaaaaaaaaaaaaaaaaagaaaaaaaaaaaaaaaaaaaaagaggggggagaaaaaaaaaaaaacaaaaagaagggacaaaaaaaagaaagaagaaaaaaataaagaaaaaaacagaggacaaaaaatgagaacacgaaaaaagagaatatgaagggggtgtgtgttgatatatgagatgtgggtgggtacgggggggtgtattttctgagtggtgaggggagaggggtgttatagatgaggagagtgtggtagggtgctagtattatgtggggggcgggtttgttgctggtgggttgtttgtttagtgagtatagtggagggggggacttgatagcgtcatttttcgtggtataaagtggtggagtgtagagacggtactgggggcgctgttgtgtgtgggtcggggggaggcgaggtagtaggggtggtggagcgtttacggaggtggggtgtggggtagtcgctgcggtctgttgtgtattacgttcggcgcgggtgcgcgtgagtgtttgttagtgatcagggtgggagcggtgggagtgtggggcgctggacggggggggctgctgggctctgccagccgcgcaccgagcgtcggcgcgcgcgggtgcgcggtgactgcggtgcgggtcggagtggctgggcggaaggggctggggaagaggggagggccgggcgcgaccgaagggcgggacgtggcggagcggctcctgtgaggagcgcggtcaggcgacgctccacagccggggcacga

SEQ ID NO: 504796 - DNA, 403 bp, Homo sapiens
ttgtgataactgtatgatgcacaagctggtacataacatatgatgtgtgggccactatgattatcattagctccctatcattcctaaagtagctattcattctccacaattactttaggagaagctattctttttcatgtatttatatatcaccttcataacttatttgttgaaaaagcagataattattggcatgcctacctatgtgccagctgactacacttagtactgaggattgaaaaataaactgaaaagacattttctgtctttaagaagataaacactgaggagagagagatgagagcaaactgctgcactaaaatgcaataagtttattggtagaaaatgtacaaagtattgtagaggaatgagggactgctttgtagaatgagattatataaag

SEQ ID NO: 504797 - DNA, 980 bp, Homo sapiens
  misc_feature (44)..(44): n is a, c, g, or t
  misc_feature (633)..(633): n is a, c, g, or t
tagggcagcaaatgctgagtgtaagacactcagatatggtgacncactgtgttaaacttgggcatcttgttggccaatatcacgaacgagatcttctcttcgttagcggatttatttgctcttctgtgcgtggctgtatgtagcaaagacaataaagacgatctttaagcaacacactctcttcttacatagatactattcttgtcgtggtaagtactatatcttgtgtgacaagagaactactgagccacgagagtgaccgatcaaatagctaggcgtggcaatcaaggtgtactaataccagtctttgtcgacctgtgtcgcaatctactggcactctgccatggcctctaacttgtctcaattgataacggataagaatagcgatgatgctggacgtgtgtataggggctcgaggtgcacgatgaagacgttaatacatgaacttacgtaacagtgatctggcgcattagatggtctagcactgtgttgagctcttattgacgagactggtttcgtgcttccctcgcacttgaggtgtatgctcctagaaagatcaggtcttatccatcttaaaactgcagtgaactgagcagaagttaacccatcgcatctgtttgtcagttagccatngggctatcacagtagaaggcatttggaccagaataaacgattaccgtgcgacgaaagggtaactcactggtgacgccccggtggatcccggtccaaggacgtttgaaaagacgcacacagtggggcgcgctgggcccattacggtcttcgaccaagggggcaaaaagggggggagaccacggaagaaactcggaggaacaacagaagggcagggaggacctctcacacgtggaacaaagggccccccgcgggaaaggggccttttgatggaaacgtcacaagagaagtttcagaagggcacaaggggagaaagacaacagaggagcagaggggccgaataatagtcg

SEQ ID NO: 504798 - DNA, 150 bp, Homo sapiens
ccgcttatacttcagtaaaaaccgctactaattgcattcacattacacagtatcaaccaaacctggatttgggtttactccaagagttcttgctcctcaccctgttccctattcccatctcacccattgttcagaagtataagcgttgag

SEQ ID NO: 504799 - DNA, 122 bp, Homo sapiens
tatcttcagagcttcccccctcagagctgagatgtgatagccctatttattggtttcctttataaaatcatggtgaaattcaaatcaccatttttttcggttttaaaaatcctttcttcctg

SEQ ID NO: 504800 - DNA, 287 bp, Homo sapiens
aggcggaggttgcagtgagccgagattactccaccacactccagcctgagacagacagggaccttgtctcatttaaaaaaaaaaaaaaaaggtctgaaaccaacagatgttggcaaagatccagcagaaaagggaccgcttgtgggaatttcagcccaccctttttggaaaacagaagggggtttcctcaaggggctaaaaatggaacttcttttccatccagcaatcccactactgggtttctccccaaggggaaggaaatctttttttaaaaagggaacccttgg

SEQ ID NO: 504801 - DNA, 518 bp, Homo sapiens
  misc_feature (268)..(268): n is a, c, g, or t
  misc_feature (463)..(463): n is a, c, g, or t
  misc_feature (473)..(473): n is a, c, g, or t
acaacatggggaaaatggtctctgcttcttacatcctccatagggagggcacatctcccattgacctcaggcccacatttagaatgggtctacagggggaaaagaatagagaatgcctgaccactatccagccattatggagctctctcctatcttaatctcttctcagttttgacctttagaataataatgttaaaaaaaaaagtaaggataataaaacttggttcttttttttggagacagagtcttgctctgtggcccaggctgnaatgcagtggtgccatctcagctcactgcaacctctgcctcctgagttcaagcgattctcatgcctcggactcccgagtagctgggattacaggcttgtaccaattcgccgggctaatgttggtatcttgagtggagacggggtagcatcatgttggccaggcgggtcttgaactcctgacctcaggtgatctgnctgccttggnctcccaaagtactgggataacacgttcgcgaggggtaccgagctc

SEQ ID NO: 504802 - DNA, 92 bp, Homo sapiens
atcgccccggcgatgcccatggacacgaaccaccagatcgggctgaagtattggggggcggtgggcatattcaagaagttttacaccaggat

SEQ ID NO: 504803 - DNA, 435 bp, Homo sapiens
  misc_feature (401)..(401): n is a, c, g, or t
ctagacattttctttgccggattgctgtggtatgctgatgcccactccagttgctagtcaccttggagtttctggtacctggaggtattaccaccaaaggctgcaaaacagtaaaaatggcaacctgcccctccctctgggacctccatcccagggaggtatggactttttgccagcctgaatgcatctgaaggagctggctggagaccccagttgggaggtcacctccagtgaggaggaataggatcagagacttgctttaaaaatcagtctcgccatgttttcatagagcagctctgctgtgctgggtgtctgcttcagccttttgtcacctcagaatctcaaagcgaaaagggtgaaacagctaagtcacccaaagagcaaagatggaggcctgcccntacccttgggagctccaactgaggaagtattcgg

SEQ ID NO: 504804 - DNA, 120 bp, Homo sapiens
cgatcgtgtcggtccggtgttccgtttgtctattcctacaagcattagatgtgttacaaaactgggattccggccaggcgcggtggctcacgcctgtaatcccaacactttggaaggctg

SEQ ID NO: 504805 - DNA, 149 bp, Homo sapiens
ctgacctagaggatcccggaaaggaggaggccagctgctctctccagaatgatctcaaccagcgtggccagtgagcactaattccaagaggcaggccaactggtccttgagaggaggagaagagcagactgctggctgaggaagcactt

SEQ ID NO: 504806 - DNA, 195 bp, Homo sapiens
aggcaccaaggaggccatgaccaccaaggaggcacatggacatccacttccatagcccggccttccagcacccgccgacagaattcatacgagaaggcgacgatagaccggactgtgtgccgggagatccgccacatctcgacgggctgcctgcggatgaaggaccagtgtgacaagcgccgtgagatctgggta

SEQ ID NO: 504807 - DNA, 102 bp, Homo sapiens
acagtggtcacctctccctatcaatactttttttaattctcgcattttttttcatttggggcccaacagtccagtgaaattgtaagcttcaactcaacagga

SEQ ID NO: 504808 - DNA, 619 bp, Homo sapiens
  misc_feature (326)..(326): n is a, c, g, or t
ggcgggatgtcacgctgatgccagtggccccactctgggctgcccagtactgtctacatagctgttacagcttgggcttgacaggcattacgtaggtgtaggagggcttcatcaccggccgtcgctcggacctcctcgccggacctacctactagttccaggttccgaatagggcatgatctcctgtgtgcccttcgtgttgagccctgcttgctttgtcatcgatctctctcatggtgactgatggcgggatgtacgtcttccagcatgctttgacctaagtaacgtcgggccagccgcgaaaactcacctcctgtcatcgtagncagcgtcctgtattagggtaggtgcgatggtggatggacctggggtgatacggagctgaccgcttcaatggacgacattgcctgtatgatcgggtaccgacctttgcccctggagtgaacatggtgctaggtccttcttcaccccgctggtctgcatgggcatcttcatcttcgaacgtatgtgtactacgagccgctggtctacaacaacacctacgtgtacccgtggtggggtgaggccatgggctgggccttcgccctgtcctccatgctgtgcgtgccgctgcacctcc

SEQ ID NO: 504809 - DNA, 278 bp, Homo sapiens
gcttggcacgaggggcaaggtgggtcacgcctgtaatctcagcactttgggatgcctttatgggtggatcacctgagttcaggagttcaagaccagcttggccaacatggctaaacccgtctctactaaagaatacaaaaattagccaggtgttgtggtacatgcctgtactcccagctactcaggaggctgaggcataagaatcattttaaccccggaggtggaggttgcagtgagccgacattgtgctcgcttattccagcctgggctacagagtg

SEQ ID NO: 504810 - DNA, 858 bp, Homo sapiens
gggcgcgcaggaggaagtgcgccgcgcgggacccgtgaggaccgatatccccgagcccactggagctacgtcagtctattcactaatcaaggttgctctggaaagagctaacaggcttctcactacctctatgatgagagcacacggcgtatcgatgaggcaccaagttcacctggcctcagaagaggactctttttgtcctcaattgtgcccaccatatctgcacatgaggagagcctgtcaccgccgtccgtgtcacagcgcctgtggcactcggtccatgtctgtcagagcttgtcgaggaggagagcctggacctgtgctgtagacgcccatagaggacgtcaaggtcgaagttttttcatcccaagaccagttccgggtttccaggtagcctatgtggtgttccagaagccaagtggggtgtcagtcggccttggccctgaagggcctccctggtggtgtccacagatgagccagcctgttgaagagtggcattcacaagtggatcagatgatctacgcagactctgtgcccgagcctgaggccctgagggtggaagtggacacgttcatggaggcatatgaccagaagatcgctgaggaagaagctcaggccacaggcacggaggagggggtccctgaggaggagggctggcgtgcaaggtgacctgacggggcccgggggagctgtgctcgcccgtactgatgtagcacactgagacgggttgctggagagggcaagacggaggtgcatggcgaaatagtagtctgttcaaatgctaggacctgggagcattcgaagagagcaagaatggagggatctatcgcagttggacaaggagttcgaggatggaca

SEQ ID NO: 504811 - DNA, 478 bp, Homo sapiens
  misc_feature (464)..(464): n is a, c, g, or t
ggagtcacacagttgtaaggcagtactatagtctagtaggctggtggatcgagaggaaggcagttaagctactctgaatgggaataaagcatctcagtctgaagggttgggggcagagaaggggccaccgacagtgtagaaattctatttattcccaggtgagggtaggtgggaagagagagaggtcagagaagaattgcgaacaaggcagaggcatcgggactggagcagtatggctggagccggtgtctgcaggatggagagcgtgtgaacatgcggggactggaagcggatctcccaggaagcagttgcaggcggtcatgctacatttgcagggcgacgggcggttgtgaagaacaataaccagaagagagtttgcgtcttcatcagaaagcacctggggcaggtagagttggtgctagcttctccatccatccctgacacccagcccattcatcattcangagaagacaggctg

SEQ ID NO: 504812 - DNA, 1244 bp, Homo sapiens
ggcgtgctcagagacctagtctgtcgctatcaccctttatttggagaaggaacgagagaaggaaattactgatgatgaggcaggaggaagagaaaggtgacgaaagaagaggaagcatacaagtatgatgacagacaacagcgcgcaagagtcgaaggatgtgggttcagatgaggaggcatgacgaggcgggtgaaggcaataggaagaataccaactacgcaagtatcaaacgcatgaaatacattgatcggtgcacacaagcgtactcaagagcaccgcctatttgtgatccagaacaccctgtatgtacagtcgatccagagcaggcacgtactggaggaaattctacgaagagtccgtcactagctgtacgtgggggacacggaccactgagggaggtcaagccactttactgatagaaggtcagttggcacattccagggcaatcgcgtgagtgttacttgccctcgctcggggggcatccccgtatagacccctttaatgtaagtaagcaatgaacgaaaaaacgcaacatatgagtcgaggaactcgtaatgttcgcggccgctggtggtttcatccagtggggcagccgagaccttgttggaatgaatgtttcgaataaacccacgattgtgaatacttccacattgtgtctactacctgctagtgttggtctgcgctatgaccttccgtggcaagggatctttgtactcaccttggacctacattcatctcgcggaagaacactttgcttcccaaggagccagtggagcgcgagaccaagtccttatgaaaaaggtgcattttccggcgtacaaaaagcaatttggtataaaatcacgacggtcggacctctggaaaggctttccttttccttccttgaagcgtggggccacgcttagaagccacggcgaagaaaattctcaccagatgacagacgtctcctaatatgaacgggaaattccctccttaagagagacattccttcaaattgctatgggaaaatttcccgaccgcatagggaccttcccacgttaaatacccggcgggatgacccttggttcttgggagggtgggctcgccgtcttaatccaagtagccctccccacaatgggtgctggggacggacttgaggaattgaagattcttcttgtccccaagttaataggtttttcctccgtctatggacgggaagcaacatccttgaaaggtacccttctataatttaccattgcggg

SEQ ID NO: 504813 - DNA, 148 bp, Homo sapiens
ggtcagtatccctcgggagccgttgacacaacccaaccagaaactgacatctcctcgaccgaggacttctgtgtaaacacgcgcaccagccacccgtgcggtccatactccttaccattctttgcttggctggccaaacaaaaacaat

SEQ ID NO: 504814 - DNA, 1226 bp, Homo sapiens
gtgggggcgttttcgttgcgtggcgtgtttcgtgggctcgttggggtgctttctgtttaccttctacctttcgtgcgtgttctctctgttccctgtgtccgtgtgtgtctctgtccttggtgtccagggactcggtccctcttttattgttgcgtccccgtttgagtttccatgctgtgtcctgtctctcttgttctctatcggtgtccgtcctttggttgtcctcttgtgcttcgcttttctttggtctgatctctgccgtttggtgggtgtcctctgtcggtggcccactgcgtgcctgtccctctaacccgtcggttgcttttgggtctgttcgtctcgtccttgcatccgccctttctctccatttgttgttggttttccaccgcgtggcgttggtttttgttggctacttctatgccttcgtgcttggtttgcgccccatcgtttctgtcggtttcgtcttgggggctttctctgttgttgatctctcggggcacgttctttgattccaaggtgtatgagattcctcgtcgtggtagcccccccccgttctctttcccatgatcggcttgtctgcccttggtggttgtctcggtttacccgctgtgctagctgtgtcacctagcccctgtcccttggtctccagtttctcttgtgggttcctgtagtattgccttaggggacgcttttgaagtgatgtgtatggtgttgcttgacgtggcccaggttttccctgtatatagtcggcgagttcttgaccttctcgcctctcatgccagacgtaagtctttacggcgcacctatgcaccaggatgggccgataagccatccagcatgccttccctgtcaccggctctctctgtccatgcctacctcgggtcctctcgggacttcactttcctgacttcgtttccttgtcagatacttcctggcgtcaggcgcctgcgggtgatggtgggctttagtgagaccgactgtccgtcgtcgggctgccttgctcctccagttcgctgttctggcttctccggtttaccgcacagtgatcctcagcagatgaggccactcgtgccacgaccatgctcatgtggtgtcacccagccgccacaactttgtttcgatgtcactgcctgatcgacatgatatttatattcttgagattttctaccctcactagaagtgtaaacttccatgaaggcacagacttttcttgttctcttactccc

SEQ ID NO: 504815 - DNA, 932 bp, Homo sapiens
gtgctgcacggggtagtgctggcaggatgaaagtagcactatatgcagcagctgtcagaccgagaagcacactcccgagtcctgctttgattgagcgcagttatccaggagctcaagagctcgccgaagaggctctgacgggatggccggaagcggaagggatggtcactggatgttgtggctgctctggaactagctggtgcgtgatgcgcatccctttgcgagaagcgagtcatgcttatacaaccctaggaagtggtgtgcatggggagttatctagtcgtgccgttcgagtgaagaaaccgacagggaaggtctgtgctctggacgactccttctagatctcttgctgcctcgcctctggctcagaagacggaggaatcacattgtcttgaaccataggcctgaggggttgtgacgaggccctgtgattgaccgttggagtacgtacgattgaacagagtactatagccatgcagggtgatccactattgtcatgtgaggtccaagctcagacacgtgatacccgatcgaacacaaagcttcagcgcttcatcatagcctttcgaggggagtctctctcttgatgactatcttttgtaaccaagtcgggaaacgaatggaacagcagtatgtatacctgcctcccctgggcattcgtgacgcatggcttcgctgccggagaggtacggctaagcttctgggagaggagtcgcggaaaagatatcagaatacatggtggctggagaattgcggggctacttccatgtctgatgggtgtttgacaagcgtcaagattatgtcttgtattggcactcacttgtgagtcagatttgttactgggttggagcctcagtggtttaaaggagctgaaattgtcagtcatggggaagggcaacgcaggcaggaagtggaggagatcttaaaaattt

SEQ ID NO: 504816 - DNA, 85 bp, Homo sapiens
ccttccctccatccccatccacacaactttttttgtgtgtgataaactgattttggtttgcaataaaaccttgaaaaataaaaaa

SEQ ID NO: 504817 - DNA, 886 bp, Homo sapiens
  misc_feature (378)..(378): n is a, c, g, or t
  misc_feature (461)..(461): n is a, c, g, or t
  misc_feature (632)..(632): n is a, c, g, or t
  misc_feature (750)..(750): n is a, c, g, or t
  misc_feature (775)..(775): n is a, c, g, or t
  misc_feature (779)..(779): n is a, c, g, or t
  misc_feature (785)..(785): n is a, c, g, or t
ggaatgtaaagagatccagggctcttggagagggacaagtgagagccagccaaaaaggaaaaagcaaaggcagaaacggcatcaggagagacagagatgtgaaggagggaaggagcaggagagcaggaaggaaacgcaggaggagggagcagcatctcctgtgaacacagaggagcacctgtttgctgttaaaatcgatctccctcggcaccctgagcaatggatataatatttggcaggaataggaaagaacagctggagcctgtgagggccaaagtgacaggcaagattccagcatggctgcagggaaccctgctccgcaatgggcctgggatgcacacagttggggagtccagatacaaccattggttcgacggncttgccctgctccacagcttcaccatcagagacggtgaagtctattacaggagcaaatacctgagaagcgatacctacaacancaatattgaggcaaacaggattgtggtgtctgagtttggaacaatggcctatccggaccctgcaaaaacatattttccaaagctttctcctacttgtctcacaccatccccgatttcaccgacaactgcctgatcaacatcatgaagtgcggagaagacttctacgcgacnctcagagaccaattacatcaggaaaatcaacccacagactctggaaaccctggagaaggttgattatcgtaaatacgtggcggtaaatctggcaacgtcacatccccattatgatgangctggaaatgttctaaacatgggcncatncattgnggaaaaggggaagacaaagtatgtgatttttaagatccctgccacagtaccaggtaggccactctggggaattgaataaaacacaaacaaccaaaaaaaaa

SEQ ID NO: 504818 - DNA, 127 bp, Homo sapiens
tgcaggagtaactgggaacagggtcagaggtgtcagagctgtgccccacatctgaaacaccttctcaggtcccggcttcgagacccatcaagccaggaatgttcggttatgggagagtgccttgcat

SEQ ID NO: 504819 - DNA, 134 bp, Homo sapiens
atgactgaaccacagacatgacagtgagcttccagctctgctgctgcgcagcatagtccagatagccacatagatggaacgtggcatcagcctccatcttctcctcaagggacatgatcaccgggccagcattg

SEQ ID NO: 504820 - DNA, 692 bp, Homo sapiens
  misc_feature (130)..(130): n is a, c, g, or t
  misc_feature (692)..(692): n is a, c, g, or t
agttagagaccagcctaggtggtgggtgtctgtaatctcactatgagaactgcctgaatccaggaggcagaggttgcagtgagccaaattcacaccatgcactccagccgtggtgacagagtgagacacntgccacaaaaaaaaaaaaaaaaaaaaacaaccccttttgggaacacttacacacaacgagaccgggccaaatggggtctcaagtcgccacccaagcattgtggagaaggcggtgagagcgcggaagggaatggcccttgaaaccccagggggtgttgcggaacaccgtcctctgggaactattattgggaggcccttgggttcctttccaaaacacaccattttaacaacggcgggtggttcactttagagaaacagggcgaatacctagggagcacgagagcggagaccacactagccgccgttgtctcacatcgtgtaaaggacgccaagggtttccaccaacagggggtgtattcacacttggcgctcgggcttggttgcaggccccgtggtgcactcttttttgtgggtttttcaaaaaacacacataattatattttacatttatcggttcacagaacacttttttaagagaaaccaacagccggttaaagactacagatgggtaacacggcatgggtttttacaacccagtgggtttctatttctaacacactatn

SEQ ID NO: 504821 - DNA, 1293 bp, Homo sapiens
aaggcgagagcggagctccaagcccggcagcccgagaggaagatgaacagccccagccagagcctctgcagagtggaccccgagccgcccccaggtagccaggagcggcctcagcggcagccgcaaactccagtagccgcccgtgctgcccgtggctggggcggagggcagccagagctggggaccaaggctccgcgccacctgcgccacagcctcacacctgaacgctgtcctcccgcagacgagaccggcgggcactgcaaagctgggactcgtctttgaaggaaaaaaaatagcgagtaagaaatccagcaccattcttcactgacccatcccgctgcacctcttgtttcccaagtttttgaaagctggcaactctgacctcggtgtccaaaaatcgacagccactgagaccggctttgagaagccgaagatttggcagtttccagactgagcaggacaaggtgaaagcaggttggaggcgggtccaggacatctgagggctgaccctgggggctcgtgaggctgccaccgctgctgccgctacagacccagccttgcactccaaggctgcgcaccgccagccactatcatgtccactcccggggtcaattcgtccgcctccttgagccccgaccggctgaacagcccagtgaccatcccggcggtgatgttcatcttcggggtggtgggcaacctggtggccatcgtggtgctgtgcaagtcgcgcaaggagcagaaggagacgaccttctacacgctggtatgtgggctggctgtcaccgacctgttgggcactttgttggtgagcccggtgaccatcgccacgtacatgaagggccaatggcccgggggccagccgctgtgcgagtacagcaccttcattctgctcttcttcagcctgtccggcctcagcatcatctgcgccatgagtgtcgagcgctacctggccatcaaccatgcctatttctacagccactacgtggacaagcgattggcgggcctcacgctctttgcagtctatgcgtccaacgtgctcttttgcgcgctgcccaacatgggtctcggtagctcgcggctgcagtacccagacacctggtgcttcatcgactggaccaccaacgtgacggcgcacgccgcctactcctacatgtacgcgggcttcagctccttcctcattctcgccaccgtcctctgcaacgtgcttgtgtgcggcgcgctgctccgcatgcaccgccagttcatgcgccgcacctcgctgggcaccgagcagcaccacgcggccgcggccgc

SEQ ID NO: 504822 - DNA, 214 bp, Homo sapiens
gtcttgagcagcggcatgacttcctggcaaatcgcgaggaagtgcgacgggtcgcgaaacatctcgctcaccggaatggtcaagaactgcagcaactgcatgaacgcggccgggtcgtgcaacacgcgctcttgcagtgcggaaatggtcgcgcagtcgaactgacgcaaggcatgggccacacggcgtttgaccgacgcgcccgagtagtcgc

SEQ ID NO: 504823 - DNA, 214 bp, Homo sapiens
agcatccatttacttgatgaggatgagcgtcagcgactgcataaagcacacctgctgaaaccgtatttgaccacgcgtcaccaggaaatcgacgcgtggaatcagcaattagatgcgcctgaatcggtattgaatcaccgccaaatgaccaatattggcaccttccgcgcttatctgaacgaatatttgcgtcatcacccgcgtattcgcaaag

SEQ ID NO: 504824 - DNA, 887 bp, Homo sapiens
cggtctgtatgttgcgctgttttgtgttgtcccccgtagttttttcggtggaggtggctgttgggaccccctttggtcaagcgggtggttgttcggatgttttggttggcccttcaggtgacgtgcgcatgtctggtgttaaacgacccgggggctctttgtgtgagtcagtctccaatgatgggggtgcgcccacgggtgcgattgccgcttcgctgttgttgggccccggcttgatccccgggccccgctctagggtggatgtcccccgcgccggccccgtgtgacactcgttgggggacgttgggtccgttgtttaagaagcagtattttttgccctgaatgcgcccacacacaaggtcagtgttcacctatactttctactcccgttccgagccgcaaaagtgccgcccccccttggtggaagagtgcccccaagtatgttgctcgcacacaataggggtagtacaccgcacattagacgaccggcggttagtaaagagataggaccacaaaacatcctgtgcgcacacagtggtcaccctcgtacgcccacagaaacttggtttgatgatacgttgcacctttaccgccgtgtaccgaccccgatccacatatccccggtggtggttataaagtcttatgtaaacaaccacaatgtagggatgcggcgctagaaatacccctcctcggggcatgggcatatccgcccccataatgaggtgatccccctcttaaatgaagcctccttaatatttgacaccttgctaacaaaaacaaccatttctaacagctcaccaaaggcaccacttattcatttgcataattcggataaagcctttaaaagcgaaattcccccccaaaataaatataaatgcaaacataac

SEQ ID NO: 504825 - DNA, 106 bp, Homo sapiens
tgcctctacacaatgtatccgtgttggctctggaagcggctgcagttgcggtagggcatctgttcccgcctgcccggccactagctgcgctccctggaggaggagc

SEQ ID NO: 504826 - DNA, 381 bp, Homo sapiens
atgtcatatcaacaatgtgaggtccattttggagcaaaacccttcaaataccccccctctatggaatttagcccttttaatggctacgccttcctaacagctgaagaaaaaatccttttgcccaggccccggcgtcttgctctgtttaagccagtcaggatcccagaaaactgctgttccctttgttgtgatgaggtagcagaccccccattgaagccctgtgggcccagtgacctgtgcatggattgtgccctgcagctggagacctgccccttgtgtcgtaaaaaaataggatttagaatccgaccgatttttcatatttcctgacccatgtgaaaaggcctcgtgggcttttttttactccattcccgcccatgttta

SEQ ID NO: 504827 - DNA, 850 bp, Homo sapiens
  misc_feature (39)..(39): n is a, c, g, or t
  misc_feature (72)..(72): n is a, c, g, or t
  misc_feature (78)..(78): n is a, c, g, or t
  misc_feature (101)..(101): n is a, c, g, or t
  misc_feature (122)..(122): n is a, c, g, or t
  misc_feature (149)..(149): n is a, c, g, or t
  misc_feature (175)..(175): n is a, c, g, or t
  misc_feature (178)..(178): n is a, c, g, or t
  misc_feature (197)..(197): n is a, c, g, or t
  misc_feature (216)..(216): n is a, c, g, or t
  misc_feature (224)..(224): n is a, c, g, or t
  misc_feature (271)..(271): n is a, c, g, or t
  misc_feature (275)..(275): n is a, c, g, or t
  misc_feature (288)..(288): n is a, c, g, or t
  misc_feature (322)..(322): n is a, c, g, or t
  misc_feature (328)..(328): n is a, c, g, or t
  misc_feature (330)..(330): n is a, c, g, or t
  misc_feature (340)..(340): n is a, c, g, or t
  misc_feature (359)..(359): n is a, c, g, or t
  misc_feature (374)..(374): n is a, c, g, or t
  misc_feature (376)..(376): n is a, c, g, or t
  misc_feature (451)..(451): n is a, c, g, or t
  misc_feature (460)..(460): n is a, c, g, or t
  misc_feature (547)..(547): n is a, c, g, or t
  misc_feature (570)..(570): n is a, c, g, or t
  misc_feature (582)..(583): n is a, c, g, or t
  misc_feature (640)..(640): n is a, c, g, or t
  misc_feature (651)..(651): n is a, c, g, or t
  misc_feature (657)..(657): n is a, c, g, or t
  misc_feature (661)..(662): n is a, c, g, or t
tgtaatcaccaatagtaaatgaagatgtttatgaactgncattagaagctttctaaactgcgctgtgtgatntgttcnatctagcctaggggaggacattncctagagggggagggactgtntgggttcaggggcatggcctggagggntggtgggcagcactgtcaggcacagnttnccctgctgttggctttctnttttggttattaagacttntgtattanctttctttgctacctgtcaccccaggggctcctgagtataggctttncagnccctgggcagtgnccttgagttgttttttgacacactaacctgggcnactctntnagcattagcntctgacctggagcaagcangcccgaccccccccncnaaacagcttagtgttattctggcatttggtaaaagctggcttaatctgtttaatgtttatcagtacattttaaanaggggcatngaaattaactcccaccaccagggcttttatgggggatgccagggcctttaaaacactagccaaactctaattaattctcaaatcacngccaggagttcttgctcctggcngcaggcccaggnnccaagatctccttcttggggttacaaacagcagtaaggaagaggaatatatagcaantcagggcctgngaattntggnncaatccgttcttagggactggatacttctggctggctgagtatagtactagctgcctccccaccaggttccgagtagtgtctaagactctgtctctccagccttaggttagcctggaagtttagatgtggcctcccctaaactgttttacactaaacagctttttctaagggagagacaagggggaga

SEQ ID NO: 504828 - DNA, 920 bp, Homo sapiens
taaccagcccaacacacaaatcgactagtcgagctgcgtgtaatcggccgaggctggtgagtcccgggcagccgtcctgctagcgccgactcctgcgcctgccattggtctcctcacatgcggaaacacagcttgtgagtgcatgtcagctgttagcaagtggttttgagtacattctgggcttggctgtatctatctagtgcctgtttgtgcgtctgtttctttcttccgatgcttccccattttccttctgtcctttattctcctgctccttgtattcccacgtcacgcacagtggggttcctcgagaggacgcgtgaggtgggccgccggtgcgcggggcgttaggcgctgcggctgctgcgtcatttttacctttgctttctcgtttacctttagacagctggccgcaatctccagtgcgtagcctttcagttccctcagtgcttctcttctgacctgcaatgttgaagttctgtaattgctggggccttccaacaaagaaccagagtgtcacttgacagagggaagcagacagagtaccctgattggtattcagctgatgatgggagtatagagacattcaggagggcacctaggttgttcacaacgtaggaataaggaagtactctgcagggatcctttccaattcctattgtagagggagtcctgtgtccatgaccccctcccgagtgggactgtccacagctcgataggctcacacgagaacccgtagaggctgaacatggggggctatggagagcggtcagggagtcctacggcgaaagatgcagtgatgcttgcttgctttccccgtgtgtgtgtcccagctagtgcactcctttcgccgcgcgtggtgcccgctgcctctctggccttgggtgcgccgcatgggccgcgggttccttgtctacctgagc

SEQ ID NO: 504829 - DNA, 705 bp, Homo sapiens
  misc_feature (141)..(141): n is a, c, g, or t
gaacacctatggcctttgaagtagtgttgggtcaggagactgtctcctcctccggaggaatactgaagacaggaggctgtcacatcgtctctgacatggagagtggcttccggccatccgtaggggaagacacagagctcntgagcccccttctagattcaaggttggcgttttacggggatggaggaggtagccaccaaaagggaatgatttgcaggccaccagaaatgtgcctgaggtcccacctgtggaccctccattttggatcctgttccctttcaatgccagtactcttttttctttttttctttctttcttttttttttttttaaaacgggagttttcttctggttggcccaggctggcagtgcagtgggcatgatctcagctcactggcaactggattcaagcgattctccggtctcagcctcctgagtacgctggggataacaggcgcccgccaccatgcccagctaattctggtgatttctaagtgaacaacgggggttccaccatgttgggtcagtctgagctcgagctcgggacctcgggtgatccacccatctaagcctcccaaagtgcgtgggattaccagatgtgagccaccgaacctggcccagaactcttagaaagtagaatcctcagggttgaacagagtttcagggatttcgacaggttatggcagaagtactactgggtccctac

SEQ ID NO: 504830 - DNA, 962 bp, Homo sapiens
  misc_feature (1)..(1): n is a, c, g, or t
  misc_feature (103)..(103): n is a, c, g, or t
  misc_feature (105)..(105): n is a, c, g, or t
  misc_feature (173)..(173): n is a, c, g, or t
  misc_feature (175)..(175): n is a, c, g, or t
  misc_feature (179)..(179): n is a, c, g, or t
  misc_feature (183)..(183): n is a, c, g, or t
  misc_feature (286)..(287): n is a, c, g, or t
  misc_feature (292)..(292): n is a, c, g, or t
  misc_feature (294)..(297): n is a, c, g, or t
  misc_feature (299)..(301): n is a, c, g, or t
  misc_feature (303)..(303): n is a, c, g, or t
  misc_feature (306)..(306): n is a, c, g, or t
  misc_feature (330)..(330): n is a, c, g, or t
  misc_feature (378)..(379): n is a, c, g, or t
  misc_feature (386)..(386): n is a, c, g, or t
  misc_feature (388)..(389): n is a, c, g, or t
  misc_feature (391)..(392): n is a, c, g, or t
  misc_feature (406)..(406): n is a, c, g, or t
  misc_feature (408)..(408): n is a, c, g, or t
  misc_feature (411)..(411): n is a, c, g, or t
  misc_feature (431)..(432): n is a, c, g, or t
  misc_feature (921)..(921): n is a, c, g, or t
ngtccggaattcccgggatcagcgccgtgctgcccgtccatgtgccctggggcctctgcgagcttgcccgcctcattggctttctactcctggtggccaaggntnttttcaagcagtgtagtaactcatctggtcgtctgtaccgcctccccagtgccgagacaatgaaggananatcnctgnggcggctctcctgtgtcaccaagtcggcggcctcctccttctattccatcattgtatcagtcttctttctatttatatagacaccaccaccagcacagagcannttttntnnnntnnnancgntgatgtggtcttagaggcctgcanagacttctgggacggagctgacatctaccctctctcgggatctgacannaagaaantnntnnacttctaccagcgntnctncctgtctgggtattgctctnncttcgcctacaagcccatgaactgcgccctgtcctctcagctcaatggcaagtgcatcgagctggtacaggtgcccggccaaagcagcatcttcaccatgtgcgagctgcccagcaccatccccatcaagcagaacgcccgccgcagcagctggagctctgacgaagggatcggggaggtgctggagaaggaagactgcatgcaggccctgagcggccagatcttcatgggcatggtgtcctcccagtaccaggcccggctggacatcgtgcgcctcattgatgggcttgtcaacgcctgcatccgctttgtctacttctctttggaggatgagctcaaaagcaaggtgtttgcagaaaaaatgggcctggagacaggctggaactgccacatctccctcacacccaatggtgacatgcctggctccgagatccccccctccagccccagccacgcaggctccctgcatgatgacctgaatcaggtgtnccgagatgatgcagaagggctcctcctcatggaggaggagg

SEQ ID NO: 504831 - DNA, 711 bp, Homo sapiens
agtccgctgggaatactgcaggatgctgtccgtcgcgtgctgcggcgggtccgcgcccttcctcggcggcgaccggagtggctctccagaaatgcttcggagttcagtctttcattgctgcacggagacttccatgcctctaactactcatcttcgaagagatacttggtgactgctggagatgttccgtctattcgttggaagtagcgtatctcttggagcgtgatacctctgtctggatcttgaagaataggtgcggccgtgtcttataaagatattggtgatggtattgccgcgcgttacagtggtgcgtgagtgacagtcgttcaacgcagaagaaatggtaggaggttttcttcagggcttagaaggggtatgtccttgaacttggaacctgacaactgtttggatgtttgtcagtgttatggaaagtgataaagctacattaagcggaacggatgatatacgtgaagaggacaggagccattgtggacgttccagttggtgaggagctgttgggtcgtgtagcttgatgcccttggtaatgctattgatggaaaggcgtccaattggttccaagacgcgtaggcgagttggtctgaaagccccggtatcattcctcgaatttcagtgcgggaaccaatgccgacctggcattaaggctgtggatagctggtgccaatggcgtggtcagcgtgacctgatatggtg

SEQ ID NO: 504832 - DNA, 174 bp, Homo sapiens
gatggcgatgagtttcgagtggccgtggcagtatcgctttccacccttctctacgttacaacgaatgttggacactcggcagacgcagctggccgcctggtgctcgctgggtctgtccttctgccgcctggcacaaacagtccagcatgacggtgatggaagctcaggagagcc

SEQ ID NO: 504833 - DNA, 167 bp, Homo sapiens
tagacaagatggccagatggtatgccatggtggcataagtggcaccatatacgagtacggagcccttcaccattgatggggaggagtacatccccttcaatgcagtatgctggcaatacgtcctctttgtcaatcgtggccagcctactgtaggccatgaggggcca

SEQ ID NO: 504834 - DNA, 336 bp, Homo sapiens
gtaaaccaccaaatctgattacctctacagacttacctattctgcatatttcatacaaatagaatcatataatatgtgacctcttgtgtctggtttcttttacttgacataaatgttttttgaggtttgtccatgttgtagcatgtatcatctgtacttcatacctttttatggcagagtaatattccactgtatggatacaccaccatttatttaatcattcatccaatggaagaaataggctgctgcctgccacctactggctattgtgaatagtgctgcaacaaacatgcacgtttaggtacttttttttttttggaaacggaaacaggataa

SEQ ID NO: 504835 - DNA, 119 bp, Homo sapiens
aataaaactctctctgtctcccagcaggagtgagatggcgagatctcggctcattgcaacctccagttcaagcgattctcctgcctcagccccccgagtagatgggactgtaggcatgc

SEQ ID NO: 504836 - DNA, 313 bp, Homo sapiens
ccaccattgagtctgtcttcccaccacactatattgttcccaaagtatcaaacattattttttgtttttgagatggggtctcactctgttacccaggctagagtgcagtggcatgatcatggctcactgcagcttcagtcaacctcctgggctcatgtgatcctccccccccagcctcccaagtagctaggaccacagacatgtgccaccatgccctactaaaattttaattcttttcgcagagacagggtcccactctgcccagggtgatctcgaactcctgacctcatgtgatcctcccaccccagccccc

SEQ ID NO: 504837 - DNA, 308 bp, Homo sapiens
tggtaagtaggctgtcctgttctgagagtgggttgagtctggagtggctgagcaggggcagcatgagaggagatccataggttgccgcaggtccaggtcatgcagtgacccgtgagccccgatgaagagcttgagttttcattccaagagcagtgggaagcccctgcaagctcaggcacaggagaggtgtgacccgaggtacacctaagaaagatcactgcataggcagcatggagcatgagtcccctggagctggaggcaatgcaggcagggtggataggaggcaccgtggtcatccaggagaggca

SEQ ID NO: 504838 - DNA, 481 bp, Homo sapiens
  misc_feature (11)..(11): n is a, c, g, or t
  misc_feature (97)..(97): n is a, c, g, or t
  misc_feature (99)..(99): n is a, c, g, or t
  misc_feature (114)..(114): n is a, c, g, or t
  misc_feature (127)..(127): n is a, c, g, or t
  misc_feature (160)..(160): n is a, c, g, or t
  misc_feature (198)..(199): n is a, c, g, or t
  misc_feature (216)..(220): n is a, c, g, or t
  misc_feature (223)..(223): n is a, c, g, or t
  misc_feature (227)..(227): n is a, c, g, or t
  misc_feature (229)..(229): n is a, c, g, or t
  misc_feature (250)..(250): n is a, c, g, or t
  misc_feature (252)..(252): n is a, c, g, or t
  misc_feature (255)..(255): n is a, c, g, or t
  misc_feature (262)..(263): n is a, c, g, or t
  misc_feature (270)..(270): n is a, c, g, or t
  misc_feature (285)..(285): n is a, c, g, or t
  misc_feature (302)..(302): n is a, c, g, or t
  misc_feature (323)..(323): n is a, c, g, or t
  misc_feature (327)..(327): n is a, c, g, or t
  misc_feature (337)..(337): n is a, c, g, or t
  misc_feature (361)..(361): n is a, c, g, or t
  misc_feature (388)..(388): n is a, c, g, or t
  misc_feature (426)..(426): n is a, c, g, or t
aagagcaaggncccgtcccagccatccaacactctgtccttccctgccccaggatggacacccaacatgtggagaagttgctcttgaagctgctcantnggcctcgttgaagcnggtcaccattgtnttgtgcagtgtctccttgtaggactcggttgangtgaccccgtaggagctgccccgtgcacccaggccggnnccccgcacccgtgtttnnnnntcnatangngttacaatgccctgttttttntngcnaagggcnntgccctnttttcagcccatggnctgcagcatccgactgnaaatgttgtaaatgcccagcncgtnccgagtaggntgctcgaagtctaaagaggctgtngatatgccgccgtactttctctttttnggttttgggggttcggggatgccatatttttttttgcntttagctgcacggtcccggtattttatttgctccatgttatttttttctagtgct

SEQ ID NO: 504839 - DNA, 839 bp, Homo sapiens
gcctcttcctgatgaccccaactcagaattcactgtttaccaaacacctcggtcataataatgtcattagtttctccatttttattttctgaactgtacattcacaacttatgtttctttgagattcaatagatattgggggaaaaacgccttttttaggaaaattatagtgaaaattgacagtgatggcataatttcttgtctgaatgctgcctccatttatcataggtccttccaggcaactcaaacactgtaagtgaaatatgggagctatagtctttctattattctcttcttttcctttgttttcataattcatactgcagtctgtcaggcaaatcagcacacagcctgatagtactttactaaaatgactgcattcttggattccttcagtctatggttcaagtcactaaagattcatttcgtagagtccttatgacgaaacagcagtatgaatcttgacggtttctgccagtcttattggccacagctctctgacttggtgtctgctgccaggctggtacttcattactctgtctccctgtctgctttacaacttaggaatcaacatacattttcacaccatacatttttacattggtaccgtcaggactcagtactttcgacttatattgatgactccggccgcatactaccatctctgggtcttgccctaccctaattgttgtaagcaaattattcgcgtccacgcgggtggctcttcctctccaatgggcatcattcttcactctgatgtaagcaaagcttacatcatgaaaacgcgattgctgcagtgtcaccgtgcaactacgacaccacacactacacacagcgac

SEQ ID NO: 504840 - DNA, 310 bp, Homo sapiens
ggtacagagtgtgaatccccatatccttggataagatcttcttgctcatcttcctctttactagacttctagcgcttcccataaaggctagcttggccttatcttcccactcttcttccgtgaggtctgttggctgtcaggagggggaggcgcaaggcgaatgtttcctcatttcgagacattagctcgctgcttttctatctctctctttctggcacttctagactgtgctcttcattcttgagttgaaatccgctgacgaaaactcacaggcttcctattttcatccacctcataatcctcctcattc

SEQ ID NO: 504841 - DNA, 307 bp, Homo sapiens
tttccggatgggggggaatcccccccaaaatatgtatgtgtgggcctgcttagattactaaatttcatagttaattttttgtttcccccggggctcctaatgtgtggggcccccggaaggcctttctgtagtccgtccttttggtttttttttataccccttttttttttttaggggattagttatgaagataatattttttttttgttaattgctactttgttttttatgcatgctttgtaattttattttttttagtttttgatttgggttatattcccctttttattaaccgttttagggggga

SEQ ID NO: 504842 - DNA, 539 bp, Homo sapiens
tttttttttgattacttgtactgacgtgtattttctaattttctataattacattgtaaatctgtgtaattttaaaaatgaggccgttcatcattggagaaaacacgacacgtacgcttaagggcagacttaaggctcttaacatttttaaagcaaccaaaagaggcaaaatgtagactttaaaacacaaaaatgtgcttttctgagtgtggcacagactccaagcccacaacgtctgaggaagcgtacgggatcagaaccagcagctccgttcacagccaaactcgccttcaaaaggcaaggagatggcgcgcaagctcagcccctgaaatcacacacgcggggttgaacgtgagtaactcagcccatcgttccgcactgtgaatctgctccaatacctgcagagacaggtccagctcccactacgagggcccaccgaccaacacggtacaccgagggtgaaaaagccacgaccaggcccgcctggaaaacaccatcagctcctagaaatgccacttccttccttcttccgccgtttt

SEQ ID NO: 504843 - DNA, 1200 bp, Homo sapiens
aagttcatgaaacctgggaaggtggtgcttgacctggctggacgctactccggcacgcaaagctgtcatcgtgaagaacattgcatgatggctcctcacgcatcgcccctacagcccatgcctctggctggcctgcacatcgacccgctacccccgcccacagctgaccgccctcccactggcgccacaccacagacaccactcgcccaacaccactcactccgactaacacactcctctcctgtgaaacgctgctactacacctacaacctcacccctacactcgccccacacaggctacctcctgcctcgcgactatctccccctcgcgccccaccacacctgctccgcctcaactcacccgcctgctccccctccgccaccactcccgtgccctctcctcccccggccctccgcccccgccccgcgccccccgccccaccgcgcctcccaccctcccgcaacccacgcagccctcacccaccgcactacgcccccccccccacccccaccgtgcgcctcccctctcccccaccacccccctgccgccgctctctccccgcccttgcccctctgctccccctgcactccattctcccacccactctacttcgccaggcagcccgcgccagcggcggccagccgccttaagccgcccgccgcgcccgcccccacctcccccgcacacacagccccatcccgcgtgcgcgccgcccccccgcccccgcccctctgcacgcgccccacactcccccccagccacacgcgcatgcccacccaccaccctcacacccccacacgacacacaacacacccacgcgcactctctacctgcccacacaccaacacctgagcacatctaacacacaaattcacaaacgcataacctcctaccgctcacccgtcacctacaccacacccagtcccctaccacccccactatatcacacttcaacttttcacggtcgcgcgcgcgctcagacgcgcgcggcacacctcaatataacaccacccctacccccccccaaccccaccaaccaacacaccacctccaccacccctcaacaccctatccactccacacactcacaccaccacccccccccaacccaaccccctccacacccccccccacccaacaccaacaccccccaccaccaccaccaaccacccccaccaccccctcccccactcacatca

SEQ ID NO: 504844 - DNA, 783 bp, Homo sapiens
aagttgtgactgctcttgtctttggcgctaacggcggctggctggccttgtgtaagactccagaactccccacttgccgcgttctcgccgtcgcaggctcccgtgacgatggtgccccgcctgctgctgcgcgccttggccccgtgggcccctgcggttggtcctggagagcccccatgtcaggcccccttcatgctgccgcgctcgctgtggccacggtccgatgtaccgtgcatgcgcaaatatcggtgcccactcgatgcactagccatggactgcctgccccaggcgtgctctattcccaattttgaggacacccatttaggagaatacctcatgtgcacagaagccctcatctttgaagtgattggcccaggttcaggagcaaccacgaatcaatttccgcaaacggagtttgtgcacaaaactcgggactgggagatacatgaacttgcattagagcaggacttggtatgctcgtggacaacagcaggaattagacattaccaaggcatactatttttggagaacccctggcctatgagtatgtacctattctgcctcggagactccgtgggatcctgaacgttttaattccattgtatggctttcattccttgacccaagagatctgagtataagtgaccagctcacccggggtcagcaacagtgacctgtttcttgccatccggctttctgaaggacaggctccggggctggccttctggagcctgaagttttccccttaaaccctcaaaagtggcctatcccttttcgagatcc

SEQ ID NO: 504845 - DNA, 705 bp, Homo sapiens
  misc_feature (340)..(340): n is a, c, g, or t
ggggcttttacctacttacacgagcgagagggcgctgtatatccatcatcaggactctgaccagccaccaaatacccccagagcctcgctcttgtagctcatgctataatcccgacatctctgatcccacaaatatagactgatcatatgccagcccatgtccccaccatttctcgaaagattcaggtgtattcaatgagactacatgctctggcttgcaatgattatcccagacatctactataggcataacgaaactaatggttcgcctatagatttaacacccagactgagagtaaagtgttcaattgaacagcgtcttgatgcgcgtacacacagncgagttaacctcttgatgaatacttgaaaggacatccaaataaaggccttactggttcatatcgccgtatcgtgtcggaacttgcaatagactctccaaagggttctagcgcgaacactggaaaaaccctagcgtaaccaacctgttgtggtcgcctcgatccaccttctctagatggagtaaataaagaggccggcaccatcagccttccttgacctattcaccctaaatggataaggtaacaagtaaccgtaagatgtcgtcaacttcgcggttaagtaaaccctagcgatcccaattttaaaccaataggccaacatccgcataatcccatgtgtgttaaaagaaaagagcggcgtacggtt

SEQ ID NO: 504846 - DNA, 159 bp, Homo sapiens
  misc_feature (33)..(33): n is a, c, g, or t
ccctagtttagaagttcaatagcagttaacaanggtaaagtgttttttatttatttttgagataaggtctggttctgtcggccaggctgcagtgaataagtgtgatcttagcttactgcaaccctctgcctcccaggctccaagcaattcttacgggga

SEQ ID NO: 504847 - DNA, 195 bp, Homo sapiens
ggccagtggtatggaaatgcacaacaaattggccagtatatgcctaatgggttggcaagttcctgcatatgggatgtatggccaggcatggaaccagccatggatttaatcagacacagtcttctgcacatggatggaccaattatgagtcaccgcctcaggcaaatgcagcatgtgcccatcagctctggtatc

SEQ ID NO: 504848 - DNA, 1131 bp, Homo sapiens
gaaggatcgcaggcgagattacgatggcgaggctcgcgcgccctgacacccgaccatggtccccgagtgcccaccacggtctggcccggcacagccatgatcaaggcgatccgtaagtcttcaagcaacgcacgggcacgccgcggactctccaagcttctaccaggccctacagtgagagatacacaacagcgacatcatcagggagactttccattttggtatctaagagagaatgcacacactgcttcgctaactctccctagcaaggcacggactcatcacattggcacggatctgacacacaacactgcactatactacgacatctatcgcaacgtccctactacagctcttctgtgctggactctcttttcacgcaccgctgacaccttgccccacctccacacgcactctacactcccaacgctacctctgcctggacaacccacttagcaccacaatgtttaagacacgcctgctcccgctgcaggcctgggatcttggactattaacacacatgcctcacgaccccaccagccgcttcacccaaaaccagctcaccattaggcccaccaccaccttgccgccggcctgcggaggcgcacagtgcgctacctctgcgaagaacacaacaagtacatcgacattgaagaatttgtataccaccaaagcattcgaactggaccaccaccacactacacggcctggcacaaccacttcctcgcacacgcagtgggcatctaagtcacgaccaatgacctcccgaagaccccaggttgcgctaggccattcacaacgcagatcggtcacagagcaaagtactcagaacgtcctctctcctgcagaaaaaatcgccctacgaaccatacatacaaaccactatggcatgacacataccagtagcacctacaacgagtacgcccacacaccaccagccaccatcagtcggaacacacacccaacatcgcacccacacagaggcccgccaaacacaagcgacaaaaacacccacgggcaccaccagaaggcacccacgacacgatcacccacagtaaccccgaagcaacgaacgcacgacactcagtccgcagacaacagacacacaccacaccccgaccccaggcacat

SEQ ID NO: 504849 - DNA, 198 bp, Homo sapiens
cttccgggagctggagcacagatgcacgccactacgctgggctagtaacagtgcacctggaccacttagaagtaaaagctgctggccaggttaccttgcatagaatttaagggttcaagaattgaggattattttcaacctgagaatctcaaggtcaaagccttttagtttgtttcttccttgagacactataggaag

SEQ ID NO: 504850 - DNA, 162 bp, Homo sapiens
tcgtccgtcatttaacgtatgcacataattggagggcattggattacgcaataccaaaagttaatcgtacaacgttcggccatgccccacgttccgggcatcatgttatattatttaccccagtttgtgcattggggccatttagtatgactagccagcggc

SEQ ID NO: 504851 - DNA, 862 bp, Homo sapiens
ggaatcggtgcgccggtgccgtcgtgcttgatgagtaggcttgactagtagtcgtatggctgaggttctggttacccccggctgtatgggcatcgaggatgtacctgccgtaaccagctgtggcattcgaggtgcgtgtgttacctccagcctcaccaaaccatcagctcgcctgcctatagtgaagatgaccacgaacctgaaagagcccgccgtggcatcccagccttcctgatggccgcttccatctgtccgccccgtaatctctatcgagcctcgcgacccatggtttgccagctgagagagccaaaggagaagtcctctcggaaggtagccgagccaggagctgatgggaacccctgatggctacctgctagcctccacaccagtagcgagacaggcatctccccagaacctggggacccctggcttgctgcagcgccacagatctcactccctgcgtgcactcattagtgggccaacatatcctgtccgtccagcagtatacaccaaggatcagatgtctcacctgttcaatgtggcacacacactgcgtattgatggtgcgaaggagcggagcctcgaatcctgaaggggaaggtcatggctccatgttctatgaagtgagcacacggaccagcagctcctttgcatgcagccatggcccggctgggaggtgctgtgctcagcttctcggaagccacatcggtccggtccagaaagggggaaatcgctggctgactccgtggcagaccatgagctggttatgcgaacggtcggtccgtgctccgggaccccccagctggaagcgtggagcttggccgccaaccttgccggaggcccgtgatcaggccggggatgg

SEQ ID NO: 504852 - DNA, 297 bp, Homo sapiens
catcccccgtcgcggcaggcatggtggcaggcacctgtaatcccagctacttttgagtctgaggtaggagaattgcatgaacctgggaggtggaggttgcagtgagctgagactccaccattacactccagcctgggtaacagagtaagactccatctcagaaaggaaaaataaaaaaaaaaatgggtcccttccttgactcctctggcccttaaggaggagttttaaattttgggcccaagttcaaagaaacccaaacactgggcctttcctgtggggcccaaaaaactttcttcc

SEQ ID NO: 504853 - DNA, 835 bp, Homo sapiens
gagacgttcttcgccgagagtcgtcggggtttcctgcttcaacagtgcttgtgactggaacccggcgctcgttccccaccccggtcggccgcccatagccagccctccgtcacctcttcagcgcaccctcggactgccccaaggcccccgtcgcctgctccagctgccttagcaggcctacccagtccgccgccagccgccatctcacttagtctgccgccattgacggaccgacgtccgaccatcgcagagtgcgccataaactaccacgcaggaactccagaggaccgccattcaacgcgcctcagatcaaccttgcgagcatctacagcactccatacgttataccatgtaccaatgtcattgactaacgtttggacccgcagatcgactcgtgagcattctgaaaggaaacatttggcccatcatcacgttgtcatgtcagccaaagtcttcgactgcaggcagcacggcgaaccactgactcgagcacaacgtgcatagaacagcttgccagcaacacaagcacgcagcgctagcgccagcaactccttacactatccagcgcactattcacacgcacacacccagtacttgttgcattgacgctgcgcgacgagtctgggccttgaacttgcaacttgagcagtagtgccattcaccattcttggcaaaaaaacaactgctgacattccagctcgacatacctcggcaaccttgcaacataacttgggcccacatggaccaagaaaattgaccccgccaatacagatgctgacattcacattgcagacaccaattaaccttgcactgcagcatggtggaaaagccacta

SEQ ID NO: 504854 - DNA, 459 bp, Homo sapiens
gtcggttccggtgtcattactagacattttaatccctgtctgtattgttgcttgtatatatgtctgtatttattttgagacggagtctttgctcttgttgcccaggctagagtgcaatggtgcggctcggctcactgcaacctccacctcctgggttcaagcgattcattctcctgcctcagcctcccaagtagctaggactacaggtgcccaccatcatgcctggttaatttttgtgtttttagtagagatggggtttcaccattttgggcaggctggttgagaactcctgacctcaagtcatccgaccgtctctgcctcccaaagtgctgggattacaggtgtgagccactgaaacacagcctgaatttctccattcttcccacacaccctcctcaggttctccttcctgaccactgacccttcttttctttctacttttttatgggaagggcacac

SEQ ID NO: 504855 - DNA, 102 bp, Homo sapiens
ctgggcactctttctgctggtcttccctggaggactgccgttactacttttgtggtgcccaggaaatttggggtccttaagccaaaaagcctgtgtcctgag

SEQ ID NO: 504856 - DNA, 251 bp, Homo sapiens
cttacggtgcgtcaggctcaaacaggcatcgagttgctatgcaccgcctaggactgtgccgggctatcacattggccaagtaatcatgtccagtccgcaccaagctgcagaaccaggagcatgtgattgaggccctgctcctgcgccaagttcaagattcctggccgccagaagatccacatctcatagaagtggcgctctcaccaatgttcacatgctgagtaaaatttgacatgacatggttgttggaa

SEQ ID NO: 504857 - DNA, 464 bp, Homo sapiens
ctgctgcgcctctaatcgtgagatacaatggcggatgactgctgaccatctcatcagtagcctggattgacaggtgcaatcttccacatcagtctgcgctggccctatgagcctgcgtgactcacgctccggctccctcttagaggctgttagagatcttactgcaggatctccattagaatacatctcccattaccaggtctttcttgattgacagaatcctgctccgtggctgcttcgcattttgctcgcttgcctgtaatgatcctggtctctgcattgctattctctgctggaaggtcgattatggtgttgctttcttgcacgaactcttctttatgtttgcgcctcctttcccaatgatattcttgtgcacctgtttgaagatcggaacagaaattgattatctcttttccaccagatctggcagcatattctgcctgtatattgtgcgttttttccca

SEQ ID NO: 504858 - DNA, 1300 bp, Homo sapiens
ggtgcctgagcccaaccgatgcgtggcggaccgacggggagagagaagtgcgccagagctgcgcgctgcgctggccccgatgcatgcagtcgttgcctgccagtggatgcagcttgctgatcgcgctggggcctgccggatccagcagttctcgctggcctgggcctgggcattatctgctggtgtgggccgcgtgcctgccccctgtgaacctgaccctggcgcgccagattgcctgtgaacctggatgctgtggtggtgctgctggcctgacacgtagtaacctccggaaggctccaatgtgtgctgcagtcctgaggctctgtgtgctgcgtgggggtgcttgcttggacacctgtgcagtgaagctgtgtgaaggctgtgcctgtggaggagtagccctattgggcacattgacgaagactcgtctgatgcctgtgaaccggcttctgatagcgagcagggaagtaccttggttgtcgaggcggaggacacggacgcacattttggggcgtttggggaccaagaggcaaagaggaaacaccaatttcattacgccgatatgggaggaactagcaaaaggtgggaatggcacctagacccgtcaccggggggtcctgtccaagggaatagcgcgccggtagacaagttcccacgagcaatgagagtgaggttaagcccacaaggagtcatacgacggggagtcagggttcattctggggtgcccaaaggcggatagacacaactgatttatagtggcggaaaagcgatttttaagttaggcacaccaaaagggaacaagtctataaagattatatagggagaatcggaaaggtgtccgcggagcactgcaagggggtaaggcgcgggaaggagttatgtagaagttaggtcgcgtattagttccagagtaagtttgtccgtggtgatttggggaagggtgttggaattttagattttggaggttagccaagctggccagggagagggagatccaaaaggtaggaagcgaaaatagccggggaatggttataccgaaggatacagtatagatattttaggtatcagcttatagcgatagattggaacgtggggcgttaaatctagaacaaccaggagggtggtttagttggaaagtggaagcgttgggtgattatacggaggcgataagaaaggggaggaacaaagagaaggagcacgattggaaagccgaagagattgatgcaagtggtataagtatgaacaatttacagaggagacaaggggagagaagggcatcggttacagcggagaagcacag

SEQ ID NO: 504859 - DNA, 803 bp, Homo sapiens
  misc_feature (5)..(5): n is a, c, g, or t
  misc_feature (71)..(71): n is a, c, g, or t
  misc_feature (123)..(123): n is a, c, g, or t
  misc_feature (138)..(138): n is a, c, g, or t
  misc_feature (141)..(141): n is a, c, g, or t
  misc_feature (166)..(166): n is a, c, g, or t
  misc_feature (181)..(181): n is a, c, g, or t
  misc_feature (185)..(185): n is a, c, g, or t
  misc_feature (189)..(189): n is a, c, g, or t
  misc_feature (195)..(195): n is a, c, g, or t
  misc_feature (199)..(199): n is a, c, g, or t
  misc_feature (203)..(203): n is a, c, g, or t
  misc_feature (207)..(207): n is a, c, g, or t
  misc_feature (209)..(209): n is a, c, g, or t
  misc_feature (217)..(217): n is a, c, g, or t
  misc_feature (219)..(219): n is a, c, g, or t
  misc_feature (232)..(232): n is a, c, g, or t
  misc_feature (296)..(296): n is a, c, g, or t
  misc_feature (328)..(328): n is a, c, g, or t
  misc_feature (374)..(374): n is a, c, g, or t
  misc_feature (441)..(441): n is a, c, g, or t
  misc_feature (480)..(480): n is a, c, g, or t
  misc_feature (530)..(530): n is a, c, g, or t
  misc_feature (540)..(540): n is a, c, g, or t
  misc_feature (579)..(579): n is a, c, g, or t
  misc_feature (597)..(597): n is a, c, g, or t
  misc_feature (606)..(606): n is a, c, g, or t
  misc_feature (632)..(632): n is a, c, g, or t
  misc_feature (796)..(796): n is a, c, g, or t
aaatnatctctggtttcacgggggagataaaacctagggctgctgtgaatgtgccctctcaggtccctganttggccccaggtagagctgtaagagatcaggaagagggcctccctgcctganggcgatgatcctggnggnaacgtgtggtgcagaaagagaagtngaggtagtgaaaggnagtnaggncttggngggntggnccananctccagcngngtcgagtattgangattggggggtcaggggttggggggggagggggtcccaactggggagcgggtgggggctctgcngccagagctctcttctctcggtcactgagggnggcaaatcgccgctgctcttctcgttcacgctcctcctggtcctgntgcctctgctgctgttcctcccgttgccgccgggctgccttctgctcccttttccgtgtagcctgcngtgcctccatttctggtgtcaatggtcctggcacctggnggatttcaaatataagaccctataagttatctttggtaaaactgcaagangtagaaaggntctagccaggatctgtgatgccttcccactctgcttgtncttcctattccagagtgnggctgagcnttgtgtgtaatcgtgaggcatctggnattcttctccatgaaaccttcggaactcattacgtgttgatttgtcagccgcaacagtataaggtggccgggcccgagagtccctaggtgcaaaaactccaaaaatgggtttaacttgcctcctgcctttcccaacatcacccaaccagaccaaggggatattnccaagta

SEQ ID NO: 504860 - DNA, 407 bp, Homo sapiens
  misc_feature (12)..(12): n is a, c, g, or t
  misc_feature (39)..(39): n is a, c, g, or t
  misc_feature (77)..(77): n is a, c, g, or t
  misc_feature (115)..(115): n is a, c, g, or t
  misc_feature (130)..(130): n is a, c, g, or t
  misc_feature (141)..(141): n is a, c, g, or t
  misc_feature (172)..(172): n is a, c, g, or t
  misc_feature (257)..(257): n is a, c, g, or t
  misc_feature (341)..(341): n is a, c, g, or t
  misc_feature (372)..(372): n is a, c, g, or t
  misc_feature (378)..(378): n is a, c, g, or t
ccagaaaacgangcatctgcccagtgttgaacatctganctcctcgcgtgagtgcacccgcgtgagactgtctgctnctgtttattatggctgtgccctgtgattacagtgcacncgcaaagggctgtantgtcctgaaanatgatgcctgtctttattagggttcctgaantggttcaggagcttccattaacttcgcctgtggatgacttcaggcagcctcgttacagcagcggtggtaactttgagacaccttncaaaaagagcacctgcaaagggaagagcaggaaggttcaaagagaacagagcaagatcactatgagacagactacacaactggnggcgagtcctgtgattgagctggaggaggantggatnagggaatttccacctattcatttcagatt

SEQ ID NO: 504861 - DNA, 85 bp, Homo sapiens
ggatttgctggtgcagtacaactaggcttaatagggacatgtgtattttatcacaattttaaaacatttaacatttttataatga

SEQ ID NO: 504862 - DNA, 220 bp, Homo sapiens
gtcgtcctgctcactagctctgcagcctcagtgtgttgtccttgacactggggtgtgcgcgtctatcgcatgtgccgcggttgagagtgtgcgctcttgtccccgtgatctgggtccgcgcactcagttcgctgttggcagggaataagccacagagggaatctgtcgggagtgttactatccacacggggtcgagttcacagcagccggctccggggaa

SEQ ID NO: 504863 - DNA, 138 bp, Homo sapiens
ctgactgagttctgattagtgaaaacattcttgtgcaatgctttctgccaaacaaccccccccccccccgtccaacggatttcactctagctggctgcaatacgaatgccccctggctgtccctcttcaatcatcttt

SEQ ID NO: 504864 - DNA, 88 bp, Homo sapiens
tctccttttttcctcattaaaaaaaaaaagtccctgtggagtgtacttatttattttttgtttaaagggaagtaaaatgcgaaaaaaa

SEQ ID NO: 504865 - DNA, 908 bp, Homo sapiens
ggagaactagtccgagtttttttcgttgtttttaaaaccttatccttataagccatgcctgtgtggggttgacagtgagggtaactaatgacttgtgggttgatggtaaatcatggggctgtaccaatggtccagttccagggttaaaatccctgacgccaggtcttcatagcggaggcaaaatgtttccatggttatcttaatacctaaactaattagttcctctctaatagggtagatacgaatgggtcccacttggggtgtagaggagtatcagtagatatcgttaggagacttcttaataccggtacgttggactgttgtcttgagctttaggcacgagctttcactaaaaacttatcgagcgaagctagccattataaagaagcctctaccataatcagcggtcagtataaaactaccacaaggaaacatcctcactacataaacacaggtgattctatctatccacataaagtagctccaaacaagagcccctcgttccacacatacatttcaggggaatattcacacaagtgttgaacatattttctaccaacagggagagaaattcaacacgacgacgagagtcatcatagttagcagggaccacaagatatgacacaaatcacaaagcaacgtcaacagggaactcctgttatcatcttggggctacaaaacacaaggaggctacataacaacaatgtgtctactgttgctcacggcacttgtggtagcgactctatctaaataatctaatattaaagaaatctatctaccagccaaagaagttagttgttaggggtactacctatagctaagaaagcagtcgagtgagtagtcgttacgcactccatagataagacagccgcgttcgttacctctcatgatggcagtacaaggactca

SEQ ID NO: 504866 - DNA, 145 bp, Homo sapiens
cattcattgcagcaaggtcatcaggggttcagtccttgctgtatattatgcttgtgtataatttttcatctttcccttgcggtactatatctattgtgccaggtttcaatattctatctgcctatactttatttagggtaaattg

SEQ ID NO: 504867 - DNA, 667 bp, Homo sapiens
  misc_feature (112)..(112): n is a, c, g, or t
cgaaaaccccagcccttctcccattggcaggctacttggccccaccaagtagcctgccactctactgtccctggtacgacggcactctggcgcagggcatgcgcagtactgncatccgtcgctctcctgctgcgtgctgggttgtgcctttgcatgcaggtgctctgctcgaaattctgtgcagatttgatccagatttgattcacagaaggctgagcgagtggaacgtctaggctggagactgtatcggtatgactgcgctctggggcggcagccctgggtcaggcggcgagagagcactgtgcgccgttgtgctgtgggccgcgcgcgctgcgtgctcgcctggcgaccccggggaccgtgaggtgctgcgtttgctccgcccgctgcactgtggctgcagctgctgcccctgtggcctccaggagatggaagtacaggctccaccaggcaccaccattggccacgtgctacagacctggattccttcctccccaagttctccatccaggatgccgatcgccagacagtcttgcgagtggtgtggccctgctggacctgtggctgtggccagacccactttgaggtgagactcgggatgactccgagtgtgggcccatcacgtggggggctgtccggacccctccgtgcgatgacttgggctacg

SEQ ID NO: 504868 - DNA, 118 bp, Homo sapiens
atcctagagatccccggcacccacggaatcgagaaagagctatcaatctgtcaatcctgtccgtggtgcggatgactagcgaggtgccgatgaatagcgaggtgccgatgaatagcga

SEQ ID NO: 504869 - DNA, 204 bp, Homo sapiens
ttgtaacaggcacttttgatcttcaagaggtgctgtttcatagaagcgcagcttcacagtgctgcgtttaccagctttgcactggagagctgtgcccacccttaaccccactacttcttagctgacctgctaaggtacaacttctacctgcccttcttcttcttcttcgggcccatcataaccttgaatgcctccagtctaggt

SEQ ID NO: 504870 - DNA, 166 bp, Homo sapiens
  misc_feature (81)..(81): n is a, c, g, or t
  misc_feature (105)..(105): n is a, c, g, or t
  misc_feature (130)..(130): n is a, c, g, or t
  misc_feature (149)..(149): n is a, c, g, or t
taagagatggggtcttgctctgtcacccaggctggagtacagtggcgagatcacagctcactgcagcctcaaactcttggnctcaagtgaacctcccaccttggnctccccaagtgctgggattctgggngtgagccactgtgcccggnctgaggcaagtaaatct

SEQ ID NO: 504871 - DNA, 339 bp, Homo sapiens
  misc_feature (203)..(203): n is a, c, g, or t
  misc_feature (245)..(245): n is a, c, g, or t
  misc_feature (247)..(247): n is a, c, g, or t
  misc_feature (296)..(296): n is a, c, g, or t
  misc_feature (300)..(300): n is a, c, g, or t
  misc_feature (306)..(306): n is a, c, g, or t
gcccttttcccggccctcattaagcccgggcatttttagtggtttcacctggaggcaaaagggaggggacaaaggccctgccacgtcccgctgcctcctgttttttggaggtattaaaacagggtgttaatgggaaggaggggagcctttggggggccacccggggcttggacttatgcagggaggccaggtccccccccccnttttgtttttgggtccctgctcccctttgggggggggggggngngttttaattttttttatggaaaaattgccaaaaaaaaaataaagagagnggtntttaantgcaataaacgggccccatgtggcccccgccta

SEQ ID NO: 504872 - DNA, 150 bp, Homo sapiens
agttatcacgcagttatgaccggacttactgggaattcctcgttcatgggggaacataaaatttggcgaaattctccccccccccccgggggaattccccatagatggtcaggtcggctgcggtagggtaaaggcaacaggctgagggta

SEQ ID NO: 504873 - DNA, 154 bp, Homo sapiens
tcactcatcattccttcttttgttcattacattatttaatacataagatccgtgatagtagccaggcactcaggaaatagtaaaaactggacatgtgatattactgccctatgtgtagcgcacattatagtggaaaacaaaatcacttgtttct

SEQ ID NO: 504874 - DNA, 321 bp, Homo sapiens
gatctagaggatcctataaagacgaacaaaaggggagcgggtcacagtgatttactcgggcacctagaagccactgatgccctccatcagagcggcactgaatcatgcgcaggaatgtctcagactatgctcgattgtccttcctgaagcagtagagcagcccgggggtccttgagcagcgcgtcatggttgtgcgagttggtgtcaaactagctgtaggtctggttgaggatctgcccagtccggcggcaagtcgcattccagcctccccatcagcgttaggatgccttacgtctaggtcctttaggaggtgatagtcat

SEQ ID NO: 504875 - DNA, 1088 bp, Homo sapiens
  misc_feature (296)..(296): n is a, c, g, or t
gatcaccatggccggctgggaccctgtacacgtatcctgaagactggagggccttcaaggactctcatcggtggtcagtacagcggggctcaagtccgagtgctctccgcaccatcccactaccattttagggcaaagcaaccgcacccctgaatttcgtccgcaaatttccctgccgggaaggtcccacgcattatgagcggtgatgatcggatatctagtgtgtattggagagcgacgccattgcctactatgtgagacaatgaggagctgcggggaagtactccagaggcagnagcccaggtggtgcagtgggtgagctttgctgattccgatatagtgcccccagccagtacctgggtgttccccaccttgggcatcatgcaccacaacaaacaggccactgagaatgcaaaggaggtaacgtgaggcgaattctggggctgcgtgagtagtgcttacttgtaagactgaggacttttctggttgaggcgtaacagagatgacattggctgactatctacaagttgatctgctagcccttgttgtggcttctataagtcaggttctagcatccttctttccgccaggcctttcccaataccaaccagctggttcctcacctgcattaaccagccccagttccgggctgtcttgggcgaagtgacaactgtgtgagatagatggcccagttctgatgctaaatagagtttgctagatgaccctaatctaataaatggactacaccacggaaacgatgaagggttcacgggaagagaagcagaagccccacgtgctgaagcggaagtgaggagaaaataggcggctgccccatgtctcctgatggaggagatggtatgaactgtgagcagggcgctggcttgcttgaagacccaaagtcgcatggaccccattcgaatcaccttgccaaggagtccttggtgttggatgactttgagcggccagtactccattgaggacactctcttctgtggcatggcataatctgggacactttgattaggccggtggtcctggggtactcaagttcgttctgaaatcactcaactttgagtgaacctcaggat

SEQ ID NO: 504876 - DNA, 110 bp, Homo sapiens
  misc_feature (9)..(9): n is a, c, g, or t
cagaggatnccgccgcgcggcgcgccgaatgcctatgccgggcatgcgccccagatgtcggcagcatgttgacgatggccccgccgtgctggcgcatgtgctgcacatag

SEQ ID NO: 504877 - DNA, 965 bp, Homo sapiens
gctctcaggttagacatcaatagggaagccatctacggaaataatgagaaaaattctcataatataataaataaaattcaggagcacaataaaaatcacttataagacaaaagaactaggaaatcatagacctgaatgagagaaagacgaagagacaccaagcatagacataaaaaaggggttggggctgggcgcaggggctcacacctgtaatcccagcactgtgggaggccaagatgggtggatcacttgaggtcaggagttcgagaccagccgtgtccaacatggtgaaaccccggctctactagaaatatcaaaggttagctgggtgcattggcacatgcctgtaatcccagctacttgggaggctgaggcaggagaatcacttgaacctgggagatggaggttgcagtgagccaagatcataccgctgcacttccaagccctgtggttataccagacgtgagacgtgtcttcagatcaaaatagacaactcgcaatacaacgtactcccacaggagagttgcggaacgcacgacaaccgccaggtagcttagtccaactctccctaagacacggcggtcccacttggggcccaccgagccacagcgcgggaccacagcgcgccctgaaagcagccgcgcctcccctcaacggcaaagaagattccccaaagggcacccacacagcgactatcatgacgcaggccacggggcccccacacagagcgctggagaatcccccgacaggcgtcccccatatcaacgccacgccgggaagcacctagaaccctggggggcgccaccactgcgggctcgggacaaacaaaaatcggcaagcaaccccaatgccaagaggacgtcggcgccaccaccctacgcgcgcgcagcaaccacgcaccgcgaatccgggcctccccgaggggaactcgaccgcggacaccaagacgcggacggcggggcacc

SEQ ID NO: 504878 - DNA, 2025 bp, Homo sapiens
  misc_feature (990)..(990): n is a, c, g, or t
cataatgggcatcaagcacagaccacccacagcctaagttattgagcatcatccctctactattgggttaaccaaatcaaccgacaacgcttagtgttggcgtgcttcccgcaatgctgtgtgcctcgcgaccccgcgtaacaagacccaccatccgttaagtacataacttacctgtgcatcgtccataccccatcgacaagtcgagtggcagagcggagacgcacggactgagtccgagctgtaagctgcagcgtaagtcgaccgggaatacagacaacatgcctcaacgcctccgttcgatcagtaggctttacagtttcgtactcacttaagccagagaatcgtacgcgttttagaataggaatagcagccaatctacagcaaaagccccaatcagggaaatctcaattcgagtgactattctactgagtgcgtgtcctgtccggacataaccccagacaatcatcatagatcgggcacgctaaactcgtgtgggggcggtcaataacgaagttgcgatcacctcaggatttaggatgtgtcaataacgctagccaccagcgaaatgttgcagcgcttcgcgataacggacagaggcgaggagggaagtaaccctgttgcccgtaaatgtttcctttacgcgaagccgctgttaaggatcaggagtcctgcacgcttattcgcgcggctgatgatcccatgcataattatcgggacgaagcgttgaacacgtctatattaccccagggcgttccgatacacaagatgacaaagctgctaccaatggagaggagacttacaaggcgatacagggtaccgtatgttgtgccgtgaaccatgtagcggatacgaccgtggcgttgccagccttgtcgcgctccacaaggcgcacagccgtaaagttccaaaatggagacgagttccgcttgatggaaaggatccactcaacaacacgagagagactcgttggtacacgttgaatttggncacgccataaggagcacctaatgaagatctggacccagaagcttcagaggcccgtacagacctctgcaagttaacggccttgtcgatagagggaaattcaattcccttgtcaattctgatgaagcggggacatacggtcacatccagaggttgatcaagcatggcaatcggttaccgccgcgatgaacgcaataggaacgcccgaagtggggttcacgtgaaaagtgtggcgcgccccaaacattgcgggactaggggggggctaccaaagcaattaacagaattaactcgtcgagacacacgaggcgacaaggcgtaaccagttccagcacaacagcaaaacgcggtcagacaggcgacaggggcgaacatacacagaggggccacaacttaagacgttgaccggaccccagtccgaagcaaatcaacccactgtgccagtccaaagagacccccccgcaggaaaccaacaaaacacaacaaacatagaacagaaataagcacccgagttgtccccttggggtagcacaacaattcccacgtaactggacgcgccgacgcactgaagcggcagagcacacagaggggaatcacctacatagctggggcacataacgcggagcgaaaccagcacgaaaccgcttatgagcagaggccggagcacaaaatggggcgaatagaatacctatgcacaaaagcacaagcggccacaacaatgtgatccacttcggttagcacaccagggccaaaagctggcaatcgcagagaacacacgccgggagacgactaacacggcgggagacagagacagaagaccatagacaaagtagaaatggggcccacgggaagcttagacagaccgaccagaagacaaaactagtgcgaggaaaacagaaaatcgaaaagaaagaacaacgagcgcgacagcatgacgcagatagacaaccccctacgaagggagcgaacaaagccacgaacccgcgagcagagtcagctagagagagcacaaccaagacatatagaacaaacacgcag

SEQ ID NO: 504879 - DNA, 791 bp, Homo sapiens
  misc_feature (226)..(226): n is a, c, g, or t
tcctactcatcataggtgacttcattactgtatcggcctgagctttgttattgcttagcgtaacgtgagggttcatacgtgttatccaactgatatatagaggccccagggattgtaggtccgatacgggagaatatacccttcggtgacgctattcatcgctttgaccacacggcgctctaagtgatcgtagtgtacatacgcacataccaacctctgcaatggngaatacgacacgtgactcgcaagaactgtatactcgtcttgcaagcagtctgctgcatggtcctcatattggtataacactccctgttctcttacaccgtaggtgcctgtgaccgtggtcatgtgtgagccaagtacattcactagacatcgtattacattgacgggtactacgttgtatttcacttcgccagtatgtcctatcaataggagctgtagtgtgccatcataggaggcttcattcactgatttcccctatgctcaggctatagcctagatcaaactctacgccaaaagtccatttcagtatcatattcatcggcgtaaatctagctttcttccccacaacatttgtactcaggctatccgtgaatgccccgacgttatctcggacataccccgatgcatacaccacatgacaacatcctatcatctataggctcattcatttctctaacagcagtactattattacattgttcgtgattgagaaggcttcgtttcgaagcgaaaagtctaatagtagaagaatctttcaaaaactggagtgactattggattgcccc

SEQ ID NO: 504880 - DNA, 907 bp, Homo sapiens
cgcagttggggacaacaataattgcggggggcccagcaaaaacacaaatgggggggggatgacaccccgccgcctgtagcggtggaaacaaacgcgggggcacaaattaagggcagaccgcgggggtgccccaaaatgccgcaaggtaattggggccacacacaagcatagcctgccgcgttgatgcgcccgcctgtcggcagacccggcttaaaaaaggggagttgctgttaaaaacgagcgcgtcgtgtggcacccacgaagcacggaaccaccgtatgttgtcagcgaaaggcacacgagccccccgcgctaccatctgggccgcgataaaatccgggaggatagggctcaccctcccgccagtaaaatggcccggtggccccccccccttgcttccccgcgaggtgtattgtccacgcacaaccaagttgtccacccaccgggcggggtttcttccccagaagagggcctattgaaaatattattgcttgtgacgccggccccgaaagccccccggcagacaaattctgtgggagcaccaccccggcggcctgtttctgggtttgttataacacacacacacgcggcttatgagtcagtcgatgttaccccacgaacgacaacaatgttctccctcagaatggcgagatcacataagagttccaacaacataacatttgcatgttgcgcccccgccgagataatgagacagtcttgctgtcccccccagaatggaacatcgtacacgccacgctactcctttagaaaacatagcttccgtggtacaaaatgtagtcgcgatgttggtgacaacgcacgaaattcaaacggcggtcgaggaatcccgccccggacaaaattgacttacggtgccggtttagagcggacccccgcaaacaaaaca

SEQ ID NO: 504881 - DNA, 1562 bp, Homo sapiens
  misc_feature (535)..(535): n is a, c, g, or t
ggacatgtactctcggttaggagcggatcactcaatctacgccgggtcctcgctgtgatcagactacagttattccagcaaacgaggacagcaccaacaatgagaagacgtagtgcttgcgtttgaggaggctgatggatggtaagatggcattaaaaacgataacgctagggcgatactctgggcgtgtgtggctcaggcctgtatagtcccacgtcacgtttgaggagtgccataggtggagtaggagtcatcgaggatcaggagcatggacgagcagctcgtgagccaacactggtgaaaccctgtctcatacatacaagaacttagcaacaaaaattagtctagagagcactggtcgtgctgagcgtcagccatgttagtttgccactagtctatctgctggtggatgcgtctcgcatgatcagagtagtagatggccaatgagacccgtggaacgccggaagggttcgacaaagttgacgccagcaagggtacttgacccaacattggcgaactccaagccgatgggggnctgaacccacgaaaggccgtaggtacttgcccgatcttgtaaaatagcatgacaaaaagagagaagagctgtggagtgtcatgttagagtcacggagtctgagttcacacgtgatcacgaggtgaagaaagggcgacgcatgaggaagtaatcctgtgggcaaacgcattagtctcacattcgaagagacggacgcacaagggaggtgagttgttcatgggggccattgggactccctgtgccacctggggggtgggcagacaaagacgaggtaactcacttgacatgcgccccagagcgtagttcgcgcgtgggcaaccaaaggagccatggtaaattccccccaagggcgaatcttgttgtggagggaagtggccctgattggtttgagacctggagtatgtcccaacccgtagaagggtcaatggcgacggtttattggaaggacccagaggcctttgggcgcccacaactgtagggttgagaaaagccccgcccattattctctaagttaaaacgaatttgctgggatataattgaaggcccaagcggttgtttggttgtgcaagggccgcccgtggtatattcccccaggcgacttacttcgggggaaggaggctttgagaggcacagggaagaatactctgtgccgtggtaaccccccaatgggaagtgcggggcacaattgtgtacaggcaaggcgccgaagaaatgtgggcgcccaagtggaaagcttcccgacccgggggaccagtcgagaacggggggaatttcacgcctcgagaccaaggaataccacctacacacaaaaggacgacagccgagaaagcgaccataatatatgacggggtgcggcagacacaacagcgggacacaagctaacacggggcacagtgggtgacaagaggtggtgtatcccagccgcgcagctttgtgtgtagtcgcacagaggggggaaacgctgcgggcgacgcgccccataagaagagggatgcgatcacattgcagcaagccagggtaaccggtt

SEQ ID NO: 504882 - DNA, 418 bp, Homo sapiens
cggcacgaggcagacttcactaagtgcaatcatttctagcttttgatttaaagtgagagacatgccactcttcctttcacttcaaaactgagaggccattgtaggtttattgattggcctagttttaatattattgtgtctcagggaatagggaggcctgaggagaaggagagagatggagaaatgactgataaatgtgtgttctgactgctccattgatcagctaagtttgctgtcttctacgggtgtggttcatggcaccccgaaacaattacaatagtaacatcaaagatcactgagcacctgtcacataacagatattattataataatgaattgtgattattaccaaaatgtgacacagagacacgaagtgagcgcttgctgttggatagatgccacaaactttaaatttgta

SEQ ID NO: 504883 - DNA, 115 bp, Homo sapiens
aggacttggaggaaaaatcccctgggctttccctaaccctttgacaaactccccccccccagttgatggctttccgtaataaaaaaattggggtttcctttttaaaaaaaaaaaa

SEQ ID NO: 504884 - DNA, 439 bp, Homo sapiens
agctccgggcctgtgagttaggaaatagaggttccaagaccctttcccaaagcccaggtgagagggggtccctcatgccaaacaaagggttcaaggctgggtctagcgaggatgctgaaggaagggaggtatgagaccgtaggtcaaaagcaccatcctcgtactgttgtcactatgagcttaagaaatttgataccataaaatggtaaagacttgagttctgtgagatcattccccggagcaccatttttaggggagcacctggagagatggcaagaatttcctgagttaggcagggatcaggcattcattgacactcagggagtgtcacacatttctgttctgcaattaaagggagaatgaggttcatccaccaaattttaagcagaatataggaagggcaggggtggggagtttcagggtctgctggtcctgggca

SEQ ID NO: 504885 - DNA, 151 bp, Homo sapiens
  misc_feature (5)..(5): n is a, c, g, or t
gttantaaaagatatcctactccagaagaaaaagaggaggacacatcaaaaggtattgaggggcaattttcactgatagtaaacaaccccatacctcctggtgtgggaagctccacagactggaaactaactggttcagaccgctcttacc

SEQ ID NO: 504886 - DNA, 354 bp, Homo sapiens
cgagctgggagtgtggtagccctcagtgagtctggtatcctgatggtcccatcagctggtgtgagttgctgtgccctaagacccacactaaagaattccggtaagtagcccgagtactaacccgtattcttgcagacctaagaagccactttttaccctatggaagggggtaagctgttcctgagtatatactatctttgatgctgctgtctttatttcatacacctgcgtcgctctttttccacttccagaaaaatcttctcagtttatctgctgtagatggaacatgtttctgtgaacctatcagtggatttcattctcttgagtaataaatcttatctttacaaggctaat

SEQ ID NO: 504887 - DNA, 1163 bp, Homo sapiens
  misc_feature (8)..(8): n is a, c, g, or t
  misc_feature (46)..(46): n is a, c, g, or t
  misc_feature (49)..(50): n is a, c, g, or t
  misc_feature (52)..(53): n is a, c, g, or t
  misc_feature (59)..(60): n is a, c, g, or t
gtttcgtntagagcccagggaggcaacgcctcttcatagatgcctnatnncnnccctcnncacggatgagatcttcctgacccccaacctctccctgcccctgtgggagtggaggccagactggttggaagacatggaggtcagccacacccagcggctgggaagggggatgcctccctggccccctgactctcagatctcttcccagagaagtcagctccactgtcgtatgcccaaggctggtgcttctcctgtagattactcctgaaccgtgtccctgagacttcccagacgggaatcagaaccacttctcctgtccacccacaagacctgggctgtggtgtgtgggtcttggcctgtgtttctctgcagctggggtccaccttcccaagcctccagagagttctccctccacgattgtgaaaacaaatgaaaacaaaattagagcaaagctgacctggagccctcagggagcaaaacatcatctccacctgactcctagccactgctttctcctctgtgccatccactcccaccaccaggttgttttggcctgaggagcagccctgcctgctgctcttcccccaccatttggatcacaggaagtggaggagccagaggtgcctttgtggaggacagcagtggctgctgggagagggctgtggaggaaggagcttctcggagccccctctcagccttacctgggcccctcctctagagaagagctcaactctctcccaacctcaccatggaaagaaaataattatgaatgccactgaggcactgaggccctacctcatgccaaacaaagggttcaaggctgggtctagcgaggatgctgaaggaagggaggtatgagaccgtaggtcaaaagcaccatcctcgtactgttgtcactatgagcttaagaaatttgataccataaaatggtaaagacttgagttctgtgagatcattccccggagcaccatttttaggggagcacctggagagatggcaagaatttcctgagttaggcagggatcaggcattcattgacactcagggagtgtcacacatttctgttctgcaattaaagggagaatgaggttcatccaccaaattttaagcagaatataggaagggcaggggtggggagtttcagggtctgctggtcctgggca

SEQ ID NO: 504888 - DNA, 261 bp, Homo sapiens
tccgaggatctcccgcagatggaatcatataacgcaatgttcatgcagtcacggaagacatatggcatgctgtagaacatggtgtgtatcaatacaagacagtcagggaccatatacggaagggcttggtaagcagcatctagtttccagactttctgcttaaaagctgtgtatgagtaattccaggacttttaggcaaatatatgacatgatagtattattttttacttaaagagaaagtcactgtggtgacagatcaga

SEQ ID NO: 504889 - DNA, 1002 bp, Homo sapiens
gggcctctgggaagaagccaggaggaagcctggcactggggaagggagataaggagcaagggagataactccactgtccttcagcttctcctgtagattactcctgaaccgtgtccctgagacttcccagacgggaatcagaaccacttctcctgtccacccacaagacctgggctgtggtgtgtgggtcttggcctgtgtttctctgcagctggggtccaccttcccaagcctccagagagttctccctccacgattgtgaaaacaaatgaaaacaaaattagagcaaagctgacctggagccctcagggagcaaaacatcatctccacctgactcctagccactgctttctcctctgtgccatccactcccaccaccaggttgttttggcctgaggagcagccctgcctgctgctcttcccccaccatttggatcacaggaagtggaggagccagaggtgcctttgtggaggacagcagtggctgctgggagagggctgtggaggaaggagcttctcggagccccctctcagccttacctgggcccctcctctagagaagagctcaactctctcccaacctcaccatggaaagaaaataattatgaatgccactgaggcactgaggccctacctcatgccaaacaaagggttcaaggctgggtctagcgaggatgctgaaggaagggaggtatgagaccgtaggtcaaaagcaccatcctcgtactgttgtcactatgagcttaagaaatttgataccataaaatggtaaagacttgagttctgtgagatcattccccggagcaccatttttaggggagcacctggagagatggcaagaatttcctgagttaggcagggatcaggcattcattgacactcagggagtgtcacacatttctgttctgcaattaaagggagaatgaggttcatccaccaaattttaagcagaatataggaagggcaggggtggggagtttcagggtctgctggtcctgggca

SEQ ID NO: 504890 - DNA, 384 bp, Homo sapiens
cagctggaagatggcgcacccggtttgctacaacatccaaaaaaagtccaccttgcacctggtgttcggtctcagaggtgggatgcaaatcttcgtgaagaccctgactggtaagaccatcaccctcgaggtggagcccagtgaccccatcgagaatgtcaaggcaaagatccaagataaggaaggcatccctcctgaccagcaaaggttgatttttgctgggaaacagctggaagatggacgccccctgtttgactacaacatccagaaaaagtcccctttgcccttggtcctgcgctttagggggggggtttaagtttccccttttaagggttcaacaaatttcattgccctttcctttcaataaaggtggtgccttcccca

SEQ ID NO: 504891 - DNA, 1066 bp, Homo sapiens
  misc_feature (8)..(8): n is a, c, g, or t
  misc_feature (46)..(46): n is a, c, g, or t
  misc_feature (49)..(50): n is a, c, g, or t
  misc_feature (52)..(53): n is a, c, g, or t
  misc_feature (59)..(60): n is a, c, g, or t
gtttcgtntagagcccagggaggcaacgcctcttcatagatgcctnatnncnnccctcnncacggatgagatcttcctgacccccaacctctccctgcccctgtgggagtggaggccagactggttggaagacatggaggtcagccacacccagcggctgggaagggggatgcctccctggccccctgactctcagatctcttcccagagaagtcagctccactgtcgtatgcccaaggctggtgcttctcctgtagattactcctgaaccgtgtccctgagacttcccagacgggaatcagaaccacttctcctgtccacccacaagacctgggctgtggtgtgtgggtcttggcctgtgtttctctgcagctggggtccaccttcccaagcctccagagagttctccctccacgattgtgaaaacaaatgaaaacaaaattagagcaaagctgacctggagccctcagggagcaaaacatcatctccacctgactcctagccactgctttctcctctgtgccatccactcccaccaccaggttgttttggcctgaggagcagccctgcctgctgctcttcccccaccatttggatcacaggaagtggaggagccagaggtgcctttgtggaggacagcagtggctgctgggagagggctgtggaggaaggagcttctcggagccccctctcagccttacctgggcccctcctctagagaagagctcaactctctcccaacctcaccatggaaagaaaataattatgaatgccactgaggcactgaggccctacctcatgccaaacaaagggttcaaggctgggtctagcgaggatgctgaaggaagggaggtatgagaccgtagagcaccatttttaggggagcacctggagagatggcaagaatttcctgagttaggcagggatcaggcattcattgacactcagggagtgtcacacatttctgttctgcaattaaagggagaatgaggttcatccaccaaattttaagcagaatataggaagggcaggggtggggagtttcagggtctgctggtcctgggca

SEQ ID NO: 504892 - DNA, 130 bp, Homo sapiens
attcgcggccgtgtctaccttccactccatgcgcggctccgacggggtgggagagcatcacgtcctggcgcatgctaagcaggctcatctggctgggcgcgtactccaggggcgacttctgctgtatcac

SEQ ID NO: 504893 - DNA, 788 bp, Homo sapiens
  misc_feature (11)..(11): n is a, c, g, or t
  misc_feature (19)..(19): n is a, c, g, or t
  misc_feature (788)..(788): n is a, c, g, or t
tgtgtggcagncttggccnatgcttgtagatacaacctctggcactattttcatgtctcccccattccacagccacgtgtctgaacacatttgcttttagaatggcatttatgatctcaatgccctcttgctgcaggccttccatcctagggtgttccctgtacttaaaataaacggaacggaagtctctgacttgaatgaaaccaaacggaaggagcgtcacagcccctctgcacagttcccacgatgactgctgtgcctcccacacaacgagccttttgactgactccagcaataggacgggactgtcgttacacgaggagagctaccggcatacagacgcatcccaatcgcattaatcggaacatcttgccacaggataacagaatttccattgctgtgcggatgcctgtctgctacacatggtatatggcaagcgagagaacctattttttgatagcctttattcccaatctcctttttttgcccatattcctgctgccatgcgattgcggctgaacatcaatcttgcccatgcccttgatccatattgaattcttttcacttcaagcatagttgtgccattaacaaaatcatcatacgaaacgacctatataattttaattatgaacctccgtgtcctagccgtggacttctccgggccgtttactctagggaggggctacttcttgatactccgctaacgcatcaggtaagatcttaccattcgcttgaacagacctaaatcatttgatcccaggtccttttctcttttaccagtatacggn

SEQ ID NO: 504894 - DNA, 780 bp, Homo sapiens
agagaggccccatgaagtctgattgaagctgcgatggagcagatgattttcttcccactgaaggaaactctttctcattgcgcagccaaagacgggtagtgccactgtcctctcttcactcctgagatactgttctggaagcgggtgtcattcctctctagtaacctcttctcttcgtctgaagtgtgtgaactatctcctagtgtttaagatttggcagtgtactcgccatgtatgtcagcatagaaaaggaaaggttgaccttatctcctgtatgtctgatagaaacttaaaagaaatgtgcattgggtttcatagccccagcagagaaaatcctcttcactcgatagggtgtgctgctgtggacaggagggcgcaaaaagaacctctacatatgaagggcaacacgtgtaactatctgacactgtgcatgatgcccaaaagagcaaagttgtagtgcatgcatccctggttcatttccccatgcgatacacagtgtcgtaggtgagtcccacggctgaccttgcaggtgattcaccgcaaaacgcatgccagctgcgtcctgccgcacaatgctgggccgcatctgtaagtgcgcccagacgccaagcaggccctgaagaaaatgatgggggtgggcagggacccgtcaaagggcgaatctggcctccgacagtccgcggaacgcggtagacaaatggttaaaacctgcaagcggtgcacataacccgcgcttttggccacacacagggaggggcacaaaccccaggggggcgacac

SEQ ID NO: 504895 - DNA, 103 bp, Homo sapiens
  misc_feature (15)..(15): n is a, c, g, or t
  misc_feature (44)..(44): n is a, c, g, or t
  misc_feature (80)..(80): n is a, c, g, or t
accgtctgtggtggngcacgttgttggggttctggggtatcacnccggctggtgtggtttcctggatgtgcgaacgccgnggctgcatgcgttggtgtgtggt

SEQ ID NO: 504896 - DNA, 137 bp, Homo sapiens
gttgtgccgacattacatacatatccatctagataggtggttatactattggcctagtgatggaatcgtgccatttatcaagttttatacatcaaaaagctttggaagttcaccagaccgtccattatttcacctct

SEQ ID NO: 504897 - DNA, 222 bp, Homo sapiens
gcccaccactaacttcataaactttcttaaaacattatgagatttaatggggataattattttttcagctcctcaccaattgtattttatgttgcagccgaggacaattctttttcttccaatgtggcccaggtatagccaagaagttgggacaccccttttttagactcaactgacccgcaaagtgctgggagtctttcttgagggtatcttagcgatagt

SEQ ID NO: 504898 - DNA, 1400 bp, Homo sapiens
  misc_feature (241)..(241): n is a, c, g, or t
cctgggggagtaaagtgttgtgtgtgctagacgacccagacacatatccgcccccggggtgttcctcttgggagatgagtggttctcctctctccccctatagttttgttcgcaggatgtcctcttgtttttgtgggttggttgtgcggcccctcccccttgtgaacctgcggcttttgtgtcgccacagcgtgtcatgttagtggagacacccacccacacgcgcgtttgggttgagaanatggtgtggttccttcggcgtttacacacatgtgtcccgacgcagcccaagaaagtgggtccgagtgtggtctgccgagtccactccattgggacgcggcgacacaagaagtcattttttctttgtggggaaacacacagaaaaatatgtggtgttgctgtcacaccaaaagagtgtttatgtctcccccccccccctgcgcgaatgttaataacacttgttggcgttctctcttcctctgatgtattgtgatcccgtgggttctcggggaagttctccccccgcttggccgcgcacacataccacaccgaggcgtctttattgtgaaacgacccagggttttacgaccaagaggtgctaccgcattgggatagacttgtgggggaatattttgggcgctcccagatgtatcttgtggtgagagtgtttccctgcgctgtttgtggcccccccaagatttctcggttttcttttggcacacctctcgggatagtgcgctctgccccaccactgccacacccacacaacttgtgtgtgagattcttctttgtgcgcggtgcgcggtctttcatcacatctgggagagtgttgtctctgtgagacgcacacagaggcacacagagtattttctgtctccacagatggcgtctattctgtgatagggacaccacagagtgggcgctgtgttattctatatatgcgcgcgcggtgtttacagagcgggatattactcttggaagtaacacgtgtgggagaccccagccgcaagagagttcacacacaagagttttgtgagagaatagagcttgtcttgtggtctctctcagagtgtctggtctcagacccacgcgcacccagagaccctttgtgtgtgtgcgccacactgataccgaggcgtgatagggaaagaatactccaggacaccaatccaggatagccaaagactgtaaagaagagattgtacaccaaatattctgtggggtgggatttggaagcttttaaacatcctggtgggatatccaccatccaaataacccgattccagattttgtccattgtttttagataaatttagttcccatttgtgaaaagggttactttcatacctcccttatgtcaccagaaatccaccatggaaaataaaggttccctaaagcgt

SEQ ID NO: 504899 - DNA, 202 bp, Homo sapiens
ctgtgttacgtagtagacgggtctttccgcgtcttcgttcggtcagctcaaaagactatttttctagcgacttatgttcatttcattttagctttatccattcgtttattcggtatggaccagaaacgggacaggaccaattgaattttctgaatcacactttcctgtttatgtataacatctttctcactgatgtgaatgc

SEQ ID NO: 504900 - DNA, 166 bp, Homo sapiens
taaaatgaaaaaaattcatctgctttgtgggatgcatacttggcagtagctcgtttggctgatgctcaatatcaaagcatagtcaactacaagaagtctactgcatatcaaacaaagcaagagttaatgcagagttccaaagaagaagcaaagaaactcaaatcta

SEQ ID NO: 504901 - DNA, 144 bp, Homo sapiens
gcggccgcctactactactactgctcgaattcaagcttctaacgatgtacggggacatgattgtgccactgcacattagcctgagtgacagagagaggccttgtctcaaaaagaaagagagaaagagagaagagagagaaaaaa

SEQ ID NO: 504902 - DNA, 190 bp, Homo sapiens
  misc_feature (16)..(17): n is a, c, g, or t
  misc_feature (184)..(184): n is a, c, g, or t
aagacagggcctctgnntgatgtcacccaggcatggagtgcattggtgcaatcacaactctttgcagcctcaaactcctgggctcaagcgatccccccgccccagcgtgccatgtagcaggactacagatcctacagatgcacatcaccatgcctagctttttttttttttttttttttttttntttttt

SEQ ID NO: 504903 - DNA, 145 bp, Homo sapiens
gatagtgttgagtagttagacaccccaccttcagcttgtacctgaaagcttatctcgtataaataatcactgtaattgaggggaagtatgtcctgtgctaaggatctcaacctgcatcccgaggaaatcagtatagtatgctaat

SEQ ID NO: 504904 - DNA, 118 bp, Homo sapiens
gtttgcggaagctagcctgaatagggagagagtccagtgtgtgcatgtagcagtcgatcgagttcggtgaactttggattgggtaacctctttggtatagagggctgatagctcgaac

SEQ ID NO: 504905 - DNA, 1305 bp, Homo sapiens
agcggccgtgttggaggggggctgagggaggagactgttgctgatctttggatgttctggttagtctaagaaggagagtatgaggcgagctccggcccggtgtgctggcctgggcttcagtggtgcccagtgcagccgctgactgccacctgacatctaactgctgcagcccatggatggccctggcagcgcggattggtgcctggttgctggctcgtggttgttgaaactgggtgtcacacatcacggaatcatccacaataagacctaggcaagagaagaaaaggacaacgacatacacaacgaccaagggacacacgcgaagaaggaaaagggctcagcgcaagatgcacaatataaaaaagaacaacatagaatagttgggaaacaataagaaccaaaagaaacaccacatagggacgcgagaaagcaacgcagaagtaaagcacagggcgattaagtgctgagaagcgatgtgcgcttcccccgtcaggagcgatatggcagactgtacgctagctagtagtatacggcagtgtgcatcttaacagacgatattagaaaggaataatagacataaataatggtagcgatgagaatatagaaggggctagtaacagtaaatagactagctcagaagcggcgaacgtctgaccgcacatggcatagcatccatataagcattgaagagaggcggagatccaacaagatgagggatagagacgagatgaagaaaggaatgacagacaggtgcgccggcaacacagaacaaggacagagctgaaaggagagacgacgaaaagcgccacgagagagcgacaggccaccagactacgatgacaaacgacacggacacagacagcacggcgcagagcatgaaatcgacaaaacaagctttgacgcagagaatgggtgcgtgactggtgaccatccgtgcgtgatggagcatcgagagcgaatcgtgaaaactcgagggaacagagacctcactctgaggatgaggagatgtacggatagagagtgttgagaaggaggatgagatggggaatcagggatagggagggcagtgattgcagggtcaggatgggagaagagagaagcctcatagagtagagagcgctataggggaaggccggtcgcgaagagcgaaggagagaggaggtcgcaagactgagctaacaggaagcagagcgatagggtaaagtctaggcgggacgctggagtaggcggtgacaaaagtagggggtgaacgaccggcagagcggcagccggacgagagggaggtcgctgcgcgcagttgagctc

SEQ ID NO: 504906 - DNA, 180 bp, Homo sapiens
cggttaaacagagaaaacagtaccgcagctgaagaagctaatgtgaggattctcaaagaccatgtacctcgcccattatacatgctcctaggaatcatctttgatgtggtaacatgccaagcttttatgtcatagtatggtcttatatgttcaatgcaatagccatagtagtaagtcctg

SEQ ID NO: 504907 - DNA, 254 bp, Homo sapiens
cttgttcagaaagcaaggggaaccaggcacgtcttacctagccggaacaggaggaagagagagaaagggggaggtgttacacacttttaaacaaccagatctcgtgacaagtcactcactatcataagaacagcaagggcgaagcccacccccatgatccagtcacctcccaccaggcccctcctccaacactggggattattgtttggccttagatttggagcgggaccaaaatccaaaccatgtcacataga

SEQ ID NO: 504908 - DNA, 168 bp, Homo sapiens
cctccctatgacacatcaagtcacttgtttttccttgtgctaattctattgctatcctatttcacatcctgaaatgagaaccaaaaataactgaggaaagataaacgctgttagacttgatagatttaaagatactgatattatgcgataacataattacctatatta

SEQ ID NO: 504909 - DNA, 581 bp, Homo sapiens
ccgtaccagttcgaggagactctctgtgatactggacaagtgattcgatgtgcaccgggatatagtagctttcatccgcctcttgaaagggtaccaccactaggaaagtccatttcagatgttggtaggttcaacgaaagttggaatgctgggactgttgagttgggcaagagttctgcagtacctggctcagagctacaatgcatttagtatattacagcagctgacatgatgactttttgcgagccttcgccaggtgctggagtttttctgttaattggccgcactaggtcataaaagatctcatgaacatttagtgttgattttgcagaagattccaagcatacactgtggtgcatctacttcaacttgctttctataagaatcttctatcgtaggagtcgtattttgctaggaaaattccttgagcagacttgtacagtcgaagcagactttccaatgcgtcctgagccacgaacgattagctgatactcacgcatgaggcacgcttgtcgaaacctagtacctctcacgctgtcagcgggtccctgcagtcagcgtgagagtctccgaggaagtgg

SEQ ID NO: 504910 - DNA, 898 bp, Homo sapiens
  misc_feature (290)..(290): n is a, c, g, or t
gagcctaattataacacatcatccgtctactattctttagccgaatcagcaaatggctattaggtgtccccgaagcatctgttggtccgtgaacctcgctgaagtaagagcactgccttgtcactaaatacataacatgacctggacgtccataccccatcgactaatgcatggaagatgccagaatggccgattttaggtccgagtctggtaaacaaggtatcctacgtaaaaaagagaagtcttcaccgtcgtcagtatcaggtaaatctccctttacgaagtcgtcncttgagatttataacgattcacgaggccacagaactaatcatattttatagtcctcgttcgaaaccatcactgtatccccgaccatgtggtgtatcatcacccgatgaggcaatgcagtcagaacgccgtgaatcgcaggcagcagtacttcgctagttctacacacctagtaggctcccttcccctactcatcgcacgtaattgacactcacggacaccctaggctcagctaaagattctactactcagtctcactgccaagaatatcaaactcctgagacaattaattagtatgactagcttagacaagtagctttaatagtaaagatacctctttaggggggttcacttatgaatcgcttataggccaatgttggattgcccccattcgctggggtcaaatagttttgcaggaggtagtcttttaaaaaaagggggatggataaaaagctcccaatatgttaatcctggagaaaattggatatcctttttggaaccatagggagtataaaagggtgggttagaaaggagaaaagctgggtgtttaacatgtgggagggtttaccggggggggggtatagggaacttttttggaaaaaggattttg

SEQ ID NO: 504911 - DNA, 625 bp, Homo sapiens
ggccgtcggcataaagcctctgtgtttttcgtcccgcccgtatctgttgtgttcttttgtcgccccgtcatgcgtgacgttcttttactaaccgggcgggtctcggtcccctcctggacgggtaccacacaacggggccccccagggggcgggaccctatacgggtgtacccgcgtttcgctgcgggacctattttcacaagtccctacacatcggtcccgccccgtttttcttggacacacgcggcccttggagaacccctctgtgccgtgggccaccgaggtgtgtttttcccggtggtagccccccctttgtgagaagatatatgtccgcctcaccagacgcgtcttgttcgactctctaggatgtcccccccacaatgggtgtgtttcacacggagccatattcccgggagctgtttacaccacgcccacgttttttccgccgcaccccgacgccgggggttattaccgggcccaaatctttgaaaacttttggaagacaaacagcccaccatttctatatcgccgccgctgtgcttaaggagtgtgtttcccccaattttttaaaaggggcccctttttcccctttcccccccctttaccccctttggggccaaaaaaaa

SEQ ID NO: 504912 - DNA, 185 bp, Homo sapiens
gggttaccgagtcacgaagttcgtatatcatggcacatagtctgtttcgcgtgctgcttagaactccatgcgtctgtatatgttactcgtactgttgcatgcccctcgcggtttaatatctatatctttaagaaaatacttgatattataaacagagtaaaagacatgatatagtagtgattact

SEQ ID NO: 504913 - DNA, 188 bp, Homo sapiens
tctcgacgtgcttcagcagtgggcatagccattttcagatagagtgaaaattgtgtgctttaactttttatggctactcttttagttaaatttggttgacattttatagattgaaaacaattttaaagggtctaagtcagtttttcatgatgaggattccagtctgctattatgaagccacgtcgtga

SEQ ID NO: 504914 - DNA, 664 bp, Homo sapiens
tatccgaaggttatttgttgacccccactaaggtctttatcgaacaaattttgttgacaaaccctgggggaccattttttgaaattggcccaccaaaaaagccaggtcaatcgtccttgcaagttacagtttggtgttcaagttagttcgctatgctactaggagtaagtccccttattttagctacgaaaatcaataatctacccagacaagatgtagtattttgggataattgatttccataatactgcatcccaaaagaagttgtattgttttttacaaaagacagtgtatttgacatcacagtcagatgcacaattcattatgtcaattcccgttgtgtcgctttttgtgatgaaacagggccatattaccccttttcgaccccatgtatctcagtcccccatggagctgggctaagtaaataggaattggtttctcgcttaaggcaattagacactttggaagatggcataacctgtctcacttgaacttaagcgtctggctgtaattcccagtgctcttttctcctctcagtatgcaggttccctaccataggagccaccagttctcatgggtggcactcagtctctcttctctccagctgactaaactttttttatggaccagttattttttcctatgctaatagaataaaggcagt

SEQ ID NO: 504915 - DNA, 145 bp, Homo sapiens
ttttcatcagagaaatgctacactcagagcactgtcatccggtgaaaactgaaagcctgtccttggacaacggctgatctacaggattgcagggaggctctgcctcgagagaggtctggttccccacagggagcccagcacccag

SEQ ID NO: 504916 - DNA, 221 bp, Homo sapiens
ggctggctagggctagggaagcatctatagcatcatagatacactgccacttagtaagcattgtcatttgtggagacagactctagactctttggcctagagttgaagtgcactggcgtattctcagtgtcacggaaaagtcgaacctcccaggtgcaatataatcctggtgcctcagcctcggtcatggcggggattacgggcacgcaccaccaagccgg

SEQ ID NO: 504917 - DNA, 991 bp, Homo sapiens
ggtcgcacttgtgcacgggcgcgccgttccgccgctgcttggggcttttccgttcatcttcaccgcccgttcttggcattgggtcgtgttcgcgtctcgacacccgacagggcccgtctcccgagggcgcctcggtcgccgcatgaggcacagggcggctcggcgggttgacgggcgcgtccctagcatcgcaaacgttcagggcctggttcaaagcctgacggaagtttccgctcaacattgattcattcacagaaaactaagcactgggcacggcccggagatacggcagctaccgagcgaagccgctgcccggccggagcgcattcccggccattccacagcctccgccccgagccccgtggagacccgctccagcgagcagggcggacggggaggtccacacccaagtccagatccaaggcggcgcgaggacctcggagccctgagacgcagggagggccccgcaaggtcccggggctggaggggagccagggccaggagagggatcaggcgacgacccgtttggcccggggccccaggacctgtgcaaggacctgagcttcgacctcggcaagggcgagaacttggagaacctcccgcaggggagggacgggaccgaatgagctcaaggacatccctgggggcagcctgaaacagccagcgggcaagattggcaggggagacttcgcagatagagaggggcaagcagaggcctgttgtggccatgatgggttgaaccctgttcttggaatctgcacactgaggcgggaggaacggggctgtcacccccgggagggtcacgtcatgaagatgtgggacccagagcacatgcgaaaaaagagcccatgctgtttcccctgtcttgttctcctcctccctcctccctcccttcttggcgtcaaaaagaaaaaaacaggaacgagaaaacgacacactcaagatgacagcaagaagaccaagaacaacaaacgaagagaaaacgagcgcc

SEQ ID NO: 504918 - DNA, 221 bp, Homo sapiens
cctcactaacgattcgagtaatgaattggcagaagctcagctttgtgaaatagctcccgtttttcttcttgtggaccctacttagttccgtgggctcccatagggacctgattaatttctgccaatcagaacccatccctaacacatcagatgatagtggctttgactagggaagcagaggttgagcgaaaaaaccccaccaggtatggtttgagagtcta

SEQ ID NO: 504919 - DNA, 200 bp, Homo sapiens
ctctctctcctctctctctctctctctctctctctctctctcccaagcatcccccgttccaagtgaagttcaccctctaaaatcaccacggtcaaaagggacaaagcatcaaagcacgagcaatgagttcaaaacgttagcctagccacacccccacgggaaacagcagtgattaaccctttagcaataaacgaaagttt

SEQ ID NO: 504920 - DNA, 1060 bp, Homo sapiens
cacttgcgtgctggggaggtctgctacatgggattgtccgccctccattgatccttctggtcacgatatctccgcgtgttgttatgtgaagttaacttcagtctgcgagcttgcagaacaccacttatgtacaagacgctccattggagtacacgatagcatatatattggtataccatcacggtatgaatgttcggtgccaggagtctaccgtgcaatgtggctgtaggtgacgaaggctggcgggagctgcatgtggagcattgtgatgtgatgagtatattcagccttgttggtgtgcgagagtggcacgtggccaagcgtagggatgaagaccgttttagtcaggtccatcttttggtgtggaattgtgtttctgccgatgggaagacaaacttatgggacgctttgtagaacctgagtatttttcggttgtaccagtgtttgtagtttgagcttttaggtttattggagctagcaattattggttttggcaagtttggccagactgacttcagataagtaatgtgtatccagggacaatttgtaagaaacctgtacacagtgtttattgtggttaggaagcaatttcccaatgtatcctgataagaatatgtgcatcaagccagcctgaccgtacatggtgaaaccccatctgtactaaacactaaaaataagttagcactggtcatggtggtgtacgcctgtaatcccagtgacttgggtaggtctgaggccaggagaatcgcttgaaacccgggaggcggaggttgcagtgagctatagattcgcgccactgtactccagcctgggcaacagcgagactccatctcaaataaataaggaaatgtgtatcaagaacatgattattccaggggtatctttctaattcagatcatcaaactggattgatatagaagagttggctttaaaatgtttgcaaatgtcggtgttttttttaatactggaagaagaaatattctgttgtgtctcactacagtgctagacgatctctgtgcacagagctgattcaggcagtggctgtcgcgtgtcggggagt

SEQ ID NO: 504921 - DNA, 810 bp, Homo sapiens
ctacatagtaagttaccacatcataatcggaggactagatgaaccttctaggttaacgcaccacatctacaacgattatcgttcacagcccatgcttttgtaataatcttcttcatactaatacccatcagtaatcggatgcttaggcaactgactagattcccctaataatcggtgccccgcgatatggcgtctccccgacgattaaacaacataagcttcggtgactcttacctcccttctctcctttactcctgctcgcatcttgcttatagttggtaggcctggagcagcgaacgagtgttgatacacgtctgaccctcccttgagctaggcatactaaaaataaaaacacacacaaaaagtacaacggagcataatctaacccgagcactatctcagatatacaacatataaaagaggatcggtgatcgactgctcttatggcatcaagcgactgcactcccgacatatccgttgggcctactcctatgcagggtactctgccacagtctggcctctcactcgaagtctattaaacgtctagatatacccaatttgcttggcagaaggagaattacttatactctggacgcacatcactatataacgagctgaacatctgacagctgctgaaatcctacgctgaccattagcactgaactcctatggaagctgactaaagctccgacttcaaacccagccaggtatgccaacactttgagggatgcagctccacaatgtataggaagaagccaaaaagaatactacaagaagatgctacacccaagacaaaaactcataaccccg

SEQ ID NO: 504922 - DNA, 422 bp, Homo sapiens
tagtcacgaggtgatacaaggtggcggaagatcacagttgtaagatcttgaagtgagaccaggagacgaacccgaaattcaggtcgtgtagggaggctcacgcctgtaatcccagcactttgggagactgtggtgggcagattgcctgaggtcaggagttcaagaccggcctggacaacatgatgaaaccctgtctctactaaaaactacaaaaattagctgggcgagtgtcgtgggtgcctgtaatcccagatactcgggaggctgaagcaggagaatggcttgaacctgggacggcagaggctgcagtgagccgagattgtgccattgcattccagcctgggaaacagagtgaggctccatctgacagaaaccatcaagaccagaggtttataatctagtaactaactgtcttctatgtg

SEQ ID NO: 504923 - DNA, 661 bp, Homo sapiens
tatcgaatcgagcatcactggtcttgtcagtgtgctttcatagcaatgaaaaactaaatacccttcgtttactagcttaatcctgattatcgagctgcccaaaatgaaggacaaaatgtggtgagtagaactggcttttctccaacaaatctcagcatattgttattattttatatggatagattggaattttaatagcaaatttgaagactaggggctcagagagattttctgagtagagcctatggttcacaggtaaaagatgatatggcttagattatgagaagatattcaattatgggtgcttgggaagagttctgcaacttggaggccattgttggtggagtgctaaaggcagctggcatctgagcagatatggtgggtctaggtttagttttatttacccttttttcttctgtaaagaagaaagcttcatggtgacaacatggcttctttattcaatcaaaaattcagaaattcaggacaatttgatgtgatgcagacaaaatctctggatgttgggctagattttaaaaagtttaaagagcaattacctagatatccggcgtatctagatacggctgtaatcaatttcttaggagttagcattcctttgaaatggtagtatattaccctcattcaaattaccttgacgacgatg

SEQ ID NO: 504924 - DNA, 173 bp, Homo sapiens
agtattacagatgcttcgacgcaggaggatcgcatgtgtcacgcgcacgagtctccttcgctccgtactgcggccgtccgactccggtgttcgcgcttccggtcccggtcttgtcttgctccgttccctggagcgctcctgtctccttgtcgcgaatccgtggtgttcgccat

SEQ ID NO: 504925 - DNA, 121 bp, Homo sapiens
ctagagtgatccccataatcttccagtgtgcaccacacgcacttttccctctctctgtctgcactggggtggcatgatcccaggactgcaactccaagtgtctggattccccttactgact

SEQ ID NO: 504926 - DNA, 1059 bp, Homo sapiens
cttaaagtccccagctgcattagcctctaacgagagtgttactctatcttttgaagatttgaagtcaggtaatcctctctagctatgaaagttctaggtgacatcttcctccaatataagacctattttatctacattgataagtgttttgtgtagccactttcatcaaatatcttatctagatcttctagttgacttgttatagcttccatatcagtacttgctgcttcacctttcactgctatgtgacaacgatgacttctgtccttaaacttcatgaaccaacctcttttagcttcagatttcttcctcagcttcttcacctttgtcagccttcatggaattgaagagagttagggccttgctctggattagactttggcttaggaaatattgtggctgtttcattcttctatctagaccatcaaactttatccatatcctagcaacaaggctgtttcactttcttatcattcatgtattccctgaagaggcacttttaatttccttaaggaacttttcctttgcatttacaatttggctctttggcccaagaggcctagtttttgatctgtcttggcttttgatatgccatcctcactaagtttataatcagttctagattctgatttagagtgagagacttgagattcttccttttacttgaacacttagaggccatgtagggttatcattaactgaccttatttcagtattcacatcgacaatgtctcagggaatagggagccgagaaagagacggagaagaaccaggggaacagcctgttaggtggtgctgccagaacacacactttatgattcagttcgggcattaggtaatcgggcgtgaatttggtggtgaccccaaaatgtattgacacaacagtaccattcaaaattacactgatcaccttctcatacacaatcgcacctaataggcatcactaattgtgaaatgtgctacgaaattacacagacacattataatgtgagccctgtcctggaacacatgtacacccattgacttgctcagaagggggtgacacaaaaactttatgga

SEQ ID NO: 504927 - DNA, 1083 bp, Homo sapiens
tcccaggggatgagttttaaatgtgaggcaaaatcagtccacaatacaaaatctaaaaatcacacccattttccccaccgggcccccggggaggggggaagcgtgggggttcctttggccttgcagggttgtggggaggacggcagaggagggcctataaaggggagaaggaacacagaggccacagaggcctggctggaggtatcctgctgcccccgtgcccgtgtcctggagctgcccttggccctcctgtgtgtgcccctcttaccgggtgtgcacgcctgtgttggtggcgcccaagcccccaatctgtgtcgtggctcgtggcccctgaagaaggcctcgggccaccgagcttgctctcattttctcttttctttcttccaagcccctttcgaatgctgaatgccctctgtgttccccctctttgggatctcgttgtcacgtgccgcgtggactccttttaggattttggacctccttcattaaccgtgaacctttcttcgtgttccactttctctccccttgtggcccgagggcccacccgggtaccggggaaaccccggattgcaggcgggggagccccagggttacttcgagagggcgcaggcgctgtagacgcacattcgcttgtgaagagatgtgtgcgccatgtgatctgacaagatgtgggcttatgcgcccacagggggcggaacaaaaacttgttagcgcgctgtgcacaaacgctgtggggtgtcatagacaagtctacgcgtttgaggagggataatcccttaccttcacagagcgcgtgaattgcctccaaagagcgcacaggaaaggcaaaggggccacaagggacaagtactcccccttgagaaacgtggacagaccgtgtctctccacaaggttcccacacgcagatgtggccaaacgtttgcttgtgccatcacaaagagccgcttcatcctcgcaggaaaaattcctgtggggaaaaaacacaacatatcaatttgggagtgccttcagaaaggagcaccttgggcccactgtgttaacccattcacaattgtggtgcccaaaattaccccgagtaaaaac

SEQ ID NO: 504928 - DNA, 225 bp, Homo sapiens
cagcccctggtgtgattcaccggcacattcatgtacccataacggtgctcattgcacacgtggacggagaccccagcagcctggcaggcatggcgctggagaagctgagtatcttcgtcaagaccgtgacggagggtggtgcggcccatcgtgactggcaggatccagtgtgaatgatctcctggtggaggttggatggaacacgtctggtgggagtgacccaga

SEQ ID NO: 504929 - DNA, 1255 bp, Homo sapiens
ggcgcgtctcgggtgctgtcggctgcgtccggagattcaaaccgtagatccagctggaaggaaccatggacaactgtgagcgtagcttctattgcgatcaaaccagatggggtccagcgtccggtcttgtgggatgagcattatcaagcgcttattgcacgcgaagagaaggattccgccgttgtggggtctgcaacattcatgtccagcgtgtccgacagatattctccaaggagactactatcgttgagctgtaaggaccagctcctattctttgccggccgtggtgtgaagagtacatgcactctagcggtccgcgatagttggaccagtggctctgtggaggggactgaatgtgtgagatgaaagacaggagccgaaggtacataagactcgcggcgtagacgcaagacctgacagatctccaaaccgtgggaaccactcctgtggagaactgtctgactatacaaaggtaaggacaaggaaacacttataccatggggacgtgaatttctggtaggagagtgcaccatgaaatggtagatacgtgacgtctggtagtgtgtatacaacctctgtaggaagctggctagaagttaacaccgaggcctgttgtctcagggaagctggaatacttactagaattgacccggagagggcaagaccacatttgctaatcaccatcccatgttctccgtccgtgtcccattggggccaggtagagactcgatggcttgataggaaaagtctagtgtcattttaccatggaaacctgtcaatcgatcaaatttgggaacgcgagagacctcatttgtgaaggctcgttgtagagtttctcccctggtaacgaggagattaacctatcacacccgaagtcgagttctgaactttttaaaacttgggcttttccccatttccccaagtccccatttgaagtaaacaaggaaaacaacaaattaaactttcactagtatgtcccctcagttggcttacgataaggctatcataaaaacagccgcaaggcgaggcacgacggattgtacctatggtacgccaaacggacaaaaagcagccatttgtaactccaacaagacaagacgtgggggggcggccccaccaacatattggacaagatagttgtggacgttacagtcgggcgactgacaacgaaacgttaagatctcgtcagacaacatccagagagaaaccattgtcgatcgacagatagacaaagagtgcgacgagcgcaacctag

SEQ ID NO: 504930 - DNA, 138 bp, Homo sapiens
agtaagattgcggacattcagactgagcgtgcctaccacatagcagccgaccatctttcaacacaagaagagcggtcctgctgggagaaactggcaacggagaagctcccgcggttactacaagtaacatcgcctctg

SEQ ID NO: 504931 - DNA, 284 bp, Homo sapiens
ctccccgagcttatggagtagtcaagagacagcagaagcgtatggcatgctggggggcagtgtgagggaagatgaggctccagcggagatgggaagatgagcagttagagggagcagagttggtgtggacatgtgtcccagtacaatgaaacggcatgtacaaatgatgcaacaacgacagggcacaggcctgtggagtgtgcaatgacaagtgagacaggaggaagtgggcagggcgcagaatcaaagagctctatccaccctagaatgtgttctccggggct

SEQ ID NO: 504932 - DNA, 942 bp, Homo sapiens
taagcacggggcagttttattaaccattcaagtccagtagcatctgggtaagaattggggacagaatggggattggaaaagtgaacagatattcagcatctaacagttcaaaagaagccactacatactcttttcacaaattatgttttcacaagagccaatacaggtactagccattaacccagtacaccaaggggtactggaatgtaagaaaaagaacaccaaaaaaaaaaaaaaaaaaaaaaaaaaaaaaaaaaaaaaaaaaaaaaaaaaaaaaaaaaaaaaaaaaaaaagggggggcggcgagcaaaaaaaacaccccccggggggcacaaaccgacggccacccacggaataaagaaaaaagggggccccaaaagggaggggaacaaataaaaacaacaacagcagcgaggcgccgccaaataaacacaaagcacaagagaaaaaacacaaacaaagaacaacaatatgagaaaaaacacacaaaacagcgggagaacaacaaaaaggagacaaacacaacacacaaggaaatagaacaacccagagaggagaaaaaaaaaaccacaaaacgggataaaacggagttgcaccaccacagcccaccgtcacggcgggagagaacgaaattgagagacaagagaaaataagaccaacacacagaaacattaaacacggggggaggcgactgtagaatatagagacacacgcgagaggcaggaacgacgacgcaaaagcagagacaagaagagagaaacaagagaacaaagagagaagaagaacagaggagacagaagcacaagacaacaaagcaaaaggaagaaagagaaaagagaaaagacaaaaagaaaaaaacataacaagaaagcgaaaaaagaaggaaaagaacaaaaacacgaacaagaaaaagaaacagagggagaaaaaaaacacagaaag

SEQ ID NO: 504933 - DNA, 269 bp, Homo sapiens
  misc_feature (15)..(15): n is a, c, g, or t
  misc_feature (169)..(169): n is a, c, g, or t
  misc_feature (193)..(193): n is a, c, g, or t
  misc_feature (201)..(201): n is a, c, g, or t
  misc_feature (216)..(216): n is a, c, g, or t
  misc_feature (249)..(249): n is a, c, g, or t
ccatgcccagctaanttttaaattattttttgtagagacagtgcctcactgtgttgcccaggagttcaagaccagcctggtcagtatggcaagacctcacctctactttaaaaaaaaaaaatagcagggtgtagtgttacatgcctgtagccccaattactcaggaggntgagccgggaggattgctttgagnccaggagntcgaggctacagcgngctataatcgagccactgcactccagcctgggnaaccgagggagaccttgtct

SEQ ID NO: 504934 - DNA, 317 bp, Homo sapiens
atacctattctacattatgcttgtgtggcagtgtccccagtcttctatgcaaatatcttttcctgtagccggcatggctcatctgaaacacaagctttcaccaacccgcctggttaatactgggagcagggttaagcaatcatgttcatgctagtacatcaactctggtataaacgattgcaatcttgcatgacttacttcggagaataatgtatcttttgcttctaaggttacaagttaatcacatttctcttaattatttttctgtggttactgtcataccctttaatctattgtagattataagctctctaata

SEQ ID NO: 504935 - DNA, 783 bp, Homo sapiens
  misc_feature (51)..(51): n is a, c, g, or t
  misc_feature (79)..(80): n is a, c, g, or t
  misc_feature (116)..(116): n is a, c, g, or t
caagagaccctaagttgctcctatttaggcgtgccttcagatgctattctnctgctgcagtaataaataagtggtgcanntaattctaagccaaatcgcccttctctgccagattntcttgtcattggatggaaatctggccaacagcagggccttatcgcatattctacagcattgcaaatcatgtatgccagagatgctgttgtcggggccctgatgccggccgccatgatcgccccggtggagtgcccctcgttctcctcggcggccccttccgacgcatctgcgatggctagtcccatgaatggagaagaatgcatgctggctgttgatatcgaagacagactgagtccaaatccatggcaagaaaagagagagattgtttcctctgaggacgcagtgaccccctctgcagtgactccgtcggccccctcagcctccgctcggccttttatcccagtgacggatgacctgggagccgcaagcatcattgcagaaaccatgaccaaaaccaaagaggatgttgaaagccaaaataaagcagcaggtccggagcctcaggccttggatgagttcaccagtctgctgattgcggatgacactcgtgtggtggtagacctgctcaagctgtcagtgtgcagccgggccggggacaggggcagggatgtgctctccgcggtgctttccggcatggggaccgcctacccacaggtggcagatatgctgttggagctctgtgtcaccgagttggaggatgtggccacagactcgcagagcggccgc

SEQ ID NO: 504936 - DNA, 970 bp, Homo sapiens
gtgatctatgttagcgtcgcctggatcctataaggtcatacttgagcttggccctggtaatgaggcgggagaatcaggtctaagcagcgaaagatcctaggatgggccaagtcgaatcagatctgtagatgagatagggtagtatctgaacattcctgtgtatagccgcagcaaggctcctcccgtgtctatgatggatgtcatctcctgagagatcaccgactaggagagcccaaacactcctcctgttatactgaccatggatggatctcaagataggacctatcgtttatgtatgcccctgagatgtcaagttaagtgctaccacctgtgctgaatacctggatggtggagtcccgtgaattacttgcaggcatactgatggtgggcaggtggaaggcagtgtttgtgtataagagcaaaggaaatgcgcgcgttggaaccatactgaggtattgcgttttacgatcgtgcttctttctcgtgggaactagcctcaacattctttgtcgaggaggagcgtcagaacacgttctcttgccaagtggcagttcgtggagtccacgctgagcgatctgatgtgccataaatgtacggaaggtggtcgagcaggccgactacttgcgctgcgtgccttaaaacaggattgcgggacatcgattccctcagggcatgcttgccacagtgtctgtggattacagcggcgtgttgggtccgcgcatagggttggtgaaatatccattgaggaaaataaacatcttaggtcacgatccaatgaatgctgcaagcattctctccttggaaaaaatggggtggcgctttggggatagtacctcggggtaaaggtgaaaaagatggctcagtgggggtaagggttgaaaaggttttaaggagggctatgtcaaaatggtgataaggaaatttgggtagcttgcaaattaatggttgcatgtgggcctaagagccggat

SEQ ID NO: 504937 - DNA, 591 bp, Homo sapiens
  misc_feature (51)..(51): n is a, c, g, or t
  misc_feature (79)..(80): n is a, c, g, or t
  misc_feature (116)..(116): n is a, c, g, or t
caagagaccctaagttgctcctatttaggcgtgccttcagatgctattctnctgctgcagtaataaataagtggtgcanntaattctaagccaaatcgcccttctctgccagattntcttgtcattggatggaaatctggccaacagcagggccttatcgcatattctacagcattgcaaatcatgtatgccagagatgctgttgtcggggccctgatgccggccgccatgatcgccccggtggagtgcccctcgttctcctcggcggccccttccgacgcatctgcgatggctagtcccatgaatggagaagaatgcatgctggctgttgatatcgaagacagactgagtccaaatccatggcaagaaaagagagagattgtttcctctgaggacgcagtgaccccctctgcagtgactccgtcggccccctcagcctccgctcggccttttatcccagtgacggatgacctgggagccgcaagcatcattgcagaaaccatgaccaaaaccaaagaggtggcagatatgctgttggagctctgtgtcaccgagttggaggatgtggccacagactcgcagagcggccgc

SEQ ID NO: 504938 - DNA, 134 bp, Homo sapiens
  misc_feature (26)..(26): n is a, c, g, or t
tgttagacgtcggcatgctatgtttnagctatgtgggacgccatgagtgcagacgtctgtgatgtatatatacgatggggctcatcggagtactatcgattgtcacgtcagagtcgcagtcgctgttctaggaa

SEQ ID NO: 504939 - DNA, 680 bp, Homo sapiens
tgcacgctccccgaccccaagttacacgcacatacgccggtgaagctcggatgatcagcgcagaccgtgacgacctgtggccggcagtggtggtccataccccttcgacacgggatgcagtacggcgcatgagtgactgcagtccagggcggcaaaggacgctgacatcaatgtcaccatcgggtcacacgctcggactcggttgaagatgggacacgatgtccttgctatgacgaatgaagcggggggcacaagggcacgttcttaacaatgggcgtgcagtggtcacaaacgtgcctgtcggggcatggggggcgccctacgtgctggtcctgtacgatcgagctcaagaaggtgatccaaggtccgcggcctcctccagcacacacacagcacagccaggggaacgcagagagaaccagcgtgagaatcactgcaaccgtgcggaccagtcaaccttgcgagaaattccagttgtctgttttcccagccgcatcctgccgtgtagatcggctcggggaaggactcctagaaaaggggcagcattgcgatccaaccatcggcagccagattccgtgtcttgatcagcggggtgggagggaagccgtggcgtccctgcgtggggcccatgggtgagacactccagtactgagacctagagtcaatacgcttgtagagca

SEQ ID NO: 504940 - DNA, 379 bp, Homo sapiens
atctagaggatccttgttactggcatttcaggtaagctttaatatcagcaaaaaaatgattttataaaagtaattctcaggatctctaggacagccagcaaacaagaattagaggttacaggccaggcacagtggcttacgcctgttattcccaacactttgggaggccgaggcagacggatcacctgaggtcaggagttggatgctagcctggccaacatagtgaaaacccgtctctactacaaaaattagctgggcatggttggcgcatgcctgtaatcccagctacttgggaggctatagcaggagagtcgcttgaacccgggaggcggaggttgtagtgagccaagaccgagccactgtactccagcctgagcaa

SEQ ID NO: 504941 - DNA, 296 bp, Homo sapiens
ctcccctttaatgggcacagaaatttgtggagatttttatttttacaaatgcttcctgatgatgactaatatctagggaaaagtttgtgtcaacaacggaaagttatctggaacataactttcagtttcctctgcagtttataagtgctgaactactgatcatcctagagattacccactgaacagtcttctctaatccagttgtacaataggaaagtctttttaacatttggtttgataaaatgttatccgaagaaatactttacttgcctattataatttctgtgcccatttca

SEQ ID NO: 504942 - DNA, 207 bp, Homo sapiens
gatctagaggatcgcggaaaaacagaatccagtctgggcaccaagggggggaagatcacttgaggccaagagttcaagaccagcctggccaacatggcaaaactcagtctctactaaaaaatacaaaactctgcggggcgtggtggcaggcgccagtaatcccagccactcaggagactgaggcaggagaaactttaacccgggagg

SEQ ID NO: 504943 - DNA, 1009 bp, Homo sapiens
  misc_feature (408)..(408): n is a, c, g, or t
  misc_feature (1009)..(1009): n is a, c, g, or t
tctatgtctagatctttattaaataagatcgatcctatattcagcacattatcttaatataataatagtatatagttcattaaacaatattaagaggactatttagctggcagacgctctagttaggcgaatatgtctcttgtgaatggcaagttgtattgcgtcacgacttgactagcgtatcattctatacaccaatttaggcacacttcttacctagacatcatcaagagagtgttgtcagtacaccaccgtatgtgagtacgcctcggtatgttggagacgttagaactcacgtatattgtcattcacacacgcgagcgttgatctgtaagtatagcatataagaccaaaccaactctagagagcgacatacgtcttatgtattaaggtagactagtagacaanacaatgggaataattcgagacgcagtatgttccaagtcacacctagatatttacttctctgtgaccatacttgcgatgcacctctctcttcttggtacaagcatagacaagagcgtgcgtggcgctcctattggtccgaaaaaatatacactgcgagtatacttcaccgctggataatattcccaactggcgatccgtagaaagaacattatttgagagcatcttcaagtcagggtggctcaaatgtagcctattaacacagcaccgtgtcagcatggatatttacgggccttctttaatagacacggataggagaaataaagcgcaacgtttttatctcggccctctatttaccattctttgtccccccttgttgaaatgctcactcccggaatttcccctttggcactagataaaacgagtgaggcttcgtggatattgagataataggtccccacttgttgccaccgctgtttcattgagcaaaaactgaaacatttttaattggctcctgggagggagtaccacgaccaatttttccggcgttttcttaacattttatttccacaaataatggcggcgttgccggggaagaacatgn

SEQ ID NO: 504944 - DNA, 190 bp, Homo sapiens
catgttccaatatgattccacccatggcaaatccatggctccgtacaggctgacaacggggaagcttgtcatcaatggaaattccatcaccatgttccaggagcgagatcccttcaaaatcaagtggagcgatgtggccctgagtacagtcgtggaggccactggcgcttcaccaccatgatgaaggctg

SEQ ID NO: 504945 - DNA, 110 bp, Homo sapiens
attcagcaaatagctatcataactccctcaaataaagccctgatccgcccagagagctacaggtctgctcccgacgggcctcgggcatgaaccgtccacacagggccgtg

SEQ ID NO: 504946 - DNA, 949 bp, Homo sapiens
aaaaaaaattagctggctcacgcttgtagtcccaactacttgggaggctgagggaggagaatgcttgagccgagatcgcaccatgcactccagccctggtcgatgagagtgtaaaccctgtcacaaaaacaaatacaggaaaaaaaacataaaaaaaaacattgtgtcgcggggcggcccttggcgcaccctcgaaaaagcactttaaaacaccaatccgcgatggaggcgagcggggggccccatgaacgatgatacgtgcgcaacctgtgtgaaaaacagatggcacacctagaggaacaacggggtgcaagcgacaatagtggcgcgggcgttactacccacaataataaaaaacagcccgcgggggaaacaacagcgcgcatgctatggagaaaaaaaaacatcacaagaggagatatagcaggagagaaaaaagcggtgagacatagatcaaaagcggcggcctcaaaacgcagcagcaacacactaataaaaatagcacgcgccgccgcggcggggcaaaagaccacgacccgaaagcagagaaaagaacacacagacgacaaaaccacacaagagcaatgaagcagaccaacagagcacagaaggacgaggaaccacagcagaaacaccacaacgacaacgacaagagggcgaccacacgcagcgagacgccgacacacgacgtagcaggacacaagaaagaacgaagagcgagcagacgacggagggagcgaacaagacggaaggcccagcaacaaaacaaaaggagaaggaaccggagcccacagcacatccagcccgacgaaatcgctacacaaggacggaagcgaaaacaacacacaaacaaaaagaacaccagtgccacacgagacagcacacgagaaagcaagagagaaaagaaggcgcaaagcgacagcacacccgcagccagaggagaccagcc

SEQ ID NO: 504947 - DNA, 282 bp, Homo sapiens
  misc_feature (30)..(30): n is a, c, g, or t
acaggtcgaggtatacccaacttgtataangtaagtgatcgcgcggcactaggaaggaggagacgacagtgcctggttactacgaatggcctgcagcaccggggtgataccactagtatctacgagacgtgcctgccacctgcggatgtgcagctccagactaatatgtaaccctatatagatgacggtgtataacttatgcgacgctatgtgacgtaaatacattgagtacattagactagtatatccttgttgatagaacatatgtataatcacagcata

SEQ ID NO: 504948 - DNA, 403 bp, Homo sapiens
  misc_feature (11)..(11): n is a, c, g, or t
ttaaatcagcnatcattaagtgaaaactgaaagcctgcattgttgtgccgtttacaagctgttcactgtatcagtggtgtgtcatatttttttttttgccatccttgttcctgtgcgagttatgtcatattttttactgttaagtacttatgcatgaataagtataagaaaataactgcttattggtagcatatacattcagtcaggaatgatggtgacatcaaccaaccacaaattacccacatgagtggctgagataatgacacctttgctttctgatggttcaaggtatgcaaacttggtctcaatgcacaaaattattaaaaataatgttatataaagttaccttcaagctatgtgcataaggtatatatgaaacaagtgaatttgtgtttaaacttgg

SEQ ID NO: 504949 - DNA, 220 bp, Homo sapiens
gaggatcccccgttcctgcttacttgaaaataaagagtcagaaattcagttacccgtctctctgcagaccggaagcaggtacttacctattattatgccaactaaacacattcacagtatatttattagaagacaagtgatatatggagacaccatgtgaaatccattctaaagaacatttcagagttttatcagctttctttcaagaagcaggaactgg

SEQ ID NO: 504950 - DNA, 1695 bp, Homo sapiens
  misc_feature (846)..(846): n is a, c, g, or t
  misc_feature (888)..(888): n is a, c, g, or t
  misc_feature (1421)..(1421): n is a, c, g, or t
cggtgacactttctgtgtagcgggaacaacagccgaggcgggggacacgcagcagttttttcctccgaccccgcgggtctctcggggggatgttattctcacatgtggcacacacctggtttctctctcgcgggcacccaacagtgtgtgttactcgggaagatgtttgcttgagcaagctttcccacctggggtgctccactcctcctctcgtgttttctctcccccccggcgagtgtgggtgcttgtggtgcgcccgtccacccgtgctgtgccccttgtgagtttgttcacgctttttgcaccccactgtgttcgccctataatggttcgtgaccgtggttcccccacccggtgttgcccccgtgcaaagtgcgtggcaacacaccccccccggagagttggttccaaagtgtggctaacgcgggatagttcggggcctccctttccgtgggggggaccgccttcgccttcttttttgaggtgttttcctcactgaagaaccgcgggaacaccttcgaacggggggcacaacaccctggtgagcccccggccctctttgttgagaagaggagtctccccctcccccgaggggggttgccagccccctgttgtcggagaccctggggggggccgcgcccccctcctcccaacgattgggggcggaaaagagggagcgcccctcttggttttctccacaagaggggaccacacccctccttgggtcgcgccgctggtggaacacctcttcttcgttgggggtcgctcgcgctattatccacgacggcagctggtgtttcacacccagagagagtgtccactcttttcgcggggcctatttttgtntcctcgccggcggcccaccatgggaggacacacaccattgtngggagaaagacgccccctgtcctacacggtgtggcgacacatggctgttgtcagcgttatactctccctcgaggggtctccccacaggagcctcctctcctccgcggtgttatcctctcgcgcccccgccggttgtctctctacaatatcctctcggggagaccacccacgatttctctcgcgcccgcagagggtgtcccacacactcgccttgtctctcccgcctctctctctcgcgagagggagagtctcgggcgcccctcgagacaacgcagcagactctgggtggacacccctgtagaacactggctctctcgggcacacgcttgggctcttcacacacccccacagagaatttttgtctgggtgttcgcctggggctcgccacagcgcggttcacacacagagagagtcttgtcctccccgcagagagaagtatacctcgagactttggggcacttcccgcgccacaggagagcccacacccacgggcgacccacccaccctttcgcctctgtgagaccacgcactanctggcgcgtgggcacacccgagggaactggagaagaaagggggacaccctcttttcctgccacttggtgggcccacgaaggccctgcccctggcctttacacacacacagaaagaaccacttgagccccttggcgggtgtaacccaccccacatgtcacacagtgttctgttgtcactggcgcgagggtggagcggcacacctggtatctgaggccccccccctgtccccacaccccctggattaactccctagcttccccccaccgcccaata

SEQ ID NO: 504951 - DNA, 889 bp, Homo sapiens
  misc_feature (887)..(887): n is a, c, g, or t
tatttttaatgcttctgtagaatatgacctattaaaagaaaatcctaaactcaaatttaaattatccaaattttaggcaaattattatttctcaatatgcgaacacagtatttagaacacaatattagaaacacaattctaactaaagataaataaggagaaaacatttaggattttgcagataagtcaacagaaagtgcctgctttacactcatgagtaaaagcactccagacatttttataattgcaagatttttatgcttttttttttttttttttcccaaactctggtgctctgcgggtgactaattgtgctggaaaaattttccaaaggccttacacttaagtccggggttttcccaatagtatcttttgttcctgggaaaggccacttccgaaaagtttactttccactgggagggctgccttaaagtatatctccttatctatgaccaatttctttggggtacttcagaagttttcagtacacccccttagagaatagcttatgagttttttcacactcctgagcatggctgtgttcagaactgatctagtgaatccatacatgagctggactagtgatacttggacgagtaaatgggaccgccatgtcctggttctgtttattccaacgcttctcttttacactatttctagtaccccaattggagggtccaggaagaaattctgggcaatgggttaagactaggtaccctgtttcgggagcgggggtctttaccaaacgcaatgttcttccttcacaaaaaaaaaaattgcggccggcaaattaaattgggggcgaagaaagacagttagaacgacagggtcacaaggggctaacaattgttaagctcacccactcaactgagaaaaaaaaaaaggcntg

SEQ ID NO: 504952 - DNA, 201 bp, Homo sapiens
attagtactcataaattaagtaaataagcccaaacgcttttcaagttcacagggcattagtaatctgtggtaaatgaagatagtttaaaatttggggtaaaataaaatagaaacatttctgaatttaatttagatattttctgggtctatttgttagacaggttacactatctctgctatttttttaggacctaactgatg

SEQ ID NO: 504953 - DNA, 228 bp, Homo sapiens
ctgggatacagctttggtgatctttgccgaaatgactttgggagatgctgaaatcacacttagggtctgagactgtcacttctgtggcccttctgtctcctgctgtgtggttcagcagtctgggaactggtgaaggccggagggccggcgagggagggtgtcatcacagaacaattgatgggcgcttcggagcgggtctttcattctcttcacccccactgtgtggaa

SEQ ID NO: 504954 - DNA, 190 bp, Homo sapiens
ctcactccaggtaaatcatcccggggggcattaataacctagccggtgtccctggttaaaacacctatgacaccagcctacacatacgcacagcgctctgaggtgatttatgtgaaaatagacaatacaagacataaaaaagatataacggtaaacctcacgtagggctagctatatagacactagtcag

SEQ ID NO: 504955 - DNA, 269 bp, Homo sapiens
cctctgggctcttcaggtgggaccaggctcaggccctgactcaggtgtgctctgtgctgtggtggggttgggggaggagtgagcatccccttccaggttgggtgtggcggcagcagcagcagcagcagcaggaaaccaaggggaggtgagatgtgagacatccctcccagctttagtccactgccaaaaatcagaagccagccctggtccccaccaatttccagggagagaaatgagaccaggccaggcacggtggctcagtgcttgta

SEQ ID NO: 504956 - DNA, 649 bp, Homo sapiens
  misc_feature (540)..(540): n is a, c, g, or t
atttataaggcccttcaaatttgtggcttcctttctcatacttctcaagtataatgaaagggggagaaaaaccccaccatcaacacaaaagaaggctataaagactgtgcaccttttaacaagtcaatttgtcatcagtccctgggcctagtcttttttttttttttttttttttttttaattttaaaactacctgaggtttaaaattccttcaaccctagctacttttattctactttttatttaaacaaaaagagggggaggatcttaaggaaactaattttctatacaaaggctttaaagtccatggactatacttatcccatttatcatcccaagtggtgctttaaccctaccataccctggctattaaaataaaaagatttttggacattaaaattattaatatatcactaataatccaccacacatttaaatatttacacacattaccataatttgtgcaacatcttataaacaatatcatttccatagtaatctaaggcttcaccaacctggcccactatatctacactttangttcattttaataattatactttccttctctttatcattttggaaatttataaatatcactttcttacataccttcattcacagatatatctagcttttaccttttgcg

SEQ ID NO: 504957 - DNA, 135 bp, Homo sapiens
aatgtaaaactggataaaaaaattattttggcaggtcagccctttcccttttttcccctaaatttttttttaaaaaacccatggaacccttttaactttccagggcactttgccattaaagtcttttcccattga

SEQ ID NO: 504958 - DNA, 584 bp, Homo sapiens
tgtgtttattcgatgccacccagagctctttgttctcatgggtggcacctccagagtgaagaagatcctttgtcaagaagggaaacagaggggaaatgagagggtcctgcaggcagagctggaatcaacttccactctgcctcttgcaagctgtgtgaccctgggcacaatttctccttcctctggaaacctctgttttcttagatttggagcagggtggtcacactgaccttgcagagttctgagaatcagagacagaacataaaaggcctggaaaacattctccaaaaagaagctgcaacatgtgtggacaatgggcttttcatgcctctcttactgtctcttactgtctattgacctggtgcaagaaacatgctctggtgatggctgtgagggaggaatgaggatagacatagacactcctgtgtctcaaacatgcttctttattactctgttatgactctgtcttccctggggcaggaccccagcctgcctacatttgcagacagacacagtggcatcgataaacaacggtgtttatcgatgccacccattgacaagttttgtgaatctttgtcatcaca

SEQ ID NO: 504959 - DNA, 176 bp, Homo sapiens
atggaagttatgcagcagcaagccaaggaatagctaggattgccagcaaacccccagaagctaggaagaggcccagaaggcttctgcacaggtgtcaaagggagcatggctctgctgacaccttgctttggatttctggcctccagaactgtgaggcaatacatttctactattct

SEQ ID NO: 504960 - DNA, 418 bp, Homo sapiens
agaatttgtaaaagttcgtatgctttgcctctcaactgcattaacatgccacaggctcagactgtttttgtgtaaaggatgtcaaagaacggcactttttctaaagagaagtttgatattttgtatgcttgttaagaaagtacagtattggaaattaaaggtggacaactgataattgacatactcctcaattatcagttgtccacctttaattgaggagtatgtcaattaattttttatgtatattacctgtttacttgtacaacttactgtacaaattacatgcagcttcattttcaaatgaatccttaaaataaggaaatctttttaggaaaacatttaatttttgtatttttgattttaaaggcatgagttatgtcaattttcagtgtattaatgaagattttaacttttcatc

SEQ ID NO: 504961 - DNA, 330 bp, Homo sapiens
  misc_feature (96)..(96): n is a, c, g, or t
ctccactgcgccattctgacctcaagaagtcagttaggcatggctgtaatatttcttttcactcccaggtataccaaattgtaagtgcaccggatncaaaatcaccccttctgcaagaaagcctctttgcaaccgggtcagaatggcggcagcggagcatcgtcattcttcaggattgccctactggccctacctcacagctgaaactttaaaaaacaggatgggccaccagccacctcctccaactcaacaacattctataactgataactccctgagcctcaagacaccttccgagtgtgtgctctatccccaccactgtgctcgtga

SEQ ID NO: 504962 - DNA, 702 bp, Homo sapiens
  misc_feature (500)..(500): n is a, c, g, or t
  misc_feature (694)..(694): n is a, c, g, or t
acgagctcgtgccgaattcggcacgagccgagtcctatgattacacgcgatgggacttgtacacttgaagtgaaacacagttttaaaacttgctttgtttagaattcccacctcatttttccatggacaaaagtattctttatgtcctagtgcacttacaatttggtattacctgggagtgaaaagaaatattacagccatgcctaactgacttcttgaggtaagattgttctgtcagctctttgttctcatgggtggcacctccagagtgaagaagatcctttgtcaagaagggaaacagaggggaaatgagagggtcctgcaggcagagctggaatcaacttccactctgcctcttgcaagctgtgtgaccctgggcacaatttctccttcctctggaaacctctgttttcttagatttggagcagggtggtcacactgaccttgcagagttctgagaatcagagacagaacataaaaggcctggaaaacattctcanaagaactgcacatgtgtgacatggctttcatgccttctactgctgtgacctgtcagaacatgcttgtatgctggaggagatgagtagctacactctggctaactgctttatacttgatgacttgttctgggagaccagctgtacatgaacgacagtgatggaacacagggcatgactctactcatgcgagctangagtaata

SEQ ID NO: 504963 - DNA, 133 bp, Homo sapiens
  misc_feature (89)..(89): n is a, c, g, or t
  misc_feature (118)..(118): n is a, c, g, or t
gggagaaaccagaaagtcttgaaaagatcctgagactccaacaggatgggccaccagccacctcctccaactcaacaacattctataantgataactccctgagcctcaagacacctnccgagtgtgtgctca

SEQ ID NO: 504964 - DNA, 896 bp, Homo sapiens
  misc_feature (18)..(18): n is a, c, g, or t
ctccacccgacggggtgntaatatcaagacacctgccttccaccctcagcggatgatctcaagacaccttccgagcgtcagctcactccccttccaccctcagctccaccctcagcagatgataatatcaagatacctgctgagcgtctgcggattccgcttccaccatcagcccttccaccctcagcggatgataatctcaagacaccttccgagcgtcagctcactccccttccaccctcagctccaccctcagcagatgataatatcaagacacctgccgagcgtctgcgggggccgcttccaccctcagcggatgataatctcaagacaccttccgagcgtcagctcactccccttccaccccgtcggagagcgggccaggctcatcttccacgcctcaggcggatgataatctacaagacagccttccgaggcgtcagcgtcactcgccacttcacaccgctccagactcacaagaccgtcagacagatgatagagtagtcaacgacacctggccagacgcggatctgcggggaggccggcttccaaccgctcgaggcggatggacaatcgtcagagaacaccattccgagacgtcagagggacacatcccacattgcaacccgctcgagccttaccagcccgtcaagacagaatagataagtaactcgaggaaccaacctggcacggagcgatctgagagggaggccgaatgtaccaggccatacaggccaggagtgacgtaaatcgtcaagagaacaaccctgcccaaaagcatagccacgagagaaggcatgaggggacggcaccgaacgcaacggacaacaccccaaagggaaggacagaagggcgggaagaaacatgagaaccagccatcccggacgcgcacaaga

SEQ ID NO: 504965 - DNA, 383 bp, Homo sapiens
  misc_feature (287)..(287): n is a, c, g, or t
  misc_feature (321)..(321): n is a, c, g, or t
  misc_feature (329)..(329): n is a, c, g, or t
  misc_feature (338)..(338): n is a, c, g, or t
  misc_feature (365)..(365): n is a, c, g, or t
  misc_feature (370)..(370): n is a, c, g, or t
cacagacatgaagagaacacaaactccacacagataatggccccgggctaagaatccatttttttcttgtcaacattataagaaagcgacattgagcataaagacattatttgaggacctgccgtactatgtacttagagagataggcattctatcttgagttccttttttttctcccttcttgaaggaagattaaattgcatctgagatggctcttgaaattgatcggggttcaagctgacttgcatactctttggggaaaggaatttaggaagggatgtgtatgnagggaagttcttatggattaagcctgtttcctgnacttggantagatggangcaaatgttttttcactattctgggangcatncgcatttctgggg

SEQ ID NO: 504966 - DNA, 346 bp, Homo sapiens
  misc_feature (68)..(68): n is a, c, g, or t
  misc_feature (301)..(302): n is a, c, g, or t
cattaggatgaaatgagacccatgagggtagggcccctcatgaatagggttaagagggtaaattttgncccaggcacagtggctcatgcctgtaatctcagaacttttgggaggccgaggcagggggatcacaaggtcaggagatcgagaccatcctggccaacatggtgaaaccccatctatactaaaaatacaaaaattagctgggtgtggtggcgcacgcctatagtcccagctactggggaggctgaggcaggagaattgcttgaacccaggaggcagagattgcagtgaacagagnntcggccactgcactccaacttggtgacagagtgagaccccttca

SEQ ID NO: 504967 - DNA, 189 bp, Homo sapiens
ttatcccccctctaaacaggaagttcatactactcaagtcctccagtggactactggctgctacagtttcctggtgagtgggggtggacctgggcagcactctgggagtgccagtccagagggcccagctggtgctgggtggagctgttctagagaatcgcttgaacccagtgaggcggtggttgcagt

SEQ ID NO: 504968 - DNA, 1968 bp, Homo sapiens
  misc_feature (1455)..(1455): n is a, c, g, or t
gctactctggtattgaagcacaatcaataaagggtcctaaagaagatgcactgccgaacatattgcctgggccatgtatgttgcaggttgccgagtggtatcaaaggtgtgcatcgataaagctcgcaaaggcaggtttaagccacaaagagtctcaaagggctggtcaggccgacaagcgtcgatcgaacttgccgtgacattgtgccacctccaagcgtgggcaagcggtgctcggatgtcacctgtatatttgtcccacatcggtcggcttcaatggcttgaatgcctgtgttccatatgtgcacaaaggacacaaagggcaccatagggggcaatgtgctctagagtgagtcgaggacgcaaagaggcccgaagggcatgcgaagaacgcgcgagcatgtcgaggctacccaaggcgttctagtgccgtcgccccacaaacggttaaccccctgagtgtccccccccttggacgagagaggaggcctttccgggcagggtgagcaatcactccttacatgaggcgagacccattgcagtgtgaccaggcacagggacacttagagctgacagagatctacacaccctgagactctctcgagacgccattgtggggggccataaaacacaattccttggcaaattgggtggggcccttgggggcggtttcccccttcccccttgttttggcctttaattttttggttaaccgaaaagaattaaaaaaccccttgggaaaggggccacgtgcacacacacagactatactacacaataaaacacaacagaaaataactctcgcgagggagagcgcctatctcttaaagttcttaacgcaggaggtgtgccggcgacaagacacacagagagacgggctaaagagtggacaaacgtgtggggcccctacatgtgggcacaaaataagcggacgtgaataccactgtgagagcccacgaggagtatttctcgtgttgggtataccaacagagtgtggaggcgagacagctgcgaagccagcaggggaactctccccacataaagtaggagaaccaggcacccgaaaatagaacacttgccgagaatcaacagcgcacagagaggtaaaaaagcccatgggaccatagtaaaagacagatacagcagagcacaacaaacaagcagagcaagcaacaagcagcagcaggatcccaggaacacaacgaatactgacagaaacaaatacactagacaagcaacgacgtggagcaaatacaactcaaccacagagcctattgtcacacaccaacaaacaaaaccacagctactaggctatcatctagcagcagctcaaccagaacttaacaaccatactaaacagctagaaatcacacacataacagatcaccactcaacactacactcaactagcattaccttcaaacactatcaacacacgcagcacaacacaacacnatcaacaactactacacagctcactcacacacatacactcaggatagacacatcagcaaacctgcacaggataacaaactagactgcacctgcagacgaagagcatagcgaatagcagatagcagaggaacgagcgaaaggtctggaaagagaccgcagcgagagacagcatgaagcatgcaggcgatcgacgacagacagcagggtcagacgaggagcgagagcgacggagataggagaacgagacgacagcgagacgcacagagaatctagaaggacgcagataacgagttgaactgcagaagcgacgagcagtgagacgcgagcagcacgaaagatacagagatgcggcataacgagaaacgatcacgagagtactcgcctgatctgatgatagagagcgagatcgagagtaagacgaagacacgaaagagagtgaagcgggagagatgagagcagagcacgccaggacgtcagacgaagacgagatcgaacaggatgcatcatatgaac

SEQ ID NO: 504969 - DNA, 316 bp, Homo sapiens
  misc_feature (150)..(150): n is a, c, g, or t
  misc_feature (286)..(286): n is a, c, g, or t
catcgttggcactcagagagaacttcagccggtaacttgcagcaaaccggccagccgctggacttggcggtcaacggtaagggtttcttccacatcctgcaactcaacaacattctataactgataactccctgagcctcaagacacctnccgagcgtctgcgggggccgcttccaccctcagcggatgataatctcaagacaccttccgagcgtcagctcactccccttccaccctcagctccaccctcagcagatgataatatcaagacgagcgtctgcggggncgcttccaccgcatacgcacaggcagtctg

SEQ ID NO: 504970 - DNA, 969 bp, Homo sapiens
atcccccccgaggcagacgactaacatcaaaacaccatcccagcacccccggcgagcgtctgcgggggccgcttccaccctcagcggatgataatctcaagacaccttccgagcgtcagctcactccccttccaccctcagcccaccctcagcagatgataatatcaagacacctgccgagcgtctgcgggggcccttccaccctcagcggatgataatctcaagacaccttccgagcgtcagctcactccccttccaccctcagctccaccctcagcagatgataatatcaagacacctgccgagcgtctgcgggggccgcttccaccctcagcggatgataatctcaagacaccttccgagcgtcagctcactccccttccaccatccaacccgtcagcagaatagataagtatcaagacaactggccgagcgtctccgtcggagagcgggccaggctcatcttccacgcctcaggcggatgataatctacaagacagccttccgaggcgtcagcgtcactcgccacttcacaccgctccagactcacaagaccgtcagacagatgatagagtagtcaacgacacctggccagacgcggatctgcggggaggccggcttccaaccgctcgaggcggatggacaatcgtcagagaacaccattccgagacgtcagagggacacatcccacattgcaacccgctcgagccttaccagcccgtcaagacagaatagataagtaactcgaggaaccaacctggcacggagcgatctgagagggaggccgaatgtaccaggccatacaggccaggagtgacgtaaatcgtcaagagaacaaccctgcccaaaagcatagccacgagagaaggcatgaggggacggcaccgaacgcaacggacaacaccccaaagggaaggacagaagggcgggaagaaacatgagaaccagccatcccggacgcgcacaaga

SEQ ID NO: 504971 - DNA, 482 bp, Homo sapiens
  misc_feature (63)..(63): n is a, c, g, or t
  misc_feature (74)..(74): n is a, c, g, or t
  misc_feature (268)..(268): n is a, c, g, or t
  misc_feature (271)..(271): n is a, c, g, or t
gacgtgtggcttcagcatcgtcattctgcgtcacgcctggccccagcttcagtgcagacactntccagctgcanctcacctcagctctaccctcagctccaccctcagcagatgataatctcaagacacgtgccgagcgtctgctccatccccttccaccctcagcggatgataatctcaagacacgtcagctcactccccttccaccctcagctccaccctcagcagatgataatatcaagacacctccgagcgtctgcggggccgntcnaccctcagcggatgattcattctcaagacaccttccgagcgtcagctcagtccccttccagcctcagctccagcctctgccgatgatcctatcgagagtcctgccgagcgtctgcgggggtcgcttccatcctcagcggatgatcttctcaagacaccttccgagcgtcagctcactccccttccaccctcagctcctgcctctgccgata

SEQ ID NO: 504972 - DNA, 658 bp, Homo sapiens
tgagacaggtctcagttaatttagaaggtttattttgccaaggttgaggaccctgtgacacagcctcaggaggtcctgatgatatgtgcccaaggtggtccaagcacaggttggttttatacattttagggagacatgagacatcagtatatgtaagatgttccttggttctgttgggaacggcaggacaacttgaagcagggagggggcttcgaggtcccaggtaggtgagagacaaacacttggattcttttgagtttctgattagcctttccaaaggaggcaatcagatacgcatttatctcagtgagcggagggatggctttgaacagaatgagaggcaggtttgccctaagcagttcccagcttgacttttccctttagcttagtgatttctggggccccaagatttattttcctttcacaggggccatgttatgtagaagccaggctgagaaggaatctgattccttatattgggttatatttttttctgaaataaatgttagcttttattttccctccaagctgcaagagccattgaactctgacttctgtgcttctcacatttaaagcctcctgatttgagtacttagtacctgccaagacattagcaggtaggagttactattcccacctgacagtcaaggaaaggcca

SEQ ID NO: 504973 - DNA, 491 bp, Homo sapiens
  misc_feature (11)..(11): n is a, c, g, or t
  misc_feature (446)..(446): n is a, c, g, or t
aagacacctgncgagcgtgcggggagcgtctgcgggggccggcttccaccctcagcggatgataatctcaagacaccttccgagcgtcagctcactccccttccaccctcagctccttccaccctcagcagatgataatatcaagacacctgccgagcgtctgcgggggccgcttccaccctcagcggatgataatctcaagacaccttccgagcgtcagctcactccccttccaccctcagctccaccctcagcagatgataatatcaagacacctgccgagcgtctgcgggggccgcttccaccctcagcggatgataatctcaagacaccttccgagcgtcagctcactccccttccaccctcagctccaccctcagcagatgataatatcaagacacctgccgagcgtctgcgggggccgcttccaccctcagcgatgatantctcaaacacacggggggatgagcacacagtaccgagctcgatga

SEQ ID NO: 504974 - DNA, 371 bp, Homo sapiens
cagtgttattaaaacaggactggtataccaggtatacttacgttaatgagtctagtcttcatgactactcaccacagatcattggctgagagtacaatgatcatgcaaagattcttttatgttgctttgtgtttgtgtattagaatcattgtacgttgtataccttttgtccttttttactcgatttaaaaattttcaacaggtatttatctgaagtactgggtacaggccagtttttttgttttttgttgttgttgttttttgaactaccaccacagtcatgcaaatgaatatgagctgttgaattaattaccctatcttctacatctcttctacttcccatcacgctggcctacagcacatgccgggga

SEQ ID NO: 504975 - DNA, 214 bp, Homo sapiens
  misc_feature (168)..(168): n is a, c, g, or t
atgaggtctagaggagtcccaagtgtgcgagatttcgttccaccatcagccgatgataatctcaagacaccttccgagcgtcagctcactccccttccaccctcagctccaccctcagcagatgataatatcaagacacctgccgagcgtctgcggggccgcttccancctgagcgatgataatctccagagggatcctctaagtcacctcagc

SEQ ID NO: 504976 - DNA, 718 bp, Homo sapiens
ggcatgcagtgacggcgccgactctctgccctgccatgcggctgggtggtgccacaagatgcctcacgcgtgccgtgagttggcgtgccgcatggaggccgctctccttcagtaatatgtaacaccagtcgaggtctgccgtccatcggggggcgagccttccctgatgtgccaacgcccagccgttcgccttctggaatcacctagaactccagccgcgtgccagtctgtggacgttggttctgccgcgtgcgtcgtgtcgcgagcaatgcttcgcacctgcccagttctggccaccccctggccctcgcgtttcccgtctcgtgttgtaagttgggctgacaacgatggcacgccgagcgtttggcggcgtcggtagctttgacctgctctcctagcgggttgcgcaatggcatgccacttgtggaccatgggctgatggcgtctctcaaggaccgcatccgttctggaagggttgcgcacaggacttcgtcgccagggggaggtcgttcattgggcgcgcaaactgggcgcagtacatcgcagggcgaagtctggacattctcgttaataccactcccctcgacgattgtcgctgtgcgggcaggatgtgcgctagggattccacacacggcccaccatgcagcgccgttggccccctgtatgttgcggaacatccttgcggtgtcccatggttccccgtgggattgcgcccttc

SEQ ID NO: 504977 - DNA, 104 bp, Homo sapiens
tgtggacatttccacgagttgccactttatgaatctgtatgccatatgcctggcctattgcatacatgattcataaatgtgggtgactctgtggaaatgtccac

SEQ ID NO: 504978 - DNA, 82 bp, Homo sapiens
cggaggccggcgtcggctgttgcagcctgctgcgcgcccagggtcccgcgggttttcgggcgcagggtggcgcccgcggcag

SEQ ID NO: 504979 - DNA, 479 bp, Homo sapiens
  misc_feature (362)..(362): n is a, c, g, or t
aagaggtgacttagacaccctcaccttgaagtttccacatattttctatccatagtatttgtatacttcacacgaagacttattagtggataaatataataaactccttcctattgaaataaaatttgagaagaacatggtatgtgccagccaaagcccaaattcaaatgaacccttctgtgaaggggaagaatcagtcttgttgagagaaagtaatttagatgcagaaggaatcccagctgcctagaaatccccgttgccaacagcaggcgaaaggaaccacccatgggagggaatgtcgcagggcagcggcaggtcgggcggcagtgcagcagccgtgagaacgcaggactcacacttcngggctgtgtcgccaacattggcaaccagtcgtcacctgccaacagcgccacccacttgggggagcatggatggtattggtcgggctctatccagctgtttgttagcagtgagtacaa

SEQ ID NO: 504980 - DNA, 171 bp, Homo sapiens
tacgatacttagacgggtgctcctctgtgtgctgtgatgtgctgcggatatgtgtgtgtgctgcgtccgtgtgtgtagctgtgttcatgcatgtgctgtgtgttgtgtgtgtgtagctgcggggatgcataacagtatgagtgtttttacggatgggaattgacgatgtaa

SEQ ID NO: 504981 - DNA, 387 bp, Homo sapiens
gcattctggactccctggatttatgcaaaaactgggatactttctcaaaacactctaatataagcagagcttatgttctttatcccccagaacatcagcaagcaaaatgcctgaacatcccaaaaaactgttgccatgacctttgcccttgactggtccacttttgcttcgactggaccacttccatttttggtagccattgctttgattgtgctttgtcttcaggatggcattggtaaagccatgttttggctcctgttacagttctttgaagaaatgcttcaggatcttgatcccttgtttaaatttctatggaaagctctgctcctgtctgcagttaatctgggtgcaacagttttgtcacccatcaagtgaaaagtttgttgg

SEQ ID NO: 504982 - DNA, 236 bp, Homo sapiens
aacatgaggcaggtatttacatagtagacgtactaggtctgcgaagtgctcaggtaggtcatctgcatggtataaatgctttaggtgccctgcctctgatgctgtctacacggggatggttagtaggtgaaggcctctgtgtacgcgtgcacaggtgttaacctaaggatgtctcgggccattagacatctgtgcacttaaaagttaaaaatggacatttgcatagaacatatctg

SEQ ID NO: 504983 - DNA, 287 bp, Homo sapiens
ctttcacaggctcaatgtattatttatatactcatctgaactttcaaaagaagttaaagtgggagatattctcatacaggcaaaagataatgatattccaatctattgttcaagttgtatggtctccgagtataagatcatggtgctatataacccgatatctggcaaaacagttgcgtcagtagcgtgcttaagtggctcatgccaatgaaataccaatcgtctacatgtcgtactccgatcatttcagtcgacgtcgaaggacaatccctactccgccgtttttt

SEQ ID NO: 504984 - DNA, 180 bp, Homo sapiens
agctggtcgaggactgattgagactgggagcttgaggctgcagtaagctatgatggtgtcactgcactccagtctgggtgacagagcaagactcgtctcagaataataataataataataattataatgaaataaattaatactagcgcatgtgattctgggactattctcccaggaatg

SEQ ID NO: 504985 - DNA, 292 bp, Homo sapiens
gttttgggacataatatgtgacagcaataggttaagaaaagcaaagcagagaaattgaagatttgtgtcaacactggcttaagcaaatctgttggcaccatttttccaatagcatgtgcccattttgggtctctacattgcattttggtaattgcttgcaatatttcaagcattttcattgttattatatgtgttatagtgatctgtgatcagtgatctttgatatattattgtaattgtttcggggcgccatgaaccgcacccatataacacggtaaacttaatcagcaaa

SEQ ID NO: 504986 - DNA, 135 bp, Homo sapiens
tgcctaagtgtgtatgctccgcacaacgcaggcagagagactcgtaaaaggaggataccccacagatagaaagggccaggctgaaattcaggagcctggatcttggccacttccgcctaaccagactgggcaacc

SEQ ID NO: 504987 - DNA, 139 bp, Homo sapiens
tgcgtacattcctcatcatcagttgtggggctgtggctgtgagtggcgcctgtcccgaggccctgggatggccaggctccagcagcagcagcagtggcagtgacagcctcatggccccaggagccagttcagcaagtga

SEQ ID NO: 504988 - DNA, 428 bp, Homo sapiens
  misc_feature (190)..(190): n is a, c, g, or t
actttaccatgaaaactacttgttcttcccatttgaaggtctattctgttgagtaaattgaaccataattcaaatcgagtgtcccagaaaaaaagacttgggctccctgtttggagtctggcaggcttcgagcacggagccagtggccaggctcaacctgtgtgtccccttccaaggctttgcattctgntcaccgcttcaccagcagcaggctagagactgcctgcctgggcttgacttttgtttggggggttattggccagggcttttgaacaggaatgtcccacagaagtaccagacattatttatataaggatgaacgcttttttttaacagtaccctttcagaaatttctaactactttgtaactgcatgattaacttggtgataaaagcagttattaaaagtctaccttttccgaaaaaaat

SEQ ID NO: 504989 - DNA, 1282 bp, Homo sapiens
tataacgcgggggggggggtcttattgggggcccccccccttgggtggcgcgcccgagaggggggggggaaagagagggggggggtgtgggagagagagaggggcgccgcggggggggggggccgcgaagaagggggctctccggggggaaaaaaacccccaggagggcaccgcccgggggtttcttttcttttatgagaggaggggccaaaaatagagacccccgtcgggttctctctttctcccccggagggtggggcgacgcgaggggggtggtgggccccgggggtcggggttcctctttaaggggggccacagagcgacacacagagagggagccgccgccgcggagaggacctcgaagagataccgcggaggagagagtggagggagaggtggtgtgccaaaagattactgcgggggagagccacggagcgtcacacccccccctaagcgatgtgtggggcggccccacaccggggagagcaggggtggtggtgcggagggaggaacacaccccccacgcgggaggcacaccttttctgggggggggaggggaaaaaaaggagaagtggacagtgagggtgcgcggaggaacccaaacagacgcattggcccccccgacagacaaacaagtcggagagccactaggacgcgggccgagcgggtcggaagaatacctcttttggaccgccccaaaacaagacaaaaaacacactttcacacgagagaggggggggggggggcgtcccacgaaacaaaacccaggctcccctgagcggaggaagctcaaaaaagagacacttcttagtgcgagagagtgagacaaaaacccccacaaaccgggagagaagacttagacagcaacagaacacccccccccagagagacagaatattagaggcgaagagctaacagcgacctacgcccacccacagagagagggggcacacccccaggggacagctacaacacagagcagcggaccggccccccggagcacccccaccacaaagcacggccgcgcatgccgcacataacacaacacataaagaaggagaggagacagcagcaaaatgcctcactaacaaactggggtccccatcggtggagacaaacaacctagcgggtggtaaaaagagaaggacccactcctagaaacctgctggggcgcaccacaacaacctattgttgcccgccacagaaggggaggtagctgcccccatcctccaccgctcccccccacacaacttgctagagcacacaagcgcgccggactaca

SEQ ID NO: 504990 - DNA, 148 bp, Homo sapiens
aatccccccccaacttttagaataccccctgccagcatcaaaaagcaaagattctaattttttaagccaaaaatttgtactaacacatgtaattttttaatgtgcctaagttaatttttgtatcaattccataaatgggattggctga

SEQ ID NO: 504991 - DNA, 1077 bp, Homo sapiens
gttgagatcgagttctaggagatccaaagggtaggtatggggcgacctatcagagtaagtggctcaatcagatccgaagaatggttaagtacgtggcgactcgtgaggacatatggtgggatgcaaagtggtgatgcctggcgatgtggatgggaagctcacattgttccgtagtaggaattcgcagcatatattgcagggtgaatggtcacatattggtcggaggttacagcgaggtagagtgtttgattactgttgagatcagagggatgacctgtgtactctcgaagacattggtgtcatcaattgttgggttcatgggattgaaagcaagtattgaatatgtttgaggctctgagggtctggtaatggaatctaagaatctaattggacgattttttagcataaatacataaaccattcacaagttatgtccacgggcttggtggtatgctttaattatggacacctaatggccgagcttgtggattgtggttcggagcatatgtggaccctaaaatggagtttgggattgaagacgataccctgagctcggggatagctgtgggtggaccaaccaaagtgaaagaatttgcgaccccttttgaataggaggagattctaatggtcaagttcataggggttcaaattgtttgggatgatgaaggggggcatcctcggacatcttctgtgagtcacatctttattggtggaaggcatttggtggacgatgaattagttgaaacacctttagggcagggctggtgtattcttttccttaaataacgaagggcggcaggggttggggcactgggtttgttccttgaagataagtatcgcatgaatgataagaaaattacgaagtcttctgtgtttcgtgaccattgcgtgattgtgtggatccagaagggaggagatgagtgttatccttggatgggggaattcccggttacaaagggggtcaaaggtacgtgtaattggatattactatatggaatttggttgggttcgtggggattagatggtggcgacaaggtgattgttagggtaataaattgtattgatcttaaaattaca

SEQ ID NO: 504992 - DNA, 311 bp, Homo sapiens
atacacaactaggtcagttttgcaggtggtaagccatttaccaagatagttgtaggtaagaagggcagatttattagagaaattgtgaaaatatgttgcagtgggcagctcagcagagaaggggctacctgcaaagaggcaagggctggaggaaagttttatagggtcctgctgaagggtgctacgtgtggaatgaggtcattgtgcccgcaggttgtttgtgattagctgtctctaacaattgttcatacaataattgttcattattgttctcaacttggggctctccccaacctggggacccttcctta

SEQ ID NO: 504993 - DNA, 400 bp, Homo sapiens
gtgctctcaggatcttgggctcagtgatctccattcgcacctacctctcgtgctgcctgcctctccacgcacagtgttaaggagccaagaggagcactttgcccagactttgtttccccaccggctgctggatgggtgtgtccagtgccaccgctggcctccgctggttccatcagccttgttgccacctggtccttcatgaagagcagacacttagaggctggtcgggaatggggaggtcgcccctgtgagggcaaggcgttggttccaagccggttcccgtcccttgcgcctggagtgcacacaggccagtcggcaacttgtggctggaaagccaccctggtttagatcactcggggtccccaccttagaagggtccccgccttagatcaatcacgag

SEQ ID NO: 504994 - DNA, 228 bp, Homo sapiens
gactctgatctgtgacgacactggcctcaccagggatgtcccatggatgcttccaagtcggaaaattccctgaagactttgagcacgaagggtgatctgtgcctaataaaactgcggagacaggtcaatcgcagcttctctccaatcaccagcagcagcttcaggccgacaggttcaaagctaagcagatgctggtgaggccagtgttgtcacagatcacccttcgtg

SEQ ID NO: 504995 - DNA, 919 bp, Homo sapiens
ccgctcgctgtgctcgcgggtctccgcggggcctccttcgccggttttggcatccgaattgtgtctttcacggcatgggctctatagagacgtgtctaaggttgtgggcacctgtggcccgaaatcccccggtgagacgcggttcccgctccaggtgttttgtctgtccccccccgcgccgatttgcccgggcggtatcgccccttatttggggtcccaacccggctcccgtgcaatgcacatgtctcgtttgcgggcggaaagaaggttcctgccccgttctgtgttaaaaactgggggccagcgccctcatatttcaagtgtttgtgtgagccgcacagtggcgtgatgggtctccgccaacgcacctgttgttggcaggcttctcacggcattccacccccagcggcccccatctcgtttcggggtcaatcgcccccccccgtcccggggggcttgtcccacgacccggggctccagaggctctgtcggcagtctggcacgaggtcgccctagttgtcccccgatcgctttcggatatggcttcaagtgagatatttacccctgtttccccccccccccctctcgtctatcccgtggtggggcaagaccgcttcccatactttgtttggtttcccacatggcccacttcaagcatttcagtactgtctacagaagctgcgttctatggttaccccacgggcggactgtcaccgcctctccgcatagatacagatgatctttttgtggagccacctcgtggggttatttcttatcttgtgccgtgtgccgcatcttatatttgatatgagttctttattaacccgcgcactttgttgtactgcggaagccaccagtgcccccaacatgtgcccggaggtggcggaccccttcaaaaaataaagcaggccacaaaaca

SEQ ID NO: 504996 - DNA, 387 bp, Homo sapiens
  misc_feature (316)..(316): n is a, c, g, or t
  misc_feature (347)..(347): n is a, c, g, or t
ggcctctgcctttttcgcatgaggcagctacccccgccagcgagggcaaaggccagtgtgacagccttttgtatttgcactggtggcttctgagctcttgcctggcatccaggaaaaatgaggttgcacaaacaaattgaaggatgataaatgtgggggattttattgccgataaagtggctctcagtgggaaggggagctgaacaggggatgggcaggtaggtagtcttccccttgaatccagctgtctctggctggattctcctccgaagttacgccgtccaagctgtccctccaaagtcaagcttgctttctnttctggacatttcatctgttagtcccacctnaccagctaaagtcttgggggttttttattggggcacaggt

SEQ ID NO: 504997 - DNA, 486 bp, Homo sapiens
aagagagagatgacctatggagcttaatttattaatgcagacagtacctaacaaaaccacaggtcctaagacataccaaagctgcattaggaggagtttcggtagggtgcgacctcggtagcagaaccctaacgctccgagcagtacatgctaagacttcaccagtcaaagcgaacgtactatactcaattgatccaataacttgaccaacggaacaagttaccctagggataacagcgcaaggcgtattctagagtccatatcaacaatagggtttacgacctcgatgttggatcaggacatcccaatggtgcagccgctattaaaggttcgtttgttcaacgattaaagtcctacgtgatctgagttcagaccggagtaatccaggtcggtttctatctacttcaagttcctccctgtacgaaaggacaagagaaataaggcctacttcacaaagcgccttcccccgtaaatgatatcatctcg

SEQ ID NO: 504998 - DNA, 417 bp, Homo sapiens
gtaggatgtgttccttatgaagcgtacgcatggaaatttccacgaggctcatcctcagtatctcattaactcatcgcaagatttcagttgcattggtcacctgtcgagacatgaccagacaggatgtactaggcctgggtatccagcgaggctgtgcatccctgctgtagggccctctgtagagttctagactttctgattctgatgctcagtagaccttttagaggctcgctctgcttgatctgctccaaggaagctgacgttctaatgtatgaaccatgagatgcattaggtcttaggaccgacagatcatcatggagctgctcatgccctgagacgcactgctgtgcgagctgctgatgctcagtgcactttactcaggctgacttgagactagagcaccttagctgacatggg

SEQ ID NO: 504999 - DNA, 677 bp, Homo sapiens
  misc_feature (1)..(1): n is a, c, g, or t
  misc_feature (102)..(102): n is a, c, g, or t
  misc_feature (117)..(119): n is a, c, g, or t
  misc_feature (126)..(126): n is a, c, g, or t
  misc_feature (412)..(412): n is a, c, g, or t
  misc_feature (665)..(665): n is a, c, g, or t
nagaagaagtaatgaagtaaaaggaggtgatagtaaaataaaggtataaaaaaagtaaagagagattgaggagttttaaaagaaactgagaagtagttatgnagaagcaagcataannnaaataanaaggaaggtaatgtttgttggggagtatgaaataagggagaggagagcagtgttaaatgagataatgagatgtgtataaaaggatgaagagttggaaggaagaaaagagatgatagagttattaggtaaaagataaaaaggggatgaagggataaaaagaagagattaatatgtaatggatggaaaagaaagtaagaaagggaatgatgaagaggatttagaattttttgaggagaaagaaaaagtggaagaagagggtaagaaagtaaagagaatgaagggaganggatgatgaggaatacattggaggaggaggaggagatggaaaatatgggaattatgagataaaagaagaaaaagaaaaataaaaaagtggcagtgaaagaaaagaaatagaaaaggataaaaatatttgaagaggaggtggaaaatgatgaggggatatttggaaagggaaggaagatgtataaaaaggaaaaataggaggaagtgtaataaatggaaaaaatgaagatatttgatgataatgaaataggagnggaaataaaaat

SEQ ID NO: 505000 - DNA, 123 bp, Homo sapiens
attaatttggtaccaaggcaaggatgaaatttttacccggttattatggcgggttacccctataccctctatatattgacccagaggaatttttctcatacacaggggtatttatattgcaca

SEQ ID NO: 505001 - DNA, 585 bp, Homo sapiens
gggtcaccccttccttgtctagggttgcaacaagaagtgacagacagggtcccacaaggtcttataaatctccctctgtaagttgtgggaatatcagataacttgcttggtccttagggctttgaatctgagtctgtaaaatgggtgaaataatatttctctaaacaggtttatcatatgaatcagaagaaattgtagaaggtgcctagccagggtgcttggcacgtagtaagcttgttgagtgaacgttgtgcttgcattgcttggcgttcctccttatgtgagcctgtagtaaacacagttgctgtgtatactaggcaggcctttctctcttctgcaatctctgaggtgcttctgtgccttaatgaaccaaggggtactacacccttgctgtttcagaagactacttcaggaaactagtccaggctgtagtggtgtgcacgctgtagtcccagactcccaagtagctggaattacaggcatgtgccagcacgcccgtcattcattttgtcttttgttagtcgagacaggctgctgtccgtgctgcgtgagccggataccggtgcacgtgcggagttccaggac

SEQ ID NO: 505002 - DNA, 185 bp, Homo sapiens
ggaggaatcttcaccccacttcctctacccccaggttcttctccccacagccagtcccctttcctggatttctaaactgctcaattttgacttaaaggggctattttccattaatcttcctacccatttctgccagctctggcttcttttcaactctctcacaattttgtattgtctctcccaga

SEQ ID NO: 505003 - DNA, 498 bp, Homo sapiens
  misc_feature (47)..(47): n is a, c, g, or t
  misc_feature (75)..(75): n is a, c, g, or t
  misc_feature (448)..(448): n is a, c, g, or t
  misc_feature (460)..(460): n is a, c, g, or t
cgcaagcccgcccgggaactgctgacgcttgatgagaaggaccccgngcgtctgttcgaaggcaacgccctgctncggcggctggtccgcattggggtgctggatgagggcaagatgaagctggattacatcctgggcctgaagatagaggattttcttagagagacgcctgcagacccaggttttcaagctggggttggccaagtccatccaccacgctcgggtgttgatccgccagcgccatatcagggtccgcaagcaggtggtgaacatcccgtccttcattgtccgcctggattcccaaaagcacatcgacttctctttgcgctctccctacgggggtggccgcccgggccgcgttaaaagaaaaaattccaaaaagggccagggtggggctggggctggaaaccacaaggaggaggattaagtccccctgtccctcctgggntggtggattgtntcgttttcctgccaaataaacaggatcagcgctttcca

SEQ ID NO: 505004 - DNA, 436 bp, Homo sapiens
ttgtcacgaggggatagtgaccacaagagataccagagacgcgctgcacagggtcatgcgctgtgatcccaaaatattgtgattacacgtgtgagccgctgtacctgtgcgtgtgcttatttttggtttttcaacgcgcacatatatctggagcattctctttctgagaaggccttaaggactttctatgggatgccagggcacacctatgggtgaactggttgggaaggagcccggaagaacggatctggctgtgccttatagggcttagaagtggtggaaggagccacattagcaaccttggttgtgcttggcgtgggcttggaagcccttagaccaaggctctaacctgtcgcaccttgtgttttaagttccggccagatgtagaaccttcaagctgtgggaacaagcgcgcttctttccttctggatgggtg

SEQ ID NO: 505005 - DNA, 476 bp, Homo sapiens
  misc_feature (216)..(216): n is a, c, g, or t
  misc_feature (450)..(450): n is a, c, g, or t
gtttttgtttaatttatatttgctcactttgcagttacagctaatgctattaatatatgtggttaaaacttttcattaatttgacaaaaaggataataggtaataagaatgttttgtttcgtttaccaagaaaaagaaactacaactgtacaagcagtataaatttaatcaaatatttaaattattgcctcactttaggacagagagaaacattanggcaaagttgtaattgcatatctggcaatatacatagcaatttattggacatgcagtttaataataaatgacactgagattaatctaaaagatatgatactaaatcattgatttgaatcatttaatttgactgtgtcatgattaatggcattagataaatgtttatctaaggtgtatattactttaggtcattctaatatacctagtttgataagaacttttgattaacttatnatttatgtcttttaaaatcaattctg

SEQ ID NO: 505006 - DNA, 118 bp, Homo sapiens
  misc_feature (3)..(3): n is a, c, g, or t
tanagactgggcgtagaattcatgtttcaggagcctaagaccctcccagagccaagggttcaccgcagaccccaagccgttgagcacatcagccaaagcagtggtcaacatcgcggac

SEQ ID NO: 505007 - DNA, 291 bp, Homo sapiens
  misc_feature (58)..(58): n is a, c, g, or t
  misc_feature (64)..(64): n is a, c, g, or t
ccggggggggggggccccccccatttccaaacctggggttaaaggaaaaaaccccccnaaaaantggggcccgggtccacccttttttttttaagcctttttaaaaaaaatcccttaacccgggggcgggccccggggtttaacgccaggtttccctcttgggcctttaaaaccgggtttaacggtaggttttggggggacccccccaagggggggttccttttttcccccccgccccccctaccccctgggttttaaaggaaaaaaaaagggtctccccccttttggtta

SEQ ID NO: 505008 - DNA, 593 bp, Homo sapiens
ctctctctctctctctctctctctctctctcctaattcccccacatacttacaccctcgttaaccctaacaaaaaaaactcatacccccattatgtaaaatacagtgtcgcatccatctatattatgagtctcttccccacaacaatatttgtgtgcctagaccaagaagttattatctcgaagtgacactgagccacaacccaaacaacccatctctccctaagctatcaaaatagactatttctccaatatatatacatcctctttagcatgttgctgtcgttacggtggtccaatcatagaacttctcagtgagtatatataaacacagacccaaatattaatcagttctatcatatatctacttatcttcctaacttaccatactactcttagtgtaccgctaacaatctattccaatgtgctagcagtcgggtgagagggcgttaagattttatatccttgtcgttgctcactcaggttgatgactacgcccgagacagtatgccaacacaggcagcccattcaccgacacttctatacaagcgtatcggagtatagtcggtcttcactcctcgcctgagcgctgata

SEQ ID NO: 505009 - DNA, 213 bp, Homo sapiens
cacgagggctatttacatgcatgggggacaatgctccaaggcagctggtgtgctttatgggcattgcagctctggacagttgtctacgggacctataccaggcttccctcgctgcagtcaaccagcatcttgctccccgtgatggaatctctcaagagggcttgcgcactcagatggtcactgcagtccatgatatttcccatctcattgagc

SEQ ID NO: 505010 - DNA, 387 bp, Homo sapiens
ttctagaggatccctttgccatggctctctaccttgggtctgggtctctcctgggcactggatcagctgggggtacctagggcccaagggctggtgggaccctggggtttgggggagcagagggcacagccacggaacagttcagggaacgccaggcgggatggaaaataaatatgaaaagcattgagtcttgggcagttctgcttcccttggatggaatagggagggtcccggcaggtgagtgcggagggtcagacaggccagcaggtggcaagtactgagccgtggtcagggtgtgcctcctaccatgctggcatcaggcttggctctgcaggctggctcatcgcttctgatgggtgcgggcaacagggtgtcggactgcacaaa

SEQ ID NO: 505011 - DNA, 166 bp, Homo sapiens
atagcagccacgacctttacagctggagatgagcccttcaagcgctacgtgaagagagaagccagcccagaaatgttgccggtgtttcaccgcactactgtgacctgaacaaagacacggtcatttcactgcctgagctgaaaggctgcctgggtgttagcaaaga

SEQ ID NO: 505012 - DNA, 170 bp, Homo sapiens
ctccacaccaacaaccccagggacgacataagtgtcaggttttccagcgtcacatcacggcacaggcattcctgagcctcatccaaggagactccattcctcctgggtaaatttcacagccacgtcttcaaaagtcactgtgccctgaacggggaaccctagcgcggccg

SEQ ID NO: 505013 - DNA, 896 bp, Homo sapiens
  misc_feature (5)..(5): n is a, c, g, or t
  misc_feature (129)..(129): n is a, c, g, or t
  misc_feature (171)..(171): n is a, c, g, or t
  misc_feature (194)..(194): n is a, c, g, or t
  misc_feature (208)..(208): n is a, c, g, or t
  misc_feature (214)..(214): n is a, c, g, or t
  misc_feature (227)..(227): n is a, c, g, or t
  misc_feature (244)..(245): n is a, c, g, or t
  misc_feature (255)..(255): n is a, c, g, or t
  misc_feature (260)..(264): n is a, c, g, or t
  misc_feature (267)..(267): n is a, c, g, or t
  misc_feature (269)..(271): n is a, c, g, or t
  misc_feature (273)..(273): n is a, c, g, or t
  misc_feature (335)..(335): n is a, c, g, or t
  misc_feature (352)..(352): n is a, c, g, or t
  misc_feature (361)..(362): n is a, c, g, or t
  misc_feature (374)..(374): n is a, c, g, or t
  misc_feature (387)..(387): n is a, c, g, or t
  misc_feature (389)..(389): n is a, c, g, or t
  misc_feature (394)..(395): n is a, c, g, or t
  misc_feature (663)..(663): n is a, c, g, or t
  misc_feature (786)..(786): n is a, c, g, or t
  misc_feature (801)..(801): n is a, c, g, or t
  misc_feature (872)..(872): n is a, c, g, or t
tttcnttttttatctgttaagctctcttgataaaaaaggcaaaccaggccagttttaaatttaagaaacagaaacattgtcagtgcttcttgtatcaacacacttcatattcagaactactcccaaaanataacatattatctccttttcaaagatggggaaactgaaacnaggcattatctataatgaccaanccacatagtaagangcacangccagcattaganttcagatcttacttganngtctacagcnccccnnnnnccncnnncntccttccattataaatgtaggtacctggcttactgggagaatgttgtggtgtgaaatgcagntgatgggagaagattanttctttttnnttactcccagtngtagccagatcantnatttnntacatactttccgatactctgctatgtgtattttttaaagtgtgaatacatggtatatcaaaatggatgtatcagtattttaaaaactaaaatctgattttaaaaggaaagcatatagaaaatctggaaaaatactgatataaagaaaattaaagtcatctagaattccattcatccaaaataaacattgttaatatttccatatattcccttaggtcttttttctatcaattttctttttatatagttaagcttataatggtacaanatttttaagggagagttaacaaaggtttaaatagatgacaaaaagggggcttgggtgaccgatagtatttgccaatcaaattattcaacaggttttgaagggggtgtgctaaacttctaaggnggatcctgacgtggnttactggattaccttttttgttgttttatttcacccaagtgcgtgtatgtcatttacctaagtttttatgngtggagtattctttgtaggggagg

SEQ ID NO: 505014 - DNA, 102 bp, Homo sapiens
tcgcgcacacatctcgcgcacacatcctttacttatgtttttagaattacttttacattttcccaactagatggcctagagtccaacattaccttatgagat

SEQ ID NO: 505015 - DNA, 391 bp, Homo sapiens
gtaatgtttaccctgaatgttattatttggccacatttttatattaagtgtgaacacttgttcctgtgagctattcgagttagttgcacacttcgtgcttacttacctcttgcttagtacttcggcatatgatccaagttctagaatatttcatataactagagtttgtcccagtatccttggtagattgttttagatccacacgtgtatagtacaggatcatcgtatctagtggctctcacgtgtatcaaatgtggcacagctccttagcctgaatgtgttccatgacctctatatcttttggagtacatggcaatgattcttgtagattgacacgcattccgcatttgaatagatgattgcttcgccatactaggtatactctactctg

SEQ ID NO: 505016 - DNA, 832 bp, Homo sapiens
tacggtacaatcccagagacctagagtgtgagtacgcgacatcaggtcgttgcctggcggactcgtgatatacatatctgcattgtccgggtaaccttgtaattaactattcctggtagacaccgtatagtaggaggtagggagagatattgtactccgcagttttagcacaagtgcacgggatctgcgatgttgcacatgaagctacgatagaatacagcactgccttcgtgagcttctcccatcaaagtgaccaggagatccactagggcgggtaggaatactcaattggggccatgtggtgcaccatacacatttaaaaacccttcatatatggaaccctgttaatgagctcactaactcagagacccctactaagtgtgggcacaagcaagtgggagattgtgaagaattgggatatgtgacgtttatggaccatagattgactctggattgtggaggaaagttgaacaagcgtatattgtagctttaacagtgaaccacgattggcgttggggtgcacaatgttaataacaacagttctgtgccactaagaaaaatggggtaaaagaggcagtcagggttatctggatgcaggggggcaacaagagcagttaacccagctactagtgtaagcacgggtccccagctggtttaaaaaaattcaaagggaaacaagggtcagagtgctttggggggcgaaaagtggtgtctcctaaccgatgggttaaaagtgggcttacctcctccaaatattaaaagaatctggtgcaaccaataattctacaattggaaacaagggcaacttcattggcaaaagggccccgttggc

SEQ ID NO: 505017 - DNA, 273 bp, Homo sapiens
aacatgtcgaggctgagcatctctagcttcattgcttaccagaaacagaagctatcgtcttcaaagaaaatgcagaacaaggggaggtggacatggagagccacctggaatgccaacgcagagccagctgttcagcatactcttttagagacatagaagattgtcggcagaaacatgccaggcgttggcagcagggttagaacagctgcctgaggttcctcccttaaggataacttgcgctgaaaagccgacaattggaggcctttcttgttc

SEQ ID NO: 505018 - DNA, 1434 bp, Homo sapiens
ccatcacccctccttatttgtaccccctcctttgattaacagcgggggggggcgccccctctttttgcatgagccgcccccctcttccctcctcttcttgtgtgtgtgggccgtcccctctcgcggccggctccttttgttcgcccaacacacccttgtgggggtgggtgttgttgtctacgccctggtctccgcagccccttttcctccagtgttattgtagccgctggtctcctcgtcgctcatcaagttttcgtgttgggggcgcctccgtttgttatgtccccgccacaccacctcctcttgtcgccagccgtaggtgttgtggccgcccccctctcttcttgttttggtgtgggtggggctggcccccccgctagctttgtttgtgtttctcccccccgcggcgtggttccgtctcctctatttttttcccccgcaggggggcgcctctctaatctcgatcagctcgctcaccgccgctgtgtgtccccctccatcataggaggcgcccttctctcgaggtattcgcgcgggggtgtattttcccctctctctcgttttgtgtttcccctctccccgcggaagatgtgttgtgttttgttgtttttctcaccacagagagtattttttctgtgaggcgccccctctgttttgcacaacacgctctgctcgctcctgttttgcgccctactctctctctccccccactatatatagagagggcgcgccccttcttgtgcgcgcccacacatcacgcggctctctctcctcccgccgctctatatctcctctccctctcagagagagtctccccacactctctctctgatacacacacatctctcctgctctgtgtatatctcttcgcgccctctccggcgagagtgtgtctcactctctcctctctcggaggctctccccaccatctgatgttctctatatataggagagcacaccccccgcgcgccttcaccccctctttttatttctctcagcacactctcgcgtgtcttatgtcacacactctctgtttcgtcgcggtgtttctctctatatgttctacaccctctctctccctccgcgcactctctctcgcgagttctcttctggggtgtctctcccttctccaccactttctctccgcgcgcgcgtatatttccggcgccccacacacattttgtgtgccacccccacacaggttctcccccgggtttctcacccgctctcttttgtgggcgtccacacctttctctctccccatttgtgttctatccccccccttatatatttctccctttacacacaccccaacacataccccttgggtcttgaaacccccccccggatttactggccattttgttgagagagagatgggtttgtgaataatattttgtgtatagtattcccctttttttaagggggttttta

SEQ ID NO: 505019 - DNA, 502 bp, Homo sapiens
aactcggccctatttcacggttgatataaaagttcttaattttgtgaagtcaaaatgtctaatctttttaatggttaatggctttttgtgtctcattcacttacattttctactaaaagttttaaagttttgtttctgacatgtaagtctttggtcctctggaatttaatgtttgtatatagagtgaagtaggaatataatttcattttgtttcttatatcaataaccattatttttctattctatttattgaaaagtcctttctttccttactgatctgccatgtcacctacatcacgtatcgaagattaaatttgtagagatttgcttgggagctctctattctgtttcattagtcagtttatcagtgaggaccaaagacttacatgtcaggagtttgagagcaggctggccaacatggtgaaaccccatctctactaaaaataccagaaattagctgggcatcagtggcagacacctgtagtccaagctacttgggaaa

SEQ ID NO: 505020 - DNA, 352 bp, Homo sapiens
ctcaggtagagttgtgtagtgaggggagacagatacggaatctgtgtgatagaatatattatgaggaggggaggctatagggccgtagcacctctttcctcttaagccaccagaagacctttcctggggaagggaaggttggtagttgggcctgtcacttggctgaaatatggagtccactccgcttctccagagtccctcagcagccctccatgtctcggggtctccacacagggaccagctgctgccccgggcttctagccagaattgcccatgccattctctcgattctttctttctctccagctgcttcatgtgagggcttgtcaggccgcgggttggaggccttagg

SEQ ID NO: 505021 - DNA, 590 bp, Homo sapiens
  misc_feature (33)..(33): n is a, c, g, or t
  misc_feature (81)..(81): n is a, c, g, or t
  misc_feature (102)..(102): n is a, c, g, or t
  misc_feature (184)..(184): n is a, c, g, or t
  misc_feature (193)..(193): n is a, c, g, or t
  misc_feature (209)..(209): n is a, c, g, or t
  misc_feature (259)..(259): n is a, c, g, or t
  misc_feature (271)..(273): n is a, c, g, or t
  misc_feature (275)..(276): n is a, c, g, or t
  misc_feature (282)..(283): n is a, c, g, or t
  misc_feature (286)..(286): n is a, c, g, or t
  misc_feature (303)..(303): n is a, c, g, or t
  misc_feature (337)..(337): n is a, c, g, or t
  misc_feature (340)..(342): n is a, c, g, or t
  misc_feature (358)..(358): n is a, c, g, or t
  misc_feature (361)..(366): n is a, c, g, or t
  misc_feature (369)..(370): n is a, c, g, or t
  misc_feature (374)..(374): n is a, c, g, or t
  misc_feature (388)..(388): n is a, c, g, or t
  misc_feature (395)..(397): n is a, c, g, or t
  misc_feature (404)..(405): n is a, c, g, or t
  misc_feature (407)..(407): n is a, c, g, or t
  misc_feature (409)..(409): n is a, c, g, or t
  misc_feature (420)..(421): n is a, c, g, or t
  misc_feature (426)..(426): n is a, c, g, or t
  misc_feature (431)..(431): n is a, c, g, or t
  misc_feature (436)..(436): n is a, c, g, or t
  misc_feature (469)..(469): n is a, c, g, or t
  misc_feature (503)..(503): n is a, c, g, or t
  misc_feature (511)..(511): n is a, c, g, or t
  misc_feature (520)..(520): n is a, c, g, or t
  misc_feature (526)..(526): n is a, c, g, or t
  misc_feature (544)..(544): n is a, c, g, or t
ataaaataaataatacagttaagcaaagcttgngtggctttttaaagtgatctgtggaggggatgtggcaggtagcccctnttcacttgctgtaagatagtnttttagtatttcagccacccttaggcacaactcagccaggcctaggaagcaacccaacgtcattgccatgaaccatttacanaagtaacancaaaatcaactgacanatttttttcctgatggaacagttaaaaaaacaaaaaactattgagttaangtttgggagttnnngnnggtgannttnaaagctcctccacacangtccaactgagcatgctcatcctgtgaggggganccnnncccttcctgtaaaccntgnnnnnnttnnaatntttggtttacaganttttttnnnccatttnntnancctgtttttgnngggtnggggnttttncatcttgtacataaagaaagaaatctgggtatncttgaggttagaaaggctttttgtaagaatagtnttccaganttacaaatnatactnataagagaaaagcaattnttcctcttggggaaaaagaggaaaagaaagaagaaaagagaaaaaa

SEQ ID NO: 505022 - DNA, 122 bp, Homo sapiens
gcggccgcctactactactactactactactactgctcgaattcaagcttctaacgatgtacggggacatggaaataaagcacccagcgctgccctgggcccctgcaaaaaaaaagaaaaaa

SEQ ID NO: 505023 - DNA, 1755 bp, Homo sapiens
  misc_feature (83)..(83): n is a, c, g, or t
gcttgaacccgacaggcagaggttgcagtgagccgagatcgtgccactgcattccagcttgggtgacagaagcgtgactctgntctcaaaaaaaaaaaaaaaaaaaaaagagggagaagaagacacggggttctctccctttgtgttccaccacaggcgtggcatgtcgcaaggggtgtgtggctcatagccctccactgtgtagcccttttaccctcctgtgggccacaagagtgtgaatctccctctctttgcccttttaggctttcctggacagattacctgtgggcacacacagggctattgaaacgcgccatgtgcccgggccctaactttgacattttgtcggtacaagaagtggctcctggccccaagtggatgggcccacagagcctgggggtctctttgtagacaccttttctttaaaaggggaggaacctccccttaaaggggggaaacctccctatcagtgggacccctttttgggacactctcaccaaaacagaggtgtgcggtcgtcgcgacatacttctcaacacgacgtgagttatgaaacaacccactaccccgaccaacacctgtgggacaccgcagacagtacgtagcgcccaatcctgtgggcaaagcaagcggcgcacaccacgcaccgacgctaccacacaactaagccgacaacacgttcgggcgcagcggggcaacagcaggccgtgagaccagcgaccacaaaggaggaaacacccagagcgggcagacgcgcacaaacaacacccaggggacaccccacacggaaagacagcacgacgcgcgacacgtacgacgcaggcccagccacaggtccaacaaccacagcgaacgcacacaaccgggccacgacaacaacgagcacgggaaaaaaagaaccgccgaagcgaacccagaatgcgagcaaagaggccaaaacgagcaaggcgacacagacacaacgcgcgaagcaggacgcgcaagcaagacaatcgccaaaacacaagcacagagcgggacaaacaacgcacacagaagacaaaaacagcaccaacgaacgatccgccgctcgcgaacacagcaacacgcaagaaaaaccaaagaatatctagaggaggcgaaagacctgagggagatcggcggcgtcaccaataggaaggcgcgaccccggtcgacgtacgcccgggactagcacctagagccgcatacggggacacatgcagcaaggatcgacagcacgcgcgaatacagaggagcgggaagggccgtgtgacacagccatagcgtaagacacacctcggacaccgcggacaccaccacaacgccaaaggcggacgcacaaagaaccaccaccagccaacacgacagccacacaccgacaagagcaggaacagacaaacgagagcacaacagcaacagccaaacaacaacgcgcgctaggacgaacgcgccaacgtcgcaagcccgagcctgagcgcagaggccgcgaccgagacagcagacgccacacgacagtgtacctacacacaaccgagccagcaaccgctgagagagaagacacgccaaacacagaggcagagtagagcaagactatcaagcagctcgcgtagaacagagaggacgagaggcaagcatagcagggcagcagcactagacagcgcagagcgcgtcggagacagacgacagcatacgagaaagagaggggaagagagacgcacggaaagtgccaccggcgacagtcagcagagaaaggtt

SEQ ID NO: 505024 - DNA, 1498 bp, Homo sapiens
tgtgggtttgaataaggattaaaaaatggggaagggtgaaggtggcacaacgcaagctcgggtgggacgcgcgagctatcccccaaaatgtctcacaaatgtgtgggcggaggcactttggattggccactattggtgtgctgttttttctaaataagtctattccaaatattatagaaatggctgttggtcaacaggaaatgtcctcttggcacatctctaaaagagccacacccaattttcttctctcacagaggaaatatggcgcccagatctcttctccacaagtcccacacgagggaaaggtggaaagaataaggtctatacgcggttataaaacatatagtgtatacacgtgccaaagaaattatctcatataaaattctctgtgcggactctataaaatagtctctatatataatattgtgagggttatacatattctgagaagatgtagatgtgaacgatctctactgcgaggggagcccccccactattattaccacccctcttatatatatgttgtcgtcttctgcacccacccacaaaattgtttgtggagagaaacgttgcttatatacaaaacagaggcacacattataaggaggagaaacacatcccaacagaggagaagaaagtggtgggtgttctcgagaacgcaggcaacacccacagggggaggaaaatataacccactgtgtattacacacagacgagaaactctgtgaaaaaacccccaggaggtgtaagacaatactacagacgggggtgccgaacaaaccctatcatagacaaaaaagaaagaaaaagagacaaacaaaacaaaacaaaaacaaaagaaaaacgcgagaagggggaaaacaaataataaacgacgagcgaggagggtgagggaaagaaacacaaacgaaggagaacaaacgaacagagagggagcaaacacaggggcacacaacaaagcgataggacagcaagagaagacaacgaacaaacgatcacgaatgagtgaaacacaaagaagaggacaaaaacaaataatcgaagagggaggagaagccacaccaagcaaacaaggaaaacagaagacctaaaaaaaaaaaacaaaagcgacaacaacagcagccggacacaaaacaacgcaagcaaaaaacaccaaacacacgcgacaacacaaacaagagcgcacgagaagaagagaaacacaacaacgacagaagagcacgagagaaaaaagaaagaccagaaaaagaaagacggggacgaacaacacaaccaaaacagtcagacgaacccaacaacacaaccgaggaaagccaaggtcaaacgcaaaccaacacccaaacaaagcagactatcgagccctaaaaaacaaacataaacagaaacgacgcacaacgaaaacataacaacagcacgcacccaaccaaaacaaaaagaacaacacactaacaacaatgaacaagaagagaagaaacgagagaaaagcacacaagacaac

SEQ ID NO: 505025 - DNA, 123 bp, Homo sapiens
ccccatggggggccttttttaccccctgcgaggcccagctttttaggggacttttgcccatgtcatccagctcagctgggagctgcttaggtggaaaaccccaaataaagtgcggctgtccca

SEQ ID NO: 505026 - DNA, 596 bp, Homo sapiens
tggaaagggagtctggctcggtcacccaggcgggagtgcaggggcacgatctcggctcacggcaacctccgcctcccaagttcaagcaattctccggccccagcctccgtgattagcggtgggattacgggcggtgtgccaccagtgcccagctaatttgtgggtgtttttagtagagagggggttttcaccagtgttgggctcaggcgtggctcttgaactccgtgagcggtgggtgatccaccgtgcctcggcctcccagagggtgcggggataacggggcggtgagccaccagtgccgggccgaaaaacccactctcataacagaaggtgcagactcatggctagattcaggtgcccttgaggtggtgccagaggtcctcgggtgttggagacaatccgggtggtgtgccaggaggctccgtgtgcaccggggggctctcagaatcccgtttacccagtctgggagaccatgcctctgggagccccatctcagccagccctggtctctccctcttccctccaggtgaggcaaatttcataggaatcggtacctgaatggtgagctcctgataataaacctcggaggctttgac

SEQ ID NO: 505027 - DNA, 348 bp, Homo sapiens
  misc_feature (28)..(28): n is a, c, g, or t
  misc_feature (70)..(70): n is a, c, g, or t
  misc_feature (85)..(85): n is a, c, g, or t
  misc_feature (168)..(168): n is a, c, g, or t
tgttaaataagaagaaataggtattctnttaaaaataaaaatggcggcaggcgcagtgactcccgccccngatcccagcactttnggaggccgaggcgggcagatcaccctgagtcaggagtttgagaccagcctggccaacatgggtaaacccctgtctctactaanaatacaaaaattagccaggcggggtggcacacgcctgtagtcccagctactcgggaggctgaggccagagaattgcttgaatccgggaggcagaggttgcagtgagccgagatggcgccactgcacttcagcctgggcgacagagggagactctatctcaaatgaataaataagtaaaat

SEQ ID NO: 505028 - DNA, 103 bp, Homo sapiens
tcagggcagcagtgccacgttttccatccgggcctccgtttggctgttgggcatgtttcccacgggtctcccattcatcacccaacagggcaacacatcttcc

SEQ ID NO: 505029 - DNA, 139 bp, Homo sapiens
ggtacagattctgtacaagtgcaactttattttctcatgccttgtggtttctggtgggaatgaaagtcaaggatagggaacagtgtgggctatgcaaagtgtgtcccctgctgtccggctgtcctcacctaatgcatgg

SEQ ID NO: 505030 - DNA, 210 bp, Homo sapiens
tctagaggatccctccccgtacgccaacctgaaccctaatgcccaatacttgtagaggttttgtttgtttgtttactaatgatcgttttgtggggttttttaagggatgagtggatgagagaaataatagagaacagctatcctctgttgagaaggtgagaaaaagtaggatggaaaacttcaaagccttccagtattgggcgtacgggg

SEQ ID NO: 505031 - DNA, 243 bp, Homo sapiens
ctgcaacgtaggatttactgggaggaagaggtgagtgagctgagagcacactactgcactccaaaaaaaaaaaaaaaaaaaaaaaaaagggttgggggttaagaaaggaaactggggggggttttgtggaaaaattggaaaattccgggtggggtgcgggggttcaaacttttagcccaaaaatttgggaaggcaaggccgggggaatcattagggggccgggattttggaaaccggcggggc

SEQ ID NO: 505032 - DNA, 1228 bp, Homo sapiens
ccatggttataaaattgtcaagagttattctgtctgtttaaaaaactaagaaacctcatttaacgcaactagattcttgcttgggttttcttatttaaagaacataatactgtcgcaggcaaggcactgtaaacagttatacattccttccagaagaagccagtggaacgaactttaacatttgggcgctacgatcaagactactgagattagtagacaattaatgatgtctaaagcttaccaacaagaagaaccctcagccagaatcacacacacaatactttgctcaggacatgttgaggtcaaattgaagacggataaccggaaaccgttttgcttgtaagaccccatagaaggcaacgactcacggtaaacgcactcacactagctagcagcgcgacacaggcagagaactggacaactaaaacgtcaatcattatgcacgatgaaatgccttatctccataacgccattcttcacaaggcttgggtccttctctagggctgcgtaccggaatgagatattcacgcatcttcgcaatcacgctttcaatccaaacctggcatgaatcttacgctcatccaatcactctctcacacgcctaccacactctacatcctttctctccctctactgggtagcataatatccatcaactatttggcaccttcattacactcctccgccctcaccccaccacgtcgtttcgccacactcctcctcccggcacactgatcgcccgggagtcgacaactccatacatctccaccaacagacctccacacgcccaatctggtcgcaccctcgcggtctgatcacccccccttgaaaaaccccacagcttgccacaaacccacagcttaactaccttgatcggacacagcactgtagcacccccttatcgatcaccacccctatcacaaccgactaaacatccaccccgctgcacgggacaacaacatcccgacctcggacgcacacaccgcgccacacctacacacgcaccacacctccctgagcaagacacagcccaacttcagcaccacgccaaccggccaacagcaaccaccgcaactcacgccagccacgccaccgaccgcacaccaccccgcgcaaaaaccgcccctgccgaccgggacgagaacagtggcgtgccacacgccatcgtagcacttccacacccaccgatcaatcaccaccaacgctcaaacacccgccaccaacacgc

SEQ ID NO: 505033 - DNA, 407 bp, Homo sapiens
  misc_feature (37)..(37): n is a, c, g, or t
  misc_feature (153)..(154): n is a, c, g, or t
  misc_feature (167)..(169): n is a, c, g, or t
  misc_feature (295)..(295): n is a, c, g, or t
  misc_feature (314)..(314): n is a, c, g, or t
atggttccgatgccaagcttgggatggggtcttccanatgcactgaaacatgatctgtgctcatggatcagactctacccacacaccaaacatgatggatgagacatgacatggcatggcatgcattttcttgacacccatgggatgtgggannaaaccacatgaannncaaaacatgcaatgtctggtgcttgtggcctgcctgtgcttccatgggctgcccatggacatgtggtgcgggctgagtgtgttgggttgtgttgtgggatggggcctgctgggccatggtgcctcnctgcttctgggactctccntctgtttcttgtgcttggcgctgtggactgccttgtggaactatgatggtgggcatgcctctggcgaatgcccaaccccgtctgggttggagc

SEQ ID NO: 505034 - DNA, 184 bp, Homo sapiens
gcagctcggtaccgtcatacgttcgcatgcaacatcagcacttaaataatgcaaattgcaacatttctccctctggggctttaaaattcgttgcccttatcattatggggtgaaggagacatttctgtcctttgcttcccacagtcccaacgcagtctgtgtataattcctgtgatccatcgag

SEQ ID NO: 505035 - DNA, 429 bp, Homo sapiens
  misc_feature (426)..(426): n is a, c, g, or t
tatttttttaatagcagagatggggtttcgctgtgttggccaggatggtttcaaactcctgacctcaagtgatccatctgcccttggctccaaagtgctgggattacaagcatgagccaccacgcccagcccactaatgctatttttacatccatacaacacagcttatcgaagtgcataacttttgctatcactttctattcacgatatttaagacataatatgtgtgtgtgtatttatgatgctgtcactgtctctgtaatcctagatcagaagtacttagtcacatgaggattgggtacagttgtgttttcattcatcctctattcttaatctctctttgtggatttttgagaccataaccactatataattcttttaaaagggctggggaggggtgtggacagcactgccaattgtgggggncca

SEQ ID NO: 505036 - DNA, 228 bp, Homo sapiens
cgcgaccgaattaaaaaataaattcatcgccacgaaaaattatgagcccgccgatttaaatgaactgctcgattttgcgcgccaaatgtatttgcgcggcgaaatcacgatttcccaataccgcgatattactcgtgaactcgaattagcaggggcttacaaaccagaacaaaaaaacgaatatgtagggctataatcgggagggtgctcccgtttttttatgtatga

SEQ ID NO: 505037 - DNA, 864 bp, Homo sapiens
aaatcctcgtaccatagaagctgccatcaagtatttcctcacgcgaaggcaactcggctatccagtaagtccttcttaaagtagactatcgcgtcttcgaactaagagtatctgctccggacacatgataccataaggaatgatgagccaatcgaatatcatcattaattaatcatagagtggctatgaggcgaataaaactgaggaatagcccccgtgtatgcactatacgtgagtcccagaggttacccaaggcacgccctgtgacatccggcctgcttcttctcacatgacaaaaactagcccccatctcaatcatataccaaatctctccctgcactaaacgtaagccttctcctcactctctcaatcttatccatcatagcaggcagttgaggtggattaaaccaagacccagctacgcaaaatcttagcatactcctcaattacccacataggatgaataatagcagttctaccgtacaacgctaacataaccattcttaatttaactatgttatattatcctaactagctaccggattcctactactcaaattaaactccaggcacaggaaccctactactaatctcgcacctgaaacaagctaacatgactaacacccttaattccatccagcctcctctccctaggaggcctgccccggtaaacggctttttgcccaaagtgggccatttatcgaagaatccacaaaaaaaatagcctcattcatccccaccatcatggcaccatcagcctcctttaaactctaattctaaccatagcgtaatctagtcagctcaattcacggttaatcccatattaacaacgtaaaattaaatgaagtttgacattcaagacca

SEQ ID NO: 505038 - DNA, 457 bp, Homo sapiens
  misc_feature (379)..(379): n is a, c, g, or t
  misc_feature (404)..(404): n is a, c, g, or t
  misc_feature (427)..(427): n is a, c, g, or t
  misc_feature (437)..(437): n is a, c, g, or t
gcgcttggccatgaagttctttattaggtgattgtattagtccattttcatgctgctgatgaagacatacccaagactgggcaatttatacaggaaaaaggatttaatggactcacagttccacgtgctggggaggcctcacaatcatttcgaaaggtgaaaggcacatctcacatggcagcaggcaaagagagagagcttgtgcagaggaactcccccttataaaaccatcagatctcatgataattattcattatcacgagaacagcacaggaaagacctgccgccatggattcagttacctcccactgggtccctctcacaacacatggggaattcaagatgaggtttggggcggggacacagttcaagccatatncagtggatttaaatgttttagggantgtttagggtgtttctttgatgnattcattccnttttatttattttggaggag

SEQ ID NO: 505039 - DNA, 685 bp, Homo sapiens
gcattccgatgtgattgatagtcaggaacttatccaaagtacagaccgtgaattaccacagccatgaatttcacagccatgaagatatgctggcttgtagaccccgcaaagtcaaggcaagaagataaaccaccttgcacaattatcgtattctctcatgcaattcagcatagctgccatcctctctgcagcgtcaacttaaaccaggcagcacaaacacatcacacagtctctctctacctctatcgcgattatcagactcaagacagcaccaccaactgcgtatctcaatagcgacaaactgcaacagaagaaaccactgcaaaatgccttccttatactccagctcttcatactgagctctggcacattagttagtcatcctcatttaccgccagctacctggccaaacattaaccgttcacatgatggctactaggcactaaataaaaacaactacaagattcatgcaggagcctttcccactgcggcgaacactcacccatcgctccagacacccatcacacacaagccaatatcccagccggcccctaattcggtccgtctacatcgactgcgcaaatagccactaacttcacgcacccgcaacacaataggcaaaaaacctaactaacacctgagccaactcacacgtcaccatgcaactagcatagaccacaatcta

SEQ ID NO: 505040 - DNA, 131 bp, Homo sapiens
atgaggaattcacttcaggtgggcctgccagcactgttgcacacattcacaccagtggtggtgttagcgtgggtgcagagcgctggtgggcacaatgactatatccatctggttattttttggtagttttt

SEQ ID NO: 505041 - DNA, 172 bp, Homo sapiens
tgcatatatcaatagtttgttcctttttgtcacttagtggtattccattgtatggatgtaccatccatccagtttgtttattaacctgttgaaggacattaggagttgttcccagtttttggctattacaaatattacagtaaacctaagatatgaatatttatgtataggg

SEQ ID NO: 505042 - DNA, 421 bp, Homo sapiens
  misc_feature (5)..(5): n is a, c, g, or t
  misc_feature (370)..(370): n is a, c, g, or t
  misc_feature (393)..(393): n is a, c, g, or t
agaanaattcattgcaaaattcattgcagaagaattcatcacctaggcacatagtcatcagattatctgaagtcaagatgaaggaaaaatcttaagagctatgaggcaaaaatatcaggtaacctataaaggaaaacctatcagattaacagaagatttctcaacagaaaccctacaagccagaagagattgattagggtcctatctttagtctccttaaacaaaacaattatcagccaagaattttgtgtccagtgaaactaagcctcataaatgaagggaatgatacagtcttttacagggcaaacaaatgctgaggggattcgccactaccaggccaggcactttaaggaactggcttaaagggagntcttaggtctttggaaaaaattntttcggaaatacacccaaattagggacc

SEQ ID NO: 505043 - DNA, 163 bp, Homo sapiens
atccccctatacagcagtagcagcagtagctatgacaggtggcagaagtctttattaggaaacaacagcttagcaggagaggagagccagagaagtgacagggaagctacgaggttacaacattatttgtgacctcagccaagcacagtggtggcagggccta

SEQ ID NO: 505044 - DNA, 250 bp, Homo sapiens
gttcagaccagctcctgctttaccatagcctcacttgtctcaggaggccaccgtggtaattctctctcgcatcttacaacaccctaacatttttttaacacaattgactagttttgatcacaataaaggatgatcatagatattattttttcttatgacagaagcaaatgatgtgatttatagaaaaacagggaaatacaggtacccaaagagtacatcaacatctgtatacccccttcccaggggtaac

SEQ ID NO: 505045 - DNA, 237 bp, Homo sapiens
  misc_feature (69)..(69): n is a, c, g, or t
  misc_feature (87)..(87): n is a, c, g, or t
  misc_feature (113)..(113): n is a, c, g, or t
  misc_feature (120)..(120): n is a, c, g, or t
  misc_feature (124)..(124): n is a, c, g, or t
  misc_feature (130)..(131): n is a, c, g, or t
  misc_feature (145)..(145): n is a, c, g, or t
  misc_feature (185)..(185): n is a, c, g, or t
  misc_feature (189)..(189): n is a, c, g, or t
ttgtatattttattacaaataaaacaatattgcttgacagcatcatctgtcatcttacagatatacaanctacacagtcctaaagtnatagtatgtctctagaactgagcttntctaaanacanacaatnnctatactattattnagtcctgcaccctaatctatacagcagcttatcaatgtgnaatnaatatgaatatattacataaatactatacattaagatatttcaatgtg

SEQ ID NO: 505046 - DNA, 1141 bp, Homo sapiens
ttttctcttctttctttttcgtctcttttttccctcgctcctttctctttttttgctccgtgccctctctttctctccccgttgtctggcttccgttttttttgtgtcgcttcttcagcttccgcgctttcgcctccctcctctgtggtgtgtgctgctgtttctttgtgtctcctctcttctctcctcctcccttctccgctgttctcttcgccctcttgctttatccttccctctttgttttctgcggcttctttttttttctgtttgtcttcgttctccccttgtttgtgtctccgttcgttcgccccgtaccttcttgttttcctccctcgtcttaatatccgttccctgtgcctggtggttctcttcccttcttttttttcgtgtctctttggtttgtttcggtgctccgtcttctcgttttttttctggtcttgtttttttttttctccttccttttgtttgttttttctcttttcttctagttctgtttgtcttctgcgtttgttttctttgtttggttgttccccgtgtgtttcctctgtcttcttcttttttcctttctgtctttttcttttgtggctcctctttttctcttctgtttcttcctgtgtcgtgtctgcctcttctctttgtcgttttcgcgctcttggattctctgggtctttgttcgtctgtctctggttcctggcctttgtctattgtcatgttttgctgtcctgcgcattgtcttttcatgcaatttttctgggtgcaatctggattggacaagaccatgcaacggtttccagtgagcacgcagccaattgtcttgcagcctcatcagctgcggcccgaggacagtggtcttgccacagctcttgaggatgtcaccacattgaaccagaaatccagttattgttccacacctcataagagtgatcagcgcatggaccaggcacgggtgcttctagggggctcgtacggggggacagctccactctgactggcacagtctctcgcatggagatctcgacgcgagggatgggctatgaggttggtgaggcttaggtgcgtgtttaccgcgcatagtcaggacatcagtacgattataggtggtgccggacctttactttataaccacagacgagatacaggg

SEQ ID NO: 505047 - DNA, 293 bp, Homo sapiens
gccttaggccagcaggtcagtggtaatcaaaactctgctagagccagaacgaaactccctacataatcacgtactcgtacctttaggtccatatactaccatgcataggcggatacagtagaaatctacgagcatagcatactatactacggtgagccagtaccacctatacctaccgggtgtaagatagaacgatagactagcctagggtagataggtacagggtaatcataacacagtacacataagtagtgtactgagctataccatctacctactacgtatccaccata

SEQ ID NO: 505048 - DNA, 384 bp, Homo sapiens
  misc_feature (110)..(110): n is a, c, g, or t
  misc_feature (133)..(133): n is a, c, g, or t
  misc_feature (190)..(190): n is a, c, g, or t
  misc_feature (214)..(214): n is a, c, g, or t
  misc_feature (266)..(266): n is a, c, g, or t
  misc_feature (278)..(278): n is a, c, g, or t
  misc_feature (297)..(297): n is a, c, g, or t
  misc_feature (306)..(306): n is a, c, g, or t
  misc_feature (352)..(352): n is a, c, g, or t
ttgtggataaggggccgggtgcagtggctcacacctgtaatcccagcattttgggaggccaaggtgagtggatcacctgaggtcagaagtttgagaccagcctgaccaanatggtgaaatgaaaccccatttnaactaaaaatataaaaattagccaggcgtggtggtgcatgcctgtagtcccggttantcgggaggctgagacaggagaatngcttgaacccaggagatggagattgcagtaggccaagatgatgccactgcantccagcctgggntacagagcgagacacggtntcaaaaaantaatgtgtggctaaggagttacctgggggaagtagaatgagaggtntgttgggaataaaggttttttttagattttgg

SEQ ID NO: 505049 - DNA, 221 bp, Homo sapiens
cactgatagccacgagccgtcatcgacggatccaaacgcgacgtcgctatgaacgctatggccagacacaagccagtatatccctgatggatacactatatctagacacctacctgataaaaaccacaaaaggtcagaacggagcgtgagagccccgactttcacgagtctgtattgcgtacatgaaaatcaagatcaacgcgagcattttgcaccttctg

SEQ ID NO: 505050 - DNA, 351 bp, Homo sapiens
aggattctgcacgagagcacatgtcagtaccgcagcctctagtacacacgccacaagggcctgtatgtggggcttcccgaggagaggctcttcggaaacacggacctgttgtccccttctgggacatggcagcctgattatacagggggagactgctgcaacgcgcggagcacaaagacacacgggcggctctatctatagaacaagatccacacactggagctgcttgaggagagacataaccggttcttagacactggagttaccaataagacgcttgcggcagagatgcaagagctgcgagtcccgcttgccgaggcccaggagacacgccggaccgcggagcgaccg

SEQ ID NO: 505051 - DNA, 169 bp, Homo sapiens
  misc_feature (52)..(52): n is a, c, g, or t
  misc_feature (62)..(63): n is a, c, g, or t
  misc_feature (114)..(114): n is a, c, g, or t
  misc_feature (147)..(147): n is a, c, g, or t
gcgaccggcgctcagtggaattccgttttttttttttgaaagtgttttttantttattaaanntaaaggcccaaatgaggatgtctccctgggggaggggggatttagggacantgagggggagggagaaaagggaaacacctgggnaagagaattcacaccacaggag

SEQ ID NO: 505052 - DNA, 249 bp, Homo sapiens
  misc_feature (5)..(5): n is a, c, g, or t
  misc_feature (17)..(17): n is a, c, g, or t
  misc_feature (183)..(183): n is a, c, g, or t
ctggntttggatggatncttccagcagagagtcacatgtcacggctaacatcaacgacaacatacaaacatttggctatattatgcatcaactcacggtttaatacatacatctgattattattctagtagagaacatacaaatcagcctcttcaacatattatatacagtttaataagcctnttgcaagttacttgttctctcacctgaggtattttaatcctccccacctagacccctgttcactac

SEQ ID NO: 505053 - DNA, 806 bp, Homo sapiens
  misc_feature (107)..(107): n is a, c, g, or t
  misc_feature (213)..(213): n is a, c, g, or t
  misc_feature (225)..(225): n is a, c, g, or t
  misc_feature (298)..(298): n is a, c, g, or t
  misc_feature (341)..(341): n is a, c, g, or t
  misc_feature (357)..(357): n is a, c, g, or t
  misc_feature (415)..(415): n is a, c, g, or t
  misc_feature (718)..(718): n is a, c, g, or t
  misc_feature (722)..(722): n is a, c, g, or t
ggacagacgaagagtttaaagagaaaagggaaaaaagaagagaaaaagtaagcagggctggcttcgcccgcgttctcgtcgtcggatcaaggagcgcggcggcgttntggacccgcgctcccatcccccaccttcccgggccggggacccactctgcccagccggagggacgcggaggaggaagagggtagacaggggcgacctgtgattgtngttattgatgtngttgttgatggcaaaaaaaaaaaaagcgacttcgagttggctccccttggctgtgaagagaccccctcccccnttccaacgagcttccgggactgtgtctggcacccccagcaagnaaggcgagtaagtttnctagagacttgaaggagtctcccccttcctgcatcaccacctgggttacggcataatntggcttctgggtcaagaaaggaggggagaacccagcgcacccctccccccctttttttaaacgcgtgatgaagacagaaggctccggggtgacgaattgggccgatggcagatgtttggggggaacgccgggactgagaagactccacgcaggcgaaatccccgttgggggcatatataacctccctctttccccatggccccctcggcagccggaggaggagcatgtgaggggaggaggccagccagcggtgaccggcgctaggaaatgacccgaagaaccccgttggaagccagcaccggnacanagggccggggcggagcaggacaccaactgacgggggtcagggcaactgaactggattcgaccttggggaactgaggacgcgacg

SEQ ID NO: 505054 - DNA, 257 bp, Homo sapiens
agggatgttcatagggcttgtagaagattatttctgggtatgtctgtgagggtgtttccagaagagattagcattttaattggtagactgagtacagaagattgcgcttaccaatgtgcgtgggcaccattcaatctattaagggcctgaatagaaagaaaatgtggtaggagggtgaattttgccctctgtttgagttgagctggcacattgatcttctcctgtgcttaacattagcactcctggtttggactaga

SEQ ID NO: 505055 - DNA, 920 bp, Homo sapiens
cggcgactccaagctggagaatgctggaggagaccttaaggatggccaccaccactatgaaggagctgttgtcattctggatgctggtgctcagtacgggaaagtcatagaccgaagagtgagggaactgttcgtgcagtctgaaattttccccttggaaacaccagcatttgctataaaggaacaaggattccgtgctattatcatctctggaggacctaattctgtgtatgctgaagatgctccctggtttgatccagcaatattcactattggcaagcctgttcttggaatttgctatggtatgcagatgatgaataaggtatttggaggtactgtgcacaaaaaaagtgtcagagaagatggagttttcaacattagtgtggataatacatgttcattattcaggggccttcagaaggaagaagttgttttgcttacacatggagatagtgtagacaaagtagctgatggattcaaggttgtggcacgttctggaaacatagtagcaggcatagcaaatgaatctaaaaagttatatggagcacagttccaccctgaagttggccttacagaaaatggaaaagtgatactgaagaatttcctttatgatatagctggatgcagtggaaccttcaccgtgcagaacagagaacttgagtgtattcgagagatcaaagagagagtaggcacgtcaaaagttttggttttactcagtggtggagtagactcaacagtttgtacagctttgctaaatcgtgctttgaaccaagaacaagtcattgctgtgcacattgataatggctttatgagaaaacgagaaagccagtctgttgaagaggccctcagcttggaattcagtcagtgattgctgctcatcttcctcatggacacaccctccatttcaggtgaggtggccc

SEQ ID NO: 505056 - DNA, 194 bp, Homo sapiens
cagcaaattgtctattccctacgtcagcgcttccctccaccgctagtagctatctcaagattcatttgggtctcaggcatccccagccccctcaatgagctccagtatgggagggctatgaagatttgaccctgagccttccgtcgagatcctccagtcttgcgcagatctatcttgcgttcagattatatata

SEQ ID NO: 505057 - DNA, 949 bp, Homo sapiens
cggcgactccaagctggagaatgctggaggagaccttaaggatggccaccaccactatgaaggagctgttgtcattctggatgctggtgctcagtacgggaaagtcatagaccgaagagtgagggaactgttcgtgcagtctgaaattttccccttggaaacaccagcatttgctataaaggaacaaggattccgtgctattatcatctctggaggacctaattctgtgtatgctgaagatgctccctggtttgatccagcaatattcactattggcaagcctgttcttggaatttgctatggtatgcagatgatgaataaggtatttggaggtactgtgcacaaaaaaagtgtcagagaagatggagttttcaacattagtgtggataatacatgttcattattcaggggccttcagaaggaagaagttgttttgcttacacatggagatagtgtagacaaagtagctgatggattcaaggttgtggcacgttctggaaacatagtagcaggcatagcaaatgaatctaaaaagttatatggagcacagttccaccctgaagttggccttacagaaaatggaaaagtgatactgaagaatttcctttatgatatagctggatgcagtggaaccttcaccgtgcagaacagagaacttgagtgtattcgagagatcaaagagagagtaggcacgtcaaaagttttggttttactcagtggtggagtagactcaacagtttgtacagctttgctaaatcgtgctttgaaccaagaacaagtcattgctgtgcacattgataatggctttatgagaaaacgagaaagccagtctgttgaagaggccctcaaaaagcttggaattcaggtcaaagtgataaatgctgctcattctttctacaatggaacaacaaccctaccaatatcagatgaagatagaaccccacggaaa

SEQ ID NO: 505058 - DNA, 317 bp, Homo sapiens
  misc_feature (253)..(253): n is a, c, g, or t
gcttctcaccgctcagaactacatctgccacggctattccacaccttgtctttctggtagaagtcaaaattccatttcctctagcagaaaaccacaggagtggtttccttgtagcactatggtgctgtggggtgcacaatatcagttatggtcaacagatccccctttttttcccacttggtactgaaaaccaaggactacttcagtacacccctttattacacctctaactgtggatagaacgcactacggnaacttacttcttctgtacctggacaaaaaaaccattaaacctgactcttgacgaacaaaaaaca

SEQ ID NO: 505059 - DNA, 202 bp, Homo sapiens
cacgaggagctcctattatgtataaggaagaatgactatcagcattctacaagggggttgctcctctctggatgagacagataacatacaccatgatgaaattctcctgctttgaacgtactgttgaagcactgtaaaaatttgtggttctcaacacccgcagtgaatgttcacagccagaacagctggctgtaacatttgt

SEQ ID NO: 505060 - DNA, 1120 bp, Homo sapiens
ggtggatctctgcgttgtgttctgtttatttcttttctcgctcgggggtgcggtgtggttaggatggtttgcttttttcttctcatagatagtattgttctgcgtgtagtttgttggttgtatgtaaattagtagatcttcccctcgcttcccgtatgtgtgtgtgcaaccacttactcttgtctccgctgctggtatgattctctggctttcttgatcacttgtcgttgttggttctctcccttttcatctccgctccctcgtcgttgtagattcgacgttgttttttcttgtctcagttgtcgtggtggtgtgtgtgactacctactactgttgtcttttgctctttgttctttgtatataagtgacgctccctctgtgcttgggcactgactcttgtttggtttgtctctccgctacactgttctctccatggttgggtgtcgctccgtgggtgataatactcatctctcgctacccactgtgttgttgtgtggtggtatcatactattaggtgcgcgctccgctctcagtgggggccgcgcgcgtaggttccttcctttctgtactcttcggtcggtggctctcggtgattgtatgaccgctttcgtagcgagattgtggtcgattctcacatttagattttcctatctgtgagtcacacataaatatcgttgtttcgctgtgagacacacatctcttttgcgtgatcctgcgtagaggagtgattaattctgtgtgggagacacacacatacagtcttctattgttggtgagaagaaggagtgaacacatctcacacacaccaccaccaccccctgggtctgcacaccccgcttgttcacgttttagagaggccccccagaagcgcctcttctttgccctcttgtccttctatctttggcctcttggccccacggggcccccggggaccctctcgtgcccctcgttggttagagggtgcgtaagataagaatttcgtacttctctagggccctctttgtcccccccatgcccatataccccctttatgtgtgtggttttatatttttttgtggggggagaaaaaaaataaaacggtttttttaaattttatttaaaaaaaaaaataaaagggcga

SEQ ID NO: 505061 - DNA, 1507 bp, Homo sapiens
atgtctgaatgcgactcttcccaaactgtcgtcatttaccagaatcaggcatttcgcttataccatgtatagagactcagacgtcctatgaacctatgcagggggacgagatgttttactgggagagctatagtaagaattacccatttcgtgtcattgtatctcagtggccacgggacacagtacacgacgtagtcttaccgtggtactccagtgatacttgttacaacgtgactgatcgtagaagtcattgctacataggttcgctgtgaaggcctgtgcatggatgctgtcctagccggttctactcgtgaagacactacaactgtttactacaactccttgttgtgtctcgactattcgactagataactataaggtgatgctgaactgtctgcccctcgggagccacacaccatgagaaaacatgagaccggtgagcgacgcggtatacacgcaggagggaagcaactcccctagctacacggggacccacttgaaaaggttaatcaattgacgaagacccacttcaccgggttaatccacgtggcagacaacgcgccggttcgagaggcactctcggaaaccagagggagcgatgcagcgtaacttttggcaaacggcccaaggcctaacgaggccagttcaacaggttccccagacttttccaagtcaggaaccgagatgctggcacgacaataaagccgggaagccaagctcctttgttgcacacttagtggcgcagttgcggcagcatccgtcccaactcccacatccaaaccaggaaacggggaacgtttgggccacgtggaactttggaggcccacaaagctccaggacgcgccgggagccatttttggccaagacccttcgaacagtggagcgcggaaccaggaacaccagggaaccaccgggcacggcgatctcgtttgattaccgagcgtggtagttggtaaacaccacagaaaagacaggggaccacaaatatatcatctagtacacgctaactagtttagctcacaccaacatttactgtcagctctactaaccctgtagcaggacactcttaggcaccgctgcacacgcgacaccaacactattatctttaatacaagcagagaagtagcacttagtagataactaacacaaatacctacagacagccactaatccaccacctaaaatagtaaagcaacacccagcaactcatcaacaatctctcatatttatccacccactcacagttaattacaactataactataactacatacaggacaataccacaaatactaatcttacaaataactaacatcaatcacacaaacaaaataactacacagtagacaccatatcaaaataactacacgcacaaaaagcatacccaaatacacacacatcagctctaacacaccaatacaacctcataatctcacaatcacaacgactcaacaaaacacagatactagacacacagaacacacaacttacccaaacaaacacataa

SEQ ID NO: 505062 - DNA, 115 bp, Homo sapiens
gggcgacgggcgtaagggaccgtagggaccgagtgctacccatgagcgcacgtgggccgggcggtccgcaagcaccggcttgagagcatcagccatggggcagggcgggctgcaa

SEQ ID NO: 505063 - DNA, 237 bp, Homo sapiens
ggcccccccccctttagattttcccctttggggaaaacccggttccccctggggattccggaaagacccgcctttttttttttggcccggctttgtttttaaagcaggggaatcccgggcccttttaaaagttgttggggggtttttttttaaaaggccccggtttttggaaaggagaattttgggggccaagggttgttttttttttggacaaaaaaaaaaccccttttaaaagga

SEQ ID NO: 505064 - DNA, 488 bp, Homo sapiens
  misc_feature (133)..(133): n is a, c, g, or t
  misc_feature (158)..(158): n is a, c, g, or t
cgttccaaaccaaaccccttattaaaatggttgaagaagccagagcaaaatccttctggtgccaaagaaaaagatcaagataagaacattgaggtggtgtattccaaggctgccagtgtccccaaagttgagnctgtaaagtcagacaacaaggatgncgccatcgatattgatgccatttaaagggatggatgccacctagcttaacagtataatgctgcaaattttcctccattatcagccagaagtgcaacatgtatgtgcaaaagctaaaatggcttaacatcatgctcccctttaccctaaaaatctattactgtgagtggtctgttattaagcccaatgagacatctagggagtccatacccatcagtgagcagatgtagtttgcttatttatagcatgtttctttttgaaaaactagtggtggccccatttggatcccctttatccagttataaaaataaaggtttgattttggtcgttta

SEQ ID NO: 505065 - DNA, 84 bp, Homo sapiens
aaacaaaagtttttttttagcattttgaaaaaaggaaagtaaaatgtccaagtttaataaaaaggggccttcccctttagaata

SEQ ID NO: 505066 - DNA, 609 bp, Homo sapiens
attgctagatacccaaatggagaccattctgtgtgtgattatgcactgagactgtaactggtaagacttgtatctccctccccctgaaggagaattgctggctcaattttcaggagccctgcccttcctcacctgtggatggtgggttgtggaaacccggtcaggtaatgatagtggcaggaggccagtccaaatgccccaggccagataggggtgggtacctggtgaaacacccacccttataagctgagagaccagtccccggcgtaaatcctcatactgaattgagaaccctgtcttccccaattggtgtgctttcctccgattgatccccaccctctcacctattttacgtgatacctcgccctttcctaattggtttttacactgctgtgcccacctctttgagtggtgcccttgcataacttaccaatcagtccacgtgtattcccctatttctgagccccataaaagaccccgactcagctgccgatgaggagagaaatcaccctgctgtgggggttggggaccactccctgcatcccctctcccctgagagctgttcttttgctccataaaattcttttctacccatcctcaccccttcca

SEQ ID NO: 505067 - DNA, 359 bp, Homo sapiens
  misc_feature (332)..(332): n is a, c, g, or t
caaacacactgtagtagccacaggtgatcttttttaaaaaataaatcattttatgttgctcctatactttagcactggttactgtgcaaaccttcatgataaaatcctaatttctgagcatggtatgcaaaactcttcataatacagactgattacctcctaaccatctttcaccagtcagtccctcatttcctcctaactatgtgctctcgccacactgaattgtttcctgttccctatgtaagccataaatccttgcctctaaaccagcagtatccaatagaatgttctgtgataatagaaataatcacttatctgcattatccattatnagaactgctagctacatcacatacatg

SEQ ID NO: 505068 - DNA, 1244 bp, Homo sapiens
tttcagaggacacattagaactcacacggtgggaaaacgcctttttcttgcactcagctgtcaacagagcatttgcaatgacagggtcaaatctgacgggctcatcttgcagacccattctgatgtaagagaacattaccagtgcaaagaactgtctccaaaaccttctccagaatgtctctcctgcacaaaacatggaggaatctgggctgctgtgtaccacacctgtagtgacgcaatcgaatgtcttactcgaaacagatatgcattacttcgactccggaagccaaactgacgaattaaagtccaaagggcatatactatccgtgtgcatgacctaacgcacaattaagtactgtaataagacaatccacagcaccattattggcaacaagctacgaccagactacaagcagcaatctccaaaccagggacgcacgaatgcagctggccacacgatgccattggaacatcacatgttgttataactgattaactcctatccccactcggtagaagttttaagaattgcacctattatactgtggctggattgggcatagcattccgccgcaccactctcacaaagcaccagtacaccacattattcatcttatcacacaccgacttaacacccttgcaacaccacgccaccaactttggccaacttccttactcaccttacccataaatcaccatcaccatttgcacacaacatactctttagcactttcgggcttgccgccacacactttcacttcctccccaaaccctttcgcaacaacgaggcaacccaccgttaacattgggcactgacctggcacccaacaccgcgaaccgactcccatgtgactacaacgctccacacgcacaatctttgctcccccatcatttatggcacccgccgcgcaccagcactcctcgtggcgcccaagaatccactgccacggacaaccatcacacacaggcgcctgtgccccccctctacttcacaacaaacacaaagcggtatcatcttctccccaaaaaacgagctttatctaaccacagctctaccacacacatttgctagacaccgaccggttgcttttcatacgcgccagtatgcttaggatctccacttatagactagataaaatctgtgacacacccaccaaagcaattcggatcgatctgtcgttgtgataaacaaacagaataatcataacacagacccgcgaccacacgcctatattgctttagtc

SEQ ID NO: 505069 - DNA, 472 bp, Homo sapiens
atcacagtcgaaacttatttcatgcacaaaattcaaacagtgtataaaattacctgcaagctacgtgtatgaggtgtgcgtgaaaaataaatgagttttgtgtttagactcacggtcacgtcccaagctgtctcatatatgtatatagcacatatgtccaacactactgaaaacaaaatccaacaatccgacaacatttcgtggccttcacgcattttcggatactgggatacccaagcctgtacggagatacttggccatgatatacgtgggagccaactggatgtatacctacagaatctgcctaaacctcgaccgtgcttcccaatgtcatgggtcaccagtcgtcacgccgcaccgccggttcaaatgcaggcgattcctgaggaagccatacctgaggagagtggcgatgaggacgaagacgaccctgacaggagcatctcgatctgctcctctgaaaaacgcattg

SEQ ID NO: 505070 - DNA, 319 bp, Homo sapiens
acacgctactcaactctgtcaatcctgtccgtgtccgggccgggtgaggtttcccgtggttggcgcatgtgcaagacaggttcctaaacgcttctttactcggacacgtctctcctacttctacaagtcctgctgtggcttacacacttacctgacgctttgtactacttggttactctacggacactgcctcttagggacctgacgctacacgttagttgccaatggctacactaccccccaacgcctgacttaaacacatttacggctgcctagacacacaacacaaccccccaccaaaacggacttccacgcacat

SEQ ID NO: 505071 - DNA, 702 bp, Homo sapiens
  misc_feature (207)..(207): n is a, c, g, or t
ggagtgctgggccggcccttccgagttgtgtcttgctggagcagtcccagggccaggggaaacaagttccaacgaaaaaggacattcttcacccagtcagctcctgtccatattcagccgagatgtgttgtatgtattttacctatgtcatttcttccatcagcagtatgtgcaatgaagcactaattcttgagtattgggatacantcaatgaacgaagagaccactgtctataacccgtcaggatgtacgagaaggaaaacaagatcagcgaagaagatactgcccgcttacccccgcttaacagaggagaccacagattgcccttgtgaacaccctaccagtttggctgacaccgtggggctcaagataagtcctctctggccctagttgcatttctttgaatgaaacagctctaatgagagctctcttcagagtttatatgttctcgacacttgttcctagccagtggcaatgaataaatcaacctatactaattgaacaattagctgtgggcaaaccacagtatgaaacactcctgggcaccatggagggattccagaaaggcttggtccttgtctccctaaagcctggaatagacttgccacaattacctgatggtggaatgccgggccgattacaggtgaacctggactcctggggttcaggaaacctccaacgtccacttaagttactggctcc

SEQ ID NO: 505072 - DNA, 756 bp, Homo sapiens
atgctggttagataattattggactacacataaactcctaatattgaatcattacctatcaggtattatctttatggaacttttcaatatcttgctttataaagattctaaacatgtatctgagctggtaatattttaaaatctccattatttgtgtaaaactgtttataagcagtgttgagagggtctgctttaccattaccccctcaatatcatgatcatccaatctcaaatgtgaaaaaaaaaaggaaattggatttaggtatggtgagtaaacaagtcttatatagacgagacactggtggaagttaagagttcttcagaagttacattggtgcagttctgtaccttttcctcatatacgtgccatggaaatagaactggaaagttatctgggcaaaagttagacaaccaaagacgactttagtggactggttttcaaaacttgagcagctgaaaagcaaaagccgtggtttcccatgacaatgtagccttgtgtggatcgggtttggcttgggtgtgaaacagaagtgcttagtcctagggcagtagatggcagcagcttttcatgtgcagacaaaacctctgtgaaaccttcccccatggacaagtcgccatgatggaaagcatctagattctgctctttacagctatccagagagggagtctttgccactgtgaccagcagttccaacgccagatagtctcgtgaacggccattccgaatacggggcttcggcaatctcccggcttggg

SEQ ID NO: 505073 - DNA, 1183 bp, Homo sapiens
ttgtgttactgccactcgtcgttttgtcttgggtcttggctatggtcgtgcgttatgtcgttttctgattcttcttccgtacatattgtgcttggttgcgtgttgtctttccgtccggctgtttatcctcgagtgtctctgtgtttcgctggttacgtcttcgtctgtctgctctgctctttgtccctgtgtgtgttttcgccctatgttgctcctctgctatttttctcccccgcttgttcgctcgggtcccccggcttttgggccacctgtttcatgtgccacactaatgcttttccccttcgggccccggcttgccccttgggaatcttcgggggccccagttccaccgtggacccctctgggtcattgtgcaaatgtgtctggctcccaacttgtaccccctcagaattggattaccttggccacgcttatagagggaattttctcagggtatttaattaggtgtcccacaaggtcaaggaaccaggatgggaaagacgcattcagaactgttaatttattgaccaggccaatgattttctggtttctggatgcccgactattaatttgggacttattttcccctttgagaagttataatagtatatgttaagatgatagagtttcctgcttaagttgtgcccttcagcttccatgagtttaaggagccctaagggtaatgatacccatgagggttggtttattgatccaacctgaatagctgtggtttctcccgtaaatacttttctgtctacctggaccctggaggcccttattaagagttgtgtgtttctttacttaatggaacacctctggataatgttttttcgctctgttcgtgaatcgtttctaattttgtcctaaatagtgttttctcttttagatttttctgtaaaagatgtgtgcatacactacgattctagatttctgatgctaactcgccaatccggttggtctctgctgggtctctcctgcttttattttaccttaaggacacagtgtaattgtcgtccaccacctttccaaaaaaatgtgaaactgccctgcctcccctttttgctgaccaaccactgtgtacattgaccaccttcctaccatactttatgttgtaaaatccaaactcttttgtggtacattatctcatgcttctgccaattcgaataaattctatggcttccca

SEQ ID NO: 505074 - DNA, 1253 bp, Homo sapiens
tgggttacggcagcactttaatttttccttacacaatggacgggttggctgggggcctaattattctcactataacagtagaaaaccaaaatttggtggtctatctctttaaagaatcgagatattgcgtacaaaaaaaaccttactataaattaagaatgaatacttttacagggcgtaaatggcaaaccggttccaactcaggggcaatgttaacagcccagggtggctctacctggccacgacaaccatctataaaaaaaaaaaaaaaaaaaacaaaaaaaaaaaaaaaaaaaaaaaacaaaacaaaaaaaaaacaacaaaaacaaaaccaacaaaaaaagagagagagggagggcgcgcccccacaccctccctctccgcccgcgggggccaccctaaacgcgccccccccgctcctttcccccaagcgcgcgccccccccacacggaggaggtatatcttaaataacccagcaagccgacggcccggcccgtcctaacaacaacaccccaccgcggccgggagaaaaaaaaaccacacgggaccatcactcttctcacacaaaccaccaaccgacagggacgcgacagcccgacacaacactcagcaccccacccccacccacgacacccaaccctccacccccgcccaccgacaaaaacacaaaacccttccctgcagagtgtatctactccggtcacccaacacaaaactaccaacacaccgcaccccgccgcaaccaaagatcatcccaccccaccccagcagcaacagaaccactacacacacacactccccaacgaggagacacgaaaaaagaaacaaacactaacacccaacacagacatagagagaccagacaaaaacacaccccaaccaacacacacaacaaaacacacgcaaacccgcaccacacacaagacccacccacccacacacaacctgcacccacccatattcaatcatcatactacataaacacttaacaaccactaacactacatatcatataacattcatccacacatcttcaaagcccacacccaccacacacaaaacaaccctaagcacctagaaacctacaatactaatatagccggaacaaccaaaacaaccacaaaacagacgcaacattacccacaccacccatcaccccaccaatcccaaagaactacacactgatcagtacaactacaccagccagtcaccaagcagaacacccgacggagttgtgcaaaaacagaaacaaa

SEQ ID NO: 505075 - DNA, 357 bp, Homo sapiens
  misc_feature (44)..(44): n is a, c, g, or t
accaggtatgtatacagaaatagacgcaaaatgaaatgcagtantataattctctcacttgtatattgtatataaaaaaggacactaagcgggaaaattatccaactgtagatgttcaatatttaatgaggtctaaacttcagagtgacaaaaacacccacccaactctacatctctatcaaaacaaatatattatgtaagaaagaattccctttaaatatatatgtatatatagtcatgttatactgttaattaaacccataattctatttatttaaataagaattaaataaactggccaaatgcttattttcatttcacaaaacataaagtattttaaatcacaacttcagggtg

SEQ ID NO: 505076 - DNA, 542 bp, Homo sapiens
  misc_feature (445)..(445): n is a, c, g, or t
attcgcggccgcgtcgacacggtacaccgggtacgcggaatccccgtcgaggataaattgctcgccgcccttgacgtagctgcccttgttgaccggtccatgcaatgtcacggcctcctcgatcactggtggcttcttgaacgcgtccaaccctttgaggtttctgaccggggatggcagacgcaggttgccaacaccaccgtcctgcagccattggcggtgtctgacccgggttagcagcgccccaacctggggctggctttgcctgaggcgccaaagacagggccacatcagccaccaataccaatgccgcaaaaccggcggccaccgcatccgctgggtcgccactgtgatgggcacggcgggcggcgagcaacagctcatacagattgactccgatactcacgcccggaataaacgataacaagccccgcgcacgcgccgncgactgtccatcgaggcgcagctgacggtagtcttgcagcgcacggcgtgaattggccatggctcgtcgacgcggccgcgaatttaatagtagtagg

SEQ ID NO: 505077 - DNA, 198 bp, Homo sapiens
acacatcagaaatctggacatatgcctttttcaaattatcacttagtgtttattttttttggtgaattcttcgataatggcccatttggccaaaatagccggttagctgggggcaggcctcctagaggaaaggcagggagaataggaataaaagggtgtaagccatgtagagcttgtctcagcgcatccgtggggtac

SEQ ID NO: 505078 - DNA, 196 bp, Homo sapiens
  misc_feature (13)..(13): n is a, c, g, or t
tcgatacgacttntctctctctctctcttctgtctttcttcgcctgcctgccttccttccttcacctctcttttccttccttcttttccctatctatctctttctttctttctatctttctttctatctttcttccttccttcctctctttatctttcttcctatctttttctttctttctttttccttctgtcgt

SEQ ID NO: 505079 - DNA, 286 bp, Homo sapiens
  misc_feature (29)..(29): n is a, c, g, or t
  misc_feature (58)..(58): n is a, c, g, or t
  misc_feature (107)..(107): n is a, c, g, or t
  misc_feature (188)..(188): n is a, c, g, or t
cctgtagccatccattttggaggcaatanccctatgtggatgaagtgtcatccaaacnggacatacaattgaatcagagacctctatatagtgctgtgtccccagcnggaaaaatgccaggggccctaagaaccaagggatgtaagcaggaaccgtcccatttatcatcacttgcaataatcccaatnaggggcattttttttgctgttcatcatgaaatgtggagtctttcaggattagcggtcctgaagactccaccatttcatggatgaacagacaaaaaaaa

SEQ ID NO: 505080 - DNA, 121 bp, Homo sapiens
  misc_feature (22)..(22): n is a, c, g, or t
  misc_feature (33)..(33): n is a, c, g, or t
gtagtcagatatctaaactgtnttacaaaaaanaacccacggagctattattaaaaaactgatcttttaattttatttatttaggtcaggaactccctgtattgaaacttctaaaactagg

SEQ ID NO: 505081 - DNA, 174 bp, Homo sapiens
gtgactctagtaggatcccgcttgtggcttctgacccctctgtgtctggtgtgtcctgccctggcctatgtggacaacgcgtactggctgtggactttccagtggacgcctcctgcagaagaacaacaaggaccgcttcgtgccacgctgcgtgtggcgcgccccgtgcctccc

SEQ ID NO: 505082 - DNA, 1264 bp, Homo sapiens
cagcggggaggctgggagccctgcggggcctggagccgccctggctgaggcgttggtggctgcggggccggcccatcctgtgggggctgacttgacgcgttgagtggctgcgcggggatggcgagccaccatgttcatgccagcagcagcagcagcagctccagcaacaggcagcagcagctccaggcagttacagcatgcagcagctccagcatgcagcaattgcagcagcagctagttactgcatgcctccagcagctgctccagcagtccccaccacaggccccgttgcccagtggctgtcagccggggtgctccccccgtcagcatgccacagcaggcctgctatctgactctccatgggccaccaacatcaagccatccctcctcaactggctccattgcttgctgaggaagctattgctatagagcatgcagtttggcaaggaactgcgaccacgtttgcagtgccaccaagccagggtattgacagctggcgcggtacatcacgcgattgcccacgatgcacacacgtggtgtaacctcgcgaggggctattggcagttggctcttcccggaggccatcaggaaggccccacaggcacagtcgaaacaacccctagaaattggacccactacgcaaattttgcacacgatgttatcctattaccccacacgtggccacgtcagacacatggtaccatatggcatgggagtacgcgttcccgtcgcgtggtatgcgagggtaccccatttggagagcgctatttccgcaaggaattcaaagcccgtatttcaaggtgaaggagataacacacgcgaagtaaacagtaggggcccctgggaacccttccccgataccgagttcagttaacccgacgcctcggccacgcgctccggaccgcaggggagttttcagtcacgtttcgcttcaacgacgcgtacgttgcgtgtgttgaggacagagcatgagttaaggagcccctagcgcaagagaggtgtgtagcgctaggttggcgcaggcgaccggccgaaagggctcgcggatgattttgcgagcaagccgtccggcaaagtcaaccgcagagatgttacgccggtatcagtgcccccgagaacggtccaattctctcccaggcgggtataccaagggcgtggcctccaggactgccattgacgccttggaggacctattggtacgggggttccggtcgcgtgcggccggacactgaggagtgtgcatggaatccttatcaatcatgct

SEQ ID NO: 505083 - DNA, 204 bp, Homo sapiens
atccccgtaggtggttgtggctagacagggagacattctgtaggtgatggataagtgtcgaatatggggaggtcgctgtaggagaggacacattgagtggatgagaactctgactcccacatctctgtggcactttgtgagttgagactagcttgatataagaacagagcctaccatatttcttgcttgtaggaggaggtgaac

SEQ ID NO: 505084 - DNA, 233 bp, Homo sapiens
ttcgccatgtttcccgacgggagaggacgccccacttcgagggctcacacaagctttgccttcttgtagaggggccaggagcagcttcaggtagaagcactgtgcagcctcttagggttgaagaaggatgggctgttgccttcacgctcatctttgcccattacgccgtgaaagatgatgggaaagccctgtcgagcgaggcccgcccagcggcagaagcgttctcgatccac

SEQ ID NO: 505085 - DNA, 189 bp, Homo sapiens
ccatttcccatttttttttttaaccaggatttgttcaaagctccagcaaatttttgttttttttaattctagctttgagaagctcatatatatttaggaaatgctttgccaatatttttcagggggtggtttgcctttttacccagctatgttgatttttttttatttaaaaaaattgtttttggtcca

SEQ ID NO: 505086 - DNA, 409 bp, Homo sapiens
  misc_feature (397)..(397): n is a, c, g, or t
cctggcttctagaatgctctgtccagggtctgcaacttccctgggctctgacttaggagtgatgtggctaactgaggcctgagtgagtgtgtagattgtccttgggtgagtgagaaaaaacactttgcattgctttcaggttggtggaaaatgtcagtggtgtagtgttgaggacctcactatttttttttttaaatcatttatcctagagaaggactctgatccttgctttcctaagtaaattatgctggagtgcttccagtactaaggcctcttgattctttccccttgaacactatgagcactgacaaatcatggtagaggtgccaccaaccagtttgcacagtggaggcacctgacatgcattagcctggacttctctgagagctgggcacanttgcaggacccc

SEQ ID NO: 505087 - DNA, 277 bp, Homo sapiens
gcgcgaattcatcatccttctgcgcgaattcatcatcctgctgcgcgaattcatcatcctgctgcgcgaattcatcatcctgctgcgcgaattcatcatcctgctgccgggcgcgatgacgctggcctgaagacccagctactcgggaggctgaggctggagcatcgcttgagtccaggagacctgggctgtagtgcgctatgccgatcgggtagccgcactaagtttggcatcaatatggtgacctcccgggagcggtggaccaccaggttgccta

SEQ ID NO: 505088 - DNA, 1397 bp, Homo sapiens
  misc_feature (896)..(896): n is a, c, g, or t
  misc_feature (1397)..(1397): n is a, c, g, or t
aaaaaaaaaccgggtgggtttcactcagaaggttggttagggaagacaaaaacttgggaggagcagcttgggcacggtgggcttcaagccttgttaattcccagcaccttgtgcgaggcttgaggtgtgggtgtggatctcacctgtgaggtctcaggagtttcgagaaccagcctgtggccaacatgtggttgaaaccccattcttcttacttaaaaattacaaaaaatttagccgggcgttgtggtggttacgcacctgtgtaatctcccaggctatactctccgggagggcttagagggcagcagaaatctccgcttgtgaaccccagggagggcaagagggttgtgcaacgagagcgccaagagattcggcacccattgtgcaccctccaggccggggccaaacaagagagcgcgaaagacctctccatctcttaaaaagagaaacacaaaaacagagccaaaaccaaaacaaaaaacacagcgggagaggagaagccaatatacaccagagggaaaatctccgagggcttgtgagagttatttatttattataagagaagagagagagagagaagaggagaagaggcgtgtggtgtgcctctctctacaccttctctctccctgtgtgtatgagggtgtgtgtctcttataaaagagatacacccgtgtgtgtgtctccctctctgtgtgtatatatatatctcctgtgtgtcacaggtgggtgtgtattctctctttatatctatatatatattgtgtggctccccactctgttgtgcccctataaaatatgtggagaaaactctccacaggtggggacacgccaatgtggggctatatatagaggggtggtgttctgtgtgatgtcctcacaactcatctgtgtgggcnctctcttctccgcaggaagggggagctcttgttgataaaaaacaccgcaagaacaacatgtataccgtgttttaacacacaccgaggatgacggctcctgttgtaaacaacacccaaaaaagagtgttgaaggagcaagcccccccacaaattaaaccactatgttggtgccagctagaagagggagcacaatgtgtaacggagtgaacactagtgcaactctgttgaagaagagcagccccccccccgaaagggggggagagtggggacccccctctccagcgaagaacaagccggggagaagaagccccttctgagtgggccaacacacaggggtgcttatccaccagacgagtcccactaataaaaggttccccactctctagtataggaaccccacaaaaaattatagggctgggcgaaaataatcaacacgctttattatttatctccaccccttgtggtgtcccccattttgtaatagaaacactacacacacan

SEQ ID NO: 505089 - DNA, 300 bp, Homo sapiens
  misc_feature (1)..(1): n is a, c, g, or t
  misc_feature (21)..(21): n is a, c, g, or t
  misc_feature (117)..(117): n is a, c, g, or t
  misc_feature (156)..(156): n is a, c, g, or t
  misc_feature (171)..(171): n is a, c, g, or t
  misc_feature (205)..(205): n is a, c, g, or t
  misc_feature (209)..(209): n is a, c, g, or t
  misc_feature (257)..(257): n is a, c, g, or t
  misc_feature (288)..(288): n is a, c, g, or t
nttgcctcttcatcctaagtnttatatacggttctggcaatgtcttttaacacatgaacacctggaggggtggctaataagatgtcaccatgtatgggaatgttaaataggatacantttaaaatactgaaaaaaatactattcagatgtgatgcnttaactctccaaacnttgaaagatctgtcacatgacagacagatttganttgntctttattgctataggagagggtgaagttaaggggaagcacatttcanatcaatataaggaaatactttctctttaganttatttgtagat

SEQ ID NO: 505090 - DNA, 291 bp, Homo sapiens
agcagcatgtgcattgggatcatgtgatgtgtggggagactctgcaaacagtcagagaatgagaacaagtcagaaaatggttgaaatgggcacagaaattccagtcatgtgaagcaaactgccctttgtcctcaaagaaatcgttgaacaagacaacttttataaagagatttaaagcatattctcagccttgtactgatcaacttgacgatgttggcattctctaacctatgacctgttggcctgacactaattcagtatccatgtcaaaatttctgtgccccatttcaa

SEQ ID NO: 505091 - DNA, 726 bp, Homo sapiens
  misc_feature (43)..(43): n is a, c, g, or t
  misc_feature (235)..(235): n is a, c, g, or t
agcggatatccttaatggctggcttcgaatcatcttcaacggnaatccgccttctaggcctggtgtggtggctcacgcctataatcccaggcacttagggaggctgaggcgcggtggatcacttcagcgagttttgatgaccagcctgggcaacatggagtaaacactgtctctactaaaaacagaaaaattacggctcaggcactggcttgtgcgatgcctgttagttcccagnctactcgcggaagctgagtgcgggaggatcacctgcatctaggcgcacatggcaggttgcagctgcagttgagattgcaccatcactagagcaagatcctgtctaaaaaaaaaaagaaaagaaaattcggccttccttttattcatttttatttcgaagaaataaccggaacttaccgggaacctaagttctaggctcatggtattgcttcttgctctttagccaagttcccttaggttccttgcagtccttcgtggctaaggtgacgcagagtgtttataacagagagacgattttaagagatgaccgttgaagacagatgttccaaattcgaccggtttcttacttccctagtttcacaagttagggtcttcagaagttgccaagcagtactaggatactcctctaggaccgaggatgtgcaattctgagcaaatgtgcagtgtgcagtatagatttccagcctccttttaaactccttcaagtctgtg

SEQ ID NO: 505092 - DNA, 428 bp, Homo sapiens
aggaacatgtgagtcatcatccccctgatgctgcgaacatgctgcgtccaagaaatggctggacatgcgtccggaaatcaaaatcaccagcaagttgcgaggcaaatacctctccattatgccccgttcggtaccagttcattgtaattccatgcaactgggcaccactacacttggaagaacgtaccacaactgtacacaacattatgtgggcaagtgtggatagatcagtctggcgaaattgatattgtgaatcacaagacaggagaccagtgtaatcttaaattgtaccttatagctacttctctcgggatgtagcaagaaacgtgaccggggcgaagtgacagatccatcagtgcacacagtccactttgctcttctggggacgtgggatgacaccatgcaatgtttcacagtacagccagtca

SEQ ID NO: 505093 - DNA, 117 bp, Homo sapiens
actgtcaagctggccttgttgtggagatcgccacctaccgcgagctgctggagggcgaggagtgcaggctgaatggcgaaggcattgcgacaagtcacacgtctctgtagtacagtc

SEQ ID NO: 505094 - DNA, 1449 bp, Homo sapiens
ggacgcgactgagcaacaggaggactcaggcctgagtgacagggccccagatgagtcacacaaaggtaaatcgttgatctctattacagtgaaacagataacgcgacgaacgtccgagcagttgcgcgcgacaggtcccttgtgtggtcttacattgtcatgagacccatgaaaggacaggatgaccgttggactacaggccacaacgtgtcctcccaagagctcctttaattgagggggcaggacgtcccagggaaaaggagaaaccattgaccattgtctgacacaatatgacgaaacatttgagacgatacgaagattgtagctccctcagacgcgggtacgccacgcaaaatgtgagagacagaagacatatagaccgagagaacattggtgggagatgtgcgacataggttccttgctcacgggtcgcctaagggggatgtcacaagggacatgctccagtgagctcgcataatgtaacacgaactcttagcgacattatggcaccgataatgcagcattcctcgtccaagccacacaaaggtcgaacagccatggtgcccgaggctcatccgtcatcatgacacaccagtgggagtcaccatcccatcaaggcactccccaggacttgacgcggcaacagcgggagagcattcatggcgctgtacgctctgtatctcgcaacctccaattttgcctataggagatcatattcttaacaagacattccccttcgtatgggggcaataggagccttgatgcagggcctgggggaagactcgaagggtcccaccttcaaggacaatcatttccaacacgaaggggacttggatcagaagactgggacccgtcctatattgtgcccgtgacatggccctcggtagaaccaggggatagtaaagcaaacaaaagcacacgaaggattccctcacgttggctcaggtggcgaggaattgcaccactatatggggaagagagccatggcccagaattcataggtacctaagaggcccaaaaggaccaactcacggagcaaggccttaagataacgcgaggaccccactatcccacaccagggggggcgccgagtgggggaaccaccgagtggattaaaccaggtctaaaacgaggatagggcttctgataagtaatcaagagaggaagttttcagaccgccgcatgtgagtggtaatgcagaacgccccacattgttggcacggaagatttcggcacaagtggaaaaccccccggggttacacccccactttcccattgagtagaagaggtactactggtcaaaaaaggaccaacagaatgttttgcgagtatacgctctcgaagaagtacaagaggcacgacaacacatcagttactgtgctagatggagaagcccactcggggagcagcacccgttggatatatcaccggaatgtaaaaggaaggagc

SEQ ID NO: 505095 - DNA, 259 bp, Homo sapiens
cagatgtatgtttggatgtaaagtgaaatattggttggcggataagcagatagtgaggcacgtggagccaataatgacgtgacgctccgtggacagcctgtgcttacaagaaaatgttgagccgtacatgcctgtcggaaatggtgaagggagactcgaagtactctgaggctttgtaggagggtaaaactagagccccagtaaaatttgtactacagcagtgcttgaataaattgggttaccggtaggtggcctatca

SEQ ID NO: 505096 - DNA, 1732 bp, Homo sapiens
gccaaccccaggccaagtcaagaaggagctcagccactatctccccaccgagccagctcagcgggcagggctgggagggagtgggacagattctgggagtgcagcggggaggagtcccggctgggctgagcgcagggagctgcttggcagtgccagagcccaggccccagagccctgctggagaggaggcagactgaggcagcaggccccgccagcaggcgaagcagggagatgtcagactgctacacggagctggagaaggcagtcattgtcctggtggaaaacttctacaaatatgtgtctaagtacagcctggtcaagaacaagatcagcaagagcagcttccgcgagatgctccagaaagagctgaaccacatgctgtcggacacagggaaccggaaggctgcggataagctcatccagaacctggatgccaatcatgatgggcgcatcagcttcgatgagtactggaccttgataggcggcatcaccggccccatcgccaaactcatccatgagcaggagcagcagagcagcagctagagacccctttggccacaccttccaggcactggcctgatgccccgccctggtgctctccccaggctccctcctcagcctcctgcccacccagggccctttactctcttctccctccagaccttcctctgacccttgctgaactggggtccctttgtgagtgtctcagtctagaggtacctccctccctggggggtctcagctcctggagtcgcaggcccttggggcccctctgtgagatctcaatgctgtctggggaccctaagagttttctcacctgttcagtctcatctaaccttccaatgtctgatgttcctgccaaattcctgcctgattctgggtccgtcctgacctccaaaggtcagcttggtgcttgaggtctccctgctcttggtggcagtggtagcagcaacagcagcagcagcagcagcagcagcagcagagacctctccactttcccttagcccctctgctgggtagagaggcactttcagggacttccctccagctgcctcttcatctgggaatgagctaagcaaggctgagcctcctcctgttgcttgaaataatgatgatataaaggctggatttggagtttgcatcccagagggaccagggatacaaactccaaatccagcctttatatcccctggtccctctgggatgctcattaaaaccttcccactccttggaaaaaaaaaaaaacaaaaaaaaaaaaaaaaaaaagaaaaaaaaaaaaaaaaaaaaaaaaaaaaaaaaaaaaaaaaaaggaagagaaaaaaaaaaaaaaaaaaaaaaagagaggagggggggcgagccaccgacaaaaaatgtcaccaacgcgaagcagcggccggcacaactcaaggcaaggccacacacatccttaaaagaacaccacggcgcggcgcgccgacgcacaacaagcagaccaatcctctaaacaacaggacgcacacgcgccggctgcactcatacacccgggggcagcgaaaggcccaccaaccccgcaacaccgcaggagcccaactgtcgcggagagccaccaccccgacgatgagggggaaagccccaacaaggccaaaaaccacaacagacagccgaccacgggcgcggccaacacagacacaccacgccagggcgaacgacgcaccaccgcagaaatagcagaggaacaaccaccgcgcaacaa

SEQ ID NO: 505097 - DNA, 1885 bp, Homo sapiens
  misc_feature (16)..(16): n is a, c, g, or t
agccggcatgggagtnggaatggccacaagtggccaacggaaagcaggtggcaggacaggaggctgtggtggggcctgaccgagcagcctttccttccaaatctgactgtggcttgctcaggcccctatggtggctgtgaccctgttttgtccatctcctttcaccaggacccgccgggtgagggtgactggagcacattcctgggcttgggggtgggaagggagtctgatttgcctggggttgatgtgggggggtttgggcatgggccgtgactcacagagtagatccagatccgcctgctcccctcatatcctgttattcagaaggctgtatccgcttagaaagtgtcttttgtcctggggtgagagggtgacgcatgtgccctctggcagtctgctgctgtgtccagagtccgactccagctgggctgtaactgggcttggcccccgccttaggccccgccagcaggcgaagcagggagatgtcagactgctacacggagctggagaaggcagtcattgtcctggtggagagcagcttccgcgagatgctccagaaagagctgaaccacatgctgtcggacacagggaaccggaaggctgcggataagctcatccagaacctggatgccaatcatgatgggcgcatcagcttcgatgagtactggaccttgataggcggcatcaccggccccatcgccaaactcatccatgagcaggagcagcagagcagcagctagagacccctttggccacaccttccaggcactggcctgatgccccgccctggtgctctccccaggctccctcctcagcctcctgcccacccagggccctttactctcttctccctccagaccttcctctgacccttgctgaactggggtccctttgtgagtgtctcagtctagaggtacctccctccctggggggtctcagctcctggagtcgcaggcccttggggcccctctgtgagatctcaatgctgtctggggaccctaagagttttctcacctgttcagtctcatctaaccttccaatgtctgatgttcctgccaaattcctgcctgattctgggtccgtcctgacctccaaaggtcagcttggtgcttgaggtctccctgctcttggtggcagtggtagcagcaacagcagcagcagcagcagcagcagcagcagagacctctccactttcccttagcccctctgctgggtagagaggcactttcagggacttccctccagctgcctcttcatctgggaatgagctaagcaaggctgagcctcctcctgttgcttgaaataatgatgatataaaggctggatttggagtttgtatcccctggtccctctgggatgctcattaaaaccttcccactccttggaaaaaaaaaaaaacaaaaaaaaaaaaaaaaaaaagaaaaaaaaaaaaaaaaaaaaaaaaaaaaaaaaaaaaaaaaaaggaagagaaaaaaaaaaaaaaaaaaaaaaagagaggagggggggcgagccaccgacaaaaaatgtcaccaacgcgaagcagcggccggcacaactcaaggcaaggccacacacatccttaaaagaacaccacggcgcggcgcgccgacgcacaacaagcagaccaatcctctaaacaacaggacgcacacgcgccggctgcactcatacacccgggggcagcgaaaggcccaccaaccccgcaacaccgcaggagcccaactgtcgcggagagccaccaccccgacgatgagggggaaagccccaacaaggccaaaaaccacaacagacagccgaccacgggcgcggccaacacagacacaccacgccagggcgaacgacgcaccaccgcagaaatagcagaggaacaaccaccgcgcaacaa

SEQ ID NO: 505098 - DNA, 1714 bp, Homo sapiens
gccaaccccaggccaagtcaagaaggagctcagccactatctccccaccgagccagctcagcgggcagggctgggagggagtgggacagattctgggagtgcagcggggaggagtcccggctgggctgagcgcagggagctgcttggcagtgccagagcccaggccccagagccctgctggagaggaggcagactgaggcagcaggccccgccagcaggcgaagcagggagatgtcagactgctacacggagctggagaaggcagtcattgtcctggtggaaaacttctacaaatatgtgtctaagtacagcctggtcaagaacaagatcagcaagagcagcttccgcgagatgctccagaaagagctgaaccacatgctgtcgcattgctgaccctgcttcctccccaggacacagggaaccggaaggctgcggataagctcatccagaacctggatgccaatcatgatgggcgcatcagcttcgatgagtactggaccttgataggcggcatcaccggccccatcgccaaactcatccatgagcaggagcagcagagcagcagctagagacccctttggccacaccttccaggcactggcctgatgccccgccctggtgctctccccaggctccctcctcagcctcctgcccacccagggccctttactctcttctccctccagaccttcctctgacccttgctgaactggggtccctttgtgagtgtctcagtctagaggtacctccctccctggggggtctcagctcctggagtcgcaggcccttggggcccctctgtgagatctcaatgctgtctggggaccctaagagttttctcacctgttcagtctcatctaaccttccaatgtctgatgttcctgccaaattcctgcctgattctgggtccgtcctgacctccaaaggtcagcttggtgcttgaggtctccctgctcttggtggcagtggtagcagcaacagcagcagcagcagcagcagcagcagcagagacctctccactttcccttagcccctctgctgggtagagaggcactttcagggacttccctccagctgcctcttcatctgggaatgagctaagcaaggctgagcctcctcctgttgcttgaaataatgatgatataaaggctggatttggagtttgtatcccctggtccctctgggatgctcattaaaaccttcccactccttggaaaaaaaaaaaaacaaaaaaaaaaaaaaaaaaaagaaaaaaaaaaaaaaaaaaaaaaaaaaaaaaaaaaaaaaaaaaggaagagaaaaaaaaaaaaaaaaaaaaaaagagaggagggggggcgagccaccgacaaaaaatgtcaccaacgcgaagcagcggccggcacaactcaaggcaaggccacacacatccttaaaagaacaccacggcgcggcgcgccgacgcacaacaagcagaccaatcctctaaacaacaggacgcacacgcgccggctgcactcatacacccgggggcagcgaaaggcccaccaaccccgcaacaccgcaggagcccaactgtcgcggagagccaccaccccgacgatgagggggaaagccccaacaaggccaaaaaccacaacagacagccgaccacgggcgcggccaacacagacacaccacgccagggcgaacgacgcaccaccgcagaaatagcagaggaacaaccaccgcgcaacaa

SEQ ID NO: 505099 - DNA, 1658 bp, Homo sapiens
gccaaccccaggccaagtcaagaaggagctcagccactatctccccaccgagccagctcagcgggcagggctgggagggagtgggacagattctgggagtgcagcggggaggagtcccggctgggctgagcgcagggagctgcttggcagtgccagagcccaggccccagagccctgctggagaggaggcagactgaggcagcaggccccgccagcaggcgaagcagggagatgtcagactgctacacggagctggagaaggcagtcattgtcctggtggaaaacttctacaaatatgtgtctaagtacagcctggtcaagaacaagatcagcaagagcagcttccgcgagatgctccagaaagagctgaaccacatgctgtcggacacagggaaccggaaggctgcggataagctcatccagaacctggatgagtactggaccttgataggcggcatcaccggccccatcgccaaactcatccatgagcaggagcagcagagcagcagctagagacccctttggccacaccttccaggcactggcctgatgccccgccctggtgctctccccaggctccctcctcagcctcctgcccacccagggccctttactctcttctccctccagaccttcctctgacccttgctgaactggggtccctttgtgagtgtctcagtctagaggtacctccctccctggggggtctcagctcctggagtcgcaggcccttggggcccctctgtgagatctcaatgctgtctggggaccctaagagttttctcacctgttcagtctcatctaaccttccaatgtctgatgttcctgccaaattcctgcctgattctgggtccgtcctgacctccaaaggtcagcttggtgcttgaggtctccctgctcttggtggcagtggtagcagcaacagcagcagcagcagcagcagcagcagcagagacctctccactttcccttagcccctctgctgggtagagaggcactttcagggacttccctccagctgcctcttcatctgggaatgagctaagcaaggctgagcctcctcctgttgcttgaaataatgatgatataaaggctggatttggagtttgtatcccctggtccctctgggatgctcattaaaaccttcccactccttggaaaaaaaaaaaaacaaaaaaaaaaaaaaaaaaaagaaaaaaaaaaaaaaaaaaaaaaaaaaaaaaaaaaaaaaaaaaggaagagaaaaaaaaaaaaaaaaaaaaaaagagaggagggggggcgagccaccgacaaaaaatgtcaccaacgcgaagcagcggccggcacaactcaaggcaaggccacacacatccttaaaagaacaccacggcgcggcgcgccgacgcacaacaagcagaccaatcctctaaacaacaggacgcacacgcgccggctgcactcatacacccgggggcagcgaaaggcccaccaaccccgcaacaccgcaggagcccaactgtcgcggagagccaccaccccgacgatgagggggaaagccccaacaaggccaaaaaccacaacagacagccgaccacgggcgcggccaacacagacacaccacgccagggcgaacgacgcaccaccgcagaaatagcagaggaacaaccaccgcgcaacaa

SEQ ID NO: 505100 - DNA, 838 bp, Homo sapiens
gccaaccccaggccaagtcaagaaggagctcagccactatctccccaccgagccagctcagcgggcagggctgggagggagtgggacagattctgggagtgcagcggggaggagtcccggctgggctgagcgcagggagctgcttggcagtgccagagcccaggccccagagccctgctggagaggaggcagactgaggcagcaggccccgccagcaggcgaagcagggagatgtcagactgctacacggagctggagaaggcagtcattgtcctggtggaaaacttctacaaatatgtgtctaagtacagcctggtcaagaacaagatcagcaagagcagcttccgcgagatgctccagaaagagctgaaccacatgctgtcggacacagggaaccggaaggctgcggataagctcatccagaacctggatgccaatcatgatgggcgcatcagcttcgatgagtactggaccttgataggcggcatcaccggccccatcgccaaactcatccatgagcaggagcagcagagcagcagctagagacccctttggccacaccttccaggcactggcctgatgccccgccctggtgctctccccaggctccctcctcagcctcctgcccacccagggccctttactctcttctccctccagaccttcctctgacccttgctgaactggggtccctttgtgagtgtctcagtctagaggtacctccctccctggggggtctcagctcctgctgctgctgctgctgttgctgctaccactgccaccaagagcagggagacctcaagcaccaagctgacctttagaggtcaggacgtcgacc

SEQ ID NO: 505101 - DNA, 661 bp, Homo sapiens
gctcattaaaaccttcccactccagcctttatatcatcattatttcaagcaacaggaggaggctcagtgttgcttgaaataatgatgatataaaggctggatttggagtttgtatcccctggtccctctgggatgctcattaaaaccttcccactccttggaaaaaaaaaaaaacaaaaaaaaaaaaaaaaaaaagaaaaaaaaaaaaaaaaaaaaaaaaaaaaaaaaaaaaaaaaaaggaagagaaaaaaaaaaaaaaaaaaaaaaagagaggagggggggcgagccaccgacaaaaaatgtcaccaacgcgaagcagcggccggcacaactcaaggcaaggccacacacatccttaaaagaacaccacggcgcggcgcgccgacgcacaacaagcagaccaatcctctaaacaacaggacgcacacgcgccggctgcactcatacacccgggggcagcgaaaggcccaccaaccccgcaacaccgcaggagcccaactgtcgcggagagccaccaccccgacgatgagggggaaagccccaacaaggccaaaaaccacaacagacagccgaccacgggcgcggccaacacagacacaccacgccagggcgaacgacgcaccaccgcagaaatagcagaggaacaaccaccgcgcaacaa

SEQ ID NO: 505102 - DNA, 778 bp, Homo sapiens
gggtggtttgcttaggcgcagacggggaagcggagccaactatgccagatggtccggagctgggttttgtcgcaacaagcttatgtgaccccgcggagacccttacgtagaagatctcgtctcgaccgaagagtctgaagctagatcggcgagtatggggctccgcgaacaatacgttgaggtctgcgcaggtgtcataatttaccctggcctaagtatcctggtaatggtcgcccgggaactgctgacgcttgatgagaatggacccacggcgtctgttcgaaggcaacgccctacctgcggcggctggtccgcattggcggtgctggatgagggcaagatgacagctggattacatcctgggcctgaagatagaggatttcttagagagacgcctgcaatgacccaggtcttcaacgctgggcttggccaacgtccatccaccacgctcgcgtgctgagtcctgccaagctgccagtatcgagggtccgcagagcaggtggtgaacgatcccgtccttcattgtccgcggctggattcccgagaagcacatcgacttctcgtctgcgctctccctacgggggtggccgcccgggccgcgtggagaggaagaatgccaatgaacgggccatggctggggctgggggctgtgggacgactgaggaggaggattcacagtccagctgtcgctccctggggctgcctggattggtactccgtaattccttgccaatagtaaacaggagtcaggcgcttttacaaaagcacagacaacgaa

SEQ ID NO: 505103 - DNA, 841 bp, Homo sapiens
  misc_feature (50)..(50): n is a, c, g, or t
  misc_feature (63)..(64): n is a, c, g, or t
  misc_feature (69)..(69): n is a, c, g, or t
  misc_feature (104)..(104): n is a, c, g, or t
  misc_feature (201)..(201): n is a, c, g, or t
  misc_feature (206)..(206): n is a, c, g, or t
  misc_feature (218)..(218): n is a, c, g, or t
  misc_feature (222)..(222): n is a, c, g, or t
  misc_feature (229)..(229): n is a, c, g, or t
  misc_feature (231)..(231): n is a, c, g, or t
  misc_feature (238)..(239): n is a, c, g, or t
  misc_feature (247)..(249): n is a, c, g, or t
  misc_feature (255)..(256): n is a, c, g, or t
  misc_feature (258)..(258): n is a, c, g, or t
  misc_feature (264)..(264): n is a, c, g, or t
  misc_feature (296)..(296): n is a, c, g, or t
  misc_feature (317)..(318): n is a, c, g, or t
  misc_feature (323)..(323): n is a, c, g, or t
  misc_feature (328)..(328): n is a, c, g, or t
  misc_feature (333)..(333): n is a, c, g, or t
  misc_feature (347)..(348): n is a, c, g, or t
  misc_feature (354)..(354): n is a, c, g, or t
  misc_feature (362)..(362): n is a, c, g, or t
  misc_feature (387)..(387): n is a, c, g, or t
  misc_feature (509)..(509): n is a, c, g, or t
  misc_feature (516)..(516): n is a, c, g, or t
  misc_feature (542)..(542): n is a, c, g, or t
  misc_feature (662)..(663): n is a, c, g, or t
  misc_feature (720)..(720): n is a, c, g, or t
  misc_feature (732)..(732): n is a, c, g, or t
  misc_feature (772)..(774): n is a, c, g, or t
  misc_feature (826)..(826): n is a, c, g, or t
tggacacctcactctcctcgggccctggacaagggaaatgtggtcatccngctttcctcgggnntcagntggtgggacgttatgtggctggccaaactggggcngttgtgtctagaaaagagaaaacagggagggtgtgccagctctggggactgggccaggtgccggggtggtgggtcagggcgagggaagtcacccggnggagngcgtgggtcaangggngcaaggngngcagggnngggctccnnnaccacnncnagcacngcagtgtggcaccgggaccagatgcaagtggntgttgcctgcgcgtggggccnntaccnggttntttcnctcagtggttcttnntagatnttggtttnctgttttttttagtagggctgggantggggtgtaatgcaagacagaatataaaatcaggcaaaacaaacactagtcaccatggaagtgaatgactctcaaagtctcccaaataacaaggtgtagggcatctcacaccactgcatcanttctggnagactacccacagggtgggggctgcnatgggggccaactcgggaactatagagaagagaggagacacacaccacaagacctcctttcattaggcaggaaagctcttgtgggacagtggtgtgcaaatcctaggacctcaatggtgnngaactccaggaaaacaaaatgacaagtctttctcaggacccctcatagatgacaagnattctgctcccngggtcgagatctctttagaggggcttcaccagctcagtgnnnaatatcagacaacaagactctcacattccaaagggggtatctagggcttttnctctcctgtgatgat

SEQ ID NO: 505104 - DNA, 1038 bp, Homo sapiens
ctgctgacctgatgcagcattaagcagctaccacaatgcctgcacagcagaagctgctgtgccttgaaggacacggtcaacctgcctacgtatcagctccatccaggccaccactgctgtgctgtggctctggccaccccacgtcatgctgcagctgccgcagagatcatggctgtcctctttttccacaccatgcgctacaagtcccatggaccccctggaatcctgcacaatgacctgcttatgtgctctcacaaggtgccatgcatgatcccataccgtctacgcggtcttggtgctgaatgctggtttcctggcctgaggctggatgctgcttgaacctgagtgaagatcagctccgacttgtgactgggcacccgtgtcccgaaacaaagctcttcacctgacgtgtgccacttgtgctaccctggagccatgggcctcagagtggcctgcttgtagggatcggcctacaccctggcaaatacttcagaccaaggccacgctaccagagtctatatgcttgctggagagacggggagctgtccagacgggctctgtcctgcggaggccatggccttcgccagcatctatacgctggacaaccttgtggccattctagacatcaatcgcctgtggccagagtgaaccggccccactgcagcaccagatggacatctaccagaagcggtgcgaggccttcggctcggcctgccatcatcgtggatggacacagcgtgacagaagctgctgcaaggcctacaggccgggccaagcaccccccaacagccatccatcgccacgcacccaaggcccgagggatccacagggctacccacaccgagcccaggcagggaacgcacatcaccaacaacctgcgcgagcaagaaccaccacgcagaccacgagcccacccccaacaacacaccgcaaaccgtggacgccgccccagcagaacacccccagggcacgtcccaccacggagccaacacgccaaaaaagggggacacagagcaccaaagacaagccgaacgacac

SEQ ID NO: 505105 - DNA, 795 bp, Homo sapiens
ggctctgccgggggccgcgggcttcttccgtgggggccgaggacggtggccgtgccgttctctagaggagcgaggggaccgacgctatggggggaaccggttcgaagctccaggacgtgggggctacggaggctccagagactactatagcagccggagtcagagtggtggctaccgtgaccggagctcgggcgggtcctacaggagacagttatgacggtctacggataatggtcacacctccgagggtcgccaggcatgctgtgtgcctgtcggtgggagctcggttcaccttggtgccctctccaatgcactttagtgctggtacctactcaggacgcttgtcacgtgtgcttgcccagaagaggcgcatctgtcctctcagagccatttctatcgcaggacgcaaagagccaaatgagactgaccaatagagaggcagatgggagaggcgagggcccgtgtgggcagtcagggtaggtgcagtgtgtgggcgcaggccagcctccctcggctgtggggggtggttgcgtccccggccgaggccggccctggtctggcctctggggtgaagcgtgcctcttgttgctgtcggtgccgtttacgagctgtgccgtgcgttcttgtcctacagctacacacaagcgagtaagaacccttcctgctcaacgatcgtccttccaatggtgtgtgtgcaggattgtgggagcgttcgctgaacgttcagtgtgtggtagtgcccctccttgtattccgcccttggcgtagtctgttcggttctgatctggtaagcca

SEQ ID NO: 505106 - DNA, 381 bp, Homo sapiens
aattaagcccccggtcttttatccaaaggaaaggctttttcccttggccaattttttgggggccggagtccaagttaaattccttagggttttaccaccattttggatggaattggaaatttggaccattttttgtccaaatttattcttttattttcttggaacttgttaaccattgggaagttgtttgaaccttttcctggaggtgtttttttattggcttgaaaattccctttggaaaaatttttgtcccttccatttttcccaaattccaaattttcgccttggttttgaaagccattaaatttgtacctttttgtccaggttgaaattattcccttaattttccccttttttccccaaattaaattgttaaggtta

SEQ ID NO: 505107 - DNA, 148 bp, Homo sapiens
tggagtgggccgacgtattacaatgtacgtgacagggatattgtgttatgaaggtagacaacctggatgtacttatgctctgccagcccaccaggtactctggtaagcttgttgttgtccaagtgctattgaaacttctaaaactagg

SEQ ID NO: 505108 - DNA, 124 bp, Homo sapiens
ggaagatggcggcggccgttccacagcgggcgtgggaccgtgggagcagctgcgcagtgagcagctgcccaaggagggacattatcaaggtttctccaggacacggttcaaattcgtttcttgc

SEQ ID NO: 505109 - DNA, 874 bp, Homo sapiens
agatcatgttggagaccttcaacaccccagccatgtacgttgctatccaggctgtgctatcccctgtacgcctctggacgtaccactggcatcgtgatggactccggtgacggggtcacccacactgtgcccatctacgaggggtatgccctcccccatgccatcctgcgtctggacctggttggccggaccttgattgattacctcatgaagatcctcaccgagcgcggttacaggtttcaccaccaggccgagcggggaaaatcgttgcgtgacattaaggaagaaagcttgtgcaaacgtcgcccgtgacttcgagcacgagatggccacgggtgctttccagttcctccctggaagaagagctacggagacttgccttgacggccaggtcactcaaccattgcaattgaggcggttccggcttgccctgaggacacttttttccagccttcccttccgtgggcatgggagtctttgtggcatccacgaaaattaccttcaaaattccatcatgaaggtgttgacggtgcacataccgcaaaagaccttgtagcgccaaacaacaggtgccgtcgggggcaccaccatgtacccttggaatttgccgacgagtttgcacgaagggagatcacattggccctggacccaagcaacaatggaggatcaaggatcattggtcccttctggagcgcaagtacttccgggtggatcggcgggctccatcctggcctccgtgccactttccacaatgtggttccgcagcaggattttgagagtcggcctcaatgtcacacggaatggttcaggcggatatacatagttgcgtaacctttttggaaactatgggcaaacacaatgaggcagcaactgc

SEQ ID NO: 505110 - DNA, 1021 bp, Homo sapiens
gtatctttgtgtggtgttctcttgcctcgtggcaccctttgtactttccacgagcgcgctttggtctcttggggccgcttcgatttccgtcccagttgtgaccctgagcccaggcggttttcgcaacgtgggtctccgcaaccctcgcttgggcgcggatgggcgccgtggccttgtggccccaccgtttttgagcgcgtgcgttgcccgggaatccggtgtcttccagccccttacgttccaccttgagccaccccatggacacctcgaatttcgaccccgttggtggagaagcccttggaacgaatgccactcgaaggtagcaccaagggcctgggacacaactcacctcgccccattaccagcatcctgagcacgcattttcgaattcaccttccgaaggttctttgaagcaccatggctaccccgttcgatgccccaagccttcaggacccagaagcttcaccggctgagagctccagatttagaaagctctgatctggtggatccagactgaaggctgcccagcctgtgtacctgtagaatgggggcccaggcaccccccacccactcgctgcctccccaggtcagggtcccggagcccggtgccctcaccaggcccaatagggaacccgagggctgttttgttttaaattagtcccgtcgattacttccaccttgaaattcttgctctttccacccaagaaaaccccccaccaggcaccacttttgagaacaccaggactccagccatcgcgtttccaataggcttttccaggaccttccactcgccattaaacaccaataatttgttgaaaatttagtcactagtttagaaagagcacttattttgtttatatcccattttttctttactaaattatagggattaactttgcaccaaatcatgctgctgttattttctcacctttgtattttatcccatagccacttattccacctttaggaaaagacataaaaactgaagaaccttgatgagaaatctctgtgccataatgta

SEQ ID NO: 505111 - DNA, 959 bp, Homo sapiens
  misc_feature (367)..(367): n is a, c, g, or t
ttttaccgttcgatcttgctgacgccacccgggtcgcccattggtgtcttctataatgatcgccgcgcatagcccctctgtgctccctcctcgttgatatctcgtctgtcaccgttggcggggtttcccccccccgcgggagaatgttcttggggtttgccccatcagcgccttgtttagcgccgtgtgccctttggggcccccaccaaggtgggaagccccccctgttgaagtcgccgtctcctgttccccgtattgcacggctgctgagttacacattctgtcgagccgccccgcttctttttgttaacaactccggtggtgcgccatcctctcctaatgggcccaggaatgatccccctttggngtcgcccttaatgacccgtgccaaacgggtgtcgcgccatgcggtgttctcatccgccattttgctgttagctgtggcgccccagttctccgcaggatgctctttgcggcgccaccgcaactgtttatcgtccgtcgtctaggcgggcgcctcccgccttcggggccacggtgcgcgcccggtggtttcctcccctgttggccatgcgccgccgccgagaatctgttgtgtgtgagtgcgtgtccccacagagtctcgactctcactatacggtcgaccccgccacacatgcttctctctcaaagcggtgcattgtgaaaatcattctcctgctgggccgcctccactgtgcgtgaatagatgaagaccaggatgtcccaagcctccgaccccaaggtgtcaaaaatgagtatcgttaccccccgctgccgtagttgttctttatagccgtagtgccgcccccgtgttttggcccaggataaacaagattctgccccccccaatttgtgcatagatcgctgcgagacgcccccgaaatttgcaactttttttagaaacaaaccacccatgaaataaaaaaaaaacataacaa

SEQ ID NO: 505112 - DNA, 248 bp, Homo sapiens
agggcgcacagttctcttttgtcttattttatttttattgttttagagacaggttctcaccgagactgaagtcatgactcactacagccttaacttcctggactcaatcaattctcccaccttagcctcccaagtagctagactagaggggcgcaccaccacacatggctacaattttattttttatctttgtagaggcaggggtctcgccatgttgcccagactggtcttcaattcctggcctcaag

SEQ ID NO: 505113 - DNA, 205 bp, Homo sapiens
ttctctcatctactaccatgtgaactattccaaagataaacagaaaaaaagtacagacttacagtagctgcctagcatcttgccacggtctggcacaacggcagtgccatcattcctccctggtattattcaagtacccaatgcattcctcacttgtcaaggaaagtagactcaactggagccacagcagcttgtagcctggtgg

SEQ ID NO: 505114 - DNA, 80 bp, Homo sapiens
ggcgcctcgggcaggacctccccttcctccgtcgcgggtttgcagggtcagaggaccacgccgagggtccccgcggcccc

SEQ ID NO: 505115 - DNA, 166 bp, Homo sapiens
tgtacagacggggttttgctgtgttgccagggctggtgttgaactcttgggctcaagctattcgcccaccttggcttcccacagtgctgggattacgggtgtgaaccactgcgcgtggccattattaaaataattttttcttcctgatactaaggatcactgttta

SEQ ID NO: 505116 - DNA, 304 bp, Homo sapiens
cgaatttgtgccaataagtacatggtaaaagttgtggcaagatggcttccatatccgggtgcggctccaccccttcacgtcatccgcatcaccagatgttgtcctgtgctgggctgacaggatccaaacaggcatgcggggtgcctttggaagcccagggcactgtggccagggttcacattggccaggttatcatgtccatccgcaccaggtccagacaggggcatgttattgggcctcggaggccaagtcaagtttctggcgccaaaggtccaatttaaaggagggggttcacatcatttgt

SEQ ID NO: 505117 - DNA, 836 bp, Homo sapiens
accctccatgagagttgtggacacttgggtcacctgacccgttgcctctctgacacatgtctccggaggggcagaccatcgtgggccaatgtgcatttgtgcacgtgctggaaccttccatggtgggtctgggctattggctggagccaggaccatgagtcaggagtcgaccatggatctctactagtgccacgggagactggaatgtgggtgtcgactcttccgtgactgctctaagggcgtgcgaggaggctgctttggcattatccaccccgtgtgacagaataggagcctagtcgagctcaggactgctcaacgggtcaggagggcaacgcctgaagtcagacctccctataaggtcaacgagggacagaggctgagggatctctggagtcatgggccctcgtcatctacagggctttggtccatcgtcccacctagactaccttgtgatccaccgtgagccaagcaaatgctgggatcgaaggggcccccgtcgatcagcatgcatttaataagtgtctgagaacgtgtgtgctgaatcatgaatgactgacagaatatagttgggcaggcctgattgaccactaagactggtttgagagtactgagtgatgtcgcagggcccgaatgttaagtagcacaggccaattgcaggtaacatgggaatcacctgtggtacccacatataaagggagtgtggatttagacttacagttaagaacgggtgaagggtaaaccgcaaaggtatggtgagagtgccatcatgtgggaggttacgggggaataggggggactttccagacaggagtttacgggagtgtgtagataaatta

SEQ ID NO: 505118 - DNA, 477 bp, Homo sapiens
tggagagaagggaaaggtgggttggggatacgtgaagtagcatagggcatctcagtggtgtttcaggctgccaggccagtcaatgagtcactctttgcccatgagtgatgttctgagcatcagaataacaaggataggatactggcataccatcattagtgtgattccctccttcctgccttttctttctctcattttgatatgattgactcagactttttaattaaactttttattttctttttaccatgcgtactagccttatacatgtgacgtagggctccctctttccctctctccctccctccttctctccctctctctttctctccctgtgaacatggaactctgctaatgattcaagcagtgatcatgattctgtcttctgatcttgttttatatatacagcaaaagtaaattgagaccgtttggaaataaacacattagtacatagcccagcaccgtgcttatctcaat

SEQ ID NO: 505119 - DNA, 273 bp, Homo sapiens
  misc_feature (146)..(146): n is a, c, g, or t
tgtgcgtaactcgatcatcaacatgctcctagcacagtgttgatgtggagacagcgcgtcttcatcatctgtgtgctgacggagtcatggtctctgatatgtctgtgctggagtggctgcaattatctgatgtttcgaggtagccnttgcaagtaagttgcgtctgccatcgtccccgctcgtctgctgatgtgcaagactgctgtcatccagtaatccgaaggctctgcactggggagggtgcaggagaccactgatcccttctccacctca

SEQ ID NO: 505120 - DNA, 202 bp, Homo sapiens
cattcacagtaactctgagctaacatcccacttcaagaattgaacgagagttgccagcatatgtctacacaaaaacgtgtacataaatgcccataggagcattattcataatagccaaaaagtggaaacaacctaaatgcccatcgatggacaaatggataaacaaaatgtggtatatgcatatgatggcatattattcagc

SEQ ID NO: 505121 - DNA, 956 bp, Homo sapiens
gctggagcggggctcctgtagacctgaggggtccctctctctagggtctcctgtagggtcttatgactgtgaatcctatggatagtacatgatgtcttatgtgacgattcctaggagtccctggcccctagagtagagagcgaggggctggtagccccaagcacccatcgctctcttccgatggagagaagagtgatctggcgttctcactacggacctctgtgaatattgattctatttatggttcccggggaagtggtctccggtgaaggaagcccctccctgggtcacttttctgacctatgctggaagtagacgtaccgcatcttctgggtcctggactcagggggctgggattttgatatatttgtctatgtaaacggactttgtctcgcgaatagaaatataagagaagaagagaaagccaagaaaagacaaagaactacgatgcgatctcttatcgagcgaggaggagcgcaaaacaggggaaggctagcaaagcgcgtgaaccgggagcacatcctcgagatctcgagtgcctaagccctgttggtgcgcaagcacccgcgtggagagcactctgtggcgtgggacgcgctagaggaggcgcgccagggtcttggaattgaacgtccacgtgcacgtgcgtatagctcctgactattcccgcagggtgcaagaacctggttacagccccagaccccagcactaccccaagccggctccagggtaaggcagaccaggcagccacgggcagcacaacagaaccacgaaagaactgtggtcaatggggtccatgggccccctccgggacaactaacagggttgccaaaagggaacaacgccagggctcctggtaagggccacccagtgaagacccccaagggtcaggcgggatgtaccccaaggacacgacggacacgtaaatcttggaaacccatggggggagggagccc

SEQ ID NO: 505122 - DNA, 319 bp, Homo sapiens
aaggcaagatcatgccattgcaccccagcctgggtaactaagaaaataaaagagaagaaaaaagaaaagaaaagaaattagcttattaggtgtgctggcgtgtgtctgtagtcccagcaattcaggaggctgaagtgggaggatcacttgtgctcaggagtttgaggttacagtgagctaagatggtccactgcactccaccctgggcaacagagtgagttcttgtctcaataaataaaaataaataaataaataaataaaggaactactgataagcagcatatgtgcaggtccaaaactgaacaaaacttactaaaaa

SEQ ID NO: 505123 - DNA, 360 bp, Homo sapiens
tttacttctcggggaccaacggccttgcggggtccaagtaactcgctcgcagtccaaaactctgcaacgctccacataaccgtcctgtagacccacaactctcccaggagcacagccccaggacctaacccaccgggttctgctcgctcacccaattcccagtgcgagcgcgcgggggaaacgtgctcgcctcccgcacctggcttccgcggccccgggagtcgccaactctcccagcaggcagctccgacaacccggacagccgggccgatcccccgccccaccacccgctcggctctcgcgtcctcctcttcctcctcccgtggccccttgcctcccgccgtctgcctctgcggccgc

SEQ ID NO: 505124 - DNA, 305 bp, Homo sapiens
cccgtgacacttgagactttctacaatactacagtggagtgagatgcccatgaactgtggctgaccttatttaattcctgggatgagagtttggatgccgtgctcgctgttgctgaatagagcgatcactacgtgcattagtgcttcttatctgttgggaatatttgaatcttgtcgtcaatgctcataacggatcagaaatacagatttcgatagcaaagcgacgttagtcgtgagctctggtgaggcacgtcattggctttagtcctctttagagttagactgtgggtgcgggtagctctaaa

SEQ ID NO: 505125 - DNA, 270 bp, Homo sapiens
  misc_feature (251)..(251): n is a, c, g, or t
actctgctccagtcaaggtgtcccgtgtggttggagtgagttggaaagagttgaggaggttgaggtcacatagggccttttggcttgcagtccacaggaaggttttttttgttttgttttgttttgtttttgagatgcggagtcttgctatgtcacccaggctgtagtgcagtggctcaatcttggctcactgcaacctccacctcccaggttcaagcaattctccctgcctcagcctcccgagtacctgngcttaccagtgcccgtcac

SEQ ID NO: 505126 - DNA, 816 bp, Homo sapiens
  misc_feature (560)..(560): n is a, c, g, or t
gctcttcgacacaggggatgactacattgcaactggagctgatgaggaacgaattaggatctcaagattgaagaagctatatagttacagaactaaggcaatacagacatgaaatacataaaatacgagtacgacagtaggatatcagaagtcttaaagatgcaaacaaatccaaatttataggaagaaactgtcctctgtgggaactatttcctcctgacttatttgcgtagaatgacagcagaggaaatggctagtgatgagctcgaaagagatgcgtgaacaacttgatcaaagaagccatcacgagagcatcacgatggccacagactggctgggacccagactgacttgtaccacttgtggcaacaggttcaaagcgcaagacatggcactttacacgacaggtacaaacccgtagtagctgatgacccaagtgaaaacatttgtaggcctcgtcatgcactgtggacactcgatggacaggtcctgctagcgtttggacagcactggccaacaatatcctgggagccatccacgaaacacgggattgtggtatnctagcttgtacactagcgcaaggcaacctagtgtgtcctgccagatccccttgtaacagcgcactgggtgaacaactggccgttggaccctacgcctgccctttcccttaaattgcccttctggagattcgcaaactagcaaagggagacacaatataattaccttgctatgtaccggtctcaacgacagtatgtccgcgtcaatccgctactgtcctccagtgaccctctggcaacgacctcgacataacgggaa

SEQ ID NO: 505127 - DNA, 170 bp, Homo sapiens
agaggatcccagctcatcatgcttgagctttgttggtcctggtagttagataacggtcaagggcttgttttcatgaagggagagattggaacactcgcaggtgtacgaagctcctcgctcgccgacgtgcaccttgatgaagtatctttgtccccgcagaccacctggcc

SEQ ID NO: 505128 - DNA, 590 bp, Homo sapiens
  misc_feature (32)..(33): n is a, c, g, or t
  misc_feature (51)..(51): n is a, c, g, or t
  misc_feature (95)..(96): n is a, c, g, or t
  misc_feature (168)..(168): n is a, c, g, or t
  misc_feature (235)..(235): n is a, c, g, or t
  misc_feature (251)..(251): n is a, c, g, or t
  misc_feature (256)..(256): n is a, c, g, or t
  misc_feature (262)..(262): n is a, c, g, or t
  misc_feature (270)..(270): n is a, c, g, or t
  misc_feature (283)..(284): n is a, c, g, or t
  misc_feature (291)..(291): n is a, c, g, or t
  misc_feature (304)..(304): n is a, c, g, or t
  misc_feature (314)..(314): n is a, c, g, or t
  misc_feature (316)..(316): n is a, c, g, or t
  misc_feature (318)..(318): n is a, c, g, or t
  misc_feature (325)..(325): n is a, c, g, or t
  misc_feature (327)..(327): n is a, c, g, or t
  misc_feature (330)..(330): n is a, c, g, or t
  misc_feature (336)..(337): n is a, c, g, or t
  misc_feature (347)..(347): n is a, c, g, or t
  misc_feature (362)..(362): n is a, c, g, or t
  misc_feature (375)..(375): n is a, c, g, or t
  misc_feature (377)..(377): n is a, c, g, or t
  misc_feature (398)..(398): n is a, c, g, or t
  misc_feature (426)..(426): n is a, c, g, or t
  misc_feature (445)..(445): n is a, c, g, or t
  misc_feature (456)..(456): n is a, c, g, or t
  misc_feature (459)..(459): n is a, c, g, or t
  misc_feature (486)..(486): n is a, c, g, or t
  misc_feature (494)..(494): n is a, c, g, or t
  misc_feature (497)..(497): n is a, c, g, or t
  misc_feature (521)..(521): n is a, c, g, or t
  misc_feature (526)..(526): n is a, c, g, or t
  misc_feature (531)..(531): n is a, c, g, or t
  misc_feature (538)..(538): n is a, c, g, or t
  misc_feature (541)..(541): n is a, c, g, or t
  misc_feature (543)..(543): n is a, c, g, or t
  misc_feature (551)..(551): n is a, c, g, or t
  misc_feature (556)..(556): n is a, c, g, or t
  misc_feature (568)..(568): n is a, c, g, or t
  misc_feature (571)..(571): n is a, c, g, or t
  misc_feature (573)..(573): n is a, c, g, or t
ttggaggaactttggatgctatgtgttccagnnggtataactaaagatganagagatttatgcaaaccacactgaactttatatggttaagaaannatctcttattttgccaagccatcaagatttagaaatttgaaaatcaatttggagatttgaggattaatgtgntatcacttcatagaccatcttatcttaactaatataaaggtatgaaacatttaaactaatacctgtnacagaggttattcaanaatgngcttgnttctttgntaataataaaaannagagggntctaataaaagcnaaaacacatngntnaaatagngntgntcaggnntattccttgnataaaataaccaatnaaacaaaagggcnanagaaaaaaaaacaaaggcggntttttaaatattagagactagctattgngaaaaaaaaaacacttttntaaattatccnttnaatggaaaaattaagaccctgcaaagntttatganagntcaattcatgattctaaaaagggnaacanaatcntaaagtntgntnaaacttgnatagnctttggatagancancnggcatgactgggaggag

SEQ ID NO: 505129 - DNA, 718 bp, Homo sapiens
taatttatttattggttggttggttggttggttttgaaacagagtctactccgttgcccaggctggagtgcaatggcactatctgtggctcactgcaaactctgctgccggggttcaggcaattctcgtgcctcagcctcccgagtagctgggatcacaagtgtgtgccaccacactcagctaattttttttttttttggaaacagagtctcgctctgccgcccaggctggtgtgagtgtgcgtgtgtttgtgccgagcttctattccatatggcaaatataaataagggagggcagttctacaaaaaaaaaaaaaaaaaaaaaaaaaaaacaaaaaaaaaaaaaaaaaaaaaaaaaaacaaaaacaacaacaaaaacaaacaaaaaacaacacaaaaaaacaaagacaacacaacaagaggcgggggggcgccagacaacacccccacgcgagggggcccaaaacgtatctagcgcccactcacaactctgtcgtaaagacgacaaggagggtcgccaccacagaagaggggggactacataaaaagaagagggcgaggacgcggccgagctacacaaacaacaaacagtagctgacggcaaacaacatagcgcagagcatgagtattattatgagagccaccacacactgggggggggcgtacgaaacagacggcgaccacacccagcagcagaggaatccgcacgacgaatcata

SEQ ID NO: 505130 - DNA, 567 bp, Homo sapiens
tcacacagttagacgcttatcagaggcacaaagagacaaagataaccctgaaggagctgaaagctccacagcggagattggagtatctgtccttaggacccactttaaggccgtacactcccacaggagctgggctttacggaagagtggccaaaaaaaagtcattgaaaaaaaataagcaaaacacgtttggtgtttgccaaaaggcatgtgggagattccccaaacatattttagaaggtactctggttagatgagactaaaattgagctttttagccatcaaggacaatgctatgtctggcgcaaacccaaaaactctcatcgccctgagaaaaccacccccacagtgaagcatggtggtggcagccatcatgctgtggctatggactaggaaactggtcagaactgaaggaatgatagatgcccgctcaatacaggcaacttcttgagggaaacttgtatcagacttaaagagatttgagactgggacagaggttcaccttcccgcacgaccctgaccctaagcatactgctaaagcaacacttgagtggtgtaagacgacac

SEQ ID NO: 505131 - DNA, 306 bp, Homo sapiens
atctagagtatcccccccttacccccacagtgagatatccccaaaaaaaaaaaaattaaaagacatctaccatggtattgggggccaggtgaggcacaaggttcttgtttaggggctttctctaatgacatatcaccacctgtcactgtagtggcttaaagaagtgaggtctgtacttctgcctcttgaatataagtgactctgtgactgctttgcccagtagaatgtggtgaaagttttgctgcgctatgttctggacccaagtttaaagaaacttccatttttcactttctgaatcttagaacg

SEQ ID NO: 505132 - DNA, 311 bp, Homo sapiens
gctgtcaggagagatgggatccgagtgtttatggtccagaggagtgatgctagcggcttccacaagaatcctgttaggtcagttcagccagaaccccctgcaccctgatgtttcctcttagttaaattttccgtgcatggcccccactcctgctcctaggtctcccccactacacaatcccattgcagcagtccctatacctatcatgatcatcctgagcagcctgcccttggtcttgcttctctgagacaaggtctggctctgtcacctaggctggagtacggtggtgcaatcatgcagcctcgaacccc

SEQ ID NO: 505133 - DNA, 353 bp, Homo sapiens
caggtctccattttgtgtaaaaaaggttttagccaggcccgtggctcacgctgtaatcaacacttgagaggctgaggcggcggatcacctgagtcaggagttcgagaccagcctggccaacatggtgaaacctccgtctctattaaaaatacaaaaattagccgagagtggtggcatgcacctgtcatcccagctactcgggaggctgaggcaggagaatcgcttgaacccgggaggcagaggttgcagtgagccgagatcgcgccactgcactccaacctgggtgacagactctgtctccaaaacaaaacaaacaaacaaaaagattttattaaagatattttgttaactca

SEQ ID NO: 505134 - DNA, 834 bp, Homo sapiens
  misc_feature (831)..(831): n is a, c, g, or t
cagtgagctgaatcctcccccaagctgttccacggccagcaggcactctgcagctaccttctcctacagtctaggtaacaacagaatggtgagtaaccatgcactggttcaagggttctgggagttctccatgaaagcttgcgcgttaaattttcgctcagacgtatccaggagtttagctcacgtagcgctgcgaggttgaaatggtgatggatgaataacaacagccaggtcttcctgtgagccgacatggagcttgaacgtagcggcactctgtggctggccttggcatgggctcagccctaggaagaggagaaacgatcccttgtcctgcccctcccttgtggcagggctacgctgcctggccctcctggctcgctagcgcagttccagccccctgtgtcagcaggttctcctcattgggcttgggtcttcaatcctgtggcgacaggaggcagggcagactgtggcaggacaggatgcacggtcagggagacgggaatgcgctagggcgtaggaccgcctatgagcatgaatagagaccctgaagcaagttgactgcttgccattgtgctacgttgtttgtgttctgcagactgagccatcgatgtctccgattgtgcacttttgattttgtcttcgataacgttttactgtgacaggaaataaggctggccatcctcggtggggaaccagtggtaatggactgctcactgtccgcccgtttttcaagggaatgcgtcgaaaaggtagttaggtaggagacaacaaaaacctcaccaaacactgggcccctccttctctcctccccctctcctaccaagagggggngta

SEQ ID NO: 505135 - DNA, 803 bp, Homo sapiens
ggcggctctgctgtcggaaagccgctcagtctctcttccccttccctttcccggctcacgtcttcctctctctttcctttctttcctgcctatcttttttctgctgcctgctccgggtcctgggccattttcctggtgcctggtgcgcactaagtgtgctgctgtgcccctgtgtggcccatgtagtatgaccctgcctgtccatgctatccttctgcgttccccctgccccattgtggcttgcggtggcctgctgtgctggctgcttgcccactatgtgccctggacaatgtagttatgcagtgaagctggaaaggctgccctgcctctgcctgggagcttgggagctgacgctcagtggcccgcagtttggcttgggatcactcgccttcacaaaatggaacaatgacttcctcctgtgaagcagatccttagtatactacttgaagaaccgggaacgtcatggctacagaattgaaaccatgctactctcgagtgttgcacttggttcatgcacgcacagcaaacttcccagtctcctgaaggagcagagagtttcacctttgggcacccttaataaaagtgtttcgcatctcagtggttgactcataggcaagtggtgtgtggcaaaaaattgcaacacggctattttgtcgtagattgtccagacaaaagccagatcaaccaaaaatccccattcttgaaagaccgggaacctggaggttggacccaagcatgcttgtggtatccatgccatacagaactgactccttctagaacactgctagccactgaagacagac

SEQ ID NO: 505136 - DNA, 330 bp, Homo sapiens
  misc_feature (21)..(21): n is a, c, g, or t
tcagtgacgcagctcccctgnaagtcatggcctgtcctccaagaccctgctccacggccttcgacagtcctcccttcgttctctctttccccgtccttcctctctctctctctctctctctctctctttgtgtgtgtgtgtgtgtgcgtgtgtgtgtgtgtgtgtgtcttgtgcttcctcagatctttctcgcttgtgagcggggtggtgtgttccctccatctctccgaactgctggactgtcatgctgtcccttacactccacaccctgcgtggccttctgtcgtgacgctgcgtgtggagagagagggtactcctactagagtcgac

SEQ ID NO: 505137 - DNA, 132 bp, Homo sapiens
ctgtaggactgatatatagaggatccccccgggagccctccgtgagtacttaaccctccttgagcccttaaccgttgtgtcgatgagtgagaggaggagtctgcctcaaggagagggttatagcttctgcga

SEQ ID NO: 505138 - DNA, 266 bp, Homo sapiens
cccccgcccccgccccggccaaacccaaattaattggaattaaacccccttaccccggaagtccttttaattttttttttccccaaaaaacccgggccggggggttgggggtttgttaggaataatccttttaaggggccccacgggaggggggggaacagcctcccagaaaccttttttttttgtataaataataatactaacaaacagttggggaactagggagaaaaccagaccattaaaactgtttgtggtcgaatctcaaa

SEQ ID NO: 505139 - DNA, 171 bp, Homo sapiens
gatctagaggatctttatatataactaccagatagatgtcatttgttcttggccacaaagctaaagtatttattctctagactgttaagaaaaaattgcgaccctggttaactgatgcttgtgatgtggggatgactttgagaaccacgtaagccattttgctaagctaag

SEQ ID NO: 505140 - DNA, 614 bp, Homo sapiens
  misc_feature (72)..(72): n is a, c, g, or t
  misc_feature (191)..(191): n is a, c, g, or t
  misc_feature (266)..(266): n is a, c, g, or t
  misc_feature (269)..(269): n is a, c, g, or t
  misc_feature (302)..(302): n is a, c, g, or t
  misc_feature (378)..(378): n is a, c, g, or t
  misc_feature (381)..(381): n is a, c, g, or t
  misc_feature (413)..(413): n is a, c, g, or t
gaattcggcttcaccagacgtgaaccgcagctgccaggggttcctccagaacctcctccccctggagcttgntacaagtgccagaaatctggccactgggccaaggaatgcccacagcccgggatttctcctaagctgtgtcccatctgtgcaggaccccactgaaaatcggactgttcaactcacctggnagccacttccagagcccctggaactctggcccaaggctctctgactgactccttcccagatcttctcggtttagnagntgaagactgacactgcccgatcgcctcagaggnctacagggccatcacaggtgctctaggtaactctcaaagtggaaggtaagtccgtccccttgttaaccaatacggnggntacccactccacattaccttattttcaagggnctgtttcccttgcctccatacctattgtgggtattgacggccaggcttctaaacctcttaaaactccccaactctggtgccaacttaggcaataccttttaagcacttctttttagttatccccacctgccctgttcccctatcaggccgagacactttaactaaattatctgcttctttgaccaccggaaagccgaattc

SEQ ID NO: 505141 - DNA, 227 bp, Homo sapiens
tccactccacccttctccaggggacccttagatcacatcactccacccctgacaggccccaggttaggaatagtggtgggaggaaggggaaagggatggatctcaccggtcccagcaactgaaaggacaccactatctggagccacccactgaaaggggtgcagacatggagctgtacccatgctgatttctcatctggtcattaaagctgtcatggccagcaacca

SEQ ID NO: 505142 - DNA, 159 bp, Homo sapiens
caagtccatcccgttatgacaactcttagtcattaagtctggaaacgaaacaccctaagtctagagtaaggtctgttatcagaaaccaacagatgatggcattctaaacgagtcagacgccacagtgcattcccaattaaacgtcagacaactagacca

SEQ ID NO: 505143 - DNA, 131 bp, Homo sapiens
tttttaccacaccacggataaaatcgagatactttggtatcagactcagcacagctgtccatgactgatcacacgggcggacatacgagttggatgtctgttcttgttcttcttgtcctcaaacaaggtca

SEQ ID NO: 505144 - DNA, 168 bp, Homo sapiens
taattggagctttattttcttgggagggagggtctggctggtcatccaggcggtagtgaaggggcttgtcataactcacggtatccacaacctccggggctgaaatgatcctccagcctcggcttcccaagtagctgggactacaggtaagtgccagcacaagggtgg

SEQ ID NO: 505145 - DNA, 524 bp, Homo sapiens
  misc_feature (419)..(419): n is a, c, g, or t
  misc_feature (465)..(465): n is a, c, g, or t
  misc_feature (519)..(519): n is a, c, g, or t
aattcgggccgcgtcgatacggctgcagacgacagaaggggctgtctcttggatataagccattttaactggggcgagatgatatctcattgtagttttgatttgcatttctctaatgatcaatgatgctgagcaccttttaatatgcctgcttgtcatttgtttgtcttcttttgagaaacgtctattcaaatcctgtgcctatttttgattggattattagactttttcctatagagttgttttagctcctcatacatattatggttcttaatctcttgtcagatggatagtttgtaaattttttctcctattctgtggttgcctcttcacttttttgattgctccttgctgtatagaagctttaaactaatgtgatcccatttgtccattttgcttgatgcctgtgctagtggggnattactcacgaaatcttgcccagactgatgtcaggagagttcccgntttctgtagtagtttcatagtttgaggtctagattgtcttaatcctttgttgcnttttc

SEQ ID NO: 505146 - DNA, 437 bp, Homo sapiens
taaaaaatgtgtggttcccgttgcccaatgggtttggaggccgggtttgtgggccctttccggccgggttttaaaaaaaaaaaaaagcccccctgggggcccccccccctggtgggggttttacgggggggggtcccccaaaatcccccctcccggttttaaaaagggttgtcccaccaaaaaaaaagcggggaaattttgggcccccctttttttttcccgggccccaaaaaaaaaaaagggttttggggcccaaagaccctttaaagggggtttttaaaaacccccccttgtttggggttttttgggaaaccccccggcccccccttcctttggtccccgttggggccttgggaaaaaagggggcgggggttggtgaaggggattttggttttaaacccaaaagaagaaaaaaattttaaaacccctttttttca

SEQ ID NO: 505147 - DNA, 953 bp, Homo sapiens
ggccggaggatgatgtggggagtatctcttcgaaaggctcactctcaagcacgattaagagccttttgagcccagtgatttctgaaggggcccttgctactgctacactaggggcttctgcctgagagcctctccgctccgagcctagataggcaagcttgtcttgtgaagttatcgcatagatcaaggcccttgggactcaattatggcaagagtagaaagcttttgtgactgcaaaaaatcaaaattcacagacacacacggacccatgaaaaaatttgggcggggggcctgggccccccgaggaaaagggttttttagaaacccccttcttggtgggggcggggcggcgcgccccggtgggttcagggtcaaacattgtgggcacaaaacgccgtgtgctccaaagaagaaccccggggcccagaacatcagcgcgtcgggagtttctctccaccaaattataaaaaaaccgcgccgggcgcggacgaccgggcgcgttcttcgaaacacacaacatccacagaagagtaggtccagagcggccaacagatcgccggggtcgatacaaacaggagcggggtcccagagcaacgctccgaatatatataattcagccccgcgccgcgagggggaaaaagaaaaacagcgcgaagcccttgccagcacagcccagaaaggtgcgacgaaggagcgaagaagcaaaaccacacaaccacaagccacacaagtcaccagaaggcccaacgaaccaacacgcaaagcaaacacaccagcaaaacgccggcgacgacacaccgaaacaacgaaaacacacaacgacaaagaaaacgacagacaatagggccagccaaaaccaaagccacacacgacgccagcaacaggaaaagacgagaacgcaccagaacaacgaaatgaatccagcagaaagaaaaaccgagagcgcagtgaga

SEQ ID NO: 505148 - DNA, 1700 bp, Homo sapiens
  misc_feature (441)..(441): n is a, c, g, or t
  misc_feature (1075)..(1075): n is a, c, g, or t
  misc_feature (1570)..(1570): n is a, c, g, or t
tatggacgacgtcgttgctgccccactggcggggccgccccccaccactgattgggttgtggggggccgccctcattctgcggggggggggtgatgcatgcagacccctccgtttgttggcgcgttgtgaggtcgcgccgtccatgattggatacggttttgtgtgtcctgccgcccagcagtaggggggggcgcccggcccctctgtgtagtggcttccgcgcgcctcaccagacatgtgggtgtgcgcgcgcgtgttgcgccgcgccgtgggtgtgggacggtgtgggtgctgtgtcgcccgcgccgcggactcgctggttggaggccgtgtttgtgttcgatcgcccctatttgcgcctgtctcttttgttctgtcaccctgtgtgtgtgggtgtgccgccccccgctccctttgttgttccctcgctaatgtgtgcntcgccctatgtgtccgcccccccccttggggggtcctacaattcctcggtgtctagaccctcttgatgtggggcgctcttcctcccgtcgatgttgtgtaagttgttctgtttggcgcccacaccgcccctttgtttttggctgccccccttgattgcccccgccgttttgttacacacgtccgacaagtgtcctccttgctctctgtggaggtcatcaccgcgggggttggtagcgccgattttgctcgcagaagtcgtctcctccataagagtttttgagcgccgcccccttgtggtgattcccggggcgcggccaccactattggccggtgacgccgacatgttttggcggccccccggcgcaccccagtagtgtggtgcccatgatagtggtggaagggtcttccaccccccctttttgtgcccctcgtcgctcaatgttgtggtgtgacgtcgtagttttcgcagcgccgtttttggacctctatatatatagaggtggccttctccttgttttgcacacgtttggtccccaccccctgtgtgtctgcacgctcacgctccgtgggcaccccacgcctctgtgggatttttacattctcttgtgcgcgcagtctgcattgtgacgcgcnctgtggggccgccatttatatatagtgtgagtattgtatttgtctctcacccacgtgtgcgcccacagagagacccccacactctgcgatgacccccccctcttttcttggagccctttgccgccagatataggggggtagattctctcgagacattaagttctctctcaaagggttttctcacacacactctcgaggatttacacgcccgctcaagggccacgcattctcgccacctatattcttgtctatatatacccgagaatacacacccacacaccatttatatatatatataattacaccaccaccctcacaccacatacacaaatctttctcttatggacaccacacaaatattgacacgccacttcttctccacctgagacatcttacccccaccatattttgtgccccacagaccccactgtttaaccctcccctggtttttattgagaattctgagacccgcaatatccccccgagttctccgcnatcgagcccacgtccaataccaccctcctatatgtgaaaaacattcctacccctccaccctacccttacttatatgataatgtctcccataccccttcaccatttcccagccttccccctccaaccttta

SEQ ID NO: 505149 - DNA, 407 bp, Homo sapiens
cgcgccagcaggcggccgatacggccaaagccgtacaacaccacatcggtgcctttgcgggcggcagcgttttgctggccaaccacatcggccatttcttcacgcacgaactgctcggcagtgcggccggcgccttctttacggaatttgtaggccaacttgcccaggtctaccgaagccgcgccgagcttgagctcgctcatggctttgagcagtgggaatgtttcgtggacggagagttcgctgtcgtcggcggagcgatggcgcgcaaagcgatgggctttgagaatcgcgatgacagactggttgatcaggctgcggccatagatcgagctcaccacattgttattgcggtacagctgaccgataagcggaatcatcgcttcagcgagtgcttcacggtcgat

SEQ ID NO: 505150 - DNA, 607 bp, Homo sapiens
  misc_feature (23)..(23): n is a, c, g, or t
  misc_feature (76)..(76): n is a, c, g, or t
  misc_feature (103)..(103): n is a, c, g, or t
  misc_feature (111)..(111): n is a, c, g, or t
  misc_feature (119)..(119): n is a, c, g, or t
  misc_feature (128)..(128): n is a, c, g, or t
  misc_feature (130)..(130): n is a, c, g, or t
  misc_feature (135)..(135): n is a, c, g, or t
  misc_feature (141)..(141): n is a, c, g, or t
  misc_feature (153)..(153): n is a, c, g, or t
  misc_feature (183)..(183): n is a, c, g, or t
  misc_feature (196)..(196): n is a, c, g, or t
  misc_feature (203)..(203): n is a, c, g, or t
  misc_feature (233)..(233): n is a, c, g, or t
  misc_feature (279)..(279): n is a, c, g, or t
  misc_feature (510)..(510): n is a, c, g, or t
  misc_feature (601)..(601): n is a, c, g, or t
cttccaactcaaagcaagtcacnccccacggcgttctggccaaagacatcagctaagaaagggaactgggtcctanggcttggggtttccaaccctgacaganccgcaagngaaaacanctggttctngncagcntctagngaaatcccagancactcagccctgacaggttaataccctgcncagatcagggggngcggggnacgacagactcaccaagccacagacttgtnttccacaagcacgttcttaccttagccacgaaggaccaagccacangtactaaaggttgaactcaaagatatgtacagggtattaaacaaataccaaggggaacagttaacttcaatacaaggtcaaaatcagcaacaagttctacaatccagtgctgatatcagatacaagcttcaaggacaatttcttttcgaaggcttattccagtttcgtgaggctagcatgaggggtgtgcatttgccaggggcaaatttctattctcaattaacccatgcngcaaatgctacgcatctgctgagtccgtttagaagcatttgcggtggacgatggaggggcccgactcgtcgtactcctgcttgctaatccncatctg

SEQ ID NO: 505151 - DNA, 1382 bp, Homo sapiens
  misc_feature (1242)..(1242): n is a, c, g, or t
taaaaccccggttctggggtgggtgtgggtataatactaagtggaaatgatatcaatttacgggggaaaggcgcttgggtgaagttaggccttattctctctggtgtcctcttcgtacgagggagaggaattgtgaagtagcatagaaaaccgaccgtggattacctccggtcgtgaacctcgaaatccacgtagcgaactttaattcgttgtgaaccacaagcgaaacctttataatataggcgggctgtgccaccaattgcgggaaatttctccgtgatctccaaacaattcggaggtctcgtataaaacccccatattgtggtgtgcacttgtgggcacctctatagaaaatatgaggattgtggcccgtgttatctccccatagagtgtataaaccttgtgttttcccccgtatgagggtgactacaaaggtctatagatgtgcgaaactaccaactctgtgagacgtatatatgagtatgaagttctgcggcgccttgtgcgactgtggggtgtgacagaaggtctcttttatgaagggcgatgtggtgctaacgcggtgtgctctgcgggaaaaggggtccatgatggggagtatctcggtgggacgtacccacgaggagtagttgtttcgcggcggccccaccgaaagactcgcagagaaaattctccttattataacaaggtctgccgcgagaaggtgttatatgggggcggtgacgcggttgttataagaggagaaccccctatgtggggggcagatgtctatcaggggtgaataacgaggaggataacccctggggtgttgtggcggcgatcattctcgacacgtctagacaggatttgataaagaggaaggggtcttcccacaacataagagggggtggtacatattatccaatgacgaggtatactattgatgaagcgatggtgtgctgcttactaagtgaggccccacctgcactaatactattttacacaacagtgtgggcgaccaagttgtgggtgacacaaagttatttctcaccacactcttggtgggtgtttctacaacagcacagttgttacaatctagagatcgcaacgacacggtgtcgtgtgtggagaagacaccccgcttctttgctagtctatggtagtaaaccgacccgcatagattctaccaatcaatacgacaggagggggccatccccccctgataatgtttgtagtaaagaggggcgggaatcaacacccaanagacgtaggtaggcaatatcaactattagtcggctactataacccgctattttgggtggcacaccaccgaggattaatacgagacggagatatcaacccccggggtcgggcgacccgcgggatataaacacacaacagtg

SEQ ID NO: 505152 - DNA, 549 bp, Homo sapiens
atggcgttctagaggatctcggagatggagtctcgctttgtcgcccaggctggagtgcagggcattatctctgctcaatgcaagttctccttcccgggttcacgccattgtcctgcctcagcctcctgagtagctgggactaaaggtgcccaccactacgcccggctaatttttttgtatttttagtagagatggggtttcacggtgttggccaggctggtctcgaactcctgacctcgtgatccgcccgcctcggcctcccaaagttctgggattacaggcgtgagccaccacgcccagcttatggtttaaattaattaactgaaaccagaagcagcttgggtttcaagataagggcccagttttctggatctttttttttttttttttggggaaccggagtctggctatgtcgcccagattaaagtgcaggggcgcgatctgggttcactaaaagctccaccttcgggggttcaggccattctcgggggttaacctcttgagttgtgggaactacgggcgcaagcaaccacacgggcaaactttggg

SEQ ID NO: 505153 - DNA, 1117 bp, Homo sapiens
gggcttctagggcggcgagcggacgggctggctatcgagctgagcggggctgggaacgcggagttgctgcctgcctgctcgggctgcctggggctccgtcgcggcctgcagccccgcgggtcgtcctccctgtgcctcgcccctgcggacaccctggccgtggacaccctggcctgtgggcaccctgcgtgggcgcgcggctgctggggcctgctgtgcctgtgctgtgccggccggcggcatgacaggtcacgtcgctcgaccgggcgccatgctgcgcaaagatggctcacgcaaggagtgcgcgcggcgctgctgctgtgtgtgctccgacttgcctggccctatcttggccttcgactgcctcgacacgtgcagcggatcgcctcaaacgtcggacctcaagctcggtgggtactgctggtcgggccctggggctggcggcggatgtcaggcgcgactaccgtgcctgccccgacgcaggcgggtcgcgccgccgcaggcttcccttgacaagaggaagcgagcgcgttgggcaagcgacgctcgacgggacccgatcgatgggtcgctgagaaccccaaggccaagcacctgaccaccatgcgcacgaaatgctctgcggcacgcacggaacaagcggccacgaccgccgctgtcgatcacatacacacatcccgcatacgtacgacatcatcgccagttaacgcaccgcgcagggggccccaggccgggagttcataacacatcgcctccaaacagaggcgcgcgactactggaacgaaccctgcgcacgaaacattcgggaacctaattcccctggatcgttggtcaggcccgtagtacaacgtgttcagaaagcacccgcaaattatcagaccatcagcaagaaaccgacattagagaaacacgctcgcgaaacaaaggaccacatccaataccagacgcaaccctgatggacaacaaacatccgcagggcgcacataacctggcccaaaccactagcaacggcaccacgactaaatgtgaaccactgcgggcgcggcccccacccgcgtgcgcaaaccccccgacccccacgtacccactcctaaccccatgacgagaacacggaacc

SEQ ID NO: 505154 - DNA, 306 bp, Homo sapiens
  misc_feature (168)..(168): n is a, c, g, or t
tggggaacgagagtaatttgaagaatgcttgaagtcagcgttttctatttaagaaagacttttattttttctttgggggtataatgtggaagctggttttagtctaggatttatactgaggagaggatttagataggtgggcttaatttcaaggggccttttctggcntggagaaggctttttacacacacacaacacatacacacacacacacacacacacatatcacagttttcacacagcccctgctgcattctctgtccatctgtctgtttctattaataaagatttgttgatctgttcaaa

SEQ ID NO: 505155 - DNA, 228 bp, Homo sapiens
aagtggaaggtgtgtcacgctcctctctgaggtcatgtcgacggtggactgactccaacatcctggtctgcagacgaagcctctgagcatactcatgggtcagagagatagcagcttcccgcttatccacagcaatgactcggctctgagtgagagctggctcaagaaggctgatagaagaatggctccctgatcctgcaagcccaacctccaagaatgaagggggac

SEQ ID NO: 505156 - DNA, 250 bp, Homo sapiens
caacctttaccaagttaatactgaatatacgcacaacataaagactgtatgcttttacctactaaaaggcaggtggaggttttaaaatcttagcattcctgtctgtgtatatatgtatgaaaatttaggtttaagctaatgtttaacacaatgcatttatctcaatttgggggaaaaaaagagatcctgactgtgcgacggtttggtatgaaaaccgacacttttgctgctgcctaaaaccttggcaagc

SEQ ID NO: 505157 - DNA, 397 bp, Homo sapiens
ggctatcacatatccaaagtacatgtagacaccacggaatattcaaattatacttatatgcacgttatagggacttgctgggttcttcgcttgtattggctccaagatagtccttgtcttcctaatgagggaggtgttcaatgacttggacagtgactaaactctaccccttgcatttcccacccataaaagacctgtaccttgtcatcttgccaaactttatgcaagagcggttccaccagggatctttagaaagcatttcttgaaattgttccaggagtcttcccccataaaggcttccccaatttcattcccaaacctggccagctccagtgaatataaatacaggagaatgatccttgtggtaaatgcttatgacgagacagcaaagcttgaa

SEQ ID NO: 505158 - DNA, 111 bp, Homo sapiens
gaggctgtgacccccctcttcagttgaatccccaagggagggaccagtgagtgtccactctgatacctccaattgatcttgcccctcatgtggtcacatgtgtgtgggtgg

SEQ ID NO: 505159 - DNA, 165 bp, Homo sapiens
tttaagattttttctttaacagaattcagatatttaaatattttctagtcaaaattgtttataatttagatttttcgcttttttcaattaaggagcaattgagtgattcctcgtcttagggttgtttcacgttccttcttgttaggtttaaatccaccaaccagg

SEQ ID NO: 505160 - DNA, 199 bp, Homo sapiens
  misc_feature (32)..(32): n is a, c, g, or t
atccaagcagtcgatagcaaggactaaccccnttccttctgcataatgaattaactagaaatagctttgttaggagagccaaagctaacacccccgaaaccagacgagctacctaagaacagctaaaagagcacacccgtctatgtagcaaaatagtgggaagatttataggtagaggcgactgcttggattacaagga

SEQ ID NO: 505161 - DNA, 213 bp, Homo sapiens
agcgaccgacctcactgaaatccacgttaaataattaattcctcatggaggaacctctttcaaggggattcctagcttagctctcagccctctctgcgccgcccgcctaaacacaagcacgttattttcctcaagctcagatgaatcacttactacatgactacagcatgccgttcctaaaacaatctggaaaactaatctcagccgcttaat

SEQ ID NO: 505162 - DNA, 136 bp, Homo sapiens
  misc_feature (104)..(104): n is a, c, g, or t
tgatacctgtccactcttagaccttagttcagcagtcacctcccgaagcaagccttcctcaagctgcacaggtgcagtccaatccaccatcacttatcacaggncaacaggagtcaggctgtcggtggattactca

SEQ ID NO: 505163 - DNA, 651 bp, Homo sapiens
  misc_feature (30)..(30): n is a, c, g, or t
tgcagttttataacttggggggagatagtngacaatcagggattatttctcatccacaatgactgtctataaatttttgaaaggggtaacaggtccataggtacccgaagtacagagctttttgggggaatcttcatcctcattatattctctggacaactgcccatggattcggcttgggacattccttattctttgggcccaaacagccttgttgaccctggtatcagttggcccatttaaagttcccatctccttcctgaaaatttccgattttttttgagggctcaaggggggtcctttttaaaccccccctcatgggtgccttggaaatggggaggggggtttcctcgggcccccacctcattgggtggcagaacggcccttttttttttttggcccccttttttcaagaggagcacttttggcgggggccggggttaaatttttagggagggttttttccatgaaccacgtaggggttgagcgggtgggtaatataaaaaggacctgcggttaattttcaaaactgtgtggtaaagggccctaccgcgttaacaattataggttgggggggcgctttgcgcaaaaaatcacggggtttccccccggtggtatttcacaagggtggaaagaaaatattaggggttt

SEQ ID NO: 505164 - DNA, 807 bp, Homo sapiens
gaattgtgccatgccctattgcatccaggtcatgaagggagtacttgacgaaggtggataaactcagatgcttcagaaatcactgagaaaggaagaagaaccaagctacagagacacaaccgcatggtcttatggtcagcccaagatggatgctgacagagaggacccaggtgtggccgtctcctcctcgcaggcagcccttgtgggtatggttataccgtcaccacccgttatggacggccacagcctggcttggggtacagcatgtgagatgaagcgctgatcctgtagtgcaccgtattgtcggactgaacacatgcgatctattacccacgtctcaggtttatgatgggggaaaacaggcaagcgtgtgcgttgtaacctttatttcatgaaggacttcttgtgtgtctaactataaacggtggcatcacctatgtgagataccttatttcagcattccgacatcattgtagaattatatctcgaaggggaatagtaacaatgtctaatacacttgggcttaatttcgttcccccctgcttatctttaaagaaccgtgcttccaatattcagatctgtgtggtgaagaacctggattaggcactctgtagtgtttaaaagaaagatagaaagtctactattgattctcttcaatttagggtatggtaagaggttacaagacgtatgtctaaggcttgtaattcgtttatcaagaaaaataagaaaacctgggtatgcctggtgatgggtgcacaagccaatatgaatggacgagggggtcgaatggaatgtgatgcggggtta

SEQ ID NO: 505165 - DNA, 867 bp, Homo sapiens
agccagcaaagacaaggtgcgaactgacagacaaacggtcagtgtagagaaccacgtgggctccatgcaggcgccccgatgagcccggaagatggtctcccgcagggcgacttttccgctcgaaggcaacgccaggctcgtgtgcgtccagacgaacacacgggtagggccccgccacctcaattgggctggaagcccctgggggcccacacattggggaaaaattaacaagaaggagatgggccacatgaaataccatcccggttctttgcaaagtacacagcgccgttggggtaaaaaaaaatttttaagtactgcgccttaaattgtaggaagcttttgcccgcggagtccccggcaaagtcggccattctacgagccacaactgattttccgggaaccccgcgcaaagtatcgtcccgcgatatgggaaccccgatataaatatttagcagcgtttttcaccacgtgccagagcagagaaaccccggacgtgggacacaaaaacatctggggtaacaacacgccctgcgagtgtttaggaagcaggagagcaccatccctctcagattgttcacacgaaggacattgaacaccattagccactccgtttgaaacccacggtgggccaccaatgccacagaagcaacggccttccttaatcaggtgaacccggcacaaacacggacacctgtggggaacgaaaaagagggcaagggaaagaataatggggtaacgccgaaaccctacggggtaaaaaacggcacataattcacggggtatcaaaagagctgcaagcggaaacatcccataaaaaaaaccctcagggccattatggggaaaaaaaagttgggaaaaaaaaataaa

SEQ ID NO: 505166 - DNA, 566 bp, Homo sapiens
agcgccggtgtaaattcgcaaccgacagtgtcatttccacaaagggtattgggtaatgggcatcataacagatatattgtgcaaaccgcaggtattcatgcgcaacatttctggaacggattgggggtagcacatttgcagaagctcgcccctagtggacgtcgctcgcgtgacgagacgtgactccttgtacgtgtgcctcgcactcccaggaggcctgcgacttgatgcatgataaagaaaataaacgcgccacgcaggccatgaaatattccccacctactcatgattcagcagctggacatccacgctttgagatctgcgcctaggaaccatgtatctggcaacctctctcatgaacacacaatcccgaggcgctcatctcactccaatccgacaatcgagcccttgcaggaaggtggtggctctcgttggacacccagaagttcctccggtaagaggtcgtgaagaacagcaccaaacgtcgttgctatcccgcggggaagtaaaaaatgcagtgtcattccccacacttttcgtaaccaaccacccaccgcccacataca

SEQ ID NO: 505167 - DNA, 214 bp, Homo sapiens
tcagaactgcctattattaaccgagttggctggacatggtggcttaccactgcaatctcagcactgaggcgggagaatcgcttgggcccaagagttcaagaccagcccgggcaacatagtgagacctcatctctacaacaaatttaaaaaatcagccagggatggtggcacacgcctgcagatcccatgcctgctcagcgagcgcgtgcagcgc

SEQ ID NO: 505168 - DNA, 913 bp, Homo sapiens
gtaagtgtgtttaaggattgttgtaatgtagttgtctattataaccacaaatacaagtgggtaaacaggtgtcggataacgatgagcggactttggaagcagttcgcaggggcgagacctttgtgggttgagttggctccgttctatcgcgtaaaaaagttttgacgcgtggccaccattgtgggttacgctctcacgaggagtggttgtatttccgcgcatagatgcttgttacctccgcgcttatgtgccaagatgcgtcatcgttggcgtaatgattccgttatagggtcttttgctgtcgccctcctcttcccgagttatttattgtccctgtgataacaaaatgttcctcccccagggggtccccgtgcgatgtctttggggattggtcaccctcttgccactcctgttggcggttgttcgactaaggccctcgacgaacagttttattctgtgcccccatatgggggttagtcttacccctctgtccgggttagtgtacatcgcgtcggaagtagatctatccctgggggagatgatacgctcggcgcgcgggcgcatgttgtctcgtcggccgctgttctctctctcatcgcgcctctgtggggacgagattggggggggtcgcgactacatatggcgcgggggaaaattgttcgccgaccggccgtggggcgccaccttctatgtagcgcccccgctacgtgaggctatgtatctgcaaacacctactgccgtggtctgtattggcctgcgtcgccggttgtagcaacatcggcaccggtggattactgaagcgtgagtgcaccaaacgttgcccaactgctggagcgagggagctcgactcatttgcccggggataacgcaaccccgcggggggggaaaagaaccccccccgcccaacataaca

SEQ ID NO: 505169 - DNA, 170 bp, Homo sapiens
gaatgccttcttgtggccccaaccactgcttaggcctcccaacttctcccaaggccaagtatggggctctggctgtgttctcgaggttcaagacacttagtcctccacagtgggtggaggagtgcaaggtcttccaggtcagatggagacgcagaacctcttgtcaagct

SEQ ID NO: 505170 - DNA, 427 bp, Homo sapiens
ctgctgtgggtactgagtaactagtgccccgagagcccctcggccaccttcagacaccttcgtcttctatcctggctctcgcggacctcgggactggcactcgattctccccttttgggcacccgagtcggcactggactttcactggcccttcggaggtgccctctgccacatggttctgacgggcactgtcctcgacgtctatgccagcctcttcctcattacagcgctaagcgttgctcgcctactggggtggtggccctagctgcggggcccggcaaccgcctctcagtcttctggggcccaatagcctccctggtcagtttgcgccgccgctgcccctgtcaccgtgcccacagcagtcttccgggtggcaggtgaggtgtgtagtgtgcgcccatatctgctgcgtttcccccgcaagtac

SEQ ID NO: 505171 - DNA, 944 bp, Homo sapiens
  misc_feature (13)..(13): n is a, c, g, or t
  misc_feature (66)..(66): n is a, c, g, or t
  misc_feature (76)..(76): n is a, c, g, or t
  misc_feature (82)..(82): n is a, c, g, or t
  misc_feature (85)..(86): n is a, c, g, or t
  misc_feature (117)..(117): n is a, c, g, or t
  misc_feature (140)..(140): n is a, c, g, or t
  misc_feature (175)..(175): n is a, c, g, or t
  misc_feature (180)..(180): n is a, c, g, or t
  misc_feature (218)..(218): n is a, c, g, or t
  misc_feature (222)..(222): n is a, c, g, or t
  misc_feature (227)..(227): n is a, c, g, or t
  misc_feature (315)..(315): n is a, c, g, or t
  misc_feature (328)..(328): n is a, c, g, or t
  misc_feature (339)..(339): n is a, c, g, or t
  misc_feature (353)..(353): n is a, c, g, or t
  misc_feature (368)..(368): n is a, c, g, or t
  misc_feature (370)..(370): n is a, c, g, or t
  misc_feature (375)..(375): n is a, c, g, or t
  misc_feature (383)..(383): n is a, c, g, or t
  misc_feature (386)..(386): n is a, c, g, or t
  misc_feature (388)..(388): n is a, c, g, or t
  misc_feature (394)..(394): n is a, c, g, or t
  misc_feature (412)..(412): n is a, c, g, or t
  misc_feature (414)..(414): n is a, c, g, or t
  misc_feature (418)..(418): n is a, c, g, or t
  misc_feature (420)..(420): n is a, c, g, or t
  misc_feature (422)..(422): n is a, c, g, or t
  misc_feature (438)..(438): n is a, c, g, or t
  misc_feature (440)..(440): n is a, c, g, or t
  misc_feature (503)..(504): n is a, c, g, or t
  misc_feature (524)..(524): n is a, c, g, or t
  misc_feature (530)..(530): n is a, c, g, or t
  misc_feature (532)..(532): n is a, c, g, or t
  misc_feature (561)..(561): n is a, c, g, or t
  misc_feature (694)..(694): n is a, c, g, or t
  misc_feature (696)..(696): n is a, c, g, or t
  misc_feature (723)..(723): n is a, c, g, or t
  misc_feature (787)..(787): n is a, c, g, or t
  misc_feature (857)..(857): n is a, c, g, or t
  misc_feature (879)..(879): n is a, c, g, or t
  misc_feature (924)..(924): n is a, c, g, or t
tttttcagttttntgattttgaccttttggcccaaggttattacagctacattctgtttggttctngggaaaggtncatttnctnngatgctggtcccctaatgatgggcccatctntccagtgccgtcccttccctccngcctggtacaggagttctggagctacggtcctgantttanagaacagcccggtcagcctcgtccctgcggtgcaagcnaggnctggnctccctccctgcctgttcttggcccggccacatcactccctgcgtttcttcttcttctccggctcctggtacattggcctgcctttantcgggcactggtnatggggccgangtgtcctccttctntggcgagcccctttntngccanggcccctnggntnatctcngagcagggcccgctcagntnttcntngntgctcaacagcttctncncgcgccttggggtcggcccctacacccctcctcctgctcctcttcctctccatgcccgggctnnggggctccttctcacctttncctctntnctgctgtataacttagcatatttttttcntcttcgtcttcttctgccgcctcccttcaagcaggcgcctgcaggccttctctgggatctcatcttcagggaaaatgcctactgccaggtcctgcagcttccggatcactttgtagagacgctttctgttctnanaaggggtgctctggcggctggccattncaaacagtctgttagcaactgcctcgtagtcaaactggagaacggggccgccactgtccctgtngtcacctgcctgctcctcaccagcctcaggttcagccctgcagatggagcctgcgagcggcttctcaganctcttctgggacagcgcgtctncacgctcaccaccctcagaggactcatcactgtgcgacgccaccncctcatcctgtgtgttcagt

SEQ ID NO: 505172 - DNA, 3370 bp, Homo sapiens
gcccccgcccggcccgccccgctctcctagtcccttgcaacctggcgctgcatccgggccactgtcccaggtcccaggtcccggcccggagctatggagcggcgctggcccctggggctagggctggtgctgctgctctgcgccccgctgcccccgggggcgcgcgccaaggaagttactctgatggacacaagcaaggcacagggagagctgggctggctgctggatcccccaaaagatgggtggagtgaacagcaacagatactgaatgggacacccctctacatgtaccaggactgcccaatgcaaggacgcagagacactgaccactggcttcgctccaattggatctaccgcggggaggaggcttcccgcgtccacgtggagctgcagttcaccgtgcgggactgcaagagtttccctgggggagccgggcctctgggctgcaaggagaccttcaaccttctgtacatggagagtgaccaggatgtgggcattcagctccgacggcccttgttccagaaggtaaccacggtggctgcagaccagagcttcaccattcgagaccttgcgtctggctccgtgaagctgaatgtggagcgctgctctctgggccgcctgacccgccgtggcctctacctcgctttccacaacccgggtgcctgtgtggccctggtgtctgtccgggtcttctaccagcgctgtcctgagaccctgaatggcttggcccaattcccagacactctgcctggccccgctgggttggtggaagtggcgggcacctgcttgccccacgcgcgggccagccccaggccctcaggtgcaccccgcatgcactgcagccctgatggcgagtggctggtgcctgtaggacggtgccactgtgagcctggctatgaggaaggtggcagtggcgaagcatgtgttgcctgccctagcggctcctaccggatggacatggacacaccccattgtctcacgtgcccccagcagagcactgctgagtctgagggggccaccatctgtacctgtgagagcggccattacagagctcccggggagggcccccaggtggcatgcacaggtcccccctcggccccccgaaacctgagcttctctgcctcagggactcagctctccctgcgttgggaacccccagcagatacggggggacgccaggatgtcagatacagtgtgaggtgttcccagtgtcagggcacagcacaggacggggggccctgccagccctgtggggtgggcgtgcacttctcgccgggggcccgggcgctcaccacacctgcagtgcatgtcaatggccttgaaccttatgccaactacacctttaatgtggaagcccaaaatggagtgtcagggctgggcagctctggccatgccagcacctcagtcagcatcagcatggggcatgcagagtcactgtcaggcctgtctctgagactggtgaagaaagaaccgaggcaactagagctgacctgggcggggtcccggccccgaagccctggggcgaacctgacctatgagctgcacgtgctgaaccaggatgaagaacggtaccagatggttctagaacccagggtcttgctgacagagctgcagcctgacaccacatacatcgtcagagtccgaatgctgaccccactgggtcctggccctttctcccctgatcatgagtttcggaccagcccaccagtgtccaggggcctgactggaggagagattgtagccgtcatctttgggctgctgcttggtgcagccttgctgcttgggattctcgttttccggtccaggagagcccagcggcagaggcagcagaggcacgtgaccgcgccaccgatgtggatcgagaggacaagctgtgctgaagccttatgtggtacctccaggcatacgaggaccctgcacagggagccttggactttacccggaggctggtctaattttccttcccgggagcttgatccagcgtggctgatggtggacactgtcataggagaaggagagtttggggaagtgtatcgagggaccctcaggctccccagccaggactgcaagactgtggccattaagaccttaaaagacacatccccaggtggccagtggtggaacttccttcgagaggcaactatcatgggccagtttagccacccgcatattctgcatctggaaggcgtcgtcacaaagcgaaagccgatcatgatcatcacagaatttatggagaatgcagccctggatgccttcctgagggagcgggaggaccagctggtccctgggcagctagtggccatgctgcagggcatagcatctggcatgaactacctcagtaatcacaattatgtccaccgggacctggctgccagaaacatcttggtgaatcaaaacctgtgctgcaaggtgtctgactttggcctgactcgcctcctggatgactttgatggcacatacgaaacccagggaggaaagatccctatccgttggacagcccctgaagccattgcccatcggatcttcaccacagccagcgatgtgtggagctttgggattgtgatgtgggaggtgctgagctttggggacaagccttatggggagatgagcaatcaggaggttatgaagagcattgaggatgggtaccggttgccccctcctgtggactgccctgcccctctgtatgagctcatgaagaactgctgggcatatgaccgtgcccgccggccacacttccagaagcttcaggcacatctggagcaactgcttgccaacccccactccctgcggaccattgccaactttgaccccagggtgactcttcgcctgcccagcctgagtggctcagatgggatcccgtatcgaaccgtctctgagtggctcgagtccatacgcatgaaacgctacatcctgcacttccactcggctgggctggacaccatggagtgtgtgctggagctgaccgctgaggacctgacgcagatgggaatcacactgcccgggcaccagaagcgcattctttgcagtattcagggattcaaggactgatccctcctctcaccccatgcccaatcagggtgcaaggagcaaggacggggccaaggtcgctcatggtcactccctgcgccccttcccacaacctgccagactaggctatcggtgctgcttctgcccgctttaaggagaaccctgctctgcaccccagaaaacctctttgttttaaaagggaggtgggggtagaagtaaaaggatgatcatgggagggagctcaggggttaatatatatacatacatacacatatatatattgttgtaaataaacaggaaatgattttctgcctccatcccacccatcagggctgcaggcact

SEQ ID NO: 505173 - DNA, 164 bp, Homo sapiens
gtctaacatcctagaggacaaggaggaggtacattacctgttcgtgcccctctgtcagaactccgacacctgaaccagctgaggtggagactcgcaaggttgtgctgatgcagtgcaacattgagtcggtggaggagggagtcaatgttgcactgcatcagcaa

SEQ ID NO: 505174 - DNA, 421 bp, Homo sapiens
cagctttagttatttgtgttgccatgtgtgctgaacaaaaaaataaaaattattattgattttaaaaaaaaaaaaaaaaaaaaaaaaaaaaaaaaaaaaaaaaaaaaaaaaaaaaaaaaaaaaaaaaaaaaaaaaaaaaaaaaaaaaaaaaaaaaaaaaaaaaaaaaaaaaaaaaaaaaaaaaaaaaaaaaaaaaaaaaaaaaaaaaaaaaaaaccttttcccccccttgcccccaccccttttaaaactcaaaaaatttttcaaatccccccaaatttagcccaaattggccaaatccccccaaagggagccctaaaaaaaataaatggcccccttttaaaaacctttgaaccggaaaaaccctgggtttccccaaataaaacccctttgaaaaaaaccccctttccccaagtgggcaaa

SEQ ID NO: 505175 - DNA, 299 bp, Homo sapiens
cgagagatttaacgaaactcagcaaggccaggcacacgcctgtagtcccagcactttggagaacaagggtggtggatcacttgagcgcgaggagtttgagacgagtctggccaacatagggagatcctggtgtctccaaaaaaaaaaaaaaaaaaaaggttccccggccctgggggcatgtctcacctacttgggaggctgaggagagagtattacttgaccctgggaggttgaaactgcagggagccgtgattgccccactgctctccaccctgggaaaaagaccacgcccctttcta

SEQ ID NO: 505176 - DNA, 810 bp, Homo sapiens
tgggtgcatatgcttaaggggagcccaaagggcctctcggctcgactggggtccccggccccccgagctgaggaggcttcgcaaggccggcctgctacaaagtgccgagtctggtgctgcttaaatttataagtgagaagcgttcgaggcagaagcgtggtgacgttggtggctctcctcgcgggacttgtgcagaattcatttacgcaaaccaactggtgttgagtgagtgaggaaacataggcacattcaaagacccctaaggaggctcacgtggagcgtaagtgatctaactcctacctttccgcaggcaggggccctccccacctcgctcgcgtgcccccgaagcccatttcccacgaggggacctccagctccacttcgcagaaagcacaggcacaacacgcgccccccattcaaggctcagaagccagaagtgacaagttgaggtggcaatcatagacgtcatcccattaaccgggacaaggaggagtggggagaaatgagagctacaaatgccatgatgtgccccaaacctctggtgcactgggcacaaggcccccagtttctccactactgtgggagaagaacccattggccctacctgacttgcctctcacaaataccgagcgaggaccagcaggaccagggggcctacaagggcaccattacagggtcccgactgagagcacccggggactcaacaggggcaccgtgggcaccacggggggccccatagccgggagctcacgcaggagctaggccagactgtccagaaccccgaggtcacgcaccgccctgcgatgccaa

SEQ ID NO: 505177 - DNA, 528 bp, Homo sapiens
agcggagttttgggaggcggcggtggaaggaggttggtggctgactccctcgctcgccctcactgccggacggtacccaactccaggcaccatgttccccgcgggcccccccaggcacagacatcctccggcatcaccccatgacatgcaagattgctgctactggtggtgcagagaccgatgggcgagagggggacatgcggaacagacgccagcacccggcacggaggagcccccccatgagaaaacatgtggtcatcgcacgcaggtacccaacagtaccacagtggacctgctacaccgaggcacaggctgcacgaactgcgccagagcactacaacggatgccagccataccccaccataacacaacgggacacccttcacagcaccacgactgcgccaccaacaacgtcgcaaccccacagcccttcacgcactccgccacacacacccatctgaccgagccccatccgacggacgcgcgccgcgggcacgcagcaccaccaccaccacgcactgacacccc

SEQ ID NO: 505178 - DNA, 567 bp, Homo sapiens
gagtagtctagcatagctgggatgcaactgtagtgctgacacattcatatatgagaaatgtactattgactcccatgtgttagtgaccccctctgattccttgtctccttgtatcctaagtgctgatatcttcatcattgttctactactgctgtgatcatgatgacatgtctccatttttacatatgctttgctttattcactcctttgtggatgaaatcctcctattacatgtggttgcccagtgccatgaggaaggattggagagccacttgaggtcatatgttaaggtatgtaaaacacactgttctgatcacttacatctgtggctctccagtattccttctaagggacttatttttcacaagcctggttatttgaggatgtgcttgtaacgtatgctttctcttctatttctcatagccaatgcttgtacctgaataggggaggtacgaagagggacagccattcactaatttacttaattccattccttcaattatgtttctttcaatgggttttcccaatcatatgactcagtgtggagtttaagaagaatttaagttg

SEQ ID NO: 505179 - DNA, 173 bp, Homo sapiens
accgacagttcgtcactcggattgacttaagaagtgtctggtgactcggcgtgtgcagcaacaacttcgtccaccaggagctgttggaccctcggcgtgtgcagtgtgggcactcggcgtgttgcacacgccgagtaaccatactgctcatatcagtgtggacgaagttgttg

SEQ ID NO: 505180 - DNA, 339 bp, Homo sapiens
gttttacagcccatcggcatttaaaaaggggagcctttttacatttgttccttttgggccagccgcaaaccattttgcagccctcacgggccttgagatgcacttttttttcaacctaaagtggcattttgacccttggcccttggcctcggcagtgacactgatgacaattaagccaaggctccccggggccgtcatttaggaatgttggaacaaaggacatttttcaaagttcccctgaagaaatgccatttttagaaccttttttttccccgactctacccccccctttgttcttagagccctttggtggggagtccagaaacattattgcccaga

SEQ ID NO: 505181 - DNA, 140 bp, Homo sapiens
cctgccttggcctcccaaagtgttgggattacaagtggggagccaccacacctggcctcttatttttacattttttttgataagtaaccatcctcaatggggcatgagttagtattttattggtggggtttcattttcat

SEQ ID NO: 505182 - DNA, 412 bp, Homo sapiens
  misc_feature (261)..(261): n is a, c, g, or t
  misc_feature (361)..(361): n is a, c, g, or t
ctcgatctctagaggtatccccagctggtactcagtgaaagcctggaggacacaggcactgtaaacgatagactttatccacacactgcccattgttcacagcaagggttgctctgacattcatttatttctagacttcacaactgcacaccatttgaatacctggtcatgcacagaacatgtgtaagcctccaagtcttatccacgacgggtagcatcattctggtcatggggtctgaactggcacccaattgatgtccnatctcacaacagaggtcctcgcataacccattcagaacatctcacatgtggaatggcgccatcgcgtgttcacacatttttcctggcatgctcacaaggnattgctatttggccatggcacattcatccacatcttctgtgcagtcagccc

SEQ ID NO: 505183 - DNA, 574 bp, Homo sapiens
  misc_feature (116)..(116): n is a, c, g, or t
  misc_feature (129)..(129): n is a, c, g, or t
gatgatcatcctacccgagaatggtgggcagcatgagtgggcgtctacaatcccagcgtacttgggaggctgactggcaggcgaatcacttgaacccgggatggcgagaggttgcnattgagtccgatngatcgcaccattgcaagctccatgtcgtgggcaacagatgtgagcattccgtctcgaagaaaaaaagaaaggaaacgggaataaacaaatataggctattatacctttttccttgggtctcaaacgcggccatggacaatttcttggaagcattccaagatttcaaggttggatatattccaaaagagaaatatttataaaggtattaaagattagattttgaacctctctataataggataattaggatattacgttttaacaaaaggccttcagggggctatatattagagtctgttctataaaaccaggctatacaattcccacggttgcagcgctatacctgtttaacgccaacgcgtattggtctcctacaaggttggagagaaccaacgcaaaggcgccttattttcccaccttggcgtgggtgatagccactcagggg

SEQ ID NO: 505184 - DNA, 1056 bp, Homo sapiens
  misc_feature (671)..(671): n is a, c, g, or t
ccccctccaggtgacgagagaagtatcgtcgagcggcggcgcgcgcctctcacagggtttgtctctcacgcgcgtcgccctatacgagcctgtgcccacccccccgtgtgtctcgtgttgtactgccgcctccttttttcacaggaacaccacgtcggtattccgctaattgctgaaaccccgcgttcgaatagaggtgctttttttttaggggaaacccttgtgggcaagtgctctagtgtttccccgggctttattgccttcggcctaagtttcctgggaaatttgaggggccgcaacgttcggcataatgagcctcccggcccccgtctttggggccctgctcttcaggcgtttcgggaccccaccaggggcaccaccggctcagaggcccggctcctctccacggggttaagggaccagaccccacggaaccccgatgggagcccacgacacccctgcgagacaccgcttgcagacacctgttgttttggaaatgtgctttccctcccctgcctgagaattcttcattcccttccaccccgccccacttcgggcacactgtgctcgtggggccagggcactgcgctcccctggctgagcacccccacgagagttttgcctgcacccttctcttacatgccgccacacgcctgctcacatccgctctnccacatgttgtggttttagagatccacatggccacattcacctgagactcacctatacacccctgcccaaaatctttataggagaaaaaggctgaagggtacgaccactgcacactatgtgacctgggaaatagccaatttagatcttttatgatttaattgttattgttttcccactagaagtttccctccccttcttgaaattaatatataatagtataaatttctgccctgagccctggcggagctgggcagcccctaggttagagtggagacggaggccccggcgccccggggtcacacctcatctggtttccttcccctctcaccgcttagcttgtgcttttccacccccagtctttaagagccataaaaactaccccct

SEQ ID NO: 505185 - DNA, 461 bp, Homo sapiens
gcgctgagctgggctctaccgggctgtctgggaaggcgccgtccacaaaacacactgcggcgtgggccggcggcgccaagcggagcagcgaggcgggcggccgggccacccgctcgccgcctgcccccctcggctctccgcgctcccccgccccccagccgcccgcagcctagccgccgccccgcctcactcgcggcccgcccccggcctgcctgacccgggggcggcggccccgcggatcgcccttatctggccccggcaccccgggccggcagctcgcgcagcacccactgagaaggcgagcccgccgcgcgggggaaggatggcggaggagcgcgaggctcctcctgtggggagggggcgcccccgtctctccgccagcgccgggctcggcaccccgcgggatgcgctcttccccgacgcggcaccaccgcccgcctccccgctggactccgcggccg

SEQ ID NO: 505186 - DNA, 326 bp, Homo sapiens
aaagcatcatcctacctggctccgtcagctagagcactggcacttgaggtaaaggcccgagtgaaggggtccactactcactagatggattttacaaccctccacccaaaagaggctacacgccttgtacagtgactcatgctatcccgtcagctacaccgtatggggcctttcttacatttgcaagcggtgcctagcactccctagatgtcgaggctatgaggcctgagttcagccctgtacccgaatacagacatctgtcttccaggcgctgcctttgtatccaggctgagactcagaacaagtgagtcatggctaactgggtc

SEQ ID NO: 505187 - DNA, 654 bp, Homo sapiens
ttctgcacgaggagagagagtatagagagagagagtagagagagagatagagagagagagatagagcacagagagtagagagagcgagagagagatttagagatatatacacacagagttcccctgtgtgtgtcctcttgtcttactccttccttcctctctcgtctccctctccccacatcctgatgccgactttcactactccctatcttcctgccctccctcactccttctttttcactccccttctttctccttcgctcttgcttctccacatctcttcctctctgcttccctctttccttttccctcgctctctctactctctctgtctccctatcttctttcccgactccttcttttcctttcccgctcccctctctatccccctacttccgtctctctctcctccattcctctcctctttttcctcccctgctcccttttgtccttcacttcttcttctcttctcctctcccccttctctctttttcctctctcttctccttctttctctcttctctcttcctctccttctcctctctctctcttctttctccctcttttttcccctcctttttctccctccttcctcttttctcccttttcttttcctctttttcctcttttccctcccttttcccttttttctcc

SEQ ID NO: 505188 - DNA, 477 bp, Homo sapiens
aacacgatagccacctactgcctgccacccagtggatctactcaccttccctaagacagcaggtgcccaagccctgcctcccggaagcttcccccaggccccaggtcgctgtcaccttggtcctccagacacagcaccccaggccggctcctgctaaaccctgacctccctggattggggctcacggccctgtctctccgactcatgagtgcgagcttgcgcagtgcagggaccaccgatctgcacctgcacattttccgccacacctggtgctgttctgtcatcagtgcccagtaaacacccggagaagcaaaggtgccagcctgggtggccacccgcatgcccccgtctcacccaccttcagcaggtccttcagctcctccatggtctgcttgttggccacctcatcatgaactgtctggccacagttctttaccacagattccatgacctgcagatgcccaggaagggaagggt

SEQ ID NO: 505189 - DNA, 133 bp, Homo sapiens
atgtatacgatggggttagcgactggacggtaggacttggtgctgtgggtgacagacgtatgactggggtggtggttgtggtaaacctttacctacgtgtacggacgactgacctacatttactgaccggacg

SEQ ID NO: 505190 - DNA, 321 bp, Homo sapiens
  misc_feature (6)..(6): n is a, c, g, or t
  misc_feature (50)..(50): n is a, c, g, or t
  misc_feature (86)..(86): n is a, c, g, or t
  misc_feature (182)..(182): n is a, c, g, or t
  misc_feature (204)..(204): n is a, c, g, or t
  misc_feature (217)..(217): n is a, c, g, or t
  misc_feature (257)..(257): n is a, c, g, or t
  misc_feature (268)..(268): n is a, c, g, or t
  misc_feature (303)..(303): n is a, c, g, or t
ggattncctgttttcggaagttgctgggttcgttttattcagcggcagtngtgctttcccgaatctcagaatgcctgttaaaagancactgaagttggatggtctgttagaagaaaattcatttgacccttcaaaaatcacaaggaagaaaagtgttataactttattctccaacaactggnacttgtcaaatgagtctatttncttctcccacaanttctgaagagcaaaagcacagaaatggactatcaaatganaagagaaaaanttgaatcaccccatttaactgaaagcaaagaatcnacaacaaaagacaatgat

SEQ ID NO: 505191 - DNA, 770 bp, Homo sapiens
agcgggctctatcctcggccgtctgctcccgagctccgggctcccgggtgctgaccgtcgcgcacgcgcggcgagcggagcgccgggcagcgggttcgctcggctgcacgcgagctcatccattccgtggccgcgcgccgcgcttggaagctccggcagtgcgtgcgtttgcaggaaagcgtgtgggatacagcatgtcacatgaaacatactttatgcttaagcaagtaaaaatggcaggcttcctagataattttcgttggccagaagtgtgaactgtacttgacctgggagtgacgatgacaggaaactgctgtgcgcgatctgattggtcgcaggtaatattgtgtcgtgtacacggctggctggatagtgattgatgcacgcgtgctgcgctgtactcgctaagaccaagtaacacgtatgaatccatggcctttcactaacatgtgagtgtacttcttccgagcattggctttcttcatgatcaacatgctgtatccaatgctcaggtgagaggtgatagctatgaaagcggctgttcaggaagaacaggtgctcgagttgggcttcctcattgcgtttcagtgttcgatgtctgggatcacttattgcttccatgtggattctcttgggtgcatatgttacccaaatgtgtggccataggcaggcaaaggagcaagttactgcttcctcaggcagttcgagatgtcagctagaagcaggaattactttgactaaacagaaaactttatactgatgtctatccg

SEQ ID NO: 505192 - DNA, 509 bp, Homo sapiens
  misc_feature (30)..(30): n is a, c, g, or t
  misc_feature (112)..(112): n is a, c, g, or t
ccgggcgcagtggctcacgcctgtaatccntgcactttgggaggccgaggcgggcggatcacgaggtcaggagttcgagaccagcctggctaacatggtgaaatcccatctntactaaaaatacaaaaattagccgggtgcggtggcagaaacctgtaatcccagctactggggaggccgagttgggagaattgcttgaacctgggaggcggaggttgcagtgagccgagatcatgccactgcactccagctgaggtgacagagcaagacttcatctagagaaaaacaacaacaacaacaagaaaaaacttgatcttgataattagcaagtgttgattagccttgccaagactgcaaattccccaacagacagagctcatggagaaggctttaaagttatgcaccattaattcagaattcatgtatcaatggaattttccaacgatgaagacctgctgggttttctgtttggaaccatcatttaaggtaccatttcagttgtaatctcc

SEQ ID NO: 505193 - DNA, 238 bp, Homo sapiens
tagcaggacccccacaccacctcgtcttacagtcctttttatttctgtcaggttgcgtacgtaatgtaacctcctttgttcctgagttttagtaattgaactcttctctctttaattcttggtcagtctagcttaaaggtttggcaatcttgttgatcttttaaaataaccagcttttggttttactgatttttctcacttgtttttctagttctttatttcatttcattggtttctg

SEQ ID NO: 505194 - DNA, 549 bp, Homo sapiens
cagcttgctcatattatgattagggtttattctaaggtaagtgtcgcgcaacctcgtgtaacacctacggttgatgtgagctctacagcattttatggtgagggatatgatgatagtgacaagagaatccttgacatgtccataatacacaggcagcttggatggaatcccaagacttcactttgggacctgcttgagtccactctgacatatcagcacaggacatatgctgaagccgttaagaaagtcattgcaaaacccgttgcaagttaagctttttacagtgatggtgatgtgctacctttgagaagggtgttcttgtcttgcccaagtgttctgccatattatactggttgattttatataaaatcgtaaattttcctcctattggtttcgttagcctgtaggcaatatagcccccacatggagaagtaggaatttatacaagggcaatctgtgctctatgtaattttaatgtagagaccatgcgctgctaaacatgttgagacactttatatattacctagggaagacttttttctgtgtttt

SEQ ID NO: 505195 - DNA, 800 bp, Homo sapiens
gataacacagagaaggaattcggaatactatcagataaatttaaaaaaacattgaaataattaaaaagaatcaagcagaaattctagagttgaaaaatgcacttgacatactgaagagtgcatcagagtctcttagtaacagaattgataaaacagaagaattagtgagcttgaagacaggctatttgaaaatgtaaagtcagaggagacagaaaaggaatactctaaaagaatgaagaacacctataatatctaggaaatagcctcaaaagggcaaacataagaattatgtccttaaagaggaggtagagaaagagataggggtaaaaagtttattcaaagtgataataccagagaacttctcaaacctagaaaaagatatcaacattcaagtgtaagaaggttatgaagcaccaagcgtatttaacccaatgaagactaactcaaggcatttaataatcaaaccagcaaaggccataaagaaaagatcctaaaagcagcaagaaaaaagaaacaaataacctacaatggagctctgataaatttggcagaagacttttcaatagaaattttacaggccaggagagagtggcatgacatgtttaaagtgctgaaggaaaaaattttttatcctatagcagtatattcagggaaatagccttcaaacacgaaggagaaataaaaactttcccagagaaacaaaacagatggatttcatcaacacagattgtcctacagaagtgctaataagagttcttcagtcaaggaagaaaagggtgtgatgagcaatagaaattatg

SEQ ID NO: 505196 - DNA, 2023 bp, Homo sapiens
  misc_feature (97)..(97): n is a, c, g, or t
  misc_feature (886)..(886): n is a, c, g, or t
  misc_feature (1566)..(1566): n is a, c, g, or t
  misc_feature (1616)..(1616): n is a, c, g, or t
  misc_feature (1747)..(1747): n is a, c, g, or t
  misc_feature (1778)..(1778): n is a, c, g, or t
  misc_feature (1834)..(1834): n is a, c, g, or t
cttctataatgttttgttgtgaacatacatgctgatggtattgatagcctagggatgctgtttttttataaaaaaattgggtgctcctctatatttncttttagatagcaggttgctgccttcttctccctacagatgtgtctgccccaaaaaatattgttcccgcaatattgtcatcgcttttgctctctactaagatatactctactgtgcgtgtatgtagtagtactttcttctatactccttccttgttggataaaagatgtttgttcccgccagatatgtatctctctccccttgttgtccgtatttgtcctccccatgccactccctagagtgtatcgtcctctactttgtgtctctttttgtgctgtcccactattgaatttagtgtggtccccccacaccctttagtttgtggtggaatcatcccaacctcgggtgtgtgttgctccgtgagaggaccacatctgtgtgtgtgcccggaaggataatagtcgttgtgttatcgtggggggcgctcctcgcgtagggatagggtgctctgttgtttagttcctacatcaccatcagggggttattactctcgtcgttgttggatgagccccacatacaataggtttgtttgtggcgcctacaagtgactgtttatgatgattgttgtttttttgtaaagatgttttatatttccggggggggtgagtcacaaaacaacaagggcgcacctctaataaggggctcgtatcgtccacaataaaagggagagtgggtgatcacacgccacaacgtgtcggtgttgttgggtgccacacacgaccacagcaacaagtgagtagatgatgtctgttggtcgctctcccgctctcgtctgcattaggagttgctnttcctccactcttgcttgtggggccgctcctgtgtgcgatcgcacacaatgagtggtggtggtcccccttctggcgttaattttgtgggggggcatcaacatcgtagtacaaataatctctctcgtagtcctgtcgctagttgttgtagaaacctcgtctgttgctgttctgtagtgttggtgggacacaccagcgccgccacttgggtgcacaacaacacaaaagatgggtcctgattgcctacattcttcgctcgcgctactctcgtgtgaggggattagctcgtccacaccacatatagaagatatttgttagtataagacagagttttttggcgccacacagcagtgctgttagctctcttgagtgtgcacaacagagagctcgcgtcacacattcttgggagtttcacacagagacgctactatagtgtccctctcgctactcttcgtgagtcctctatatgagactctctactagtcttggacacacacagagaggctactctcacaacaaaccttctctatgcgtgtgtgggtctgttttgtgtgtcacacactgtactgtagtgtgttgagatattgttgagaccccactactagaggagactcttttgtgtgatcactagctggtgctgctgaaaataatagagttcttcttgtgctgtgcttgtagttgntggtgtgagaacaccaccactacaagaagtatcacatctgcaagcaggtnggtgtcggtactcgacaccaccgcttgctgctcggcacacacgagttgtccgtcttgtgatgcttgttggtggctacacaacgcaaatcgcgtcgcgggctctctgtggagaaaagaattgtgacactctnatagatgtatcacttgtgaacactccaccgnctctcccacgatgtttgtggacacactgtgtccgcgctttccacgaaaccactggnagagaagataaaaatagacacttctcactggggaaccacactgtaagaaaaagatacccgatattgtcctcaagagagaagaaatgagcaccctttatacccggacaccagaattttgccaattggtggggtttccaaataaagagtattttccccctgtgaaattaaaaaaaaagaaataaaataaac

SEQ ID NO: 505197 - DNA, 88 bp, Homo sapiens
catggatttgctggtgcagtacaactaggcttaatagggacatgtctccatacccattacaatctccagcattccccctcaaacctga

SEQ ID NO: 505198 - DNA, 473 bp, Homo sapiens
cttcttcgtgtacccgccatgtacgagttacgatgtattattccacttggacttaaaatataaagtcttgtatcaacacattgttaggatgttgaagtttctcaagatatttgcacagaatatatagaagtacttagaggagttttgttaactgcagttggtcatactagatacccgagggttgcagttttgagagaccaaatgcatctgtgtcagacatagacaaaaggcatatactcctccttcctagaaacgggtacatagacatgttcttattcttgggatatgaaaaaacaagtagtactggcatttaaagtttaattactaactgtataatgcctgagaccaaaattcagagcaattctcaaaagggttaagagtcagactctgggcattttcgttttttagctgcaggctcctcagtctcgtgtgattctaaagtgcttgcctcgatctgcgtgtgattctggccg

SEQ ID NO: 505199 - DNA, 696 bp, Homo sapiens
agacatggcaatggagatgagggtgcccgtgcaggtgcctggggtctggctgctcgctctgggtcccacatgcgtgaacagggaatgtagaccaatccatgtttgaacaccaagttctgcgatttcactactcctgatacttgggatacttgtcgggagatcgttgaatgattttcgagccaatggaacttcgtcgcagaggtccactgtacagcgggcataaccgaaaagcttgtactgcgcgggtgaattcagaggctttgacttcttccccaaaccgcggtgaaaaaattaaaggcattccaccattaaaaaagtcttccccatagaggttacttatccaggaattaggcacctgacccagagtgtgaccggcggacacaacgggataggtgaagagggttaaccctcccccattttaaccagaaaggggggaggagcttattcccgaaaggtccgggggacaaaccgcattggcggaatttcccatgggtggagtaactatggtaacttctttgccaaacgtccattacaaacaccaatttccccaatggcccaaaagatccgccttcggtgggattggcgcataggcaaaggatagtgacggtcggagtctcaaatgtcaacatggtgccaaacacgatttctaaaatgaaactatagcactcggcattcatcttgaatacctgggtcggg

SEQ ID NO: 505200 - DNA, 369 bp, Homo sapiens
cccccttttttctaaaaatagaaaattagcccgggggggggggagaaacgggtaatcccccccccttgtgggggtgaggcaggaaaattgctttaatccgggagggggggggtgcagtgaattgagattgcccccctgccctccaggctggggggcaagggtgagaccccgtttcagaaaaataaaaaacccctttggccaaaaaggggttgggggccggggggggggggtgagagaattttccctggaaccccttttccttaagaaaaaaaagcaaaaatcccccctgcggggccctttggctttaggggggttccccttaaaaaggtacttttttttataaacggataagattaacttttcccgcca

SEQ ID NO: 505201 - DNA, 92 bp, Homo sapiens
gtcccttttgatatttttgattttccatttcttattcatttttctcatcttatcttcctagctttattcacttccccttctgtcgtcttctc

SEQ ID NO: 505202 - DNA, 114 bp, Homo sapiens
gctactcaggaggctaaagtgagagggtggctctagcacagtcatcaaggctgcaggaggctatgatggagccactgcactccagcctagatgacaaggtgagacgctgtctca

SEQ ID NO: 505203 - DNA, 282 bp, Homo sapiens
  misc_feature (29)..(31): n is a, c, g, or t
acgtaactgccccaaggcttgcagccagnnngtgatgctgttggtcaggtttgcatccagctgcaaaggaaaagtccaacccatggtggctaaaaaatagagggcacataagtctcaggcattacatttttattcctgtctgtgagcaagaatcctccttgaagattcaatgcacttgcagctgccccggagtctgcgcttctctatctgcccagggcagtgggcaggacggaccgtgctaacccaggagcagctgttggtgcaggctccttggctgcaggg

SEQ ID NO: 505204 - DNA, 336 bp, Homo sapiens
gggctctacagaggtcatattgtgctcgaggtacttctgtcatgtggctattgtgtgacgggactgttccaagtcatatgagataccattctgtacagagggtccgctattaccattctataaggcacagagaacatagtacgcaatttctggcacacgcgctatgtgtgccgagagacaggttacagagcgtataatggcctctcacaggaatgcggcccattacagtctgaaatgtacacccagaggctgaacttttggtggaactcttgattgtggcactgcgatgtaaatggatggctcgtgaatctggccagggcccatgttagctggggc

SEQ ID NO: 505205 - DNA, 1015 bp, Homo sapiens
  misc_feature (973)..(973): n is a, c, g, or t
tcagttatgaagaagggaaagctttggcatgatcttggagtgcaagttttttggaatcttctgctaaagaaaatcagactgctgtggatgtttttcgaaggataatttgtggaggcatgaaaaaatgtgactggggcatgttggacaaggcgtggtctgtgatgctgcggggatgcgatgagtgcgggggaagggctggttggcacctgggtatgtgtgtgtacgctgaatgaaggcgtgctgcgcgcggggggcttggaaaatgaagctgtggctggggtggtcagtacggtagatgcgcctagattgtgttcgtcgcgtggtgtaggaagccgtcgcttgaggttgggattgtgtttgctgggtgtggagcaagaacgccgtgtgatttgttcagctattttgcagtgtcgactgggttgttgtaactgttggtgcaacgcggatacaacgggctattgtcacacggggatgcttcgcttggagacaccagagtggtgatggtctggcgtgatctgtggacgggcaatgagtggtaggcgctggatgtgggcgcgcgggcatagagacggtgcaatggagactacgggtcgtgtatactgtagtgtttcgttggtcgctcaactattgcccttgggacgtgtgtttctgctgatctgtcgtaggaacagcatggtctaacactggtgtgggttcttttattagacggtgaggtgtacgtcgtcgctgcgttctgcacaggccattacgctggcgctacaccctatatagtcgtacatcgtgctagtggcgtatgctcgagagtcgtgttgacgagtagtatgagcaatcgagtaatgcgagatagaacgttgttggtgtactagtaactctcacgaatcagtagctgtgacgctcgtgcgtcagtgtacataagtacaatcacgttggatgggcatgatttccagagcagtgtggcgcgcacacgtcgcgnaggtgtactacagtgtctacatatcggaatatgacataaaag

SEQ ID NO: 505206 - DNA, 349 bp, Homo sapiens
aacttttaaggagaaccaacataccagcaggtccctccaaataaccatcttttattccaacatccattttatataatggttaaaaaacaacaaaatttggtttcattaatacatttggttcactaaaaggtcacatttccattgaacctatccaccattgttaagtgggaatttcccatactacctggttatctctttggcagccagttagtctccatcataacaatgctatgactatgttataaattttcttatataaatcaggttaatggattgtaatacctttggctacaatcttttctctaccaggtggccacagctatagtgcatgtgtaattttgctattata

SEQ ID NO: 505207 - DNA, 906 bp, Homo sapiens
  misc_feature (1)..(1): n is a, c, g, or t
ngattccggcgttcaagccgtggccccccgttgagccaaataataagtgttgggccccccaacaacccccaaggccctttatgggtctaatcctttttatttaggatcgtacaaccctgctgtggagcggttgcaacttttgctggaccgcgtactcgctttccaagaaatggggcgcacgccaaagggggctatatatattgaccacgtcccccgcgagggataaatgtatcatacacgcgacgtgtggcagatacttctcgggccaaaatagatgttattgcgaggacaccctcacgaattgcgcccgccttcatagagtggggggagaaataaaatttttgaaccagcgccacccctattataaacgtgttgttggtttcgacaacagaagggcttggaggctatgtaagtgccccctttatggccaccgaagcggggtcattacaaagctcttggggagtcaactaagaaataggtgaagcgttagcgccctttagggacttcataaatggttgaaatcatgccgatgcgctcctcgctctataatcgtaaatcccgtgaagtcatttctcagccgcgcacacgttcacaatctcttttttggcgagagttctttcgaaattattacgttccagattaataactcctgaaaacacaggcctcacaaaaagttttagaaacgctcctactcgctgttctgcataaatattcatgacacacatgttgatatttacccacgacaaaaatcttatgtagctatacataattccacaaaggtggtaaacctcacacagtatgttccttcgcatcacttgtatacagcagagaatacaaatacaccacgatcaggtacccactttaattatttcatcacaccaaagataaacccaaacaaaaaaaaca

SEQ ID NO: 505208 - DNA, 758 bp, Homo sapiens
  misc_feature (304)..(304): n is a, c, g, or t
taccaaaaacatcccctctagcatcactcagtattagaggcaccgtgctgcccaagtgacatcatgtttaacggccgcggtaccctaaccgtgcaaaggtgagcataatcgacttgttccttaacttagggtacctgtatgaatggtctccgacgagggttcagctgtctcttacttttaaccagttgataattgagcctgcccgtgaagcatggcggggcttgacacagcaaagaccgagaagaccctaatggagcttgtaatatctatttaatgcaaacagatacctaacaaacaccacggngtcctaaagctaccaaaagctgcattaaaaaatttcgagttggaggcgaccatctggagcaagaacccaacgctccgaagcagtacatgcgtatagacttcacccagtgcaaagcgaactagctatactcaatgtgatccattaatctgtgaccaatggaagcaagttaccctagggataacagcggcaagtcctattctagagtccatatcaacaaatagggtttacgacactcgatgtgggatgcaggacgttctccaaatggtgcagccgtattaaaggttcgtttgttcaaacgatttaaagtcctacgttgatctgagtttcagaccgtgagttatccaacggtcggtttgccaatctactgtcaaatttcctcccctggtacgaacaggacaagagaaataaggcctatattcacaaaaggccttcccccgtaaattgattttctcta

SEQ ID NO: 505209 - DNA, 161 bp, Homo sapiens
ctgctaacagtcggaaaagaaggaagaacaggtcatagcctcgacctcaggtggctgaaggagagaatgtatctcgtgtctgccatattcttggcatccttcaatgacacttttgtccatgtcactgatcttgctggcaagggaaaccatctgccgtgcga

SEQ ID NO: 505210 - DNA, 1392 bp, Homo sapiens
  misc_feature (331)..(331): n is a, c, g, or t
  misc_feature (335)..(335): n is a, c, g, or t
  misc_feature (339)..(339): n is a, c, g, or t
  misc_feature (344)..(344): n is a, c, g, or t
  misc_feature (348)..(349): n is a, c, g, or t
  misc_feature (351)..(351): n is a, c, g, or t
  misc_feature (355)..(355): n is a, c, g, or t
  misc_feature (366)..(366): n is a, c, g, or t
ggtcaagcatggagatatcaagtgtgtactaaatgaaggcatgccaatttatctgtagaccatcatgcaaaagggtcgcctcaatccatctgcaatttcaaggtcaaactttcctgcagcaatggctttctctctcctgataaactgtctttgctaggaaacaactcctcaccacgagcaggcaaggccagtggcaagagactgcatgcagatggaccaagtagaactggtggactttgatccaaatcaggaaagacggcgccactacaatggagaagcatatgaggatgatgaacatcatcccagaggtggtgttcagtgtcagacctcntaangggncagtnaatnncnctcnctgctggcatntaatgtgcagtagtgaatgagtgaaggactgtacatcataatatgctcactacttgctcttgtacccgtctcaatcaaccctatagtcagtgtttcaacaacagtccccctgcaagacatcaaccgcagactatcaccagctctcacacaacccaaccccaacaacactcacagcgcccccacatccccggcacgcgagaacaaaacaacgcaacaaaacacaactgcgcacacactcggaccccaccacacgcaagacacaccggaacgcacagacagaacacaccgaaacacacaagatggatcaaaacacaggacaggaacaacaccaataataaggaagcaacgcccgacactaagccaccaccacaatcacgaccacgagaggacaccaccgggcaaatcagaaagaaaccacacgcggacgacaagcaagccacacagacacagaacaacaagcaacacagcccacgcaccccacagacgaccacacacaagagcacgagcaacaacaagcgcaagagggcagcagtacatgtcccaccacataggaccacacaagcgacaccagcacagagaaccgccgaacacacaagccaagaccgaacgcactaagccgacaacaaacgcaaaacacaataataagaccaccgaacacacagaaatcagcaagacacaaacacatgaactaagaacgctaaccaaatatacacaacaatatcgacgcatcaaatggtagatgagtggagaggcggaggagcgatcgggaagcagggaaggcggagagcaccgagcgggcggcggaggacggtggcagggcggacacggacaggtgcgggcgtgcgcgagagacaacacgaaccgggagcaggaagagcgacgcgcgaggagagcagggaggcagaagagagaagacagaggagggagaggagaaagggaacagatagtcgagagaggcgaccgagagcgcacggaagcaggagagaggagacgagaggcgagagaggggaagggcagagtgtgggg

SEQ ID NO: 505211 - DNA, 1114 bp, Homo sapiens
gcaaggcactttgaccatgtcaattttcagccgagacatggtcagcaaatgatcagtacaaccccatggcattaggctgcaaaccatatgcaacattgcatagcatttagtagtttaacaaactgtccagccagtttcatcatggttcccacctcacatcattcattgcacagcacacattcattttccgtctcagctacatccaattcagagcttcaatcagctattatcagtatcatatttcagcatatttgcaacagatgtattatcaacagagcattatcactattcatcagcgaccaggcacccatctattcatcgcacgctagcatattactagtatttatacgaaatcatcacatcaccatatcggtagtcatagtccaacagcacataacaattcagtaaaaattcagtcaacatgaaaaagactcttccgtacatcattatttccatgctaatgtgtgtctgtgatccagaataacttctcccactcatatcttcagttcacctaatgaaatgaatggatagcaaagagccctatagaacccaggactttaaggcaacatattacaacattattgccaaaattaagaatataatgtatggtatacaatgtacctgaataagacattacaaattaacctcaatcaacctaacactttgatctgacaagctgcataaagtatatcttgcagacagactagcaatctttaaacatcagcgtggcgctgtacacactgacatatgaaggtacttggagtcaggaggtgaaatagaacacagacgcaggcacaacaaggaaagcacctcaccagtggacaacaatcgacatactagacacaccatgcaccttggacagtaattgtaaaacacacaaatgatcacaaaaatacacacaaaaacgtgtttacacacggaaatataccagataatcactatgaacgagtaatgattactctagatatatacacaaaataaagacaggcaataaattaactacactaaagtggcaaatgcattaaacgaatattaatacaaattatgagtaagctaaaactgtgtatcaatgtaacttacaaagaaatatagagacacatagaagatcaaacag

SEQ ID NO: 505212 - DNA, 413 bp, Homo sapiens
tagaggactccccaactgcagcgcgcttttaacttatgtatttattttgtagagatagggtctcgctctgtcacccagactggagtgcagtggtgtaatcacggctcactgcagcctcagcctcctgagctcaagcaatccttacacctcagcctccctactagctgggattacaggcatgccaccatgcccagctaatttcttttattttaagtttttgcggggacgtgttgaaagaaaaaccttagccaaattaagcttaacaaagtttagttaagcaaagaatgctttgcgaatcaggcagcctcctaagccagggtagctcagagagactccagtgcagccacgcagtggaagatttatagacagaaaaaggaaagtaacatatagaaaacagaagtgaggtacagaaa

SEQ ID NO: 505213 - DNA, 180 bp, Homo sapiens
ttttttatttccccccccccccggctgattttggccccgggcccccaccaaaattggggggggggtcccccccccccaaaaatgggggggggtgtgggggggggcccccttggccccccccccccctttttcgggggaaaggggccccggggtttttttagtaaaaaatttttttgttta

SEQ ID NO: 505214 - DNA, 315 bp, Homo sapiens
aacccgggcaccgcctttgctcacatttcccgcctgagctccaccttctcagatcagcagcagcgttagattctcataggagaacacaccctgttgtgaaccgtgcatgtgacgggatcttggttgcgctgtccttatgagaatctaatacctattgatctgttactttctcccatcacgctcaggtgggaccatccagttgcaggaaaacaagcttaacacgcccactgattctacattatgggtctccctctgttgtccaaggctggagtgtactagtgctatcgcagctgactgcagcctccaccttccagg

SEQ ID NO: 505215 - DNA, 91 bp, Homo sapiens
ggagaacgccatcagctcgctgcttaaagggaaatgctgttgtgagagagaatgaggagagaactaggtaaggctgtgagagccatcagac

SEQ ID NO: 505216 - DNA, 81 bp, Homo sapiens
tctgaggacacggccgtgtattactgtgcgagagaggaatatgcagcatataaaaacccctttgactactggggccaagga

SEQ ID NO: 505217 - DNA, 1143 bp, Homo sapiens
gctccgggagctgccgacggacggagcgcccccgcccgcgccggggcgaccgcgcgacagtgcggcgatgcgccttctaccaagagccacaaggcagctgaagctgcgcttgctgcgtgccgaggacgagttccgccgacctgagtcgcccagcaaaaccacatggaccaaggtggctgacccccgagctgtacgcggagctgcgcgccaagagcacgccgagcggctacacggctggacgacgtcatccagacaggcgtggacaacccgggccacccgtacatcatgacctgagggctgcagtggcagggcagacgacggagtcctacgaagatgtacaaaggatctcatagacgacacccagtcatcagagggaccggcacggcaggcatacaaggcccaagcgatgagcacgagagaccggagcctacaagacccgacaacactgacagggacggagcgacagaaccttgagaaacccaaagcgtacagattgactagaagcatcagccgaggtgccgcaacaggagccggaagacactcacgtggaatatcttggcatcaccacccagcaacatgcagagcagaagagaaaaacagcaagagccaatcacgaggaagagccacagcagcgacagagaacagcccctaggaccccaagaccctgacacggagcgaacccagaggacagaaggcccagaaaaactaacgacagcaccaaagacagaaatagaccagcacagcgcacgtcaaccgaaaaaaaccaacaccaaaacagatacaaacatcaaccgaaaagaaaaaacgcaacagaagaacaacccaccagaatagagtgagacaacaaaacaaaagaccagaaaagggaaacaaaagcaagaagaaaaaaggacaacagacaaaaaaacaaacaagaagaaagaaaaacagaaaaagacaaaaaaggaacaaacaaaaaaacaatcacaaacaaaaaaagcaggacaaacaatagagaacaagacataaaatataaagacacacaagaataaaaaacaaagtaacaacagaggaaacaccacggacaccataacagaaagagaagagaaacaaaaaacggaaaaggaaacagagatcaaaaagaaacaacacacacaaaacaag

SEQ ID NO: 505218 - DNA, 651 bp, Homo sapiens
  misc_feature (348)..(348): n is a, c, g, or t
  misc_feature (353)..(353): n is a, c, g, or t
  misc_feature (359)..(359): n is a, c, g, or t
  misc_feature (361)..(361): n is a, c, g, or t
  misc_feature (366)..(366): n is a, c, g, or t
  misc_feature (373)..(374): n is a, c, g, or t
  misc_feature (386)..(387): n is a, c, g, or t
  misc_feature (389)..(389): n is a, c, g, or t
  misc_feature (394)..(394): n is a, c, g, or t
  misc_feature (401)..(402): n is a, c, g, or t
  misc_feature (404)..(404): n is a, c, g, or t
  misc_feature (426)..(426): n is a, c, g, or t
  misc_feature (452)..(452): n is a, c, g, or t
  misc_feature (473)..(473): n is a, c, g, or t
  misc_feature (475)..(475): n is a, c, g, or t
  misc_feature (534)..(534): n is a, c, g, or t
  misc_feature (539)..(539): n is a, c, g, or t
  misc_feature (546)..(547): n is a, c, g, or t
cccaggagcctccccaccagcccctgaaatggaaaggctccagctcctgagtcagtgggcacagaggagatgcctgaggatggagagcccgatgcagcagagctccgcggcgccgcctgcagaagctggagtctcctgttgcccactgacactgccccagcccagccccagcctctgctcttttgagcagccctcgctggaacatgtcctgccaccaagtgccagctccctctctgtctgcaccagggagtagtacccccagctctgagaaagaggcggcatcccctaggccaagtggaaagaggctggggttcccatttgactccagtcccaggcagcatggggatntcggntcagtncnagctntcctctnnaactcttcagcnntntgttntgctggnncnatgaaggcagaaggtttagccnctgagaagccctcttcttcccaaccnctttccaggagaagggctgcncnctccaagccctactgtatgtgggagtcacactgcagtgccgacagtattagctcccgtnccaantgtgacnncagagggctggagcaagctatgaactgctcgactggggccaccccctaagactggtaccatatccttatacttacactgatctcaccacagaagacatcttgag

SEQ ID NO: 505219 - DNA, 371 bp, Homo sapiens
  misc_feature (12)..(12): n is a, c, g, or t
  misc_feature (28)..(28): n is a, c, g, or t
  misc_feature (243)..(243): n is a, c, g, or t
  misc_feature (346)..(346): n is a, c, g, or t
gaaacctgaatnacggagcagcaatatnttggtttttctgaggtagatctgtgctcaaattttctgttccagcagattcacaaggacagttatgcttgtcagatcctgtgttctgatttctggtactctgtgctctgccaaagggttgattcactcttgcccacatgttcctcaggcctagcgcatcagtagaccgttgataaatgtttgttgacagtaattgctactaatcatgcaacgcanttgagtttcaaaatgcactggccctcctgctaaagctgtcttcagaatctgtgtggtaagatcaccttttaatgaggtcagggtgttttctcttcagggcgtnattcaggtttcgggatcctctagat

SEQ ID NO: 505220 - DNA, 776 bp, Homo sapiens
agcggctctcgcgaaaggcgcaaggcgtggagtcgacggctggagagaagccgggagcgagcccaggcgggagtcttgattcccattgggtcagcagtcttatagggtctgtcagatactgcactgcaagaatggacagattgtctgggatctctgtctggatcagttttgtggcagtggtctgggataatgtcatccccagtggaggctctgaaaggtctggtggataagcttcaagcgttaaccggcaatgagggccgcgtgtctgtggaagaacatcaagcatgactgttgcaatctgcccacaaagaatcctagctttgacgattatcttgtcaggtttagtcccaggaagcaccattctgcacagtgctgaggatttgtggcgtgaaatcagcgcacggatacttgtggcctggtggatgtcttggtactgaaggagccaggtagagacagtctgtagattaacaatagctaaagtgaagacagcatctaagctgtgttcagacatgactctttctgggtgttgtggaagtgaaagagctgcagcgtgtgagcccctaaccctgaggaagtacagtctgtgcgagaacagcttggtcatgaaagtgacaactgatgtttgttcagatcacaggcaaataacaaagtctgaagggggttcttctaggcagcttaggctttccattcacccaagaagtcttctccttcagtgaaaacctgctgtggacctggtgctgccacgctgtggacctctcagcacacgatatggagga

SEQ ID NO: 505221 - DNA, 428 bp, Homo sapiens
  misc_feature (418)..(418): n is a, c, g, or t
accaaaaactgggatggggcccaacaaaatgttttaaccagcccttcggtggttacagaaggatagagccagaatagactaaccactgtaacaaacattacctatacttgggaggctttgaaaaatgtttatttagccgggtgcggtggctcacgcctgtaatcctagcactttgggaggccgaggtgggtagatcgcttgagctcaggagttcaagacgagcctgggcaacatggcaaatgccgtctctgcaaaaaatactaaaattagctggtcgcggtggcttctgcctgtgattccggctacttgggaggctgaggtgggagggattgcttaagcctgtgaggcagaggttgcagtgagccgagattgcgccattgcactctagcctgtgtgacagagcaagaccctgtctcanaaaaaaaaaa

SEQ ID NO: 505222 - DNA, 734 bp, Homo sapiens
gggtttccggaatatggcggggcgttggctcttgctgcagccagagctccaggtctcgtcttcatttctgtgtccttgttcttagaggcccagcctgtgtggccctgtgacccgcagatattgggagatacacagctaagactccaggaccccctggaagcctagaaatgatggagtcttgctctgtcgcccaggctggagtgcatggcaccatctcggctcacagcaacttccacctcccgggttcaagtgattctcctgcctcagctcctgagtagctgggactacagatgtgcaccaccacgcccagctaaatttttatttttttatttttagtagagaaagggtttcactgtgttagccaggatagtctcgatctcctgacatcgtgatctgcccacctcagccttccaaagtgctgggattacaggcatgagccatcgtgcccagccctgtattatatctttatctttatcaagtgtggtctaagtgagcattggtatgatttgggatcatggaattgtgctgaggatggtggtgttctgatggcgtggtcaatttagagtatgtgacacatggtgatgagaaagatatatatacctatgtgggttcagatgaagagttcctatttgtttattagaatgtttgggcagggtgagtaagtcgaaacgggaattccggcccaagggggattagaaataattatttaaggaaaacagtcccgttagggagac

SEQ ID NO: 505223 - DNA, 609 bp, Homo sapiens
ggccgcttcaatgctcagcactcacaacgatggtgttcatctgtgaactccgaggactacatgtaccgtcgcgggaccctcgtgccgggccaaggcaggtgcagctcgcctggtcctgctccggcacaccagcactttgaggagtgggacatggcggtgctggaggacaatgttgacggtggacggcggtctagcctggtgcaggactggctgatgggtgaggaggacgaggacatggtacgcctgcaagacgctgtgtgagacagtggcacgtgcacggtctgcccgtgtagccgtctaaccgcgtgcagtacagacgcctggccggtctcgcctctgagctccgcgcctctatgggacaccgggcgaggcgcctctcagagcacgagacgtgcccttcggccgttggttcgtgtcgcggggccgttttcgttgaacgacgtgagaggcatctcccgagacccacctctgctgtgcggacaggcgcaatccagggcaggacgcctgccccgtgggtcccggtcatcctgtgggcctgcatgtgtgccaagactgagtctacctgcgaaccgagccctgggggtcaggcccagcacaggggcgggtgga

SEQ ID NO: 505224 - DNA, 192 bp, Homo sapiens
ttttctggggtttttttttaggaaaaggggaaggggccaagggccaaaccatgccaatttttatggctgaagacggtccaaaactccctggagcgagaaaaccggttctgcccgaagccgaatgggagagcccaaaagggccccaaatgggcgcccttaatttttaaataaaaggggatgatggggttttga

SEQ ID NO: 505225 - DNA, 142 bp, Homo sapiens
tattaggcctgccttgtccggggtggccattgaggtcatggggtacacgcggtcagatcacacactcgtaattttccatgacatgaagtgtcgaaagaaaacctttgaattaatgaggaggaagaacaatgactgacgaact

SEQ ID NO: 505226 - DNA, 300 bp, Homo sapiens
ggacgccagctcgccgtcgtgcgcgacgcggatgatgcggtccgcgacgagttgccttgacccgctgtccaactcgggaagcgcagcgccgacgtcgatcatgtggccgcggcctgcgcaatgatcggcaatggcgtcgatccgcgcgggcacctcgccgggcgtcgcacagacgctgtaaccgcaacccgccagatggcacgcgatcagcaactcgaccgcgcgctgggaatcgtcgtcgacgaagaccagcacgtcgccggaatcgacaccggtgctgatgatctcggcgatccaccg

SEQ ID NO: 505227 - DNA, 368 bp, Homo sapiens
tcgatctagaggacccccactctgacgattactgtagcgatgttgctgtactgggaaggtggacctgtagcaatactgtcatctcctctgccatcatcttatcttccaggaccttctccccggcctgatcggaaatagtggggggactgcgagcggtagatcttagaccgaatgacgtacccgacgaccagtaatgcctctcctcagggctctcgtgcacccatgatcctctatcctggagcctgatctctgcgaagggcccctggtgctgcggctgcggtcccggctatagctccggctccgttgccagctgagggctgtggtgctacggcttctccgcttgcttagaatacgactacaactgctgc

SEQ ID NO: 505228 - DNA, 239 bp, Homo sapiens
ggtacctaaggtccttacacgaatgtagtgcgtactggtatctgctggcatgcagtggctgttatcgatttcgcccggtaacgcgctgggctggaaagacgccaactccaccgagttcgatcacaccagcgtgcatccggtcgtgggcctgatcaccgaggtgggaagacgccaccgtgcgccggttgaaaccccgtacctgaaacctccggacctggtgcgggcaccatggcgccctg

SEQ ID NO: 505229 - DNA, 118 bp, Homo sapiens
cgaagacaagtaggaatagtggagtgagctacacgtctacgtgtcggtagtacgatgtctagtgatgagtcgctactacaatgccagtcaggccacctacggtagtacccacagtagg

SEQ ID NO: 505230 - DNA, 165 bp, Homo sapiens
tttttcctgccacacgattcccttaaagtgctgcctctttcagtccgcatcttcgtcggtctggcagtcatcagcagggaaatgcatcgtggaacagggtacgtacagtacgcagcccggtgttgcagttgcggctgtcggtgggtgtggcattggccgtcgctg

SEQ ID NO: 505231 - DNA, 819 bp, Homo sapiens
ggtttccgggaagcggtactccaaatgggtcgcagtcgcagtcgttctccacggagggaacgtacgcgttcccggtccactatcccgggagagagaacgcaggtgcccgagtaaaggtccaggtctcgggatggccgaggagtcgggagaagtgagaccgtgcgtgatccccgcaccgaatacgctcccgatctctcaccgttattgacactaggactccacattttcgcattccccttctcgactggatcagaaagaccgagatgaggaatcgaaagaaactaagcacgaaagcaaaggcagcgaagatcggcgggataatcgtgagtgaatagacgttaatagggcctacaataccagaggaccgactgtagaaatgatgatagtcaatgggatttcgccgtcctttgacctcctgcaagcagtgtatgataggtggatggctctggccttgcctatgccagtaccttgtctctcagcaatgaggatagtcttggcatgtagcatgaatcgccctacggtggtattcagcagatctttggaatttcactcgtgtgaggaatgaaggtgcagacggactgcattaatctgccccctcaatcttgggtccgagtagtggcatttcggcctagcgaatttcaaacttgcgtttccgacactaccagggactctcaagcttcatccttccttgaaaggggtaagaaaaatcttacgtcctgataatatgcagttgacgtatcttgcgctagccaggaagaacggttgcacattttccctcttattcttctagggaaaatacactgggggacgggttacccc

SEQ ID NO: 505232 - DNA, 191 bp, Homo sapiens
cccaccctttctcacattcaatctctggacgctccaacttgtaggtagaagtactggaaaactgcttgcagacatttcctaccttttctatataattctgagtttctttaagctggtccatatgataatacacccaggcatagtttccccaagtgaccagacttcgtacttcttctttatccgagtgttcc

SEQ ID NO: 505233 - DNA, 387 bp, Homo sapiens
cctttgaccatgacagaaactgactgacctattcagtgatttcagagaactagacaccaagatgcaaggctcttcattttaaacatctttatttccataggtgattagcatttaaccatcaataggaagtgaaactcagggtgtgttgaattgctgtattaaaaaaaatgcaccaatcagaatagtttgtgttcaaatgaccaaaatttgttgaactataaatctgttttagttatttaaaaaagcaaaccactatgttaaattaagcttaatttttattgtattgcttataatttatttctgtcgagagaattcatatgcttatgtaaggatatcatttatacattgtgtatatatgtgtatatataaatacatgcattactgtct

SEQ ID NO: 505234 - DNA, 160 bp, Homo sapiens
cttttaagtctgcatagaggaattgttagaactttctttttttaatttaaacgccaagcaatggttatggatggaactaaatttcttttaaatgtatacaatttggcacagtgtctataacatgttcttgctcagcaattgtgagttatcatgaatggca

SEQ ID NO: 505235 - DNA, 160 bp, Homo sapiens
tatcattttccccctttcaggcatgtgcatttcaatgtttcatcagttcatcagcttcaattaggctcttggtgcttccagggctagcacagcatgtgtcatgcagtccattggttcatcagcagcagtctttgtcatgcaggcaggaggcggcaattcg

SEQ ID NO: 505236 - DNA, 179 bp, Homo sapiens
cacgaccttagtatgctatctacgtgccaaaaacttcagcaaatgcttataggcaatgtcattttgaagcaagccttgttacatgtgtgtcttggttggctggcagtcatgggacatatcatataagtaatgctagggtgagtggtaggaagttttttcatacggagggtaccgagctc

SEQ ID NO: 505237 - DNA, 631 bp, Homo sapiens
ctaagttgggttctcctctccccccttcacacccaccttctcatatcaatatcccagtagaggtggcggttatatattctctcaaaaatacaactcatcaatcttataacaacataataatgtagtaatatcctacagtatatacccccccccccgaagatgtattcctttcccccccactctcgtagagcccccccccccccccaacatcgttctctctaattaatataagaagaggtgcatttatattgcctcgctcccccacctctctctaatatgtagtaatatgggggttcctctcctaataaaatgataggattctccctcaccacatcatacaactccttctctggctatatatatcttcgttctaatctaatagataaccactcaacacacatctcgatactcttcatatacccacctctctatcaatagacgctttttccagcacgattattattctcaaatctcgctctcaatatatggcgtgagaccaaattgaatatataaacacacctcctatacaacctatctgtataagaagaatccattaatcacccgcacaccatatacatatggcatcatccactatttttgttgttaacaaccccacaatagatacacagaa

SEQ ID NO: 505238 - DNA, 134 bp, Homo sapiens
tgcatgttctccctacggaaattccatcagttcaaataagcgcataaatgccacccagttatgttaaaataatagaggttgttcagctgtgatggagaattgccggtcctcctctccttctgttatctttccta

SEQ ID NO: 505239 - DNA, 163 bp, Homo sapiens
ttcccccccccccccttttggggaaccctttttttccccctttgaaatcccctcggtgagggggggggcccccccccaggggttatccctgtttccccgggcgagtttggggcctggggggtggaaggggcccagtaaacgtttttggagggaaaaaccctta

SEQ ID NO: 505240 - DNA, 391 bp, Homo sapiens
  misc_feature (137)..(137): n is a, c, g, or t
  misc_feature (206)..(206): n is a, c, g, or t
  misc_feature (210)..(210): n is a, c, g, or t
  misc_feature (308)..(312): n is a, c, g, or t
  misc_feature (316)..(316): n is a, c, g, or t
  misc_feature (318)..(318): n is a, c, g, or t
  misc_feature (320)..(320): n is a, c, g, or t
gccagaaggctccatattctcaacatgtgcaggtcaatttgacataaagctaccaacaaggagcaacaggcccactgcaggctgtgtttataacttgaaaattatgagcaggtattgggagccacagactgtatttnggaaccagctgcatgtcaggacaagcatagattgtggtctgtggaggctgggagagcacaatgcttgantttnatttctttgggagataagaagaaaaaataccttcctacctgacaagattgacaacttgctaaatctgattatcttcagaagtgtgctggacagttgcnnnnnaacntntncttttcaagatgatgatcaggaacatctctacgagggaccgatttaggggagagctagctttcctggcagg

SEQ ID NO: 505241 - DNA, 174 bp, Homo sapiens
  misc_feature (34)..(34): n is a, c, g, or t
gtttatacactcatgagcacatgcctcattctangtaccttttcatgcagtcagtacatattatacatttatgcctacatgttttcatgcattcatgagcacattttatacattcatgtcatgtataaatacactcatgagcacatgtattcattctcgagcccgtctatttat

SEQ ID NO: 505242 - DNA, 318 bp, Homo sapiens
  misc_feature (23)..(23): n is a, c, g, or t
  misc_feature (88)..(88): n is a, c, g, or t
  misc_feature (93)..(93): n is a, c, g, or t
  misc_feature (120)..(120): n is a, c, g, or t
  misc_feature (128)..(128): n is a, c, g, or t
  misc_feature (211)..(211): n is a, c, g, or t
  misc_feature (216)..(217): n is a, c, g, or t
tcccacccaacttcacgccgggnaaagtcccagtgcttgtatgcgcaaacagtggcgctgttcaaaccttgcaggctgaccattgccngcccntcggcgtttttgcccagccacagttcncccacggnctgccagcgggccctcagcgcatcgtcaatcgattgcccgggcaaggcttgcagtttgcgccagctcggcttgcagggcgctnttcgnnacgcccagctccagcagcggctgccagtgctgtggcaagacgttgagggcggcgcgtacctgctgttgctcgacgggcaggctgaccagttggttgagggc

SEQ ID NO: 505243 - DNA, 252 bp, Homo sapiens
  misc_feature (49)..(49): n is a, c, g, or t
  misc_feature (57)..(57): n is a, c, g, or t
  misc_feature (117)..(117): n is a, c, g, or t
  misc_feature (162)..(162): n is a, c, g, or t
taataccatattgtatgtaatccatctggcctcctaagtacctatgccntgtgtaancccattgttttccataatcatattagtatttcctattatagggataatgaattagagttncaagatgaaacagtcgaacttatttataaacagagaactgaatgnttttaggatttttagggtagtgaaactactcttatgttaatatattggtgggtacatgtcattataaatttgtccaaactcatagaatat

SEQ ID NO: 505244 - DNA, 390 bp, Homo sapiens
  misc_feature (337)..(337): n is a, c, g, or t
aactgctgaaaaggaagccgtccctggatgatctgaaagagctgatgccagccgtcgggagaagcatgcagcaattgctggactatccagaagatgacatagaggaaacattttgtctaaactttaccgatcacagttgagaacttcggtgcaacagaagtaaaagagctggttctgaacggggcagacactgctgttaatagacagaatcggcaggagtttgttgatgcctatgtggattacatattcaataaatcagtggcatctttatttgatgctttccatgcgggctttcataaggtctgtggaggaaaagttcttctgctcttccagcctnatgaattacaagctatggttattgggaatacaaattatgattcggaaagaact

SEQ ID NO: 505245 - DNA, 108 bp, Homo sapiens
  misc_feature (7)..(7): n is a, c, g, or t
gactctncacgcgcgcgggttccaaggtacctgtgtgctttgattgggtctgagggccaatctttctgtggcccgccctgtgcggccaattccggtgggcttaaaaca

SEQ ID NO: 505246 - DNA, 390 bp, Homo sapiens
gtggtctccttaatcttctccaagaaggggtacagcaggcgcagcagctgcaacacacgctcctctcgccgtgactcagtgaggcaggcgtcgttcatgacgaggtatgggtaaatcttgccattgagtcaccggatgtacagccgccgggctgcggaatatgtgcttctgcacaatctctacccggggcatgaaccgtgcaatcttgatgtaataatgcgtaggcattaggcatcagaaactccccaggaatatccacttcagctgtctgtgacgagaaattgctcaagaaccggcaatattcctctatagaggaagaataaggggagttgcttggtcttggcctccaagattttgatccactattacaacttaagaaattaagataat

SEQ ID NO: 505247 - DNA, 291 bp, Homo sapiens
aaaagcctgaaacttttttgtaaaaaaaaaaaaaaaaagaaaatgaaaaaccctttaaaaccctgagctggctgggggggtcgtcaaaaatcaaaaggaccgggaaaaggctcggtaacccaggttggggaaaacatccacccggcaactgttgcctgcaactgtcaggaccttgcactcaggcccggcaggctgttggttgaggctgaggctgaacacccctggggaggaaccaggcacctgggccttcaattccccgctcagctgccactggttgacgcaacggccctg

SEQ ID NO: 505248 - DNA, 122 bp, Homo sapiens
  misc_feature (71)..(71): n is a, c, g, or t
  misc_feature (95)..(95): n is a, c, g, or t
ttcactgttgagtggtaatagcgtagtaagtaagtaggagtgatgtgctatatggggatatagctatgttntgtatctcgatatgccattggcanagcgtagcgtggcgcctctaggagaga

SEQ ID NO: 505249 - DNA, 292 bp, Homo sapiens
  misc_feature (37)..(39): n is a, c, g, or t
  misc_feature (118)..(119): n is a, c, g, or t
  misc_feature (156)..(156): n is a, c, g, or t
  misc_feature (159)..(159): n is a, c, g, or t
ggcaagagaaaaagaataaatgtaagaaagagggggnnngagtctgagggagctacgactgacactgtcgatggatgatggaaacataagactatcaagaaatccaagctggtaattnnccaaaggggatgtgggcgtccgacaataaacttatcntanttggggaaacgggtgttccgaataatatcctggaagttatcaggacacctattttaaatataggcctgaattttgtaaagtaatatttaaggtggtccgtgataattaaataaaatgcttaatgggggtggct

SEQ ID NO: 505250 - DNA, 363 bp, Homo sapiens
ggaaaagcaggagagatattctgcatcagtttgcagttcactgcaaatcttttacattaaggcaaagattgaaaacatgcttaaccactagcaatcaagccacaggccttatttcatatgtgtcctcaactgtacaatgacctattctcatgagaaatggctaaagagattatattttgttctattgctagggtaaaataaatacatttgtgtccactgaaatatattgtcattaaatattttaagggtaggaaatattgtgaaagctctggttgcacatgttatgaatgtttttctacacttgtcatgggagtctactcatttcactctttccactgtatacagtgttctgctttgacaagt

SEQ ID NO: 505251 - DNA, 931 bp, Homo sapiens
gcgcgccgtaagtggtctcgacacgtggactagccgggttgtataggagagcgcggagtgacgtgtgccgtgctgtgtaggggataaccaatggacacccagtaaggagttacaaactccaaaagcagacacaccacatgatatagtatctgtgagcgcagtgtcgcacagaagaagtgaactaaaatctagggatccaatcagatgcagagaatgtggaattgtcacctactgtacaagaaagggactaaagagatgtgtcgattagatgctcgatgaatgctggaattcagaaggaatgtcttcaccttatactgtggattggtctcttcccatcctgatgtggtatagctgtcgatttcgcttacagtagttccgccttatcttcgggagatacattccaaggcccccagtgaattcctgaaacctcaaaacagtaccaaacgcttaatacactgttttttccatatatatagtacctatgataaagtataatgtataaattaagcatagcgaagagatttcggtaataattgtcatagaacaatgataacatactatataaagttatgtgactgtggttggcctctcttggtgtcaaaaatattttctgtacagtactcacctattttagactgtggttgactacggttaaccataacaagagtgggcactttgtgcgggggccctatgtcttaggatacagtatatcctatgattcatttaagaccaacaaaatgcgcccagagaaacttcgttaggacccttggggccacggccctggtgagggttgtactacccgccaggggggtgtccccaccctttgacaaaactcgggtgtacagggtgaacccggtggaaattgtcgcaaaaacaaagcgccgccaacataggggagaaacacgtgtaaactatagtcaacacagtataa

SEQ ID NO: 505252 - DNA, 811 bp, Homo sapiens
ttgacgataggtctccttctttgtgcttttgtcgtgtaggtggactgtgtgtgtgtgctcgtcagtttccgtgtcccgggtgtgtttcgtcttagtgttggtggtgctaggagatatcgtaaccttgggagcgtcccctggcgttagctcgcccgattctttaaactccctttagggctctttttctccccccgttgtgtctggtcccccgatcctttggtgggcaacgcccgctaatcttgctggccacacctttaagagttttcctgtgtccggtcccgcactatagcgcggtttttctcccctctcccccgggcgtttttttttttgccgacattttacaggcgtcggttcttcctctattttccgacgttcccatcccgccttaggcgtccgagaggagcgcgctgggaatgttcggaccacgaagccaagccccgtggaccaatcccgggccagccccaaaagagaagttggtcccaaggccaaattctgggaccaacctccaaaaacgtagtccttgtttgacaaaggtacctatgagtaactctgtaaggaggtccccactattaacttatgacccccgctgtggtctttgagagactgaagattcgaggcttccttgcccacggcagcccttcacggagctccctaagttaaggacttatccaactggtttccaagcacccgagctccagttaaagttacaccccgaaaataccccagggtggagaatgctcccactgctggtgaaaaagcctggataggtcccacccactggacatttgggaaaattaaactttatttaatc

SEQ ID NO: 505253 - DNA, 1201 bp, Homo sapiens
gctcatttgcagccccccatgctgcatggtacagcgagcaggcatcatcgagatgcgagaggaggcggcactggggagatccgcagagccatctacaggccggatcccagacagcctgaataactgtgtcaataaggaccatctgacagacgccatccactgggccagtcatggaccccgttcgtcgtgcacccttgtagctcaattggggcctgccttatcaggtacccttccgggcgtggtgggcgtggtccctctcgtggcatcccagctgctgtggaagtgtatcggacgcaccatgggaccagtgtacccatgatccctactggacatgaccctccttgtggcccaacgcacagctctcctacatggcactcgctatactccatggaaactaaaccctggtcagaaggccccgatgacaggaattagtaggaacaacagacacaagtggaacacaagataagttgacgcccctgggagagcgcaaatctcttactaaaggcagagtcgcccgctcccgcctgggtggcacgtacgggggcaacagcgataaacacggcggtcttgaacccattaacagtaggtcgttgggaccgcgcagagtgccactatcgttcccagtacgggctcagaacacatccatagggccaaaccttcgagcacggacgcgacataggagcacccccgaaagcaccctagctctcacatgggcaaccgcacaccgatcctgccgttgagggacaaacaccagccatgagacgcaactggcggaaagatcacgtggattagaatcagaagaaccaacccctcgcaaccgcttagaccgcactagacagacactccacgacaccgccataagctgtttctcagcacacacaggacgcgatacaacacataacgacgcttgcaggaccaataactaagaaagcctccaacgcacaacctacatctctaccatccacccccataacaacacgcctcacactcaacatgcttatcaaacttcaccaaaaacatacatcataatcaacaccaccttcaccctaccagctgacaactccattcacaaacagcaactaacaacacacccctgctcacacacaccacacccatacagcacacaaacacaccaataaacacccagtaaactcactataatcgacatcacctccacatgtatatgcaccaagctatatca

SEQ ID NO: 505254 - DNA, 155 bp, Homo sapiens
cagttgtacttgtactctcctttctcctttcttcccctttctctgcccgccatccccttgactggggtttccactaatacggcatgccggctggggaacttaagttgccgcccgttcccggccccctttacacttgcgcccgctcacaccaaaca

SEQ ID NO: 505255 - DNA, 117 bp, Homo sapiens
tctagaggatccctttctctgatcgctcactgaaaccctgtgcaaggcaggtggttagtggccccagtttgtagacaaggaagccgggtgtggtggctcacacctgtattctcagta

SEQ ID NO: 505256 - DNA, 151 bp, Homo sapiens
cggcccgtaatttggctgtatcgacccattccatttctcttatctagacagtgagataactcagagagggcgggagatttcgcgatccaaatgatagactaggtgatatatccaataagcttgtttcttaaggatttcatttaagatttct

SEQ ID NO: 505257 - DNA, 183 bp, Homo sapiens
gatgcatcagaggatccggacgaggtgatggagacttgctcacaccttcctgggaatcacggtcttggccccagacccagagaaggcgccttcgatgccatggacgggaccagacgacgggtaccgccatcggtgcatgacggatgtctatccttgttggctgtgcaggacggactctgcgcc

SEQ ID NO: 505258 - DNA, 523 bp, Homo sapiens
gatacagcgaggcggtggcccttatgtgggtagagggagtctgcgggatataccaaggcagatgagaccatatccatgaggagcctctgagcccaggtattgatgctgagcgcctgactggcggagagcgctaaccctgagacaacggcgcccgacaacatgcaagtgcaggaaaacttgaatatcacttggacatatgggaagtggtacaaccagtgcaacggtatcacctggccctggctgtacaacataatggactggaagacagtgagcaccctggtgctgctagagggcgctacataggctcataacagtatgaccagcacttgaagggggtaaaggttcctgagaagagaccactttagcttatatgagacatatacatgatggaaggtatgtataatacatcaaatgaagacaaacatgagttctaaggggtcacaacaacttgagaaggaacccctttcttgacaccaacctccatatgggccgcatttctggcaagcttggcgggggccgtggg

SEQ ID NO: 505259 - DNA, 1229 bp, Homo sapiens
atcccatgagtcacagctatcctctgtctttaagaatgactgttttatagcttacatgggatcatgaggtccatggctggttgcaggttccctttttccttcctcaggttttgtctcttcctgtgttgtccccagcaagggagagactgtggggtggattgggagaacagattaggagtatagcaaatgaacccagaatggaacagtggggagctaactgtgaatgaggagagtacctgctgcaggacctggaggtcaggtgtgaatgctgtattggcacagggaataaatatcctggcgtctggagccttcacctctccgtcaagtccttcctgtgatactgccatggcacaggatctgagttgcagctctgcaccctaaatcacaccctgggcattgtctgggctgcagggctgccaggttctgtacttgtgtccagctgtggccctggatgctggagctggagggttttctgtgctcagactgtagcctgtagctcttggcctgtgtagagccccctcctgtgccctcagtggctgtcgtttgttaacatcatcaggaagatgggaaaggtcaggcagaatttttctgccctacaaagggtggaagagaaaggacacagtattttcatgaatttaccatatatctttgtttttcttcaacgaaaaagttaattgaggcaatgtcatctgctcaaagttgagtggtttattcacaataaactgtaagtttctgattataaaaatgtgtctagagtctttcttcatggggtctaggtagtcttctgagcccacaggggtctggccagtgaacaccagaggagtgccttcctatcagtcagccccttcttccagagggctgtggaggccccagtggccaaactcggctctgttttccctttctggctgttgggggagagggcacctgtaagtgatccctgtggaatgaagtagaaaatcctgccagttttccgctctcctctccctcagtacaggctgaatcattccccaccacagatagatcccagggttgtggtagagtactgatataaatgtcccaacccccccattctgagacctccggacccctccaaagcagacatgggaatgtagggctgtgggatatggcagggtgaactccagcttcacgggagccctaagggttatgaagagacaacttggggcagaaacaagtgtggagtctaatctcaagggtgaaggacaggaaat

SEQ ID NO: 505260 - DNA, 348 bp, Homo sapiens
cacacttcaagtacaggtttataattcaagtcaagtgcttcgctccccacacttaaaattagatgggtaggagaagcagatgacatgccggtcaggtagctgtccacattccatgcgatatggcatgtggtgaggacaccaatcacatcagggagaggaaagatggtctggccagagaataaccagaccggagcctgtactaggggggaggtgctatatacgcaagggtcagttctattttacacgacgtgatgtcccatccacaccagaaatacagcatcgattacctggtccgggcctaggctaggacggaacgggaccgatcggggtgtgaatcagttcagcttc

SEQ ID NO: 505261 - DNA, 376 bp, Homo sapiens
ccttggctggccgctgggggggcctctccgcgcgcctccctggccgggccgggactccgccttcgccgtcgcccgggaggcccgggcgctccccgtcgccggcacgttgtccgagcattacccgccgtcagcggccgggcgcccagcgtgtgtctgccttttttcctcccgccgccttctcagctctcggaaaggtcagaggccaccgcctctgaccaaccggcgccggcacatctaggccctctctccctgtctggcgcggcggggaaacgcgccgcctcggggctcaccactcgagtcatctttgggagctctcgcagcgctgcccgcgcggtttaacgcccgcctgtggagggtatccccagctcgcgggctc

SEQ ID NO: 505262 - DNA, 411 bp, Homo sapiens
gtcccattattattgacagattgcaactaagagatgtcctcattgttctcttggtgtgttcacagagtcattaccagctccagctgtgccctggtgcagactgccccatggttattcgggtacaggagcctagagctcgccgagtacagtgcaatcggtgcaacgaggtcttctggtaagagtgagtgtgagtgctgagcagccctgggctcatgccccatcctccaaagcaccactgctgttgctccatgtgagggcggcactggaagaggcagggtctctgagccaacagaacagctgtgctccaagtgggtaggtttatgtccagcatctcatattccactaggtcttcaatacatgctcagtctggaggcaaggaagtgacacaggctcttggaaaatgtgttgtgg

SEQ ID NO: 505263 - DNA, 166 bp, Homo sapiens
cgagattccactttctcctggagatgctggataacgccttcttatcagctttaggcaagttcttgcgtgacgttctgcctcttcccattctctcatgagcgggacattctctctcgggctggcctcaagcctctctttggctttccgaaaacggcatcttcatcgg

SEQ ID NO: 505264 - DNA, 377 bp, Homo sapiens
  misc_feature (15)..(15): n is a, c, g, or t
  misc_feature (25)..(25): n is a, c, g, or t
  misc_feature (58)..(58): n is a, c, g, or t
tatttatttggtccntaaaagggantaaagtactgatacatgctacaagatagatganccttgaaggcaagtaaaagaagccagacacaaaaggccacatactgtatgaactcatttatatgaaatttccaaaacaggcaaatccataaagacagaaagcaaatttgtggttgccagggacttggggaggaagaatggggagtgactgctaatgagtataggatttccttttgagtgataaaaatgttctaagattagatggcagtgatggttgcacaactctgtaaatatattacaaacaatgcattgtacactttcaaagggtagatttcattgcacgtgaactatatatttcaataaatctgtcacaaaaaagt

SEQ ID NO: 505265 - DNA, 407 bp, Homo sapiens
ttgttggcttggataaaaggaaaattttgaacatgggaccctgacttaatgaatatttgaatgtttttcttttccaattttaagtttcaagtgtcgtcagatgtatcacgcacccacagactgtgccacaatccggaaatggctcacgaagtgtgcagacgactctgaaacagccaactacattagtgctcacactaaagactgtcccaagtgcaacatctgcattgagaagaatggaggctgcaatcacatgcaatgctccaaatgtaaacacggtgagttccaagcttggtgtgtaaggcccagtggcactttcttgtggttgggtctccgttactatttaagtgagtacttctgccatgaaatgacaaaacatagaagaacctcagtcacttaacagtcacagt

SEQ ID NO: 505266 - DNA, 1353 bp, Homo sapiens
cgggcctcgacgggggcttgcacacggggggtgaggctgctatctgggtggagaccttctttgccggcagtttcgcccgctcgtgtgccgcctcccccgtgaagtttgctgggttttcgttgggagaccaccctcttggtttctttgcctgacccaggggccagccccgagtgtgccgagcactttatggggggtttcccacaagtttctccttggaggaaaccttgggtgccccggaggggcacccacaaaggcgccctgggataaaagaggagtagccacttggcaaaaaggggcgtcccaaaaacaccaagggttggctccagcaaaacccttttggggaaccccttggggtggcttctgcgcacctggggcgtgcacaaaaggggaaattttacgcctttctccgaaccctttccccacccaggcgcgtatctgcgttagagtagaaaatgggtgcgcgcccccccctttgtgggggaaattccaccccgggttttctaaggagccttgcgagaggttattgcccccgacccaattgacaaatcgggaggccccgttttctaacccaccacagggcacattggggggaagccattcccctgagaagggtggacacacctgcgcctatggacctctccccctggtgtcccagccattatgaacccacaagggtgataaagaccggtatgaaaagagaggcttcgtcgggagcctcacttcgctttgggtatatataatggagaagtctccaaagcggtgtataacagggtctttatagagtgggcctctcacttcgctggtgtatagcacacacaccacggagagaactcgggtggtgccacacaagtggagaccctcccacaccctccaacatgccccctgggcccaccccgccacacaggaccgggcacaagcctgcacgccttctcggagaattgagatcccctgagccgagtatcttatcctattctctcccgagcccttctcctataagcccgctggagaagagattgtatattcccacagagatgctatgcttatagagaggtcacaagtacacagtctcctccacatgagagaacactatggcctacaatcacacattaagagtctatgagaattgtgagaaaaatgtgtgcccctctgtcacccttgttttgttgccctaaataagcacatctgaaatgtttggttggtggggcgggtttctgaagcacaatgagagaaaatgcccctattataggaaggaattaacttgaagccctggaaggtccaaaggctgaaggtgaagcccactgagattactcccctgcactccagcctgggccacagagcccgggcctgtatcca

SEQ ID NO: 505267 - DNA, 110 bp, Homo sapiens
cgtagcggaccaggctgcgttcttctggggttctgaaaagcagctcctctagctatttcaacttatgtccctaatatttaaaacataaagataggttgaggttgaagtct

SEQ ID NO: 505268 - DNA, 90 bp, Homo sapiens
catcctggtgtaggagtttggtgctagctattgtaaggaaaagggaccttccagaaagcatcgtgaggaaataaatggcctgcgcaagga

SEQ ID NO: 505269 - DNA, 320 bp, Homo sapiens
  misc_feature (260)..(260): n is a, c, g, or t
  misc_feature (306)..(306): n is a, c, g, or t
ttgttggcttggataaaaggaaaattttgaacatgggaccctgacttaatgaatatttgaatgtttttcttttccaattttaagtttcaagtgtcgtcagatgtatcacgcacccacagactgtgccacaatccggaaatggctcacgaagtgtgcagacgactctgaaacagccaactacattagtgctcacactaaagacgtaaggaccgtattttacctctcatggatttgccctccttagtgctgcccagggcctngccttggagatttgccatctgagagcagaatacccagagccccagnacccttcctgagga

SEQ ID NO: 505270 - DNA, 964 bp, Homo sapiens
ggcagacactgaccttcagcgcctcggtccagcgccatggtgccctccaggaagtgcttcgttgggggaaactgtagatgaacgggcggaagcagagtcctggggggagctcatcggccactctgaacgcggcatacggtcgccgcggcgaccccgaggtggggttgggtgttcccccgtattgcctatattctgattcgcccgggaaagaaagcttgaggatcccagaagattgctgtggttgccgcaagaattgctacaaaaggttgaactaaatggggcttttacgtggggcggagatcagccccttggcttgatcaaaaggattggcggaggccagcgtgttttgctcctgggcgcactcagacgcagaatgtgcatggtctgcggagagaagtcaggatagaagctgtagtgggggcagaaaaagggtggggcgcatgtcttcgtggcgcacgcacgggaactcggaaatttaactcggccatggaatggggggagaagggctatatgacaggggaagcttggccatcacctgaagaagtgttgtttccgacgcaagaaccaaaggtcaatccgcagataaccgtgaaggcgtggagccaggtcgtcgtgccttaatgagcctggttgttggcccattgtgttacgtggcaaagatttggaacaccccaaaggcccagggatgacacagaaaagtccggcgggatggtagagtccaacgtctcagaagcgggggtcaagagcacacgatcatttatggagggcttgtgactggcgcacttggatgagttgcacccgcctgggtgtgggacgctcctttgtgggggggttcccccaaagccgaattcgtgcttatattgaacaaagagccatattttcctacctttgcgagcggataaacgaaacaagatgctcctggataatgagagacggctcggggccaaagttcttggataccgag

SEQ ID NO: 505271 - DNA, 4095 bp, Homo sapiens
  misc_feature (22)..(22): n is a, c, g, or t
  misc_feature (29)..(32): n is a, c, g, or t
  misc_feature (34)..(34): n is a, c, g, or t
  misc_feature (36)..(37): n is a, c, g, or t
caaataaggctaggtacgaggnctgggtnnnnantnnggcacgaggcttctggaggaagcagcgcgggcttgaccggcgtcggcccgccgcctccgctgccgcttcgccccaatccggtccctctggcccggcctgacccggtctggcttgttcgggctcagcggccgcgaggccgcagctcccgatggaaatcatattatgtagaatacttgggtgacatctgcctgagagatctccaagaattacagaagacaaaaatactaatgcatttgagaaagcggtagttttggggggagggggaaaaagcaactgctttcctgatctgcaacttggctggatgctaagatgtcagtggacatgaatagccaggggtctgacagcaatgaagaggactatgacccaaattgtgaggaagaggaagaagaagaagaagacgaccctggggacatagaggactattacgtgggagtagccagcgatgtggagcagcagggggctgatgcctttgatcccgaggagtaccagttcacttgcttgacctacaaggaatctgagggtgccctcaatgagcacatgaccagcttagcttctgtcctaaaggtatctcattcagttgctaaacttatattagttaatttccactggcaagtttcagagatattggacagatacaagtccaattctgctcaactgcttgttgaggctcgagttcagcctaatccatcaaaacatgttcccacatcccatccccctcaccactgtgcagtgtgtatgcagtttgtgcgaaaggaaaacctactctctctggcctgtcagcaccagttttgccgcagctgctgggagcagcactgctcagttctcgtcaaggacggcgtgggcgtgggagtctcttgcatggctcaggactgtccactccgtacaccagaggactttgtgtttccattgcttcccaatgaagaattgagagagaaatacaggcgctacctcttcagggactatgtggagagtcattaccagctccagctgtgccctggtgcagactgccccatggttattcgggtacaggagcctagagctcgccgagtacagtgcaatcggtgcaacgaggtcttctgtttcaagtgtcgtcagatgtatcacgcacccacagactgtgccacaatccggaaatggctcacgaagtgtgcagacgactctgaaacagccaactacattagtgctcacactaaagactgtcccaagtgcaacatctgcattgagaagaatggaggctgcaatcacatgcaatgctccaaatgtaaacacgacttctgctggatgtgtctaggagattggaagactcatggcagtgaatactatgagtgcagtcgttacaaggagaatcctgacatcgtgaaccagagccaacaagcccaggcgagggaagccctcaagaagtacttattctactttgagaggtgggaaaaccacaataaaagcttgcagctagaggcacagacataccagcggattcacgagaagattcaggagagggtcatgaacaatctggggacatggatcgactggcagtacctacagaatgctgccaagctcttggccaagtgtcgatacaccctgcaatacacctacccatatgcatattacatggagtccggacccaggaagaagctgtttgaataccagcaggctcagctggaggctgagatcgaaaacctctcatggaaagtggagcgtgcagacagctatgacagaggggacttggagaaccagatgcatatagcggagcagcggaggagaaccctgctgaaagatttccatgacacctaagttgggatgtggatgtgccggggtgaggaagatgtggctgcaaggtctcccggctgccatactgcatgctgcaggctctgcctttcatgaccccaggcaacagccagggccccactcctgagagacactggcaacacctcttagttgatttctgttttcttctcttttcactttttgtttctaccagggtagaggccatgttgaactggcctcttttcaggacttttatttccccctggatggttgttgggagggagggaaagtgttttctgaatggctattaatagtattagatcattacaacttatgtaactttcaaaggttgtacaattatacaaaaaaaaaaaaaaaggcaaactataggataacacagagccctttttgaaaataaattggcattggagtgttttaccctctagctgttttacttagaatgtaacatatgctgcctacccacctcaaaatgtctgtactgcaagagggccctgggcctctgctttccatattcacgtttggccagagttgtagtcccaaagaagagcatgggtggcagatggtagggaattgaactggcctgtgcaatgggcatggagcacaaggggtcacagcatgcctcctgccttaccgtggcagtacggagacagtccagaacatggtcttcttgccacggggtgttgttgtctctggtggtgctgcatgtctgtggctcacctttattcttgaaactgaggtttacctggatctggctactgaggctagagcccacagcagaatggggttgggcctgtggccccccaaactagggggtgtgggttcatcacagtgttgccttttgtctcctaaagatagggatctacttttgaagggaattgttcctcccaaataaatttgctttaccttggtcctttcttttgtgccagtattcaagtggtatagctctgagcagggtcacatttggccaaacctgacactgtcttgctgcattctcctttggcaaacatcagggtcagaattcaggatagcccttcctagggcactggactttctggcatgggggctgtgtttgcacaagttattttcatgttacctggagagtgtccagaggctgctctgaggctgaggtgtgttcccccttgcctggttccagctgtcagagggataccatcctagggtctgggaatccaaggccacgagactccttggtttgtggtccgagatcctgtactaaggagggtctggccagaggaacagaccagcttttgcacaatgaagcgcaagggaacaagtggtttgcctggtgtcctacctgtcctgaacctggtcctgtgggccattgaaaagttagatctgtgatctctggggtttttgtggctttgttcaatgcttccactctagggcaggcagagcagtctatactctcccaagcctgcttgacctccaagtagagctgatacagagatctgtgaatattgtgatagaaattctttggtattcatacatttcagctgcaagtcagcaatttcccaggtaccatgtaagctataaaacagtcattcttaaagacagaggatagctgtgactcatgggatcatgaggtccatggctggttgcaggttccctttttccttcctcaggttttgtctcttcctgtgttgtccccagcaagggagagactgtggggtggattgggagaacagattaggagtatagcaaatgaacccagaatggaacagtggggagctaactgtgaatgaggagagtacctgctgcaggacctggaggtcaggtgtgaatgctgtattggcacagggaataaatatcctggcgtctggagccttcacctctccgtcaagtccttcctgtgatactgccatggcacaggatctgagttgcagctctgcaccctaaatcacaccctgggcattgtctgggctgcagggctgccaggttctgtacttgtgtccagctgtggccctggatgctggagctggagggttttctgtgctcagactgtagcctgtagctcttggcctgtgtagagccccctcctgtgccctcagtggctgtcgtttgttaacatcatcaggaagatgggaaaggtcaggcagaatttttctgccctacaaagggtggaagagaaaggacacagtattttcatgaatttaccatatatctttgtttttcttcaacgaaaaagttaattgaggcaatgtcatctgctcaaagttgagtggtttattcacaataaactgtaagtttctgattat

SEQ ID NO: 505272 - DNA, 4394 bp, Homo sapiens
tgaccagatagcggctgagaaacaatggttatctgctccactgacgccaggatgtcttctccgtgcccgatcccggagtacaaacagtgaaatgagaagccggtgagaaacgcgctggttaaaaacatctcgacgggagacgctggtaggcgaatagtggctccagacgcggtcggcgcctgccgtaccctggtcagactctgggtcagagcgctaagtttcaaggaggcggcgctaaacaggccctctagccgggagcctgtcgcgacccgagcgaccgtgggtcgaccccgatccggaagtgacgcaacggcgccaagcacttccggagctgtggggacgactcttctggaggaagcagcgcgggcttgaccggcgtcggcccgccgcctccgctgccgcttcgccccaatccggtccctctggcccggcctgacccggtctggcttgttcgggctcagcggccgcgaggccgcagctcccgatggaaatcatattatgtagaatacttgggtgacatctgcctgagagatctccaagaattacagaagacaaaaatactaatgcatttgagaaagcggtagttttggggggagggggaaaaagcaactgctttcctgatctgcaacttggctggatgctaagatgtcagtggacatgaatagccaggggtctgacagcaatgaagaggactatgacccaaattgtgaggaagaggaagaagaagaagaagacgaccctggggacatagaggactattacgtgggagtagccagcgatgtggagcagcagggggctgatgcctttgatcccgaggagtaccagttcacttgcttgacctacaaggaatctgagggtgccctcaatgagcacatgaccagcttagcttctgtcctaaaggtatctcattcagttgctaaacttatattagttaatttccactggcaagtttcagagatattggacagatacaagtccaattctgctcaactgcttgttgaggctcgagttcagcctaatccatcaaaacatgttcccacatcccatccccctcaccactgtgcagtgtgtatgcagtttgtgcgaaaggaaaacctactctctctggcctgtcagcaccagttttgccgcagctgctgggagcagcactgctcagttctcgtcaaggacggcgtgggcgtgggagtctcttgcatggctcaggactgtccactccgtacaccagaggactttgtgtttccattgcttcccaatgaagaattgagagagaaatacaggcgctacctcttcagggactatgtggagagtcattaccagctccagctgtgccctggtgcagactgccccatggttattcgggtacaggagcctagagctcgccgagtacagtgcaatcggtgcaacgaggtcttctgtttcaagtgtcgtcagatgtatcacgcacccacagactgtgccacaatccggaaatggctcacgaagtgtgcagacgactctgaaacagccaactacattagtgctcacactaaagactgtcccaagtgcaacatctgcattgagaagaatggaggctgcaatcacatgcaatgctccaaatgtaaacacgacttctgctggatgtgtctaggagattggaagactcatggcagtgaatactatgagtgcagtcgttacaaggagaatcctgacatcgtgaaccagagccaacaagcccaggcgagggaagccctcaagaagtacttattctactttgagaggtgggaaaaccacaataaaagcttgcagctagaggcacagacataccagcggattcacgagaagattcaggagagggtcatgaacaatctggggacatggatcgactggcagtacctacagaatgctgccaagctcttggccaagtgtcgatacaccctgcaatacacctacccatatgcatattacatggagtccggacccaggaagaagctgtttgaataccagcaggctcagctggaggctgagatcgaaaacctctcatggaaagtggagcgtgcagacagctatgacagaggggacttggagaaccagatgcatatagcggagcagcggaggagaaccctgctgaaagatttccatgacacctaagttgggatgtggatgtgccggggtgaggaagatgtggctgcaaggtctcccggctgccatactgcatgctgcaggctctgcctttcatgaccccaggcaacagccagggccccactcctgagagacactggcaacacctcttagttgatttctgttttcttctcttttcactttttgtttctaccagggtagaggccatgttgaactggcctcttttcaggacttttatttccccctggatggttgttgggagggagggaaagtgttttctgaatggctattaatagtattagatcattacaacttatgtaactttcaaaggttgtacaattatacaaaaaaaaaaaaaaaggcaaactataggataacacagagccctttttgaaaataaattggcattggagtgttttaccctctagctgttttacttagaatgtaacatatgctgcctacccacctcaaaatgtctgtactgcaagagggccctgggcctctgctttccatattcacgtttggccagagttgtagtcccaaagaagagcatgggtggcagatggtagggaattgaactggcctgtgcaatgggcatggagcacaaggggtcacagcatgcctcctgccttaccgtggcagtacggagacagtccagaacatggtcttcttgccacggggtgttgttgtctctggtggtgctgcatgtctgtggctcacctttattcttgaaactgaggtttacctggatctggctactgaggctagagcccacagcagaatggggttgggcctgtggccccccaaactagggggtgtgggttcatcacagtgttgccttttgtctcctaaagatagggatctacttttgaagggaattgttcctcccaaataaatttgctttaccttggtcctttcttttgtgccagtattcaagtggtatagctctgagcagggtcacatttggccaaacctgacactgtcttgctgcattctcctttggcaaacatcagggtcagaattcaggatagcccttcctagggcactggactttctggcatgggggctgtgtttgcacaagttattttcatgttacctggagagtgtccagaggctgctctgaggctgaggtgtgttcccccttgcctggttccagctgtcagagggataccatcctagggtctgggaatccaaggccacgagactccttggtttgtggtccgagatcctgtactaaggagggtctggccagaggaacagaccagcttttgcacaatgaagcgcaagggaacaagtggtttgcctggtgtcctacctgtcctgaacctggtcctgtgggccattgaaaagttagatctgtgatctctggggtttttgtggctttgttcaatgcttccactctagggcaggcagagcagtctatactctcccaagcctgcttgacctccaagtagagctgatacagagatctgtgaatattgtgatagaaattctttggtattcatacatttcagctgcaagtcagcaatttcccaggtaccatgtaagctataaaacagtcattcttaaagacagaggatagctgtgactcatgggatcatgaggtccatggctggttgcaggttccctttttccttcctcaggttttgtctcttcctgtgttgtccccagcaagggagagactgtggggtggattgggagaacagattaggagtatagcaaatgaacccagaatggaacagtggggagctaactgtgaatgaggagagtacctgctgcaggacctggaggtcaggtgtgaatgctgtattggcacagggaataaatatcctggcgtctggagccttcacctctccgtcaagtccttcctgtgatactgccatggcacaggatctgagttgcagctctgcaccctaaatcacaccctgggcattgtctgggctgcagggctgccaggttctgtacttgtgtccagctgtggccctggatgctggagctggagggttttctgtgctcagactgtagcctgtagctcttggcctgtgtagagccccctcctgtgccctcagtggctgtcgtttgttaacatcatcaggaagatgggaaaggtcaggcagaatttttctgccctacaaagggtggaagagaaaggacacagtattttcatgaatttaccatatatctttgtttttcttcaacgaaaaagttaattgaggcaatgtcatctgctcaaagttgagtggtttattcacaataaactgtaagtttctgattat

SEQ ID NO: 505273 - DNA, 250 bp, Homo sapiens
ttttattttttgggggaaaaagaggggcccttccctgcctaaatcccttcctgggggggatcaccattatttaatgttttttaaatcaggcctttttttaaaaggagggctataaaccttggactttaaaaaacttatttttttattcccccccgggggccattggcagattaaaaaaagggaacttcataattttttccccaacccccaaggttttttttaaaaaataaaattaaaaatggaaagggga

SEQ ID NO: 505274 - DNA, 4584 bp, Homo sapiens
  misc_feature (22)..(22): n is a, c, g, or t
  misc_feature (29)..(32): n is a, c, g, or t
  misc_feature (34)..(34): n is a, c, g, or t
  misc_feature (36)..(37): n is a, c, g, or t
caaataaggctaggtacgaggnctgggtnnnnantnnggcacgaggcttctggaggaagcagcgcgggcttgaccggcgtcggcccgccgcctccgctgccgcttcgccccaatccggtccctctggcccggcctgacccggtctggcttgttcgggctcagcggccgcgaggccgcagctcccgatggaaatcatattatgtagaatacttgggtgacatctgcctgagagatctccaagaattacagaagacaaaaatactaatgcatttgagaaagcggtagttttggggggagggggaaaaagcaactgctttcctgatctgcaacttggctggatgctaagatgtcagtggacatgaatagccaggggtctgacagcaatgaagaggactatgacccaaattgtgaggaagaggaagaagaagaagaagacgaccctggggacatagaggactattacgtgggagtagccagcgatgtggagcagcagggggctgatgcctttgatcccgaggagtaccagttcacttgcttgacctacaaggaatctgagggtgccctcaatgagcacatgaccagcttagcttctgtcctaaaggtatctcattcagttgctaaacttatattagttaatttccactggcaagtttcagagatattggacagatacaagtccaattctgctcaactgcttgttgaggctcgagttcagcctaatccatcaaaacatgttcccacatcccatccccctcaccactgtgcagtgtgtatgcagtttgtgcgaaaggaaaacctactctctctggcctgtcagcaccagttttgccgcagctgctgggagcagcactgctcagttctcgtcaaggacggcgtgggcgtgggagtctcttgcatggctcaggactgtccactccgtacaccagaggactttgtgtttccattgcttcccaatgaagaattgagagagaaatacaggcgctacctcttcagggactatgtggagagtcattaccagctccagctgtgccctggtgcagactgccccatggttattcgggtacaggagcctagagctcgccgagtacagtgcaatcggtgcaacgaggtcttctgtttcaagtgtcgtcagatgtatcacgcacccacagactgtgccacaatccggaaatggctcacgaagtgtgcagacgactctgaaacagccaactacattagtgctcacactaaagactgtcccaagtgcaacatctgcattgagaagaatggaggctgcaatcacatgcaatgctccaaatgtaaacacgacttctgctggatgtgtctaggagattggaagactcatggcagtgaatactatgagtgcagtcgttacaaggagaatcctgacatcgtgaaccagagccaacaagcccaggcgagggaagccctcaagaagtacttattctactttgagaggtgggaaaaccacaataaaagcttgcagctagaggcacagacataccagcggattcacgagaagattcaggagagggtcatgaacaatctggggacatggatcgactggcagtacctacagaatgctgccaagctcttggccaagtgtcgatacaccctgcaatacacctacccatatgcatattacatggagtccggacccaggaagaagctgtttgaataccagcaggctcagctggaggctgagatcgaaaacctctcatggaaagtggagcgtgcagacagctatgacagaggggacttggagaaccagatgcatatagcggagcagcggaggagaaccctgctgaaagatttccatgacacctaagttgggatgtggatgtgccggggtgaggaagatgtggctgcaaggtctcccggctgccatactgcatgctgcaggctctgcctttcatgaccccaggcaacagccagggccccactcctgagagacactggcaacacctcttagttgatttctgttttcttctcttttcactttttgtttctaccagggtagaggccatgttgaactggcctcttttcaggacttttatttccccctggatggttgttgggagggagggaaagtgttttctgaatggctattaatagtattagatcattacaacttatgtaactttcaaaggttgtacaattatacaaaaaaaaaaaaaaaggcaaactataggataacacagagccctttttgaaaataaattggcattggagtgttttaccctctagctgttttacttagaatgtaacatatgctgcctacccacctcaaaatgtctgtactgcaagagggccctgggcctctgctttccatattcacgtttggccagagttgtagtcccaaagaagagcatgggtggcagatggtagggaattgaactggcctgtgcaatgggcatggagcacaaggggtcacagcatgcctcctgccttaccgtggcagtacggagacagtccagaacatggtcttcttgccacggggtgttgttgtctctggtggtgctgcatgtctgtggctcacctttattcttgaaactgaggtttacctggatctggctactgaggctagagcccacagcagaatggggttgggcctgtggccccccaaactagggggtgtgggttcatcacagtgttgccttttgtctcctaaagatagggatctacttttgaagggaattgttcctcccaaataaatttgctttaccttggtcctttcttttgtgccagtattcaagtggtatagctctgagcagggtcacatttggccaaacctgacactgtcttgctgcattctcctttggcaaacatcagggtcagaattcaggatagcccttcctagggcactggactttctggcatgggggctgtgtttgcacaagttattttcatgttacctggagagtgtccagaggctgctctgaggctgaggtgtgttcccccttgcctggttccagctgtcagagggataccatcctagggtctgggaatccaaggccacgagactccttggtttgtggtccgagatcctgtactaaggagggtctggccagaggaacagaccagcttttgcacaatgaagcgcaagggaacaagtggtttgcctggtgtcctacctgtcctgaacctggtcctgtgggccattgaaaagttagatctgtgatctctggggtttttgtggctttgttcaatgcttccactctagggcaggcagagcagtctatactctcccaagcctgcttgacctccaagtagagctgatacagagatctgtgaatattgtgatagaaattctttggtattcatacatttcagctgcaagtcagcaatttcccaggtaccatgtaagctataaaacagtcattcttaaagacagaggatagctgtgactcatgggatcatgaggtccatggctggttgcaggttccctttttccttcctcaggttttgtctcttcctgtgttgtccccagcaagggagagactgtggggtggattgggagaacagattaggagtatagcaaatgaacccagaatggaacagtggggagctaactgtgaatgaggagagtacctgctgcaggacctggaggtcaggtgtgaatgctgtattggcacagggaataaatatcctggcgtctggagccttcacctctccgtcaagtccttcctgtgatactgccatggcacaggatctgagttgcagctctgcaccctaaatcacaccctgggcattgtctgggctgcagggctgccaggttctgtacttgtgtccagctgtggccctggatgctggagctggagggttttctgtgctcagactgtagcctgtagctcttggcctgtgtagagccccctcctgtgccctcagtggctgtcgtttgttaacatcatcaggaagatgggaaaggtcaggcagaatttttctgccctacaaagggtggaagagaaaggacacagtattttcatgaatttaccatatatctttgtttttcttcaacgaaaaagttaattgaggcaatgtcatctgctcaaagttgagtggtttattcacaataaactgtaagtttctgattataaaaatgtgtctagagtctttcttcatggggtctaggtagtcttctgagcccacaggggtctggccagtgaacaccagaggagtgccttcctatcagtcagccccttcttccagagggctgtggaggccccagtggccaaactcggctctgttttccctttctggctgttgggggagagggcacctgtaagtgatccctgtggaatgaagtagaaaatcctgccagttttccgctctcctctccctcagtacaggctgaatcattccccaccacagatagatcccagggttgtggtagagtactgatataaatgtcccaacccccccattctgagacctccggacccctccaaagcagacatgggaatgtagggctgtgggatatggcagggtgaactccagcttcacgggagccctaagggttatgaagagacaacttggggcagaaacaagtgtggagtctaatctcaagggtgaaggacaggaaat

SEQ ID NO: 505275 - DNA, 437 bp, Homo sapiens
  misc_feature (66)..(66): n is a, c, g, or t
  misc_feature (184)..(184): n is a, c, g, or t
  misc_feature (387)..(387): n is a, c, g, or t
  misc_feature (433)..(437): n is a, c, g, or t
aaccatggggtggggctgcaataaagtctccggaatggcccggccaccttcctgaaagcagggccntggccccacccaaaggtccctggggcaggcgggcacccgtcattcggctgccattggcttcctcagatgtatttcaaggactaaagtgggctcctaagatctaagatggcccggcgcnggttgtcccgcctgtaatcccagcactttgggaggccgaggcgggcggatgagttgaggtcgggagtttgagtccccgtctctactaaaaatacaaaattagccggacaaggtggcgcatgcctataatcccaggtactcaggaggctgaggcaggagaatcacttgaacctgggaggcagaggttgcagtgagccaagattngccactgcactccagcctgagcaacaaaagcaaaactctatctctnnnnn

SEQ ID NO: 505276 - DNA, 793 bp, Homo sapiens
  misc_feature (793)..(793): n is a, c, g, or t
caacgactgtctcttctggttcacaatgtttctgtaatgcatcaatgtctctggactaacatgccatagatgatgagcattggaaagccctgatccatcgaaatgagcacctagctttcggagtctactatataagtgtgctttctgattatcaatgagtgaagactatgttgagaagattctgatatacccagatataccactatgaatgcaggattccattgtttgaataggctagtactcaacattttgttagtttctccacggagagaggccttagtgtggtcctcgcaattccttctgtaattaaattccccaggggggcctaaattactttggaatcgaaaaggtttttccccattccaacgttgccaaattgttgtttaaaggttttctctaagagaacctcggaacacttggaattggctcgtaattttggagggcaaaccaactttcctttggcggtgatatatcccccaagggaatttccctttataccgttgggaccgataatgcggcccgaacaggagttccgacgatcgaaactccgcgcgctttagagaggttttttcttcacacttgttgaagcgccatattttggggatacccgcccggtgggccaaaccaaaaaggagagcggcccgattccctttccgatatctttttatatccctttgtgggggcgataaattatctcccaatttgtgggggctttttgaaccaaaccttagggggtgtaagttttgggaggtgggcccataccgaacacgagaaagaaacccccgctttccgn

SEQ ID NO: 505277 - DNA, 129 bp, Homo sapiens
  misc_feature (124)..(124): n is a, c, g, or t
gcttcttttagattttttgtgtttgtgtctcctgtgactatctccttcttcactttcatggcgacgtctactattacttcgagaagacttatgtctggtttcctctttctcccttctgtcgtcntctcg

SEQ ID NO: 505278 - DNA, 4232 bp, Homo sapiens
  misc_feature (22)..(22): n is a, c, g, or t
  misc_feature (29)..(32): n is a, c, g, or t
  misc_feature (34)..(34): n is a, c, g, or t
  misc_feature (36)..(37): n is a, c, g, or t
caaataaggctaggtacgaggnctgggtnnnnantnnggcacgaggcttctggaggaagcagcgcgggcttgaccggcgtcggcccgccgcctccgctgccgcttcgccccaatccggtccctctggcccggcctgacccggtctggcttgttcgggctcagcggccgcgaggccgcagctcccgatggaaatcatattatgtagaatacttgggtgacatctgcctgagagatctccaagaattacagaagacaaaaatactaatgcatttgagaaagcggtagttttggggggagggggaaaaagcaactgctttcctgatctgcaacttggctggatgctaagatgtcagtggacatgaatagccaggggtctgacagcaatgaagaggactatgacccaaattgtgaggaagaggaagaagaagaagaagacgaccctggggacatagaggactattacgtgggagtagccagcgatgtggagcagcagggggctgatgcctttgatcccgaggagtaccagttcacttgcttgacctacaaggaatctgagggtgccctcaatgagcacatgaccagcttagcttctgtcctaaaggtatctcattcagttgctaaacttatattagttaatttccactggcaagtttcagagatattggacagatacaagtccaattctgctcaactgcttgttgaggctcgagttcagcctaatccatcaaaacatgttcccacatcccatccccctcaccactgtgcagtgtgtatgcagtttgtgcgaaaggaaaacctactctctctggcctgtcagcaccagttttgccgcagctgctgggagcagcactgctcagttctcgtcaaggacggcgtgggcgtgggagtctcttgcatggctcaggactgtccactccgtacaccagaggactttgtgtttccattgcttcccaatgaagaattgagagagaaatacaggcgctacctcttcagggactatgtggagagtcattaccagctccagctgtgccctggtgcagactgccccatggttattcgggtacaggagcctagagctcgccgagtacagtgcaatcggtgcaacgaggtcttctggtaagagtgagtgtgagtgctgagcagccctgggctcatgccccatcctccaaagcaccactgctgttgctccatgtgagggcggcactggaagaggcagggtctctgagccaacagaacagctgtgctccaagtggtttcaagtgtcgtcagatgtatcacgcacccacagactgtgccacaatccggaaatggctcacgaagtgtgcagacgactctgaaacagccaactacattagtgctcacactaaagactgtcccaagtgcaacatctgcattgagaagaatggaggctgcaatcacatgcaatgctccaaatgtaaacacgacttctgctggatgtgtctaggagattggaagactcatggcagtgaatactatgagtgcagtcgttacaaggagaatcctgacatcgtgaaccagagccaacaagcccaggcgagggaagccctcaagaagtacttattctactttgagaggtgggaaaaccacaataaaagcttgcagctagaggcacagacataccagcggattcacgagaagattcaggagagggtcatgaacaatctggggacatggatcgactggcagtacctacagaatgctgccaagctcttggccaagtgtcgatacaccctgcaatacacctacccatatgcatattacatggagtccggacccaggaagaagctgtttgaataccagcaggctcagctggaggctgagatcgaaaacctctcatggaaagtggagcgtgcagacagctatgacagaggggacttggagaaccagatgcatatagcggagcagcggaggagaaccctgctgaaagatttccatgacacctaagttgggatgtggatgtgccggggtgaggaagatgtggctgcaaggtctcccggctgccatactgcatgctgcaggctctgcctttcatgaccccaggcaacagccagggccccactcctgagagacactggcaacacctcttagttgatttctgttttcttctcttttcactttttgtttctaccagggtagaggccatgttgaactggcctcttttcaggacttttatttccccctggatggttgttgggagggagggaaagtgttttctgaatggctattaatagtattagatcattacaacttatgtaactttcaaaggttgtacaattatacaaaaaaaaaaaaaaaggcaaactataggataacacagagccctttttgaaaataaattggcattggagtgttttaccctctagctgttttacttagaatgtaacatatgctgcctacccacctcaaaatgtctgtactgcaagagggccctgggcctctgctttccatattcacgtttggccagagttgtagtcccaaagaagagcatgggtggcagatggtagggaattgaactggcctgtgcaatgggcatggagcacaaggggtcacagcatgcctcctgccttaccgtggcagtacggagacagtccagaacatggtcttcttgccacggggtgttgttgtctctggtggtgctgcatgtctgtggctcacctttattcttgaaactgaggtttacctggatctggctactgaggctagagcccacagcagaatggggttgggcctgtggccccccaaactagggggtgtgggttcatcacagtgttgccttttgtctcctaaagatagggatctacttttgaagggaattgttcctcccaaataaatttgctttaccttggtcctttcttttgtgccagtattcaagtggtatagctctgagcagggtcacatttggccaaacctgacactgtcttgctgcattctcctttggcaaacatcagggtcagaattcaggatagcccttcctagggcactggactttctggcatgggggctgtgtttgcacaagttattttcatgttacctggagagtgtccagaggctgctctgaggctgaggtgtgttcccccttgcctggttccagctgtcagagggataccatcctagggtctgggaatccaaggccacgagactccttggtttgtggtccgagatcctgtactaaggagggtctggccagaggaacagaccagcttttgcacaatgaagcgcaagggaacaagtggtttgcctggtgtcctacctgtcctgaacctggtcctgtgggccattgaaaagttagatctgtgatctctggggtttttgtggctttgttcaatgcttccactctagggcaggcagagcagtctatactctcccaagcctgcttgacctccaagtagagctgatacagagatctgtgaatattgtgatagaaattctttggtattcatacatttcagctgcaagtcagcaatttcccaggtaccatgtaagctataaaacagtcattcttaaagacagaggatagctgtgactcatgggatcatgaggtccatggctggttgcaggttccctttttccttcctcaggttttgtctcttcctgtgttgtccccagcaagggagagactgtggggtggattgggagaacagattaggagtatagcaaatgaacccagaatggaacagtggggagctaactgtgaatgaggagagtacctgctgcaggacctggaggtcaggtgtgaatgctgtattggcacagggaataaatatcctggcgtctggagccttcacctctccgtcaagtccttcctgtgatactgccatggcacaggatctgagttgcagctctgcaccctaaatcacaccctgggcattgtctgggctgcagggctgccaggttctgtacttgtgtccagctgtggccctggatgctggagctggagggttttctgtgctcagactgtagcctgtagctcttggcctgtgtagagccccctcctgtgccctcagtggctgtcgtttgttaacatcatcaggaagatgggaaaggtcaggcagaatttttctgccctacaaagggtggaagagaaaggacacagtattttcatgaatttaccatatatctttgtttttcttcaacgaaaaagttaattgaggcaatgtcatctgctcaaagttgagtggtttattcacaataaactgtaagtttctgattat

SEQ ID NO: 505279 - DNA, 3768 bp, Homo sapiens
  misc_feature (22)..(22): n is a, c, g, or t
  misc_feature (29)..(32): n is a, c, g, or t
  misc_feature (34)..(34): n is a, c, g, or t
  misc_feature (36)..(37): n is a, c, g, or t
caaataaggctaggtacgaggnctgggtnnnnantnnggcacgaggcttctggaggaagcagcgcgggcttgaccggcgtcggcccgccgcctccgctgccgcttcgccccaatccggtccctctggcccggcctgacccggtctggcttgttcgggctcagcggccgcgaggccgcagctcccgatggaaatcatattatgtagaatacttgggtgacatctgcctgagagatctccaagaattacagaagacaaaaatactaatgcatttgagaaagcggtagttttggggggagggggaaaaagcaactgctttcctgatctgcaacttggctggatgctaagatgtcagtggacatgaatagccaggggtctgacagcaatgaagaggactatgacccaaattgtgaggaagaggaagaagaagaagaagacgaccctggggacatagaggactattacgtgggagtagccagcgatgtggagcagcagggggctgatgcctttgatcccgaggagtaccagttcacttgcttgacctacaaggaatctgagggtgccctcaatgagcacatgaccagcttagcttctgtcctaaaggtatctcattcagttgctaaacttatattagttaatttccactggcaagtttcagagatattggacagatacaagtccaattctgctcaactgcttgttgaggctcgagttcagcctaatccatcaaaacatgttcccacatcccatccccctcaccactgtgcagtgtgtatgcagtttgtgcgaaaggaaaacctactctctctggcctgtcagcaccagttttgccgcagctgctgggagcagcactgctcagttctcgtcaaggacggcgtgggcgtgggagtctcttgcatggctcaggactgtccactccgtacaccagaggactttgtgtttccattgcttcccaatgaagaattgagagagaaatacaggcgctacctcttcagggactatgtggagagtcattaccagctccagctgtgccctggtgcagactgccccatggttattcgggtacaggagcctagagctcgccgagtacagtgcaatcggtgcaacgaggtcttctgtttcaagtgtcgtcagatgtatcacgcacccacagactgtgccacaatccggaaatggctcacgaagtgtgcagacgactctgaaacagccaactacattagtgctcacactaaagactgtcccaagtgcaacatctgcattgagaagaatggaggctgcaatcacatgcaatgctccaaatgtaaacacgacttctgctggatgtgtctaggagattggaagactcatggcagtgaatactatgagtgcagtcgttacaaggagaatcctgacatcgtgaaccagagccaacaagcccaggcgagggaagccctcaagaagtacttattctactttgagaggtgggaaaaccacaataaaagcttgcagctagaggcacagacataccagcggattcacgagaagattcaggagagggtcatgaacaatctggggacatggatcgactggcagtacctacagaatgctgccaagctcttggccaagtgtcgatacaccctgcaatacacctacccatatgcatattacatggagtccggacccaggaagaagctgtttgaataccagcaggctcagctggaggctgagatcgaaaacctctcatggaaagtggagcgtgcagacagctatgacagaggggacttggagaaccagatgcatatagcggagcagcggaggagaaccctgctgaaagatttccatgacacctaagttgggatgtggatgtgccggggtgaggaagatgtggctgcaaggtctcccggctgccatactgcatgctgcaggctctgcctttcatgaccccaggcaacagccagggccccactcctgagagacactggcaacacctcttagttgatttctgttttcttctcttttcactttttgtttctaccagggtagaggccatgttgaactggcctcttttcaggacttttatttccccctggatggttgttgggagggagggaaagtgttttctgaatggctattaatagtattagatcattacaacttatgtaactttcaaaggttgtacaattatacaaaaaaaaaaaaaaaggcaaactataggataacacagagccctttttgaaaataaattggcattggagtgttttaccctctagctgttttacttagaatgtaacatatgctgcctacccacctcaaaatgtctgtactgcaagagggccctgggcctctgctttccatattcacgtttggccagagttgtagtcccaaagaagagcatgggtggcagatggtagggaattgaactggcctgtgcaatgggcatggagcacaaggggtcacagcatgcctcctgccttaccgtggcagtacggagacagtccagaacatggtcttcttgccacggggtgttgttgtctctggtggtgctgcatgtctgtggctcacctttattcttgaaactgaggtttacctggatctggctactgaggctagagcccacagcagaatggggttgggcctgtggccccccaaactagggggtgtgggttcatcacagtgttgccttttgtctcctaaagatagggatctacttttgaagggaattgttcctcccaaataaatttgctttaccttggtcctttcttttgtgccagtattcaagtggtatagctctgagcagggtcacatttggccaaacctgacactgtcttgctgcattctcctttggcaaacatcagggtcagaattcaggatagcccttcctagggcactggactttctggcatgggggctgtgtttgcacaagttattttcatgttacctggagagtgtccagaggctgctctgaggctgaggtgtgttcccccttgcctggttccagctgtcagagggataccatcctagggtctgggaatccaaggccacgagactccttggtttgtggtccgagatcctgtactaaggagggtctggccagaggaacagaccagcttttgcacaatgaagcgcaagggaacaagtggtttgcctggtgtcctacctgtcctgaacctggtcctgtgggccattgaaaagttagatctgtgatctctggggtttttgtggctttgttcaatgcttccactctagggcaggcagagcagtctatactctcccaagcctgcttgacctccaagtagagctgatacagagatctgtgaatattgtgatagaaattctttggtattcatacatttcagctgcaagtcagcaatttcccaggtaccatgtaagctataaaacagtcattcttaaagacagaggatagctgtgactcatgggatcatgaggtccatggctggttgcaggttccctttttccttcctcaggttttgtctcttcctgtgttgtccccagcaagggagagactgtggggtggattgggagaacagattaggagtatagcaaatgaacccagaatggaacagtggctgtcgtttgttaacatcatcaggaagatgggaaaggtcaggcagaatttttctgccctacaaagggtggaagagaaaggacacagtattttcatgaatttaccatatatctttgtttttcttcaacgaaaaagttaattgaggcaatgtcatctgctcaaagttgagtggtttattcacaataaactgtaagtttctgattat

SEQ ID NO: 505280 - DNA, 124 bp, Homo sapiens
acctcccaccccacctcatgccaagtgggcgtgtgtcctgacagagaacagtcacactgggcctgcgggcacatatagcagcatattttgctcttaaccccacccacctttttaatcacactag

SEQ ID NO: 505281 - DNA, 927 bp, Homo sapiens
aaacgctacgtggtctaagaacactggatcagtgctgtctacctggggtctctcaaagacacatgtgtcctgtcccctgcaactgctggcagtagcagcagctgacatctgcccctctgaccccccagtaaaaaaagaacacacacatcccagagaaacatgatccatgcacgaggaatctgagaccgacgtgatattatcttgtacattgacgtgaaaggtcagcgtgaagcgacaagacaggaaattgtgaaatacacaagaacaagctacagcacaagcattttgcagatgcttgatcaagacaacagcatattgaaatacacccacaacatgcgcacacaactgcctagggcgacaagagcaccctatagtccaacaaataatttagcccaacaactgtgataacagaaatgaccacactctaagtgcccccacgattcgcaagctcacacaacatttatgcctgcaatacacaagcccgattggacaacttcgacaaccagaatagagcatactaatcatacaagcacacaaggacaagcgaagatatgacctcaaacatacacacaactctgcgtcaacgacatcacaaggcacttctcttgttgtaagcccacgctagggcagagaacaacgacgatggcgcttcagaccatggcaaaaacaaaaaatcacaaaacaaacagaatagtagagcaaccatatagaatatttaataaagatagaacgacctatagtccacaatagaactccaagcaacaggcactacaaaaccgataacgaccacgcagaacaatgcataccttcaacacagacacgcacatagaccagcacatcccgtgacactagatagaaacaaaagcacaattaccacaagacaaacatggaaagagaaagatagaaacaatagaagaccaaaaccag

SEQ ID NO: 505282 - DNA, 541 bp, Homo sapiens
tgacctagagttacccaggcaaagctctacattgagtctccaagtatattaagcaaacattaagagatctaaagggggctgacgcggtggctcatgcccgtaatcccagcactttgggagaaaagaccaggtggtctggcgtagtgggtcaccccctgaaatctcagcacttttgggagggccgaggtagggtggatcacttggagatcagcgccgtttgagaccagtcctgggcaactacgtgtgaaacagccatctactactggggaatgcaaaacattggctgggcgtaggtggcgcaaagtctagtggtccccagctgcttgtggaggctggaggtggggagaatctgcttgtaacccgggagggtggaaggttgcacgtgggcccacgatcatgtcattgcactccagcctccagcctggacagagagagcatctgagagtctctgtctcaaaacaaaaagaaaaaaacaaaggaagagaccaaagagccttacttctcttggtccaccaagtgaggatatggcaagaaggcagcc

SEQ ID NO: 505283 - DNA, 1057 bp, Homo sapiens
cattgtcctcactgggatggctcgaccaagatctaggtgtgttgcatctttagcaactagaagggcaaatgtgggagaaggtaacggttcactatcgacctgtcgtcttgggtgagaatctttgcgggccgaagtccagcacgtagatggacatgcctgattctctaattgcgggggcttcggcgccagatccatggaagaaatcgcaaaagtggtccgcgtgaatatggtgacgcgggctcatttcaaatgctatgtcgggggatctcagatacactgatagcctgagactttgaactggcggacgttcacaaattgatctccttcctgtggtggaaaaatctagaattaacatgcccgtggcacatatggtggacggatcccatgcagattgcgcgcatgtgatcagctgaagaattttattctaattagtaatgaatacacctgagagcgttttcatgaacgagggctgtgcatagaactagctttagcaagatgcttagtcggggtgggtagatttggcaggctggggtagtcgtcgcacgaattggggacgtactcccgaagagacgtgccctttctagtattacgaacacgaggagttgtgtaaacaaaccctaagtttggtgcggtagtaaacatagaatgttgggattccaacagttgatgcaccccataaagggcagcaagaaccattatgcggacgacgttggtacctggacagcaggccctatagatggagcaaacgtgggttaaaagccgcaaacaaggagcgtgtgggacaccacatgccgggtttgggagtgcagccacggaccaagctggaagccagaggggtccatgcactgtggttcagggcgggatgtgtcccgcgagacatgacacggccggacacaccggatggacagacgtgacaggattcttacacaaacgcgtgattgtgagacctgatgcatgagggtgagattgtcacacactgttggtgtgtgtgatccctgacgcacgatcagaggctaacacgtgtgcacgtggtgggaccagaaaaacaagcacacga

SEQ ID NO: 505284 - DNA, 343 bp, Homo sapiens
ctctacaggatctaatgcagctatccggttcaatcgataaagtagaacaaacaggtacataccatgaagtatactactcaacaatttaaaaaaaaaaaaaaaaaaaaacataatggggcccggcaggtggctcacgcttgaaatcccaaaattttggaaggccaaggccgaggccggaaaataacctgaggtccggagtccaagaccagtctggccaacatggttgaaacctcgtctccattaaaaatacaaaaaaataagcggggtgtgggggtgcaatgcttgtagccccagataatatgggaggctagtggcaggcgaatcatttgaacacaggaggcgg

SEQ ID NO: 505285 - DNA, 799 bp, Homo sapiens
agataattcattagtaataggaattaactgaccccttttgatgggggagagcatcaggctggggtcaggtaagtgtaaatggccttctgagcatgctcttctaggcggactcccagccctgacttgaaaccattagcgctaacttgctctgttttgagaaaaactttccaaactttgtgcatgagaaacctagaaacaggaatgtatgccacgtaactggattacagaaatgagttaatgtgtctctgtgataaaacaaaacaaatttgaaatatttcttatggaatctactattttgggtctgtgaagcatttttcataagtggatagaaggtattggtctttttaccttggtgggataccctcttagcatatattctgggctatccttaagatcttaaacaaaatcattcttggtcagtcaagtatagtggcgcaaacaatgtgtcaacatccttgtgtctttatctacacggaacaaatttttggaggttacccatttacagcaatcagcacagcagcacagatgttacaaccagaatgttgtgtgggcgccactacggcgccccagggaaaagcgcttgtaagaccccaatcgtcgagtggaccgcagcggccccccaggcagctgaaagctaacccgtggaccaaggggcgggtcacaagagacaacaccgggcccaacacaaacgggcgggaattcccccaagtaaaaagggcgggggcaaccaggctttggaccacaccaagggagcctggagcccacagggcctacacggagggccaggggctgatataag

SEQ ID NO: 505286 - DNA, 273 bp, Homo sapiens
  misc_feature (66)..(66): n is a, c, g, or t
  misc_feature (156)..(156): n is a, c, g, or t
  misc_feature (241)..(241): n is a, c, g, or t
gtcacgcaccatctctcgcgcgggcgcgaagcgcggcagcgggcgcgtgccgggggccggcatgtngtccacgccgtagggcgagacgccatagggagtgcgcgtcatcacgatcggataggtccgcgtgcgatccttcgggacgtaggcgtccgngtagagcttctttccgtcgcgcatcggaatgcgaaactcgtacttcgtgtagaactcacgcaacgcgcgcgcgtagtcggcctcntccttgatctcgtacgggacgaggggcttgtc

SEQ ID NO: 505287 - DNA, 412 bp, Homo sapiens
accagcgcaccgcatccagtttttattatcctgagatcaagcccacgcagccatccaacagccaaaacacaacaaacaactaacgccagtgccaatctcatctggtctcctgcgcaagtaaggtcaggtcacgaacggctgtaacgcaactcagtcatagtccgcctagaagcatttgcggtggacaatggaggggccgaactcgtcgtactcctgcttgctgatccacatctgctgtatgtgtgtacagcgaggccaggatggagccgccgatccacacggagtacttgcgctcaggaggagcaatgatcttgatcttcattgtgctgggtgccaggccagtgatctccttctgcatcctgtcggcaatgcctgggtacatggtggtgccgccagacagcactgtgtaggc

SEQ ID NO: 505288 - DNA, 396 bp, Homo sapiens
tcgacagcatgctccttcagatgcttcacattgtttcttacctcaagcacagagtacagcgcataacgattatagacatggtgttatatagacagggagcagctttccgaacgcataaagaggccacacatgaataagctcaagatggtcaaagtcgtgctcgtatccacatgataggtttagatgcttgtagtcgatatgctataagcctaagtcagcagtacttgaatcatcgagtttcgaacgctctatgagcacacgcatgtccacatgtggtcagagtacagcctttattcaaaggtcaaatacccgcataagagctttcagtggctcctcagagacggcggtcatgtgtgtccagatctctacagagcacagtgtgtatcacaagttctc

SEQ ID NO: 505289 - DNA, 186 bp, Homo sapiens
accctgtatcccagctactcgggaggctgaagcaggagaatcgcttgaacggggaggcagaggttgcagtgaactgagatcacaccacggcactacagcctggcaacagagcaagactccatctcaaaaaaagtgactgctatagattgaacaaagcaaatacaaaagtagaggagcaccaccaat

SEQ ID NO: 505290 - DNA, 215 bp, Homo sapiens
  misc_feature (13)..(13): n is a, c, g, or t
  misc_feature (22)..(22): n is a, c, g, or t
  misc_feature (41)..(41): n is a, c, g, or t
  misc_feature (50)..(50): n is a, c, g, or t
  misc_feature (53)..(53): n is a, c, g, or t
  misc_feature (55)..(55): n is a, c, g, or t
  misc_feature (76)..(76): n is a, c, g, or t
  misc_feature (105)..(105): n is a, c, g, or t
  misc_feature (110)..(110): n is a, c, g, or t
  misc_feature (115)..(115): n is a, c, g, or t
  misc_feature (147)..(147): n is a, c, g, or t
  misc_feature (152)..(152): n is a, c, g, or t
  misc_feature (155)..(155): n is a, c, g, or t
  misc_feature (167)..(167): n is a, c, g, or t
  misc_feature (170)..(170): n is a, c, g, or t
  misc_feature (191)..(191): n is a, c, g, or t
  misc_feature (206)..(206): n is a, c, g, or t
ggaaattcgaatngcgaggatngcaagaaaagctggcaacntcctatgtnccngncagaacccaaattggcgtttnacatcagaatcagaggtatcaatggagtnagccnaaagnctcgaaaggtgttgcagcttcttcgccttcgncaaantcntcaatggaaccnttntgaagctcaacaaggcttcgnttaacatgctgaggnttgtagagc

SEQ ID NO: 505291 - DNA, 748 bp, Homo sapiens
tgtgcccaaaaggggtaaaggggggtgaaaaggggaaaaacgggccccatttaaaaaattttaggggaaataattttaagggagagggaataaaaggtggttgggccccaaagttttaaaaatgggggggtttaccccccggggtgggtcttagcggaacaagcgggttgcggtaaaacacacccgagaaacgtgcgcttctttgtataacacccaacgggggggagacacccccgcgtagccgccgcaaacacgtctgggcgacggtacataatcatcacacaaaggggggctctcaacgccgggagcgtcacacccgaaggagggcgcagacgatcaaagagaccgcacagactcgccggggaccgacgaacaaagggggcgacaaaatagcacgaacgaggaaacataacccccgcgccaacacggggcgaccacagaaggtgcacagccccagtggggcgcgccagacgtggatctggtgcgacacgggagaggctactaggacacccccgctgtgtaattacaagagagaccccatacggacagcggccgggggacaacgtgaccaacaagaattgagtgcggagccaagataacatccacgggggacaactaccacgaggcggcgccgaaagtgcagatcaagaccacgactggggttatactaatgtacaagcaaacggggacaccggggcagtcaagcactgaaacggcacaatagcataggggggggccacacagcagc

SEQ ID NO: 505292 - DNA, 326 bp, Homo sapiens
aggacatgtattcaatcactagtactatgccccatgctccggtgtgactcgtgcagccatcgacagtgacgctctaggtagaagctgggtgttgccctcaggcgcggatctcgatctcgttggcgccctggaggagcagggccttcttgagtgttgccagtctgctggtccatgtatgccacgctgttcttgcagtggtaggtgatgttcttgtgagtgcctcggtggacatcaggcgcatgaaggtcagctggattgccacatcggcagggtcggagccctggccgccatactcgaactggaatccatcggtcatgctctcgccg

SEQ ID NO: 505293 - DNA, 132 bp, Homo sapiens
gcggccgcctactactactactgctcgaattcaagcttctaacgatgtacggggacatgaacaaattctttagtactcaatgtttctggacattctctttgataacaaaaaataaattttaaaaaggaaaaa

SEQ ID NO: 505294 - DNA, 445 bp, Homo sapiens
cccccacgttacaccagcttcaattactttctatataattcatgttgcagaataaaaagacttaccttaacataatcttccaatgcactgaattttaaacactgcctgcaaaaggtttacggttcaatatggacatgaagccagctgtctgaataagtgattaacaaataatatctttaccaatctttctttatatcataattattaatacaattataaattttccatagtattatttttatactctattcttcgaaagaaaaaattatttttattccttgaatttgttttcattcattcaaatcatttactgaatacctcttgttatgctagatagttggaatacaatgatgaacgagacagaatctgttattacaatcccattgagatatgctgcccggttgagaactactagtatagtagaagatgagtatgggctgacagt

SEQ ID NO: 505295 - DNA, 350 bp, Homo sapiens
cagaatgtttgcgggcttagaattttatttttgatttgaagtatacaagtctctcgagtaaatttctaggaggtaagtgtatacttaaatttcaaagaaactgccaagctgtttccgaaagtagtcgtacaattcctatcagcagcatgtgagagtatagttgctccatatcctcactgtctttatccatttatgatactataacaaaatgttccagttctagtacacatatatacatgcagaatatataacaagcagaatataatcttttatcttttaactttaatcttttctgactctattagtccgttctcatgctgctaataaagacataattgaaactgaaaaaa

SEQ ID NO: 505296 - DNA, 169 bp, Homo sapiens
cgtacacagtccacatgtgtaaaggactaggagaggtgacagtacctttgtgtcagatcgagaagtgctagggacatgtgggcatgagcttagttgtcaggctcctcagagggagggaagcttgcgcaaagggaagtgagtagagtccaggaggaggaggaattcgccc

SEQ ID NO: 505297 - DNA, 1362 bp, Homo sapiens
  misc_feature (1084)..(1084): n is a, c, g, or t
  misc_feature (1088)..(1088): n is a, c, g, or t
  misc_feature (1106)..(1106): n is a, c, g, or t
  misc_feature (1114)..(1114): n is a, c, g, or t
  misc_feature (1143)..(1143): n is a, c, g, or t
  misc_feature (1233)..(1233): n is a, c, g, or t
  misc_feature (1237)..(1237): n is a, c, g, or t
tctcgatccccagagtaaccgttccccgtttaccgaagcccacttagtgccctgtaatactgaactgttgtccctgtgactaccttacctcttcagcgcccgagggcacccgtgggcctcccggagcctctgcccctggcggggtggagacccggacccgcagccccctccactggcgacacaactgcaccttccctcatttcagtctcccgcacacttattcctcctcccctcttcccggtggcacctctccacctgtacccgcccccgccccccccccccggcccctctggaagagttgttgcccgacccgggttttgggggaaacccgtcttgacacttccaaacccttttcttcccgatcctggacccctccgttgactaatcttgcctgggttgtgtaggtctgcaggaaggaaggctgaaaaagcggacgaagattttgacttaagtgggacttgtgatttaattttttcttttttttaagtggggaggaaggggaagctagatggactaggagagacttgattttggtgctaaagttccccagttcatatgtgacatctttttaaaaaaaataacaacaaaaaaaaaatgagagaaaagctaaaaaaaaaaaaagtaagggggtgagcagttaatgggtattcattccacatacaatatctggtgtaaaacggatttcctggtagaagtagctttaatgggttttggctctagaataccggtaggtctatccttagagcactcacgccaggctttcttcccggggtttaaacttcatataactttcagaaattgggagagcaaaaattttggctggtcactggcacttcattataaaaaagcttatttaaccttattcaaaaggtattttattggccaaactatggcttttttgggtaaatttgggtccatatttatcggggatgacaaatccatagaatatatcctttaatggtcaaattatggatcttcatattaatcttaaaatttgtggacggtgtcttttcccttttttcccacaggtttaactatattatccttcaagcgacatttttggtacctttacacttttggggtnattntcattttacacacactgnacactttnctttacgcaactgcaacaacctggtgggntacttatttagaaatccccctttgggtggctgcaattgggttcttctcttagggcttcacactaggctgatgtttgtaagtctgtgcgcncganggaacactttgttggtcaagggaaaaaagaactgttctcggctcagaatcccacatggggggacggggtcaggttgaagcgccaagggtactggcgggttttgggtaaaattgggcacaaagagg

SEQ ID NO: 505298 - DNA, 882 bp, Homo sapiens
  misc_feature (835)..(835): n is a, c, g, or t
  misc_feature (841)..(841): n is a, c, g, or t
  misc_feature (855)..(855): n is a, c, g, or t
gctgaagtgggaggatcacttgagctcaggagttcgagaccagcctggccaacacggcaagagctcatctctacacaaaagatgaaaaaaaccgcacgtgcacctctgaatctaaaatttaaaaataaataaaatacagttagccaggcgtggtggtgtgcgcctgtggccccagtcctactcaggaagctgaagcgggaggatccctggagcccaggagttcgaagcttcagtgagctgtgactgcactgctgcactccagcctgggcaacagagcaaggccctgtctctaaaaccaaacaaaaaacaaagctggcgattgctgacgtgcactcggggcattaaacactttatgccagacgctgctctgcaagccttagggccgtcagctcatctaccctcacagccggcctgtgtggtgggaactgtgaccccgtttcacagacaaggaggcagagcacagagaactcccgaggcagcgactccagagcctccctcagcccctctcccacgggcctcttggatgggggcccagggtgttgcatttcagatttttactgaatgttactcctaacaacctcttgcaccaaattactccagccttcacctcacagtccagaaaattgggcacacaaaccccgagagacgtggcttgcagtgaagccaggacttgcatttactgcagctctggtggcttctccaccatctgttcttcctctttgcagaagcatttcttatggtgtggcggaactgattggcagcttggaacacacatctctttgggcccacatctcctgtattcactgaaaggcaggaagactgcagtatgccgttngtgtcnagagcttggccctnctgggagaagcctgcacacgtgtccca

SEQ ID NO: 505299 - DNA, 1399 bp, Homo sapiens
tctcgatccccagagtaaccgttccccgtttaccgaagcccacttagtgccctgtaatactgaactgttgtccctgtgactaccttacctcttcagcgcccgagggcacccgtgggcctcccggagcctctgcccctggcggggtggagacccggacccgcagccccctccactggcgacacaactgcaccttccctcatttcagtctcccgcacacttattcctcctcccctcttcccggtggcacctctccacctgtacccgcccccgccccccccccccggcccctctggaagagttgttgcccgacccgggttttgggggaaacccgtcttgacacttccaaacccttttcttcccgatcctggacccctccgttgactaatcttgcctgggttgtgtaggtctgcaggaaggaaggctgaaaaagcggacgaagattttgacttaagtgggacttgtgatttaattttttcttttttttaagtggggaggaaggggaagctagatggactaggagagacttgattttggtgctaaagttccccagttcatatgtgacatctttttaaaaaaaataacaacaaaaaaaaaatgagagaaaagctaaaaaaaaaaaaagtaagggggtgagcagttaatgggtattcattccacatacaatatctggtgtaaaacggatttcctggtagaagtagctttaatgggttttggctctagaataccggtaggtctatccttagagcactcacgccaggctttcttcccggggtttaaacttcatataactttcagaaattgggagagcaaaaattttggctggtcactggcacttcattataaaaaagcttatttaaccttattcaaaaggtattttattggccaaactatggcttttttgggtaaatttgggtccatatttatcggggatgacaaatccatagaatatatcctttaatggtcaaattatggatcttcatattaatcttaaaatttgtggacggtgtcttttcccttttttcccacaggtttaactatattatccttcaagcgacatttttggtacctttacacttttggggtaatataatttgaaaaacatggaaaaattattttaaaaaattggcaaaaaagtgtgggataattatttaagaaattccccctttggtggtggcttggcaaatgcgagttcactttctcttaagggcctttcacaattaggactgtgaagaactgtatggttacaagtcctgtgacagtacagaaggaaacacaacttttattgtataggcttcaaaaaggggggaaacaaacagaaaggggaggaacccttttgggattacaaggtggccattctaagagaatttccatccaacgagttaggaggtctgggatccca

SEQ ID NO: 505300 - DNA, 506 bp, Homo sapiens
aacagtatgactcacgtgacacgagtactggggccagaggagtggctggctagtgtccctgcatcgcaacaaagccttgcccaagcctctaccagcaagtgcaacctaagccaatgaagaactcacagttatcactgatgctgattacagccaaagaagtcattatgaagactacgctaatgtgcctacccagaagcaaagccaaagcacccttcccaaccaacaccattatacatgtataggaataaagactttccctatgaaagtcaatagatagaatgggaagaagtaacactaaatgtgcagcaatcaccataaggacaccagaaaacatggaaaggaaaggaaacataacacttccaaaggaatacaataattctctagcaacagatcccaaataaaacttatgacttgtctaaaaaataattcaaaataatgatcttaaaggaatccagcaagttgcaagagaatgcagataaacaatacaaagaaatcaggaaaacaat

SEQ ID NO: 505301 - DNA, 406 bp, Homo sapiens
  misc_feature (202)..(202): n is a, c, g, or t
  misc_feature (310)..(310): n is a, c, g, or t
actcgggaagagacacaggtaagaaagtggaaacctaccctgtcagataaacatgctgggatggggattaatgaccagattagaatcccgtaaagagaaaagtttaatgtccctcgaggggcacagcaatagaaactatcaaaaacaaaacacagaggcccaggcacgggttgcacgcctgtaatcccagcactttgggagnccaaggcagctggatcgcttgaggcccaggagttcaaaaccagcctggccaacatggcgtaaccccttctctactaaaaataaaaaaattagccgggcgtcgtggtanacccctgtagtcccagctcctcaggaggctgaggcataagaatcgcttgaacccaggtggtggaggctgcagtgagccaagatcaccccagtgcac

SEQ ID NO: 505302 - DNA, 209 bp, Homo sapiens
gccaagaggcaaccacaccactggcagatgaaggcagggctccaaagacaaaccagaaagtaaaaaatcttggtctggtctgctctggtttggcttcaaacattgggttttctcttctgttgatgagacaggtgttgattccaaataacgtcagagatctgctccattcaacacagcctgaggcacgaccagaggcagaactgcctaaa

SEQ ID NO: 505303 - DNA, 1431 bp, Homo sapiens
  misc_feature (295)..(295): n is a, c, g, or t
  misc_feature (821)..(821): n is a, c, g, or t
gggcgacttcatatccgactgctgggagatctgcccctaggaatcctcatccctcggaaacgcggcctagtgcagtagtacgctgctgtaactgcagagagggcctaatctgccgtagccagagtgcgccacccgtcatacagaaagagacgctatgtggacccgacgttactatgtaggctcacgtgtagagcctaatatagctgcaggctatcgtcgatgcatggagccagaatcgagcgaacacctagggataggcgcgtcatagccacgagcggacattcatccttgacangtccaaatccgtgccatttggccgtggacttcgaacccggcaggtctcctgtgtcgcaaagactctcatgtctctgggcacatcctaggcacaggcctaggccttgtgtggctaggacacgaacacgagaaggagactagataggcctcttcaagcaggtagctctttgggtaggcggacctcccaacatggcgacgcgccgctcgtagggcggcgagaacgacccataggtccgggggtgcgtctcgacgtggccccttgggaccaataccggacgtggtgtgcagtagttcgggccagatcaatagcagaggcgccatcggcaatcgcatatgacaagcaagcattgagatccaaaggttacccccatttgccgagccatctcctctcggagctgcagatcacagggcctcgttctaccttcgttaccccctctatagtgagttccccattccgtgcccctaacgcgggtgcacaatccccctctgttgcaaagagggttgtccgccagcggcacgtggaaagnagcgtggtgagtagcttactctatgtatcatcctcactacaattaggtcgctttttacgccctatctagccataaggctacctagtgtccccgaatgggggtcaccgcgttcggtacatttacctctgcgttccaattatacccacattttgcgcttaaggataccacccatagaggtttctggtggcagcggccaagaccaggattccacccccaagacaaacgaggacggccaacaaagctttggggcaagggttccccaactcgttgtagagaagggcgctgtcacacgcccagctacatatccgttgcaacccaggaccaacagaccaacgggccacccattaacgctctgaagcgtacaggccggatttggaccccggctgagaacggcgaaagggttgggacctggaaggagccaggggcgccaagccggataaaggactcaccacgggccagtggcggccacagcccacaacgagtgtaccagagggcgcaacgaggacacccaagagacacacaagcgagagagccaagcagacgcggagcgaagaaacatcccagagggctggtcctcaagcaagatgggggcgacccagcgcaccaccgc

SEQ ID NO: 505304 - DNA, 335 bp, Homo sapiens
ccaacagaccagcacaacagcgcagatccccttaaaagccctaaaccagggctgggaccggtggctcatgcctgtaatcccagcactttggaggctgaggcaggtggaccgcttgaggtcaggagtttgaggcgagcctggccaacatcgtgaaaccccgtctctactaaaaatgcaaaaattagctgggcatggcagcaggtgctggtaatcccagctactcgggaggctgaggcaggagtattgcttgaacccaggagacggaggttgcagtgagccaagatcatgccactgcactgcactccagcctggatgacagaggaagactctgtctc

SEQ ID NO: 505305 - DNA, 916 bp, Homo sapiens
  misc_feature (33)..(33): n is a, c, g, or t
  misc_feature (37)..(37): n is a, c, g, or t
aaacggaaaggttcggaatttgcctctgcgccntctntttttgcctgttacctgtgacgtccttgaaaatgaaaagctttcttaagacaataggacgggccgggcgcggtggctcatgcctgtaatcctaacactctgggaggccgaggttggcggatcacgaggaagcagaatctgaaactttctgaggagagcatttgagcttcagatttctaacagcctctttgcaacaaaatagaccagtagctgaaggcaactgcaatccttcatgatgtttcccttggccagaaatgcactaagcagtctcaagattcaaagcattctgcaaagcatggcaagacatagccatgtaaaacactcaccagattttcatgataaatatggtaatgctgtgctagccagtggaactgctttctgtgttgctacatgggtgtttacagccactcagattggaatagaatggaacctatcccctgttggcagagttaccccaaaagagtggaaacatcagtaaccatcacagttgctgtaatgacagaattgtttaaaaaaccaacttgtcatgtaagcactctactgcttattaaaatatagcacaattgaaaaaataaaatgtgttttaaatctttaaaaaaaaaaagaacaaaaaaaaaaagaaaaaaaaaaaagggggggggggcaataaaagattccccgcggggggcccaaattatacgggacaccaggtcatctgggcgcacaaaggggcgcccccaataaagagggaggcgcggatatacaacgaacatagaacacgggcaccgcgagattaaacaaccggtgcggatcgtgtggaacacctggatcgctgggagacccttgggaagagggccaccacactcgcggggaggcgacaaatggggcaacacccacagag

SEQ ID NO: 505306 - DNA, 516 bp, Homo sapiens
  misc_feature (33)..(33): n is a, c, g, or t
  misc_feature (37)..(37): n is a, c, g, or t
aaacggaaaggttcggaatttgcctctgcgccntctntttttgcctgttacctgtgacgtccttgaggaagcagaatctgaaactttctgaggagagcatttgagcttcagatttctaacagcctctttgcaacaaaatagaccagtagctgaaggcaactgcaatccttcatgatgtttcccttggccagaaatgcactaagcagtctcaagattcaaagcattctgcaaagcatggcaagacatagccatgtaaaacactcaccagattttcatgataaatatggtaatgctgtgctagccagtggaactgctttctgtgttgctacatgggtgtttacagccactcagattggaatagaatggaacctatcccctgttggcagagttaccccaaaagagtggaaacatcagtaaccatcacagttgctgtaatgacagaattgtttaaaaaaccaacttgtcatgtaagcactctactgcttattaaaatatagcacaattgaaaaaataaaa

SEQ ID NO: 505307 - DNA, 277 bp, Homo sapiens
cgcaatgcgggcatgcctatctgctcgtaggtgctgtagacaccgcataccttgtcaagcgtatcggagacaatcaggattgaatgtgtattagactcgaggcatgctagtgagctgagatggcgttaatatctgctgattctggtgagagcatggatgcatggatcaactaagctgacgcataggatgatttactgcgtgtttttgcatccatatgcgatacggtgtcctgggtactctgtcgagctgttgctgacatttgcctggacatatggtc

SEQ ID NO: 505308 - DNA, 819 bp, Homo sapiens
  misc_feature (33)..(33): n is a, c, g, or t
  misc_feature (37)..(37): n is a, c, g, or t
aaacggaaaggttcggaatttgcctctgcgccntctntttttgcctgttacctgtgacgtccttgaggaagcagaatctgaaactttctgaggagagcatttgagcttcagatttctaacagcctctttgcaacaaaatagaccagtagctgaaggcaactgcaatccttcatgatgtttcccttggccagaaatgcactaagcagtctcaagattcaaagcattctgcaaagcatggcaagacatagccatgtaaaacactcaccagattttcatgataaatatggtaatgctgtgctagccagtggaactgctttctgtgttgctacatgggtgtttacagccactcagattggaatagaatggaacctatcccctgttggcagagttaccccaaaagagtggaaacatcagtaaccatcacagttgctgtaatgacagaattgtttaaaaaaccaacttgtcatgtaagcactctactgcttattaaaatatagcacaattgaaaaaataaaatgtgttttaaatctttaaaaaaaaaaagaacaaaaaaaaaaagaaaaaaaaaaaagggggggggggcaataaaagattccccgcggggggcccaaattatacgggacaccaggtcatctgggcgcacaaaggggcgcccccaataaagagggaggcgcggatatacaacgaacatagaacacgggcaccgcgagattaaacaaccggtgcggatcgtgtggaacacctggatcgctgggagacccttgggaagagggccaccacactcgcggggaggcgacaaatggggcaacacccacagag

SEQ ID NO: 505309 - DNA, 129 bp, Homo sapiens
  misc_feature (10)..(10): n is a, c, g, or t
cctgcgctanttccagaccctaccagcactacctaaccctcagccgacactctcagaatcaccgacccactttcttggcatatagccccacttaagaccctcgctctcacaaccccaacagcactaacc

SEQ ID NO: 505310 - DNA, 575 bp, Homo sapiens
  misc_feature (33)..(33): n is a, c, g, or t
  misc_feature (37)..(37): n is a, c, g, or t
aaacggaaaggttcggaatttgcctctgcgccntctntttttgcctgttacctgtgacgtccttgaggaagcagaatctgaaactttctgaggagagcatttgagcttcagatttctaacagcctctttgcaacaaaatagaccagtagctgaaggcaactgcaatccttcatgatgtttcccttggccagaaatgcactaagcagtctcaagattcaaagcattctgcaaagcatggcaagacatagccatgtaaaacactcaccagattttcatgataaatatggtaatgctgtgctagccagtggaactgctttctgtgttgctacatgggtgtttacagccactcagattggaatagaatggaacctatcccctgttggcagagttaccccaaaagagtggaaacatcagtaaccatcacagttgctgtaatgacagaattgtttaaaaaaccaacttgtcatgtaagcactctactgcttattaaaatatagcacaattgaaaaaataaaaaaagatgcggccgtacttactctactccttaccccatctcccacaactcggacgattgt

SEQ ID NO: 505311 - DNA, 1062 bp, Homo sapiens
agctaccgtacttcctgttagttatcactccaattaaccggcagttactcccagtcatgcccgagccctcaaagtccgatccatgccccgaagaaaggctccaagaaggccgtgacaaaggcccagacgaaggacggcgaagaagcgcaagcgcagccgcacaggagagctactccgtgtacgtgtacaaggtgctgaagcaggtccaccaccgaaaccggtatctcgatccaaggtccatggagcatccatgacactccttacgatcaatgacatcttcgagacgcatcgccggagaggcttcccgcctggcgcataaacaacaagcgctcgaccatcacctccagggagatccagacggacgtgcgacctgatgctgacagaggagagctggcacaagcacgcggtgtcaggagggacaccaaggccgacagcaagtacaccagtaccaagaagagacacaagaagatacacagagcagcactcacgcaggcccatggacttcagacagctcaagataaggctacaattaagagtcagcaaccaagtctccagcatgcacatatcatatgggcaagcacatgcaatgccgcaaagcagaatccagatctcttaccataaaccacgggcatagcacagcatttgcaaaactgtaaacagatgtcactcataaacataaaaaaaaatagctaataaaactaaactatgtatgctaaattaaaaatggatacataacaggcacaaaagacaatgacaattaaccaaaataagaaggcaacacaatataatacgggaactgtcaaacacaatacctaacagaaaacaaatcatgagcaatgcaaagacccaacaaccctaatatggcaataaaccagcgatcacacgagcagcccagagaaaactcaaaaagaaaggcacaccacaaaatcacgacagaaacaacaagcagaagcacgaccggcacaaacgcgacacacaaaacagccccaggacaccaaaaaaacaacaagaacaacaaacagagagaagagcagacacacaaacaacaacaagcagaacaca

SEQ ID NO: 505312 - DNA, 84 bp, Homo sapiens
tcgatacgactttttttttttgcacacgacatggtcactgcccattttcttctttgtgcactacttcccttctgtcgtcttctc

SEQ ID NO: 505313 - DNA, 937 bp, Homo sapiens
ataaccaggctcgctcgggcttgaagcggcctcgctttcttgaaaattgtaaatctgctgccccccacgcaaactttcaacacccccttcaatcaaccttctgcggtcggtaagaggggcaaaagttgttcgccttgtccccgtcagacctgaacactttttcgtggcttcaactcgtgtcttaatcaactttgggctttcggggggcacagcaagcaactcttctttggcgtcaacattaacgcgcgtctttcttcccacatttggaacatttttgaaaattccactcacaatgacactgggaaaaatggggtttttgccccacatggaataaagggcgttcctttggtttaaatcgatcttttttgtttttgtgccaaacctttcttcttattttttttctggcctctaatacacactctgagttcctatctaaataacacgctgccctatataaaaagccctaaaatgggtcagacagggattaaaactaacttataatagaagtggcaatttttttgggagaataacttctcatcacaggagaatataaatacctcggggttcttttcgtattagcaccgttcgcccccttaagaaagggaaaggggggacgtacactacgttattatctaactcgactctttagacttaggcgtctggcagttgctcttagttgggaacccccacatggtttaattccaacttgcagttacgaatatggatatgttttatcactagtggtggctaaataacccaacatttgtgtaaaagaagaaaagccaagatttcattgtttgttgaatatttcttaagcatgccccttggcccataaagaggaccgcttcttaccaagcctgtaaactatgcatgatggatattcttgtatctatttaggaatggctgttgttacttaacacatctgtgatcagctaac

SEQ ID NO: 505314 - DNA, 173 bp, Homo sapiens
cagcggtgacagttccactgcacacagaaatagcaagggaatcatcaaccattggctggggaggctaaggtgggagatcacttgagccagtgaggtggaagtggcagtgagctgagatggcgcctctgtactccagccaaggtgacagtgagaccttcccagctggctcagag

SEQ ID NO: 505315 - DNA, 841 bp, Homo sapiens
ggacgcgtgggtcgacccacgcgtcgaaaaaaaaaaaagagaaaaaaaaaaaaaaaaaaaaagggggggcggaaaaaaaagaaaacccaaaaggggcccaaaaaaaaaaaacgccagatttttggcaaggggggccccaaaggggctttatagaggcacttggagccgcggcgatttaagcacgccagcagggagaggggggagcaaacaccggcagacgtgggagcactctgtgggaacggagcccctaactgttggggggggaggcaatagtggggcgcagatcatccaagagcgaaaaaacgctccaagggggagacactactatcacaatgtaaacggggaacagggggaacaaagcccgaaacgtggaggggacagttgggtacgggaagttagcttaggacaaattttatccccggggcgtgctcaaccgtgctagactaaacacaagagacacacgacaaatggtagaaacaagacacagaagaataaaaaggcatgtatcaaaaataaagaaaaaagaacaacaaatgacacaagacaagaagacagaaagataacaaaaaaaaagaaataacaaagaaaaataaaaatatgagtgaaacaagaagaaagaaaggagaacaatagaaggcgagaaaacagagagacaggagtagaagtgtaatacgaaaaaaatacagaagggcggaaagcaaatatcaattaaaaggaagatatagtagcaccgagacgaaagcaagaaaacacggaaaaacagaggaaataaaagatgcacgagaaagacacaagcagaaaacgcacaaacatcacaaagtagaagaaaaaagccaccccc

SEQ ID NO: 505316 - DNA, 225 bp, Homo sapiens
  misc_feature (131)..(131): n is a, c, g, or t
  misc_feature (147)..(147): n is a, c, g, or t
  misc_feature (223)..(224): n is a, c, g, or t
tcacttgtctagacagagctcatcgggaacgctgcggagtcaataaacaggcttagtatttaattccgtagcagaaaactacgagaatcaacatgaattaacagaaaaaaaagtcctttaccaaatatttntggagcgtctggtagnagagatacatagatacagcatgttaacaaaacagagttgtggcgtgcctacgtttatcatgtgtgtagaaattganna

SEQ ID NO: 505317 - DNA, 349 bp, Homo sapiens
ctgaactcgagaggagaaaactacataagatagagcaagtttaaaagctgcagaaataggatgtggatggttgctgacttaaattgggaggactccaagccgtgaaggaaaattccctttaccagactgtatcaattgtaacaagttatggcctgaaagcaggtaagtccatacttagcactgacatacttttaaccttctgtgctaaggtaaggtatccaccctcgatgcaatccaccttgtgtctacttagggtggaatgtgatgttcagcagcaaacttgcaacagactggccttctgtttgttactttcaaaaggcccacgtgatacaattagagaattcccacc

SEQ ID NO: 505318 - DNA, 326 bp, Homo sapiens
actgaaaagagcaaaagtgagtgcactttgtgaaaatggagtataagagtcgacaaagggtactctcgtaggtatagtcttgctgagttagttttgaactactttctttctctttccaccaatgacaaaaatgtgtgtggccgatctgttgctgcgatgaagggataaagtgtggtggtgcctggatctgaaaactctggatatccacaagatccgctctcttgcgaagtcgatgtcgaggatccgggtttttttctttcttttctctgctcttttcttggcaacccggaaccacaggtaggcactcacgggtgctcgcgtcaatc

SEQ ID NO: 505319 - DNA, 1571 bp, Homo sapiens
  misc_feature (690)..(690): n is a, c, g, or t
gtcctgatatgtcgcgtctaggaccactatgcactacttgcacgttgctagttcataggatgggagtcccatgtgtctggtgctggctcctggaatctagctcccaatacgggagtctgataccaacacaaggtcactagggctatctcgatcttgtaatctgtctcgaggctatccgaactggaacgatggcatgggagatgtataagacgcacatgatggacatgactgaagaaatgagagtagaaaggtgtgctgctcctattcgaggagattaattggccctggaggtacctgtgaaaatcaaacaacatggagaaaaggcatagacgtcggatagaagaacggtagggtaactacgatctccattattgaatcaaacctacacgtgtggaaacgtcaaacagtaaattgcatcttctcgaatccttgtggaccttaattggtagatccgttagtactagtatagtatcgacccgctagggtgaatcggaccgaggcatgccaacatttatccagtgccaaaaaatagatcgattcgtactactcatctactgggtggaacaatttccatcccaaggcgtccgttggaaacctcggctaggacatttgcttctccataaggaggtttgggtttcccgaacattgttctcgatgtcgattttggggaattgaacacattctctccgnaataggacctttgcgttttctttcttcccccacggggaaatttagggcgatctatagatatctcctcggcccaaagcaggaacgttagaacccccattttacatatgtgggcttgtgacaagcaaaaggtagggctctgggatctgtataatcgaccataattaaatccaattagagtcgagagcaactagggggtttttccactggggagagggccagttgattctattctcttaatcctaggcaagtttctccgataaacttcttgtataccccaggacccaagaagccccagaaggaagccaattaattggacaagggaaagagggggttccggagtcaaaaccaggagggatcagtttgtccttaagaccaacttgctttggtggccaagagcttgtggaattggaacaaataatgttccgaggcaagtggcctgtaaaacccgctccgaaagacctttggaagagacatgtttcctaattttcctagggtgggaacacaactcatgtcaaggtctctgggattgggacatactcacttgagagtgaatcctataatctattttgcccctttgaggaatgggtccaaaagccctattcctctatctccaaattaggaacctcttatggagtttaatttaccacacggggggcaaactttgccgtgtacacattgatcacttactcccaccgggattaaaccgctgaagccgcgtgactctggatcttgcacaccactgtgctcaggggaacaacttccacacactatggctctgtgaccaagagcagaaacgcgactttctctgggcggcaccatagcgtctggttatctcttaacagccgggactcgaacccttcctgttaccacaaactcggggc

SEQ ID NO: 505320 - DNA, 649 bp, Homo sapiens
  misc_feature (329)..(329): n is a, c, g, or t
atatggttggacgaccgacaagcaccacagcaaaaagatgctccccagaacacatggacaccccaatccccgtatcattagactctcccagaggcacgtatgtactgcttaatgcagagactcacctgaggcacactgatgcaccccgcatgacacagacttgcccccccataaggactctactatgacacacagacaatcccaacatcacacactgttcccacatcacacgaacccattttaggaaacacacagcatacagacttaccccatagaacacggcttccccgacaagcacacatactctcaaggccagtagactcaccccncagcacacagactttctctagagtgtacagcttcttcccacagcaaacagactctccccagggcacacagacacccctgacatcacatactctcaccacagaccatagactcgtcctagagcacagggactcttgccaatgaaacagactttcccgagaatagactcatgagacagcttgaagacccgcatcatgacacaaagactctcccacaacagacagactcaccccattgtgtacagacaagcaccataggccacagaccatcacctcaggacacagacttgcccagcaccacacagacactctgcagagcacgt

SEQ ID NO: 505321 - DNA, 198 bp, Homo sapiens
  misc_feature (161)..(161): n is a, c, g, or t
acaaccccggacaaggccgaaggctctgagtaccaggtcctgtacatcgctgatgacaatgagatccgcagcctgttccccggccacccccattcggcttacgagcaggcattccagtggtgacgagaagtgtccgcattgtatgctataggatgtccatngttcaaggctggcccgtgtctatttggaccacactgg

SEQ ID NO: 505322 - DNA, 388 bp, Homo sapiens
atgaggtgcacatctcccagctccagcatgagaagagcatcctcaggggagacccagatgaaggcaagcttgaggatccctgtcccctctgcatgttgcaaagctatgccatgagggccatggcagtgagttaccagctggagcgctgtatcgtaagagcagtcagctggtggcgacatcgaatcaatatgaacacacacacgcacgtatcaagacatcactcgcagcatgcctgctgccaagagcccgtcggcccaacttatggagcaagtggctcagcttaagtccctgagtgacaccgtcgagaagctcaaggatgaggtcctccaggagacagtatctcagcgccctggagcaatagtaccagcagaattctcttagcaccagg

SEQ ID NO: 505323 - DNA, 182 bp, Homo sapiens
gcggccgctttttttttaaagtggaaaacatgtttattaacattcaaactcccctcatacaaggcatataaaaatccttagcattgattatcttagtctaccttctacatagtacaatgatgtataattagctttcatatacggtcatacatcatagctgtaacagtcactctcatcatacg

SEQ ID NO: 505324 - DNA, 89 bp, Homo sapiens
  misc_feature (51)..(51): n is a, c, g, or t
ttgtttttttctttttggtgtaatgttttacaaatcttttggcttgagaantaatatgttaattgccttaaataaattaatagaaattt

SEQ ID NO: 505325 - DNA, 992 bp, Homo sapiens
ttgctattctcggtgttcttcgtgtctgggtgtttctctcttggtggcctttctcgtgtttgtctactctctctttgtgctgtctttctcggtgtctgtgctgtctttttttgcttgctctttgtgttcctccttgttaggctgtcggttcttctctgtctttttgcttctcagtggtgctcgttttgtcacgtgcttgtgtgtgttcttctgctgtctctctgtcttcttcattgcttgttgttcttgcttgtcgtgatttgtgcctctgattatgcctcttctgttgtgtgtcttctcgtttctcttggtgtctgtggtgtcgctttgtttgggctctcgtttgccttggcgctgtccgctgtgggcgtaggcgtgtggctactttgtccattgcgtcgattgcttttgtttctggtcttctgttgctcgttggtccactgtttggctcgctcgtcttgcttccctgtgttctagctgcgtgttcacttttcgcgggtctgcattttggcggtgtcatgtggttcgtctgtaccgttcctagatgtgagtgcctctcgaaatcttttgtgttctcaagtcacgtcgacggctgtcggttggcaacgtgatgtgtgacgatgggtgggcgcagctcgcatggcgtggcaacttgaccttgggggaatatttcacatccatccagagctcggaatctactagcgtccagccactttccagcaagacgcgcgttcccattccggagacgttgtcaaccgtgcaagcgggtaaaggctgactgggaaatccattttgggtgggcaatttccttcatacgaagccggaaggcgaggttagtccgcggcggggcccagcttgcctgccaggttttcaggaatctcaaactctcatcttgtgcaatttatcaggtgtggaacatgttctactgctgccgtgatggtgtgcgtcgtggtgaataagatgaaatgtatataaaaaccaaggtatctcta

SEQ ID NO: 505326 - DNA, 225 bp, Homo sapiens
gcactgctgtcgctcacgtgtctatcatcttctattcctatggacctacgtatttgaggctccctgccacagtcccggtcctcagccgatccatgaacttcacgctgctggtccaatgctcgccagagttaaagacagcggaaatagagcccaaggcagatgggaggctggagggcaggagctgatgtcggcctcatctgctctgccggcggccatctagagccc

SEQ ID NO: 505327 - DNA, 1354 bp, Homo sapiens
  misc_feature (657)..(657): n is a, c, g, or t
cccagctactcgggaggctgaggcaggagaatggcgtgaacccaggaggctgagcttgcagtgagccgagatagcgccactgcactctggcctgggtgaaagagcgagactccgtctcaaaaaaaaaaaaaaaaaaaaaaaaaaaatatacggtataaaccctttaaaaaaggtgtgggtgtgttcagaaactctcttataaccttctgtggcccagttgtgaagtgatccggggttttaacactttgtggacttcttatataaacggtgtgttaaatgtgttgggccggggtgtgcaggggcgcctcaacaaccggtgttaattcccaagcacattgtggcgaaggcgccggaggtgtggggggaccccttgtgagacggatgggcgatgtttggcaaacaccaagcgccgtgggccaatgttgtggaacacccccatatcttcttaactaaacaatatcaccaacaatggttaacaccaaagcgctatgtggtggacaaagggcccccgtgggaacacccggggggcatcacccaccaggggaagcgctgggaaacaccggggatagcaacgggggttcacaaacacctgggggggcaggcgtagcgagagcgtgtctggccacgactgaaccccgcaggaaactatcactctgncgccaacttggggacactccccaacgctcactgggggggacaacagcggaagtagggtcgaaacctctgcggcgctctgccaaatataaacgccgacacgtaacaacaacaacagaggggggcggcgcgcacgcgcgccacacagaacaagaattatcaccccccccggaggagggggggcccccaagagaaatctatcagcgcgcagatacacccacaagatactacatactcgtgagggaaccacaaaagtcgggtgggcgccaccagaataagagtcagcgaagcgcagcaaacatatacataaacagggcgcagctagagcagcactcggggacccacgagcgcggtacttcaaaaacaccacggcgtgtgataggaccggtggcaacaacaaagacccgcacagacccacggggcgccaccatcggtggcgcaggaagcagcacacccacctcaaacacccacacggagcggcggcgcaccgccaccccacaactctggcgagccaaaccaccaaacgcctaacgagggaaagcatacttcaacgggcgcccccaagaagcagcacacaatactataaccaacgtcctcacacgacgtgtctacacatcgtgggcgctacaaacaaacagcagcgacaaatactgactgagcagcgcgcagcgcaagcgatctggccgaccacggcgctgat

SEQ ID NO: 505328 - DNA, 199 bp, Homo sapiens
  misc_feature (4)..(4): n is a, c, g, or t
atantatccgcaatagtctgtcatcgcccacgtggaccatgggaagccgaagtagacagataccctggtgtagtaaggcgggcatacatcagcctcggcccgggcgggggagacttactatcactagatacccggaaggacgagcaggagcgttgaatcaccatacaagttaactgccatctaccctacttctacgagc

SEQ ID NO: 505329 - DNA, 581 bp, Homo sapiens
  misc_feature (343)..(343): n is a, c, g, or t
  misc_feature (347)..(347): n is a, c, g, or t
  misc_feature (353)..(353): n is a, c, g, or t
  misc_feature (420)..(420): n is a, c, g, or t
  misc_feature (577)..(577): n is a, c, g, or t
gacaagagcttcatgggcacgctgtccttttgagccctgcctgtgaacacgcgtgcacatgcgcactttcatatgccaccccatgtgcctttagtcccgggcccccagagcaccccaaagcctgggcttgagctgcagaatgactccaccttctcacctgctccaggaggtttgcagggagctcaagcccttggggagggggatgccttcatgggggtgaccccacgatttgtcttatcccccccagcctggccccggcctttatgttttttgtaagataaaccgtttttaacacatagcgccgtgctgtaaataagcccagtgctgctgtaaatacaggaanaaanagcttnaggtgggagcggggctgggaggaagggatgggcccccccttcctgggcagcctttccagcctccggntgggtttttcttcctaccctccttccacatggacataaactgtcactttaggaagaagacaaatgacagattttgacatttatatttgggtattttcctggatttataggatgggacttttttgattaaaatatttaatatattgaataaaaaatanacat

SEQ ID NO: 505330 - DNA, 679 bp, Homo sapiens
tctcattaaactttttaaatggggtctcaaaattcggggacaaatttggggtcaagtggtttccattaaaaggtatcggattttaaaaatctaataatcttaaaacggccacacgcaaaaaagaaaaccaaagtgggtccacaaaaacattctcctttccttctgagggttttacgatgcatggttatcataaaccagtctttatactactaaagcttaaagggccaactggaaacaaacagttctgagacggttcttcacaccacgtgattaagaggtgggggtggcaggtatcaagggataatattcatttagccttctggagctttccgggagcagactgggtgcgacctggccagctccagcagcctatctggtccactggcttaggatgacacccaccggcaactggtctggtctcatatcacagaaccagcaaagcgacccaaagggggatagtctggagaacgctctcaaaaaaacatggggctggccagggaaccatatcaagcaagggcagcatcaccagagcttcaagaattcagggccatctccccagcgtttctaaccagaagggggacccaactcttgaccctcacaggctccagccacacttggcatgcacaggtgacgccgttgtggacaacccaaagtacagggggggcatagccgggaggca

SEQ ID NO: 505331 - DNA, 719 bp, Homo sapiens
  misc_feature (343)..(343): n is a, c, g, or t
  misc_feature (347)..(347): n is a, c, g, or t
  misc_feature (353)..(353): n is a, c, g, or t
  misc_feature (420)..(420): n is a, c, g, or t
  misc_feature (577)..(577): n is a, c, g, or t
gacaagagcttcatgggcacgctgtccttttgagccctgcctgtgaacacgcgtgcacatgcgcactttcatatgccaccccatgtgcctttagtcccgggcccccagagcaccccaaagcctgggcttgagctgcagaatgactccaccttctcacctgctccaggaggtttgcagggagctcaagcccttggggagggggatgccttcatgggggtgaccccacgatttgtcttatcccccccagcctggccccggcctttatgttttttgtaagataaaccgtttttaacacatagcgccgtgctgtaaataagcccagtgctgctgtaaatacaggaanaaanagcttnaggtgggagcggggctgggaggaagggatgggcccccccttcctgggcagcctttccagcctccggntgggtttttcttcctaccctccttccacatggacataaactgtcactttaggaagaagacaaatgacagattttgacatttatatttgggtattttcctggatttataggatgggacttttttgattaaaatatttaatatattgaataaaaaatanacatctcattttaacttatcaaataatactccaattcactaaccatcgttttacaacattcttcactatcgaaatccctagcattaccgaactttaatctcgtatgcacacattctcctttgccccacctatccatattact

SEQ ID NO: 505332 - DNA, 124 bp, Homo sapiens
aaggatcccatggagaccaggctgagcaacatggtgaaacaccatccctacaaaaaatacaaaattaaccaggtgtggtggtctgcgtctagtgatcctagctactcgagggactaatgtgggg

SEQ ID NO: 505333 - DNA, 527 bp, Homo sapiens
  misc_feature (32)..(32): n is a, c, g, or t
  misc_feature (151)..(151): n is a, c, g, or t
  misc_feature (155)..(155): n is a, c, g, or t
  misc_feature (161)..(161): n is a, c, g, or t
  misc_feature (228)..(228): n is a, c, g, or t
  misc_feature (385)..(385): n is a, c, g, or t
actaaggactcagtacagcaggcgctatgtgntaaaacggtttgtctatcccccaagctaacccggcctttatgttttttgtaagataaaccgtttttaacacatagcgccgtgctgtaaataagcccagtgctgctgtaaatacaggaanaaanagcttnaggtgggagcggggctgggaggaagggatgggcccccccttcctgggcagcctttccagcctccggntgggtttttcttcctaccctccttccacatggacataaactgtcactttaggaagaagacaaatgacagattttgacatttatatttgggtattttcctggatttataggatgggacttttttgattaaaatatttaatatattgaataaaaaatanacatctcattttaacttatcaaataatactccaattcactaaccatcgttttacaacattcttcactatcgaaatccctagcattaccgaactttaatctcgtatgcacacattctcctttgccccacctatccatattact

SEQ ID NO: 505334 - DNA, 823 bp, Homo sapiens
gattccgctactgcgcaaagatggtggaggaggagaacatccgcgtgttcgttgtggcggcaggagttgaacttaggagagctgtgtctctgcagatctaagtatatctctgtgtctctggagacttggttaaagtttacaggcacagttacaggaagagtgtgtacactatactgcatggacacagaaatctggtgactgaatccagttaaccccaaaacatctacagctgtattcttgtcccttgatggcacaattaaactgttgggactatatagatggcatcttaataaagcacttccatagtttggatgtaaattcatgccctctttatcttgcccaagctagaggattctgtctttgtaaatagtgaataaaggaaaaaccagatatattcagctgttcagtgaaatgccaaaatcctcaagccaggaagtagaacgccagggagctgtccttggttcttgattacataaaccagtcacccaagtgctggcttgggaaacgaggagtatatgttgctgcaggtacggcaattacttgtctggtatttttcaaacagacaacaacatcaggtactttatcatccatcagaaataagaaggctgctacaacattacgtgttagcttgtacccacgggaatggctccgttttggcctggttgacactcgcttggggatttatgtgaagagattgggactgtttcttggccgatggtctggttggttcacgaagaccctcgagggggatacttaaggcggacaaaagagttcgggaatgatcacgggagagccgcaaaaacccggcgagacgacaggcgtg

SEQ ID NO: 505335 - DNA, 240 bp, Homo sapiens
agaaacattccaagcctgtgataaactctctctttctaaaatcaataaaaactcttagtgcataggagcaagcactcctaaccaaaaaaaaaaaggaaaaatttgtccagaggcccctctcaggtttattctccaaaataaacttgtcttggactgtggagccacttttcaggttccttttctctttcttaacttctaacattgggggctgaaacctgggatgggtgttggggataccat

SEQ ID NO: 505336 - DNA, 452 bp, Homo sapiens
ggtcgtgacttggcaaaaccttgcgcggctgtcgaggacagagtggatctcacgttcaggaaaatgtttaataagtgagcactgcccataaagaataagctgcacaggtcaggggtgtatacctcatttaggcagggcctggaaaggccagatagtgggaacattgaagagactcaggaactggcagaaaactgagccagattatatttaacatccttttattatttttgtgggttttttttgagacagggtctcactctgtcgcccaggctggagtgtagtggtgcaatcacggctcactgcagccttgacctcccaggctcaagtgatcctcctgcctcagcctcctgagtaactgtttgccaccatgcccagctaattattttttctttctttcttttttttggagacagagtctctctctgttacccaggctggcgtgcagtggctca

SEQ ID NO: 505337 - DNA, 973 bp, Homo sapiens
ctccaattgcgactccagtaaaatgactcaaaagtgggaaatgaacaacatccatagtgtttagaaaaaataaaaggaaccaataacctacctactgacacgtacatttatacaggactgaaaatcgcctgaaacctgctgcaactattattaactctgtacagctccgaacccagaacctcctgatcagtttgaaggacgttgataaactgtgattttacaataacattatcatctgcagttactgtttacaaaactgcttttaccttaaacttgtagatgtttacatcttttttgttttaagatgatgtggtaattgtgcatttagctctgttttatttagaatagagttaaaagcattgtgtcttcttgggattacactcaggggtctgaaaggcagttgattttttttttttaacacactctgaaaaaaggtgggagtaaccagactttcatatataactgggtgattatcaaccggtggtgtctttattgaatttcacatccttatgaagcacggcacaggttcttagccaagggggccttccttcacagtcatgctgcttttacgacaggtgaatttcacacatttagtggctcttcattctcagtatatatttcaagagctttctgttgaactttataagaccgtactggatggaatggcatctggtggaagaaaaatccttactgtctcaaaagcgaattagggtgcaccgtggtctgaactgcatggtgcttgggctgacacagcactcgggatagaacatcaggcaactacggaggcgaaacatatggcacaagccgtactgtagcatccacacgggagggcccagaaacagggacacacggcaacagacacgaccgggaacgcaccacaccacaacctaggaacggcggcggacaccacgcaacagctcacgaacacgaacacaggaacacgaagagtcacccaaccagccccttccacccg

SEQ ID NO: 505338 - DNA, 666 bp, Homo sapiens
  misc_feature (193)..(193): n is a, c, g, or t
  misc_feature (221)..(221): n is a, c, g, or t
  misc_feature (559)..(559): n is a, c, g, or t
gccaatacacaggggctgccttgaactcgttcatacaatccatttataacctgtttataacttgtttataacccatttataccacatacccctaaagcaaatacctagcagatagcatgcagggcctatttgcctggcctccttcaatggcatcacattctccaccaccacgatggttaatatggacgagccntagcagctgcccagtgaagtccacacgntactgcccaaaccagctcaagtccttagttgtcatgaaaataatgtgagttcccacagccgtaaaagggaaagcagcaagagccacatgagcatccccggaaccctgggaacagtcatcagtgtcatcttcagggtcatgtccctacaagcagttctcaggctcctgctgagggtcagaacagagccgaagtcacaggatatcaaaaatggataagcccaacctcagctcgcagaggaattgctcagctgacagatgattgtgttatctcagtgaagccagatgacaatgtacttggccaacggaacatcttggtcaatggatctccaagttggttanaaaattaaagcaaaataatgccattatatgtaagatgtcattgattgtaagatgctcctttatttgatgtaccactaataaataaaaacactgacatttaaacaaaa

SEQ ID NO: 505339 - DNA, 177 bp, Homo sapiens
  misc_feature (37)..(37): n is a, c, g, or t
ggtcggacacagttgtttagtaataagttctcatgcnttggaattctctgttttcagtctcatcaaattcaagactacatatttctcatgacctttctggaagggagaggagagtagtaaggatgagtcttgtagtcttctagtcttcagttgaaattaaataacccaaccaagatg

SEQ ID NO: 505340 - DNA, 181 bp, Homo sapiens
tatgcttcacagcgtctcacagactctatatgagacctctcaaacgtactgtctctgtctctgtccctctccctttcaacagaactagaacttagtctctctctttccatctccagaatgtccgttacatgccacacggaactgaatctgacacgttcatcactgtacacttccccttgga

SEQ ID NO: 505341 - DNA, 857 bp, Homo sapiens
  misc_feature (53)..(53): n is a, c, g, or t
  misc_feature (55)..(55): n is a, c, g, or t
  misc_feature (67)..(67): n is a, c, g, or t
  misc_feature (70)..(70): n is a, c, g, or t
gacgatgctacgcgcgcccggctgctcctccggacctccgtagcgcctgccgngncctggctggcgntgntctcgtcgcttggcgctgctctcttctagagccgagggacccggtggcctcgtcgctcagcccctatttcggcaccaagactcgctacgaggatgtcaaccccgtgctattgtcagggcccctgaggctcctgtggctgtggaccctgagctgcagtggagggtgtgacctgcaccccgggtgcagacatggtcagccctcattctgcacacggaaacacgtaccccacggtcaaacagatccgcaagctgaggcagctgcacgggtttgctgcaggccacgcgggtccaagggatggacggggctagatagtaccagggacagccgcagacctagggtgcagcgctggccgactggccttatgttggtacgcggacttgtgatggactgggcaagatagatagagaaggggacggaagggatatgcagacagcattgtgtgcatgagtattggcctcagctctacccggaccacattatcaagcacgtgagaactatggactgactgagggatcatcaacagtgaccaagcaacacgagtgcatgcgaataagcaagacgcacagcctatcactggcagggagctggtgggcaaacaactaaacacccctgggattgacagcgagcggaccgtcggaaacataatgggacgagggaacacacaacaaggtaaaatgatacacacaaatggagaaaaaagacacactgaaagaggataaaacagaagagaaaaaatgacacagcaataaaaacaagcaacctcacactgggccgcacacacacaatt

SEQ ID NO: 505342 - DNA, 134 bp, Homo sapiens
agaccaggtatcgtctcatcctccaacatctagcatctatcagcattttactgatcatgtccacaccctgtgtgggtaaggaggactctctcggacgtagtagaggcaggcccagccagaagtgcgcctgggtg

SEQ ID NO: 505343 - DNA, 627 bp, Homo sapiens
agctgaagaccgaagcaagagctggttcaggtggcagccacagcagcctcagtgacctcagcaactatggcctcctgcccagactctgataatagctgggtgcttgctggctccgagagcctgccagtggagacactgggcccggcatccaggatggacccagaatctgagagagccctgcaggcccctcacagcccctccaagacagatgggaaagaattagctgggaccatggactggagaacgggacgctcttccagactgaaagccctcagtctggcagcacttctacacagcaggagactgaggctcaacgggcaccctggcacaggctgatgctccgatggtgctgcgagcctcctggcccaggcagacacagctacgctccacgggcagacctgcaggagaccaccgctgcgtgacacggcctgcgcgaccagacacacaggacctggaaggccagagccctccacagagcctgccttcaacccccaaagcacgcttgcgactcagcgcacggagggccgcctgctccagcagctgacgatgacaccgaccgtggcacctgcacgggctctgcgcgagaccgcggggccgcgaggccggacccactcaagccgcgccagc

SEQ ID NO: 505344 - DNA, 241 bp, Homo sapiens
taagagtgttggttgatatagactgctggagggtggccatgttcagtggaatcctgctcaggattgtgttacaactcacctgccgcatctactagtcctttaaaattgcatgcgctggagcgtcgggcccttatccgggcgtcgttggtagtcgagagtgtactgaaggctgtgttcgctaaggatgtgttcgctaaggatgtgttcgctaaggatgtgtgcgcgaaggatgtgtgcgcta

SEQ ID NO: 505345 - DNA, 391 bp, Homo sapiens
gacgtgggctagggcatttttaatctagacatgtttgaaaccagtcactttgtgtctaaaattagctgtagcacatggatgtggtcgatattaagctatcggctgtttgaattatagatgcgtctacagtatttgtgtgggcatagtttttgtaaaaaaaagattaaaaaatatcaggatggtggaaaaactagatccgtgtatctctgttttggcatgcatttattcagtatcttctagcaatggtttttctctgttgatctaccgtagtatcctatttttaagtttattttatttttaaggagtattgtcatcacttttcaaggtgtcttgacttctacacaaagtatatatattcaggactttaaaaaatagcagtacacatttaaca

SEQ ID NO: 505346 - DNA, 129 bp, Homo sapiens
cttctttcatgggccaaactcccgagttactttgttgtagaatccagcctactgaattattttatgatatctctgtttgagacaggagtttctctgctcacccatgctggagtgcagtgactcagtctt

SEQ ID NO: 505347 - DNA, 611 bp, Homo sapiens
ggtgttgtggtgcaagtctcgtacgcgtggccgtcagtgtcgtcctgggcgatgtgccatgcaatgttgtgtgccagtctttatacacaggggatttctgtttgggatggggacaccatgttgcccccgtggcctttcccatgcgtgttttctcccatgtcgcgtaggtattgctgatggcctgtatttcctgcgttcgtgtttgataaccggcgtcctgttttgccccccggtgggccactcccgtgtgggtttcccagcgcagtacaacccatgtgtgagatccccgtctcacatgcccctatggggtaaggcactacctaactcccacgcgggggggagcccactcacacacgcgggtgataactttatctacagcacctttccaataatagaagacaatcttttgacagaggatatacatttggtccagcaggaagtatccgtatgcttgcttacttggcacctgtggagtctacgacagctgcacccgtcatctttatcaggagcacaacaaatgccccggtgttgagacccatacccgctgttgctggatggaaaatttgattcaagcgtttcaaaaaccctttgtttttaaacactgacaaaac

SEQ ID NO: 505348 - DNA, 157 bp, Homo sapiens
cgttcccttcatcatactaccaactaatgacaaatgaaaaaacgaagttatgggaacgacacaacaacatgaatgaaatggtgacgggaaatgcgaatgcgcacaggcaagcaataatgcaaatgtgcagcggcacaggcacatggaatgcaacatg

SEQ ID NO: 505349 - DNA, 81 bp, Homo sapiens
attccagttcagttaagaatttagctgtgtgtgtcggcttctacttccatcagcttctgcatgaaggctacatgatggcat

SEQ ID NO: 505350 - DNA, 976 bp, Homo sapiens
gcaaaacaccaaagtggctggatgactgccgtgtgcagctgggtgtgtgtgccctgtgtggtgccctgtgtgtgccctgtgtgattgggtgaacctgctgtgtgtgcttcctgctggatgtgtttctgtgcatgtgtgcatcctggtgtgccggggtctgctgtgcctgtggactgtgggcctggtggcctgatgtgcctgctgtgatgctctgctgtgatgtgcaatggcctgatggactaaagtgacgttggattgccctgtcaccaagtttgtggccgcttggtcaaggacatgaagatcaagtccctgtgaggagatctatctcttctccctgcccattaaggaatcagcagatcatttgatttcttccttgggggcctctctcaacggatgaggcgtttcgacacgattatgccagtgcacgaatgcatacccgtgcctggccagtgcaccaggttcaatggcattttgtatgctatcggtggactacaaatggccaccgtcggctcttgggtgttaagtgctccaaggagtgtgtgcaccgccatccgtggggccatcatcctggccaatgctctccatcgtccccgtgcgcagaggctactgggcggaacaagatcgcgaagccccacactgtcccttgcactggtgacacggccgcttgcggctcttgtgctgggtacgcctcatcccttcacccaggggccctggcatcggtctcgcacctgtgcctaaggaagctgctcatgatgcgctggtatcgcatgactgctaccactccagtccggtgctgcattgcacgctgggcaacttccgcaaggccacctttgaatgccatttctaagactaaatgttacttagccccgaagtctggaatgagagtgatttaccaagtttccatatatgacgttactgacaaatatgacaaaacaagcaaagtctcgaggaggcgacgaggtacacatatggcaac

SEQ ID NO: 505351 - DNA, 167 bp, Homo sapiens
gttcaagtaagggccaaggtaagttctaggcagctgtctctttgccgtgtgtgggcccattgtgggccagcgggtgttaacttgtgggtattggaaaaggattggattaggtgagccttcaggctggtcagcggggcggtcactgggccctttgatcttctttatat

SEQ ID NO: 505352 - DNA, 305 bp, Homo sapiens
acccgtccagtacgggtgtgccagaatagggatatcatagagacagaaagctgaatggtgatgccagtgactagggagaacacgaatggggagtgactgctgcactgggtatgggtcttcttggggcagcaaaaatgctctaaaattagtggtgatggttgcacaactctgtgaatatactagaaaccattgaattaggccaggctcagtggcttatgcctgtagtcccagcactttgggaggccaaggtgggtggctcacttgagcccaggagttcaagaccagcttgggcacacattatggag

SEQ ID NO: 505353 - DNA, 380 bp, Homo sapiens
ccgagcgcggacctgcaggcatggcagtcaccgaccaggcagcccgcaagaaggagcgcgtcctctggctgttggacgtggacgggaccctcacgccggctcgccagatcgcagtggagggcggctctgactactgtcagaccgctgagcagctgactgacggagatgaagtcattgagaagattgattatgtgcttgccgagagcgtgacggtgcaggataagcacggacgactgctctacaagcagaccattcagaaccacctgggcaaggagctgcaggaggacttgatcaactactgactcagctacatggccttgatcaggctgcccaagaagcgtgacacatatactgagttacggaatggcatgctgctctcc

SEQ ID NO: 505354 - DNA, 344 bp, Homo sapiens
gattgaaggcaagcacagccacacaatctttcttttttctttttttttggaggcggaatcttgctcttgtcgcccaggcgggatctccactcactgcaacctccacctcccaggttcaagcaattttcctgtctccggcccccacgagtagctgggattacatgtgcctgccaccacacctacctaagttggtattattagtagaaatggggtttcaccacgttggccagacgggtcttgaactcctgacctcaagtgatccacctgcctcggcctcccacaatgctgggattacaggtgtgagccaccgtgcccggccagccacacaatcttaacgagaaggc

SEQ ID NO: 505355 - DNA, 310 bp, Homo sapiens
aattgagaggactgcacaccacggcctgctctgaaagaggatattacttgcttctaaaactgcaggtgcacttgtcctctccaacaaggtgtgaagcaggggcagctggttctcactggtctttgaagtggccttctcttttccacaacgcggtatccctctttccggtcatcagtggcaaaggttgaataaagagtttcttctccaactacttccttctgtaatgtcatttcaaagctcgtgcaggactttcaggcagcccacctggccatagtatgcggcctcgtcagcggcagccagccctccttgt

SEQ ID NO: 505356 - DNA, 513 bp, Homo sapiens
gggaaatctaggcgaaagtaatggggaagattagaaagaattagccacccgggctccagttgatatttaaaagatccctttaaaacaagctgatagggggtggttaagcaggacatcttgggcatgcaaaaatgaattccccccccccccctcttttttcaattaatggaaaactgttaagggaagctgatacaaagagacaccttgctcctttccctcagctttataataaactgtttaacgggaggtttcagtagccccttggttttgcctctttaaattatgacgggcccaaacctttttttcaatgcaatgcctttgaaagttttgaaacctggaacctttttttttttttgggtgcaattgtttaagaatcatggatttattttttggaactctttgggtattgtccttgggtatcctgacagcgccatgtgggtcagcccatgtccatcaagatgggtggttatgaaatgccaggcttctaaaataaatgtttaggaattcacaaca

SEQ ID NO: 505357 - DNA, 241 bp, Homo sapiens
gaggcaccttggggccttctttttccttttgggggtcctgggggccctcattaaaatgtgtgaaataccaaaaatggacagccatttggtaaaaaagttgggccagcaccttttaccttggatggaccggctttccttggagcacttgaaccccagcatttatgtgggcctacgcctttccagtttgcaggttgggaccaaggaaaacctttacctgcacgccaacccataaaaaaaaaaa

SEQ ID NO: 505358 - DNA, 904 bp, Homo sapiens
  misc_feature (62)..(62): n is a, c, g, or t
  misc_feature (70)..(70): n is a, c, g, or t
  misc_feature (80)..(80): n is a, c, g, or t
  misc_feature (257)..(257): n is a, c, g, or t
  misc_feature (278)..(278): n is a, c, g, or t
  misc_feature (293)..(293): n is a, c, g, or t
  misc_feature (300)..(301): n is a, c, g, or t
  misc_feature (372)..(372): n is a, c, g, or t
ttaggaatccataatatcaaatgcaaaaaaagaccccggccggatggtgaggtctgtgatgnagctggtngttctgactngagcgccgtaacctatcgtggacccatgtaatggcggccaggatgatccggtcgtaacgcttattcaactgattgagtcgttcacttgtcgcgttgtcatcagagcatgctctgaccaccatccgctcatggcgtgacagagcacgtcgcaaacgttgacccttttcgcctcgccanacagcgagcggcatcgcgccngcgctggcgggtatngtggtgnngcttcccattatgcaatctcctgaagttgcgttttcgtgtcttcaggaaatgctccaggcaggtgtaaatnggcgcttctcaagcctgtcgtctggggctgactctattcaagatctggctcgtcgaatgaaaaaatcgggagaagttctttttcctagttagacggttcggcggattcgagcgagcttcaccggcacagtgcccaagcgatagctgtcaccaaacaatgtcgcactcatgaaaccatcgcgtttgatgtcagatttgccgacggtgcgaagttcgccgttgtggagaaccgtgtcgccagggcggatcatgtcgatgtgagattcaaccgtttcatagttcgtcatggggctttcctagtgctggtggaccgtcgtaacgggcttggggataagtagaaatcaaccttgcagcaaagggccgatgtcacctctaacaacaagatggcatttgaacagtctgctgttgcaggacatgagcaagacggcacattggcgtcgatgaaaacgcgaaagttactttgccagggcttaactttctcatctcgcctcaaagagagcggcatctccccagcaatagcggatatcgtggta

SEQ ID NO: 505359 - DNA, 577 bp, Homo sapiens
  misc_feature (112)..(112): n is a, c, g, or t
  misc_feature (244)..(244): n is a, c, g, or t
  misc_feature (260)..(260): n is a, c, g, or t
  misc_feature (265)..(265): n is a, c, g, or t
  misc_feature (376)..(376): n is a, c, g, or t
  misc_feature (506)..(506): n is a, c, g, or t
ggaacgaggcactgcaacaactcaatagaggggtacatcatagtcagagttcagattttttatgataggagtatcaagttcgtagtctggggtatcagatatgtgaccaagnacgggaacttctccacatcgtagcactacatgactaatctgaaaggaataaagcactgaatcggctactatacattctgatagggtggacccctgaggagtgtacagagagcatcatgaggcgcccacaccnacagcagagcggggtnctcanacaggggaatctcccagtctggtagcgagaaatcgtcttttcctcatgtagctcataatactgacatctctcaacagtcaagatgaattctcacaccagatcctacccctntcccagagccacatgtgtcacacaagtgtagtagaatggcaggggatccaccacaagatggaggatggccaggacaaacccgtgcctgttcctcctcaaacgcgttttttaggcactaaggaatctcttntattctttcaggtaaacccggccgcggattatcttactacttggagggggcccctccccaacttttccatc

SEQ ID NO: 505360 - DNA, 132 bp, Homo sapiens
gagtcgagctggtaccagttcaatagcacctagcttttagaagtttcaatagtcctagttttagaatgtttcaatagcaccttatatagtatgtcgtcactgaagacttgattcagaaaagaaaaacctctt

SEQ ID NO: 505361 - DNA, 686 bp, Homo sapiens
ccttgggactcgaactgagcctcaagctcagctacctggaagagtgtcgatggatggcacctgtgatcctcagatgaccccagtcacgtcgggaccacaatggggcatccgattatgagagcacagagtgtctgccaacaagcgttttacatattccatgctaggcgtgagccaccacaacgtcatcttggcgaaagcagcctcggcgatcgtcagcgctcagtgctgctatggcctgtcgatgagccgccagcactcctcttagactggctaacgccctgccgttgctccaggggttgggtatggcagctgcaaggccagcacgacgaggcctgacggcttgcgggcacgggtcagctggctgagccgtttaccgtgctcacggcccccattctctggaggtcgtatctggagtggtcaagggacgcaagggcagacactggccgatggctctacacgcgtgtggatagctcagcaaggtgtaacgctgggacccagggacaggtagtagcgcctgcgttgcggttcatgccgatgccgtgcgacgcatgatccctgacgatcgtgactacacactgtgagtggcatctgttgccatgttcctttagtagcctctcaatttggatctgagttgattctccgagaacacattggagacattcacgttagatgcttcgggaattaat

SEQ ID NO: 505362 - DNA, 984 bp, Homo sapiens
  misc_feature (188)..(188): n is a, c, g, or t
  misc_feature (984)..(984): n is a, c, g, or t
gctgcttcctcctgtttccccgtgcgccgacgccgccatcatgagggagcatcgtgcactggacagcgccgagagcaagtgcgggtgaccaaatcggtgccaagattattgggatgggtgatcagcgatgatggcacgggtatcgatcctccacgaggtcatcctaccacgagggtacgagcgacctngcagctgggaacgcatcatcgtgtcatctatcggatgtaggccgagcggcgggtaagtacgtgccccgcgccgtgcttcggtgaggatcgatggaagcctcggcatccatggactccagtgcgcgtcgagcggcggcctatctgggcagagtcttcacggccggcgagaactttcgttctactggtcatgaagtggtagctcgggaacaaactggggcaacggggcatctaacaaacgtaaggcagcgagatgctggatggaccctcaggtgcatggatctgttagtgagcaaaggacggcctgtatgagtcctgtgatcgtgcctgtggatggggtttccacgtatgaacaccagctcccatgtgatggtagcggcactgggcgctctgtagtgatgtgcggtaacccatccgatggattccgacccaaaaatcccgggggaaggacagaatatgcactgggacaagttgaattcaatgcccgacaaccgcgttgacagtgatgcgatgttgcactttcgacccacgaacagcttgtgttcgaactaaacaagtgtgggtgtcgccaggaacccaataccagttgggccacaaaacgcgcacctttcacgaaacacagcggaattcgggcccgattcagcattaaatattaactacgcatacgatccaaactcgaaatgtgtgctctttcgagataagcacagaaacggtcttactaaccttgggcgtggcaatcaagggcctcgcacaagaatttctcggcaaatttaggggcacgaaggcatccggctgtggn

SEQ ID NO: 505363 - DNA, 110 bp, Homo sapiens
acgaagcctcgatcagtaagtaaactttaatgtaatacttctctgtttcctggactttttctttttcttcattactattattattgagacagggtctcgctctattaccc

SEQ ID NO: 505364 - DNA, 708 bp, Homo sapiens
acgatggcgctggcctgaagtcggaaagattggccataatctactaattgcatgtatcgagatgggctgcttgggccatgacatgatgagcgcgataatatcgtacttttgtagcatatcactgacttagtaacaattagcgaccatcgccagcgagacagacgaatctctatgactcgcacgcgtatgattaatcgagggcagactcttacacgagtctttaggttgaatttgatcatactattagttcttagaggcgtcaaagtagtccacgtgctactattagacaaagtgctgacaaacgagttcgtactaatctacctacacatgaacatggtcaaggtgtactatgactacgcacgcatagacatcgtaggattactgatctgcttcccgccatgaggccatttagtgtagtatggcgtgacctgttatgagatgcaggaattagtactgaatcaaagcgataaaaacttcttctacaggcctgaaaggctatcatattggctgcacggacttccgactgaccttaagctaataggaaagcgacaatgactaatagtagtcatgtcaatctatgaatactcccatgaccatattgtcaacaccctagatacttttagggccctatgcaataaatttattgactactagccgaaggaccactcactttctgtcgatggctcaccagtaggtacccatttcccc

SEQ ID NO: 505365 - DNA, 109 bp, Homo sapiens
cggatatgtactccccggggacagtccccacatgattacaaaagccaggtgcctcatcaccacgttaccctgacctgtccacttgtatatgaataaaccttcagtctcc

SEQ ID NO: 505366 - DNA, 298 bp, Homo sapiens
agatccccgaagcgtggctgggtcattgtgcacaatgacccagaagtggagaagatgcaggctggaccaccgggggacatggaggctgcggcactaccgtgctgtgaaatacaatgcggattaagttcctggtcatcgccctcaagagctccgtgtgggtgtatgcctgggcccccaaaccctaccacaaattcatggccttcaagtcctttgccgacctcccccaccgccctctgctggtcgacctgacagtagaggaggggcagcggctcaaggtcatctatggacccagaccagg

SEQ ID NO: 505367 - DNA, 133 bp, Homo sapiens
tttagacaggcaatcccaggatagcatatgagaacagctgctgctttcacgaagggatcgtggcataagcaatgataaggctggcaagatgactgtaccaataccgagcaccaggaatcagacacactcctac

SEQ ID NO: 505368 - DNA, 190 bp, Homo sapiens
  misc_feature (151)..(152): n is a, c, g, or t
ggcggcgctacagccgaaagccacggtataagcttggaatggggtcattctattatttcactacaaacagcatagaaagcaagagaagtcgggaatttattctaaaatagaatggaggttgtcatctacacgcagcactcctcactcctcnntgttgccatttttagcagagtactcccttgtccgagca

SEQ ID NO: 505369 - DNA, 1160 bp, Homo sapiens
gagctccagcctccaggcacccgggatccagcgccgccgctcataacacccgcgaccccgcagctaagcgcagctcccgacgcaatggacccggcgctggcagcccagatgagcgaggctgtggccgagaagatgctccagtaccggcgggacacagcaggctggaagatttgccgggaaggcgtaccgaggagaaggcattgtatatgggacactagaggaggtgtgggactgtgtgaagccagctgttggaggcctacgagtgaagtgggatgagaatgtgaccggttttgaaattatccaaagcatcactgacaccctgtgtgtaagcagaacctccactccctccgctgccatgaagctcatttctcccagagattttgtggacttggtgctagtcaagagatatgaggatgggaccatcagttccaacgccacccatgtggagcatccgttatgtcccccgaagccaggttttgtgagaggatttaaccatccttgtggttgcttctgtgaacctcttccaggggaacccaccaagaccaacctggtcacattcttccataccgacctcagcggttacctcccacagaacgtggtggactccttcttcccccgcagcatgacccggttttatgccaaccttcagaaagcagtgaagcaattccatgagtaatgctatcgttacttcttggcaaagaactcccgtgactcatcgaggagctccagctgttgggacaccaaggagcctgggagcacgcagaggcctgtgttcactctttggaacaagctgatggactgcgcatctctgagaatgccaaccagaggcggcagcccacccttcctgcctcctgccccactcagggttggcgtgtgatgagccattcatgtgttccaaactccatctgcctgttacccaaacacgcctctcctggcagggtagacccaggcctctaaccatctgacagagactcggcctggacaccatgcgatgcactctggcaccaaggctttatgtgcccatcactctcagagaccacgtttccctgactgtcatagagaatcatcatcgccactgaaaaccaggccctgttgccttttaagcatgtaccgctccctcagtcctgtgctgcagccccccaaatatatttttctgatat

SEQ ID NO: 505370 - DNA, 304 bp, Homo sapiens
  misc_feature (87)..(87): n is a, c, g, or t
  misc_feature (190)..(190): n is a, c, g, or t
  misc_feature (192)..(192): n is a, c, g, or t
  misc_feature (195)..(195): n is a, c, g, or t
ttcatagagtggccccatcagagaggtggtaaatctcaacagttatctcaagattacagaaacgtcaagtcctctcctttcaaatancatgggaagggcacttcagtacaaaagaactccccatctttgtacagaagtgttaaataaacatcataatagatttggagaaagaacacacactccacccatncnctncttcttactccaagggatacagcagcaaagaatttctgctcctacaggcaacttcaggggattaaaaaaacagtaactgccagctggagggatagattaagacacatta

SEQ ID NO: 505371 - DNA, 1210 bp, Homo sapiens
gagctccagcctccaggcacccgggatccagcgccgccgctcataacacccgcgaccccgcagctaagcgcagctcccgacgcaatggacccggcgctggcagcccagatgagcgaggctgtggccgagaagatgctccagtaccggcgggacacagcaggctggaagatttgccgggaaggcaatggagtttcagtttcctggaggccatctgtggagtttccagggaacctgtaccgaggagaaggcattgtatatgggacactagaggaggtgtgggactgtgtgaagccagctgttggaggcctacgagtgaagtgggatgagaatgtgaccggttttgaaattatccaaagcatcactgacaccctgtgtgtaagcagaacctccactccctccgctgccatgaagctcatttctcccagagattttgtggacttggtgctagtcaagagatatgaggatgggaccatcagttccaacgccacccatgtggagcatccgttatgtcccccgaagccaggttttgtgagaggatttaaccatccttgtggttgcttctgtgaacctcttccaggggaacccaccaagaccaacctggtcacattcttccataccgacctcagcggttacctcccacagaacgtggtggactccttcttcccccgcagcatgacccggttttatgccaaccttcagaaagcagtgaagcaattccatgagtaatgctatcgttacttcttggcaaagaactcccgtgactcatcgaggagctccagctgttgggacaccaaggagcctgggagcacgcagaggcctgtgttcactctttggaacaagctgatggactgcgcatctctgagaatgccaaccagaggcggcagcccacccttcctgcctcctgccccactcagggttggcgtgtgatgagccattcatgtgttccaaactccatctgcctgttacccaaacacgcctctcctggcagggtagacccaggcctctaaccatctgacagagactcggcctggacaccatgcgatgcactctggcaccaaggctttatgtgcccatcactctcagagaccacgtttccctgactgtcatagagaatcatcatcgccactgaaaaccaggccctgttgccttttaagcatgtaccgctccctcagtcctgtgctgcagccccccaaatatatttttctgatat

SEQ ID NO: 505372 - DNA, 4218 bp, Homo sapiens
gagctccagcctccaggcacccgggatccagcgccgccgctcataacacccgcgaccccgcagctaagcgcagctcccgacgcaatggacccggcgctggcagcccagatgagcgaggctgtggccgagaagatgctccagtaccggcgggacacagcaggctggaagatttgccgggaaggcgtaccgaggagaaggcattgtatatgggacactagaggaggtgtgggactgtgtgaagccagctgttggaggcctacgagtgaagtgggatgagaatgtgaccggttttgaaattatccaaagcatcactgacaccctgtgtgtaagcagaacctccactccctccgctgccatgaagctcatttctcccagagattttgtggacttggtgctagtcaagagatatgaggatgggaccatcagttccaacgccacccatgtggagcatccgttatgtcccccgaagccaggttttgtgagaggatttaaccatccttgtggttgcttctgtgaacctcttccaggggaacccaccaagaccaacctggtcacattcttccataccgacctcagcggttacctcccacagaacgtggtggactccttcttcccccgcagcatgacccggttttatgccaaccttcagaaagcagtgaagcaattccatgagtaatgctatcgttacttcttggcaaagaactcccgtgactcatcgaggagctccagctgttgggacaccaaggagcctgggagcacgcagaggcctgtgttcactctttggaacaagctgatggactgcgcatctctgagaatgccaaccagaggcggcagcccacccttcctgcctcctgccccactcagggttggcgtgtgatgagccattcatgtgttccaaactccatctgcctgttacccaaacacgcctctcctggcagggtagacccaggcctctaaccatctgacagagactcggcctggacaccatgcgatgcactctggcaccaaggctttatgtgcccatcactctcagagaccacgtttccctgactgtcatagagaatcatcatcgccactgaaaaccaggccctgttgccttttaagcatgtaccgctccctcagtcctgtgctgcagccccccaaatatatttttctgatatagaccttgtatatggctttaatgccgcaaaatatttatttttccttaaaaaaggtgtcaacttggaaataatggtttaaaaacaggataagcattaaggaaaaacactttcaatgtgtcttccatttgatgaatttgtttttctctctttatccccgcaaggtggagtttcatgtcctcggtgaaaccagacagtgtgaatctgttccagcccaaatctgcagcattagggatgagttctcagaagtgattctgaactgagcacgcactcatgtctgcatggggaactctggggagaagagccttccttttctttcccttgggcatttgcctttccttgtcgtcttactgaggcggaggcaggaggtctctgtcttccaggccctggccaggccatcctgccatcaggaaagatggaagagtaggcctccgtctagcagccctggctggaaatcccccctctagatcctgctgcaagactgtacaaactcacaggggccatgtccacccaggcacatcatcagaaccagggagcacagccttgccacctagaaggggcctcagcagccgtgcaactttctttccctatctccaatccagagagggatcctctaacattctctagcaacctcatctgcacccccaccaccttccttgtaagaaagaccacgtgtgactaaaatcccttcacgctgcatttacccaggttactattgtgcgcgcaaaatgttttcacagtgttctcagcctttgctcctccaaacagaaaacgtttcccctgcgttactgttacttccctatttttgagtcctggggtgactgtctcttaaatgtgccaagatgtgagcaagctttaaaacatgacagctcagtgttaaggagacagaaagcttcctctttctctgttctattgcaactacaaattctacagtcatgcctaagatcctttagctaacacccttttcaagaaatcatcagactcttggattgacttagaattcattcattcgttaagtgcttaccgagtccccgctctgtggcaagcactgttctatatcaacttctcatgagttcagccaattctaggtgcaccagccaaggaaacttcatgcctgccctctctgagctccatactctgaggtggtggtcttatcaagatgggatcgccttgtacatccctgtgtagccaagtggaaggccagccaaccaagaatgcatctcactgggcctatgggacatactgtgcctgcactgctcctccacgtgactgcatcaggttaaactggtcagagccctggatgaggagctggaaaacatgcatccagtccaagctctgccacttgggccaagtgtgctcttgaacagtcacttaatatatctgctttgatttgtcttttaaagaaaatatggaggcaggaataccagtgtcagtgtagcctgcttcttgagtgttggcacaagtgagataatgtatgaatcagtaaaatgctgggcaaagcaaagaagtagggctgcctgggagtggattcctttttatggtgagttaagacgacttcacaattgttagctgtgatgcctgcagtgtttgaggatggcattgccttcatcctgtgtcagctctgaagaagttggcaggagcaaagctaagcctcaagtgtaaatcccagcatcatggaacgcaaatggatgagcttttgttttaggatcttcttgctgattcctacccagaggacttccccagcctagagaccagaaacctgggcaatagttatatcttcagtggccctaggagttgttgtgtctccttggggaggagagaaccttctaaaacaggccagagacaggaggtactgggagggccatgggctcacctgcatctatgcccagataacctgggacagataacctctgtcccaatcacttgctttgcctggtctctcaaggagtctcttggtaccccaggcccacggccagctccatgctcatccctgtccccaccttccagtcttgatgaaaacccaccttctctttcatcccttggctgcttgataagacttaaaacaattccctgattttagggaaggccactgcgtgcacagatggtgagtttgtgcaggcaaggaatgtgccctccacatcacgtggcctccttgcccagcctgggtcatgggaagggagtgttgaattgaatcacgtctttcgttggtagattatgttcatcttcaatgtttctattaagtctaaaaagtggatacaaatggtgcctccaagttcttgtctaattgcttgtctactgcttgacaaaatccagaatggaataggccaaacaagttaaccagcaggacagaaactgctctaagcccattattccttgagatgaatagaacagtgagctgaacgcctgctctaatgaagccactaaaggggtttacaggaaggttaggagcccagatgggttttgagtccactgctgggaaacagattcttcacttcctgtggaccctggagaagccatcagattacattaacatggctccactgatgatggcctgagaattactattgtttgtgtttcatctgtgtccttgccaggtcttcccccacatccttacttcacaggatcaggggctgagaggagaccaatactctggcccaggcctggtcaagggatgctggttgttgctgatgcaaagtcacattgcctggtcctgagcttggcaatcaggcatccagagatggccaaaccaaatatccctttggccaggcactcaggcattccctgtaatgttgtgcacttaaagcatcttgggctgatagtctccaccgaatcacagaagaaaactcaatctgccgcatcactcaccagctggataagccatttactgtacacagtgtgtgccctcttatcaatacattggcacagaaccatacaccgtagaagctgctgtgatcactaaaggcaatgcccgtttagccctgagcacagtgcttggcatgtggtaggcaggtttgtgtcagctctaactgatggagtatggtggaggtgatgccatgcaact

SEQ ID NO: 505373 - DNA, 906 bp, Homo sapiens
agttcaggaaaagcctggtctccaagtaaagtatctgtatcatctcatttgtcggctttcgttatgaagaatgcaccacagtgttaaagcgaaatcatgctgagacttatttgtagctataacccgagtccagttctcatctacggcagatttgcatccagtgaaacgtcgagtacttgtggacattagaggagaaatgtccataggaatttaagagaactagcatggttgaccacaaatgttacccacaaatacctgatcacctgagagaaccattcttagaagccactgacaattctcatctgaggtccgatgccagcaagcttccttcctccttcatcagtgaagaaacgaggtgtacttcttttgggagacgcatataatatgaggcatccacttacgggtggaggaatgactgttgcgttttaaagatatagaaactatggagaaaactgctgaaaagggtatccctgacctttatgatgatgcaggctattttcgaggcgaaagaatgcattttactgggaagaaaaaagtctcattcctttgtcgtgaatatccgtggtcaggtcttttatggattatttggtgcacagatgattcgctgctatcaggtagaaaagctgtttctttatttcaacgttggtgggaatgggtgcgggtccgggggatggttctggatgggtcttaacatctagttttattggggactgttggtgggaacgagcggagtttgggtagatcaactgggttcaaagtgggcactcttgtgggggttgcaacaggggctggggattcccattcggaagaaatgtttggagggggaagttgaattataattaccagaattggggagtataacacacagagggaagcgaggggggtctttattataggagaaagtag

SEQ ID NO: 505374 - DNA, 4217 bp, Homo sapiens
gagctccagcctccaggcacccgggatccagcgccgccgctcataacacccgcgaccccgcagctaagcgcagctcccgacgcaatggacccggcgctggcagcccagatgagcgaggctgtggccgagaagatgctccagtaccggcgggacacagcaggctggaagatttgccgggaaggcgtaccgaggagaaggcattgtatatgggacactagaggaggtgtgggactgtgtgaagccagctgttggaggcctacgagtgaagtgggatgagaatgtgaccggttttgaaattatccaaagcatcactgacaccctgtgtgtaagcagaacctccactccctccgctgccatgaagctcatttctcccagagattttgtggacttggtgctagtcaagagatatgaggatgggaccatcagttccaacgccacccatgtggagcatccgttatgtcccccgaagccaggttttgtgagaggatttaaccatccttgtggttgcttctgtgaacctcttccaggggaacccaccaagaccaacctggtcacattcttccataccgacctcagcggttacctcccacagaacgtggtggactccttcttcccccgcagcatgacccggttttatgccaaccttcagaaagcagtgaagcaattccatgagtaatgctatcgttacttcttggcaaagaactcccgtgactcatcgaggagctccagctgttgggacaccaaggagcctgggagcacgcagaggcctgtgttcactctttggaacaagctgatggactgcgcatctctgagaatgccaaccagaggcggcagcccacccttcctgcctcctgccccactcagggttggcgtgtgatgagccattcatgtgttccaaactccatctgcctgttacccaaacacgcctctcctggcagggtagacccaggcctctaaccatctgacagagactcggcctggacaccatgcgatgcactctggcaccaaggctttatgtgcccatcactctcagagaccacgtttccctgactgtcatagagaatcatcatcgccactgaaaaccaggccctgttgccttttaagcatgtaccgctccctcagtcctgtgctgcagccccccaaatatatttttctgatatagaccttgtatatggctttaatgccgcaaaatatttatttttccttaaaaaaggtgtcaacttggaaataatggtttaaaaacaggataagcattaaggaaaaacactttcaatgtgtcttccatttgatgaatttgtttttctctctttatccccgcaaggtggagtttcatgtcctcggtgaaaccagacagtgtgaatctgttccagcccaaatctgcagcattagggatgagttctcagaagtgattctgaactgagcacgcactcatgtctgcatggggaactctggggagaagagccttccttttctttcccttgggcatttgcctttccttgtcgtcttactgaggcggaggcaggaggtctctgtcttccaggccctggccaggccatcctgccatcaggaaagatggaagagtaggcctccgtctagcagccctggctggaaatcccccctctagatcctgctgcaagactgtacaaactcacaggggccatgtccacccaggcacatcatcagaaccagggagcacagccttgccacctagaaggggcctcagcagccgtgcaactttctttccctatctccaatccagagagggatcctctaacattctctagcaacctcatctgcacccccaccaccttccttgtaagaaagaccacgtgtgactaaaatcccttcacgctgcatttacccaggttactattgtgcgcgcaaaatgttttcacagtgttctcagcctttgctcctccaaacagaaaacgtttcccctgcgttactgttacttccctatttttgagtcctggggtgactgtctcttaaatgtgccaagatgtgagcaagctttaaaacatgacagctcagtgttaaggagacagaaagcttcctctttctctgttctattgcaactacaaattctacagtcatgcctaagatcctttagctaacacccttttcaagaaatcatcagactcttggattgacttagaattcattcattcgttaagtgcttaccgagtccccgctctgtggcaagcactgttctatatcaacttctcatgagttcagccaattctaggtgcaccagccaaggaaacttcatgcctgccctctctgagctccatactctgaggtggtggtcttatcaagatgggatcgccttgtacatccctgtgtagccaagtggaaggccagccaaccaagaatgcatctcactgggcctatgggacatactgtgcctgcactgctcctccacgtgactgcatcaggttaaactggtcagagccctggatgaggagctggaaaacatgcatccagtccaagctctgccacttgggccaagtgtgctcttgaacagtcacttaatatatctgctttgatttgtcttttaaagaaaatatggaggcaggaataccagtgtcagtgtagcctgcttcttgagtgttggcacaagtgagataatgtatgaatcagtaaaatgctgggcaaagcaaagaagtagggctgcctgggagtggattcctttttatggtgagttaagacgacttcacaattgttagctgtgatgcctgcagtgtttgaggatggcattgccttcatcctgtgtcagctctgaagaagttggcaggagcaaagctaagcctcaagtgtaaatcccagcatcatggaacgcaaatggatgagcttttgttttaggatcttcttgctgattcctacccagaggacttccccagcctagagaccagaaacctgggcaatagttatatcttcagtggccctaggagttgttgtgtctccttggggaggagagaaccttctaaaacaggccagagacaggaggtactgggagggccatgggctcacctgcatctatgcccagataacctgggacagataacctctgtcccaatcacttgctttgcctggtctctcaaggagtctcttggtaccccaggcccacggccagctccatgctcatccctgtccccaccttccagtcttgatgaaaacccaccttctctttcatcccttggctgcttgataagacttaaaacaattccctgattttagggaaggccactgcgtgcacagatggtgagtttgtgcaggcaaggaatgtgccctccacatcacgtggcctccttgcccagcctgggtcatgggaagggagtgttgaattgaatcacgtctttcgttggtagattatgttcatcttcaatgtttctattaagtctaaaaagtggatacaaatggtgcctccaagttcttgtctaattgcttgtctactgcttgacaaaatccagaatggaataggccaaacaagttaaccagcaggacagaaactgctctaagcccattattccttgagatgaatagaacagtgagctgaacgcctgctctaatgaagccactaaaggggtttacaggaaggttaggagcccagatgggttttgagtccactgctgggaaacagattcttcacttcctgtggaccctggagaagccatcagattacattaacatggctccactgatgatggcctgagaattactattgtttgtgtttcatctgtgtccttgccaggtcttcccccacatccttacttcacaggatcaggggctgagaggagaccaatactctggcccaggcctggtcaagggatgctggttgttgctgatgcaaagtcacattgcctggtcctgagcttggcaatcaggcatccagagatggccaaaccaaatatccctttggccaggcactcaggcattccctgtaatgttgtgcacttaaagcatcttgggctgatagtctccaccgaatcacagaagaaaactcaatctgccgcatcactcaccagctggataagccatttactgtacacagtgtgtgcccattccaatctctgcccacattgcagattcatgagaaaaataaatgtcactgtttgggggtgaatcatgacacagttacagtacttgaaacattttgcgaagccaggcatgaatgtcatatgaaattctaataaatccattttatttgtggcccccca

SEQ ID NO: 505375 - DNA, 174 bp, Homo sapiens
acattatccgtcagatgccacaatatgttctattcgtagaaaactatgtagttttgtctttgttggatagcttttaattacatttcagagaggtgtaattttgggtagatgctcattacatttttgaaaggtttatgattccaaaataaagatttatatgactgttgtaactgg

SEQ ID NO: 505376 - DNA, 479 bp, Homo sapiens
aaacaggtcatcagtataatgtacttgtatggttttgagtgaaatagcattgtcttgacttctaatgtgattgtgctgtcttccaagagattgtttgtaatgatttcatttctttgcctttgctgaggagtgttttactgctgattatgtgatcagttttcaaatatatgccatgcggccataagaagaatgtacattctgtttcttggggatggagagttaggtagatgtctatcaggtccatttgatccagtgctgagtttgggtcctgaatatctgtgttaattttctgtcttgattatctgtctaatattgccagtgggtgttagactcccacacaataatagtcggagactttatgtctctttgaaggtctctaagaacttgctttataaatctggatgctcttgtgtcacgtgcatttatatttaggatagttagatcttcttgttgaattgaacccccaccattatctaatt

SEQ ID NO: 505377 - DNA, 4268 bp, Homo sapiens
gagctccagcctccaggcacccgggatccagcgccgccgctcataacacccgcgaccccgcagctaagcgcagctcccgacgcaatggacccggcgctggcagcccagatgagcgaggctgtggccgagaagatgctccagtaccggcgggacacagcaggctggaagatttgccgggaaggcaatggagtttcagtttcctggaggccatctgtggagtttccagggaacctgtaccgaggagaaggcattgtatatgggacactagaggaggtgtgggactgtgtgaagccagctgttggaggcctacgagtgaagtgggatgagaatgtgaccggttttgaaattatccaaagcatcactgacaccctgtgtgtaagcagaacctccactccctccgctgccatgaagctcatttctcccagagattttgtggacttggtgctagtcaagagatatgaggatgggaccatcagttccaacgccacccatgtggagcatccgttatgtcccccgaagccaggttttgtgagaggatttaaccatccttgtggttgcttctgtgaacctcttccaggggaacccaccaagaccaacctggtcacattcttccataccgacctcagcggttacctcccacagaacgtggtggactccttcttcccccgcagcatgacccggttttatgccaaccttcagaaagcagtgaagcaattccatgagtaatgctatcgttacttcttggcaaagaactcccgtgactcatcgaggagctccagctgttgggacaccaaggagcctgggagcacgcagaggcctgtgttcactctttggaacaagctgatggactgcgcatctctgagaatgccaaccagaggcggcagcccacccttcctgcctcctgccccactcagggttggcgtgtgatgagccattcatgtgttccaaactccatctgcctgttacccaaacacgcctctcctggcagggtagacccaggcctctaaccatctgacagagactcggcctggacaccatgcgatgcactctggcaccaaggctttatgtgcccatcactctcagagaccacgtttccctgactgtcatagagaatcatcatcgccactgaaaaccaggccctgttgccttttaagcatgtaccgctccctcagtcctgtgctgcagccccccaaatatatttttctgatatagaccttgtatatggctttaatgccgcaaaatatttatttttccttaaaaaaggtgtcaacttggaaataatggtttaaaaacaggataagcattaaggaaaaacactttcaatgtgtcttccatttgatgaatttgtttttctctctttatccccgcaaggtggagtttcatgtcctcggtgaaaccagacagtgtgaatctgttccagcccaaatctgcagcattagggatgagttctcagaagtgattctgaactgagcacgcactcatgtctgcatggggaactctggggagaagagccttccttttctttcccttgggcatttgcctttccttgtcgtcttactgaggcggaggcaggaggtctctgtcttccaggccctggccaggccatcctgccatcaggaaagatggaagagtaggcctccgtctagcagccctggctggaaatcccccctctagatcctgctgcaagactgtacaaactcacaggggccatgtccacccaggcacatcatcagaaccagggagcacagccttgccacctagaaggggcctcagcagccgtgcaactttctttccctatctccaatccagagagggatcctctaacattctctagcaacctcatctgcacccccaccaccttccttgtaagaaagaccacgtgtgactaaaatcccttcacgctgcatttacccaggttactattgtgcgcgcaaaatgttttcacagtgttctcagcctttgctcctccaaacagaaaacgtttcccctgcgttactgttacttccctatttttgagtcctggggtgactgtctcttaaatgtgccaagatgtgagcaagctttaaaacatgacagctcagtgttaaggagacagaaagcttcctctttctctgttctattgcaactacaaattctacagtcatgcctaagatcctttagctaacacccttttcaagaaatcatcagactcttggattgacttagaattcattcattcgttaagtgcttaccgagtccccgctctgtggcaagcactgttctatatcaacttctcatgagttcagccaattctaggtgcaccagccaaggaaacttcatgcctgccctctctgagctccatactctgaggtggtggtcttatcaagatgggatcgccttgtacatccctgtgtagccaagtggaaggccagccaaccaagaatgcatctcactgggcctatgggacatactgtgcctgcactgctcctccacgtgactgcatcaggttaaactggtcagagccctggatgaggagctggaaaacatgcatccagtccaagctctgccacttgggccaagtgtgctcttgaacagtcacttaatatatctgctttgatttgtcttttaaagaaaatatggaggcaggaataccagtgtcagtgtagcctgcttcttgagtgttggcacaagtgagataatgtatgaatcagtaaaatgctgggcaaagcaaagaagtagggctgcctgggagtggattcctttttatggtgagttaagacgacttcacaattgttagctgtgatgcctgcagtgtttgaggatggcattgccttcatcctgtgtcagctctgaagaagttggcaggagcaaagctaagcctcaagtgtaaatcccagcatcatggaacgcaaatggatgagcttttgttttaggatcttcttgctgattcctacccagaggacttccccagcctagagaccagaaacctgggcaatagttatatcttcagtggccctaggagttgttgtgtctccttggggaggagagaaccttctaaaacaggccagagacaggaggtactgggagggccatgggctcacctgcatctatgcccagataacctgggacagataacctctgtcccaatcacttgctttgcctggtctctcaaggagtctcttggtaccccaggcccacggccagctccatgctcatccctgtccccaccttccagtcttgatgaaaacccaccttctctttcatcccttggctgcttgataagacttaaaacaattccctgattttagggaaggccactgcgtgcacagatggtgagtttgtgcaggcaaggaatgtgccctccacatcacgtggcctccttgcccagcctgggtcatgggaagggagtgttgaattgaatcacgtctttcgttggtagattatgttcatcttcaatgtttctattaagtctaaaaagtggatacaaatggtgcctccaagttcttgtctaattgcttgtctactgcttgacaaaatccagaatggaataggccaaacaagttaaccagcaggacagaaactgctctaagcccattattccttgagatgaatagaacagtgagctgaacgcctgctctaatgaagccactaaaggggtttacaggaaggttaggagcccagatgggttttgagtccactgctgggaaacagattcttcacttcctgtggaccctggagaagccatcagattacattaacatggctccactgatgatggcctgagaattactattgtttgtgtttcatctgtgtccttgccaggtcttcccccacatccttacttcacaggatcaggggctgagaggagaccaatactctggcccaggcctggtcaagggatgctggttgttgctgatgcaaagtcacattgcctggtcctgagcttggcaatcaggcatccagagatggccaaaccaaatatccctttggccaggcactcaggcattccctgtaatgttgtgcacttaaagcatcttgggctgatagtctccaccgaatcacagaagaaaactcaatctgccgcatcactcaccagctggataagccatttactgtacacagtgtgtgccctcttatcaatacattggcacagaaccatacaccgtagaagctgctgtgatcactaaaggcaatgcccgtttagccctgagcacagtgcttggcatgtggtaggcaggtttgtgtcagctctaactgatggagtatggtggaggtgatgccatgcaact

SEQ ID NO: 505378 - DNA, 246 bp, Homo sapiens
acgattggacctcgtaaagctattgacataaacaaatatgtatgaaataaactacaagaaaaatggcacctatagacttgttctatcaaagtggttgccacagatgttcaattatgttaaaaatgaaaatttgcagtatcttgaaaactacaatgaaggagaagcacaaaaaacagggtgtgcctgtgattttcattgacaggtacaactcttcttggattttttgggagaggggttttcgccctg

SEQ ID NO: 505379 - DNA, 799 bp, Homo sapiens
caagttcccccgagacatgaaggccatgtccccagaagaccaggagtatctcgagaagcgatcggtggccacctgtgtggtacctgaaggaggaagatcattaccagcgggcacggaaggagcgtgagaaggaggactacctccatcctcaagcggcagcccaaacggcgttggctcttctggaacagtccatccctccccgtcttcctcggcagaactccgtcgcgtcatccccatcttcctcctcggctgtggtctgagatgcatgcctaccgctcttctgaccctgctgcgtgttgtccccatccgggcttcacccctctgtctcgttccgcgatcgagcccatccaccttaccaagggaccagggggaccacgtaatcaggatccagagggtggagctcttcttatccagccaccgtggtctcagctcagagaggagctgagtccctgtggagacagaatcgggaagccaccgtgcagaggtccccagagccaaagctaggacgggagacaactgcttggaggagcgaagagccctggcattttatctctgggtttgagagccctagagtcaacagggaaagcctcccaggctccagggcttctctgtgtgtctgggtagctgactctggacaggaggcagccccactcccagcaagcagaagtgatcctcgagggtcctggcccctgtttggcagtatctttccatcggacggacttgagtgtagcaatagtttagagggaattccacaggaagcctagtccaaccctcatggagaagtcaggttgaacatggg

SEQ ID NO: 505380 - DNA, 1164 bp, Homo sapiens
ggtcgcccgcgcatggactaccgcggcactcccggctgcacgctctgcttggcctcgccatgccggtggacctcagcaagtggtccggtgcccttgagccgtgcgaagaagatggacgagcagcctgcagtgacccgcatgacatgtcaccatacagccagggtgcgtgcgggtggacgagactgggcaaagtgctgagcgcccacccaggttcacggaatagacccaccagcatattcgtgggcatggtccttgcatttcagtggcacaagcgtctacacacttgggtcctgaccaggagcccgggcattgcgtcccaagccgatggaaacgggactcccaaaaatacatgaagcaaatggcaagtcacattgtccttgggtgggtccaacgatgaacaggggggcacagtgaccattcaatgacaaagtgggacaacaaggatcacttcattcgcagcaatatagttgttagagagcatacgtgtgagcccttcccacaaagacggggcaacccagtgggacattccaaccccgggataaaatggttatagggcacatgagatatgtgccagacagcaacgacgacacaaggggcactgcgttacacaagattggttgcacggacgggctccatgttccgcgtccagcacaagaccccacacgtccttgggaacgcgaccgcaaccccggttgtggcgtacaccattttcaaccaggggactgtgaccgtgtcccagttatcgccagcataccacaactgattaattgagggccttccaacggagggcccccagaggatagagccatgggaccaacggaattggatgagacacaaagggtgccaggaaggatgaggcaaatggacccttactagttggcacgcggaaaacaccattggattacccgacaaggcccatggactctgtgctctggttggggcgaaaacagcgcttaaagcggggaaggaggatattaaaggtccctttcagggtgagtgggacacacacgttggccagaaacaatgggatgcccccgtaggatggaaggggtcacaccgcgacagtggactccgacctgtgtgtttgcgcccccagcagggagtattacaagcgcatggatattggcgccatatgtgatcatatgcacaatacgcgaaatttat

SEQ ID NO: 505381 - DNA, 392 bp, Homo sapiens
ctgagagggtgtcactggaagggattggcatgtgaagtggactgagcggtgcaaaatcctctactcgctgtggcaaggcacactccaatcacctaggggaccaggtagtaacagacaagcagaaaggagtaaaatgggctctctctctcgcactcactcttggaaagttgacctggccagggagatcagatctccaggttgtatgctcttgggtctctcgagtgtaggaccagtcaaccctttatcctcccacctcctcctctggcccctcaggcctttggccttggtctgagacaggatactgtcttccttggctctccagcttggaggtggcctctcatggatcttatcagcctccataactatgcgagccatttccactaataaatccg

SEQ ID NO: 505382 - DNA, 3945 bp, Homo sapiens
  misc_feature (54)..(54): n is a, c, g, or t
tggggagtacgggacttgcttccgtccctggaggcacgggagaggctgtggaantgcatccccgacaggatgggtttccatcctgaaaatcagcaggtccagagaggactcctgggtggagggcacagcaagggatgagacgcgatcactgtatcatggccatttccactgggctgggctctgcttacctgcctggcgctcgtccccagcacctctgctgcagatcataacacagctctgctgttgccttcacagggaacccaccaagaccaacctggtcacattcttccataccgacctcagcggttacctcccacagaacgtggtggactccttcttcccccgcagcatgacccggttttatgccaaccttcagaaagcagtgaagcaattccatgagtaatgctatcgttacttcttggcaaagaactcccgtgactcatcgaggagctccagctgttgggacaccaaggagcctgggagcacgcagaggcctgtgttcactctttggaacaagctgatggactgcgcatctctgagaatgccaaccagaggcggcagcccacccttcctgcctcctgccccactcagggttggcgtgtgatgagccattcatgtgttccaaactccatctgcctgttacccaaacacgcctctcctggcagggtagacccaggcctctaaccatctgacagagactcggcctggacaccatgcgatgcactctggcaccaaggctttatgtgcccatcactctcagagaccacgtttccctgactgtcatagagaatcatcatcgccactgaaaaccaggccctgttgccttttaagcatgtaccgctccctcagtcctgtgctgcagccccccaaatatatttttctgatatagaccttgtatatggctttaatgccgcaaaatatttatttttccttaaaaaaggtgtcaacttggaaataatggtttaaaaacaggataagcattaaggaaaaacactttcaatgtgtcttccatttgatgaatttgtttttctctctttatccccgcaaggtggagtttcatgtcctcggtgaaaccagacagtgtgaatctgttccagcccaaatctgcagcattagggatgagttctcagaagtgattctgaactgagcacgcactcatgtctgcatggggaactctggggagaagagccttccttttctttcccttgggcatttgcctttccttgtcgtcttactgaggcggaggcaggaggtctctgtcttccaggccctggccaggccatcctgccatcaggaaagatggaagagtaggcctccgtctagcagccctggctggaaatcccccctctagatcctgctgcaagactgtacaaactcacaggggccatgtccacccaggcacatcatcagaaccagggagcacagccttgccacctagaaggggcctcagcagccgtgcaactttctttccctatctccaatccagagagggatcctctaacattctctagcaacctcatctgcacccccaccaccttccttgtaagaaagaccacgtgtgactaaaatcccttcacgctgcatttacccaggttactattgtgcgcgcaaaatgttttcacagtgttctcagcctttgctcctccaaacagaaaacgtttcccctgcgttactgttacttccctatttttgagtcctggggtgactgtctcttaaatgtgccaagatgtgagcaagctttaaaacatgacagctcagtgttaaggagacagaaagcttcctctttctctgttctattgcaactacaaattctacagtcatgcctaagatcctttagctaacacccttttcaagaaatcatcagactcttggattgacttagaattcattcattcgttaagtgcttaccgagtccccgctctgtggcaagcactgttctatatcaacttctcatgagttcagccaattctaggtgcaccagccaaggaaacttcatgcctgccctctctgagctccatactctgaggtggtggtcttatcaagatgggatcgccttgtacatccctgtgtagccaagtggaaggccagccaaccaagaatgcatctcactgggcctatgggacatactgtgcctgcactgctcctccacgtgactgcatcaggttaaactggtcagagccctggatgaggagctggaaaacatgcatccagtccaagctctgccacttgggccaagtgtgctcttgaacagtcacttaatatatctgctttgatttgtcttttaaagaaaatatggaggcaggaataccagtgtcagtgtagcctgcttcttgagtgttggcacaagtgagataatgtatgaatcagtaaaatgctgggcaaagcaaagaagtagggctgcctgggagtggattcctttttatggtgagttaagacgacttcacaattgttagctgtgatgcctgcagtgtttgaggatggcattgccttcatcctgtgtcagctctgaagaagttggcaggagcaaagctaagcctcaagtgtaaatcccagcatcatggaacgcaaatggatgagcttttgttttaggatcttcttgctgattcctacccagaggacttccccagcctagagaccagaaacctgggcaatagttatatcttcagtggccctaggagttgttgtgtctccttggggaggagagaaccttctaaaacaggccagagacaggaggtactgggagggccatgggctcacctgcatctatgcccagataacctgggacagataacctctgtcccaatcacttgctttgcctggtctctcaaggagtctcttggtaccccaggcccacggccagctccatgctcatccctgtccccaccttccagtcttgatgaaaacccaccttctctttcatcccttggctgcttgataagacttaaaacaattccctgattttagggaaggccactgcgtgcacagatggtgagtttgtgcaggcaaggaatgtgccctccacatcacgtggcctccttgcccagcctgggtcatgggaagggagtgttgaattgaatcacgtctttcgttggtagattatgttcatcttcaatgtttctattaagtctaaaaagtggatacaaatggtgcctccaagttcttgtctaattgcttgtctactgcttgacaaaatccagaatggaataggccaaacaagttaaccagcaggacagaaactgctctaagcccattattccttgagatgaatagaacagtgagctgaacgcctgctctaatgaagccactaaaggggtttacaggaaggttaggagcccagatgggttttgagtccactgctgggaaacagattcttcacttcctgtggaccctggagaagccatcagattacattaacatggctccactgatgatggcctgagaattactattgtttgtgtttcatctgtgtccttgccaggtcttcccccacatccttacttcacaggatcaggggctgagaggagaccaatactctggcccaggcctggtcaagggatgctggttgttgctgatgcaaagtcacattgcctggtcctgagcttggcaatcaggcatccagagatggccaaaccaaatatccctttggccaggcactcaggcattccctgtaatgttgtgcacttaaagcatcttgggctgatagtctccaccgaatcacagaagaaaactcaatctgccgcatcactcaccagctggataagccatttactgtacacagtgtgtgccctcttatcaatacattggcacagaaccatacaccgtagaagctgctgtgatcactaaaggcaatgcccgtttagccctgagcacagtgcttggcatgtggtaggcaggtttgtgtcagctctaactgatggagtatggtggaggtgatgccatgcaact

SEQ ID NO: 505383 - DNA, 119 bp, Homo sapiens
ctagaggatcccgtaacgctgcaaattattccatagcacggataccaaatctgtggtttgtccgatatgtgcctcgatgccctggggagaccccaactaccgcagcgttccacagcgtt

SEQ ID NO: 505384 - DNA, 104 bp, Homo sapiens
ctcccacctgggagatgggttgtttctggtgtgcactctcaccttgggctaatagaagcatgatttgaaatcaagtgcaagaggccgcattttcacctctgtga

SEQ ID NO: 505385 - DNA, 649 bp, Homo sapiens
cggagctccgggcactcagacatcatgagttggtccttgcacccccggaatttcaattctctcacttctcatgctcttttcattgtcgtctcgttccaaccatggtgtcagccatatgttcgctacccagcagaccaacgtgctgccatcgtatcagcatgacacagcattccggtcagcttatctagtccaactcacctggtggccattgcagcatttccctgatctcacttcatccacacacgcaaaagtcagcaacaagcgcatcttaccacgtacttcttggcaacgaccatcttcacatccaagtttgacaccaccacaacaccatcaggaacgtcaacccagccttgcatcacaccaagccaaatccgacactccactttgcatacatcccttgatggacattcccattccaaaacacagcccaacaatcactcggcatccagccaccgcgtgccgttacttctgagcacacgactcccccaaggaacacaccatggtttcagccaagcaccattcattgcacacatcatgcccaacccatcggcgattgcttcacacccaccattgactcccaccggtcatttccgacatcattttggcgagggacacactcataatccatttccgaacattcaaattcaaa

SEQ ID NO: 505386 - DNA, 275 bp, Homo sapiens
  misc_feature (14)..(14): n is a, c, g, or t
  misc_feature (127)..(127): n is a, c, g, or t
  misc_feature (145)..(145): n is a, c, g, or t
gctgatgttacaanatattgtaattcaatcctttttacaacctttactactgtccgaccatatcttgttttaattatcattagaatttctcctaaatggtctctctgctcctctctttcttttctantgtctactctttacatgncatctagactgaccatttaaaaatataaatcatatcatgttattcttctattcaaaaccctataaagactcctcatttcactcagagtaaaagtccttacaatggtcaatgggcccacattaatgttttc

SEQ ID NO: 505387 - DNA, 333 bp, Homo sapiens
acattctccgttctaaggaactgctgatcttctttctgtctctgtagattagtttgcattttctagaattttatataaatggagccatataatatgtactctttttttggtctggattctttccatcaacataattatcttgagatttatccattttttgcatgtttcaatagtttatgcctttttattgctcaacagtattccattgtatgtatataccacagactgtttatccatttgcctgtagatggatatttgggttgtttctagttttgttgttgttgttgttgttgttgttgttgttaccaataaagctgctgtgaacatttggca

SEQ ID NO: 505388 - DNA, 969 bp, Homo sapiens
ttgtgtgtatggtattattagcgcggtgctgttctcgctactcttttcccgccaatttgcgtttttcactgtgtttatctgttaccttcttgtggctatcttcctgccgctcgtgggccgaccaccgctggtcgatcatggttgtgaaagcgcaaaacgtccggggtggtttcccgcaggacacgcgcagtttgactttcgcgggggcgccaaccgtggacggtactccttggccgccctttgtcccggtgtccgcctccggcctgctgacttccgtggtcccaaccccgggctgtggggcggcccgtgatgtcttgcctcgttacattgggccccctgccgcagttctcgtttcagagtgagtccgacggtcgtcttgccacgcgggagcaggccagttcacttctttgtttaaggtactgcggggcaaacgcaagtttgatggtcacgagctagttcccccaggcgtcttccaaaccaacatgtttggtcccacggcgattatcgtcggccgcggatagagtagtaccccctgtgggactcccctctgggcacgaactgtgtcaattttccctcaaccaccggtgttgaaaatcttcttgatgggggagacaacatagttgtgtttgccgccccccacaaggtatcctttaaccagacgggcagctattttggatgcgcttatgttgcaataaagcaaatttgggatatcccataaggggtgagaggcgccggagcaagtgctatctttatgggggccagccacccgcgcactcagtggtttttttgtgcagcccccacctttggagcagggttcccctcacgttataataagaattttcttctaagaatattcaactgagttttcgaataaggggttggcactacacatgagaggaggtgcccatttccatgaagtttctggagtgcccttttaaacaaaaaggattgacattcgaccacaaaaca

SEQ ID NO: 505389 - DNA, 436 bp, Homo sapiens
ctttcccacccttaattcgggcagtcacttggatagataatcctattgaagtatatgttaataacagtgcatgggtaccaggacccacagatgaccgtgccctgcccaacctgaagaagaaggaatgatgataaacatttccattgggtatcattatccttctatttgcctgggaaaaacaccaggatgcttaatgcctacaatccaaaattggttggtcgaagaacctactgtcagtgccaccagtaaatttacttatcatatgataagtggaatgtcacttgggtcacaaatgaataatttacagcattcttcctatcaaagatcattaaaatttaggcctaactggacaccatgacagaaggaacttaacgacgaatcaaaagacacacaactcctagactgggaagacactacggctgaacctgcaatacac

SEQ ID NO: 505390 - DNA, 750 bp, Homo sapiens
  misc_feature (43)..(43): n is a, c, g, or t
  misc_feature (70)..(70): n is a, c, g, or t
  misc_feature (73)..(73): n is a, c, g, or t
  misc_feature (77)..(77): n is a, c, g, or t
  misc_feature (80)..(80): n is a, c, g, or t
  misc_feature (83)..(84): n is a, c, g, or t
  misc_feature (115)..(115): n is a, c, g, or t
  misc_feature (125)..(126): n is a, c, g, or t
  misc_feature (128)..(132): n is a, c, g, or t
  misc_feature (134)..(138): n is a, c, g, or t
  misc_feature (169)..(169): n is a, c, g, or t
  misc_feature (173)..(173): n is a, c, g, or t
  misc_feature (177)..(177): n is a, c, g, or t
  misc_feature (180)..(180): n is a, c, g, or t
  misc_feature (190)..(190): n is a, c, g, or t
  misc_feature (202)..(203): n is a, c, g, or t
  misc_feature (210)..(210): n is a, c, g, or t
  misc_feature (219)..(223): n is a, c, g, or t
  misc_feature (227)..(227): n is a, c, g, or t
  misc_feature (388)..(388): n is a, c, g, or t
  misc_feature (414)..(414): n is a, c, g, or t
  misc_feature (416)..(416): n is a, c, g, or t
  misc_feature (669)..(669): n is a, c, g, or t
  misc_feature (676)..(676): n is a, c, g, or t
  misc_feature (688)..(688): n is a, c, g, or t
  misc_feature (727)..(727): n is a, c, g, or t
aaaaaaaaaaaaaaaaaaaaataaaaaaaaaaaaaaaagaggngaaaaaaaaaaaaaaaaaaaaaaaagnagnatgnggnaannaggtcagcatggggacttaggagctatcagnaaggagtaannannnnntnnnnngggacacgggatggggtgaaaaaaaaggtantgtntttnaanaggatttttntttttatttctnnaccccancatattttnnnnntggnaaggaagggggctcatataaagcaggagaccctgagccccgacacaggtggcgtgggggaggacacgcagaatgacgaggataaaaccggctcttaggaaccgtggcttctgtcctgaggtctcagggcacacgcgcgaacacatatacaacacaagatgnttctggcatgaggggcagggtcccananaccccaccctcattcaagctaaaaactgggaggggctgagcaggggctgggaccaagacccatgttttaccagtggggcgagtttttttggtttttctctccaaaagggaaatttaaaaatctacaacaaatcacaccaaattcattaaaagtgataaaaacccagcctccccctcctcacttgagcttcagaccgggccagaaaagctcaacgatgaagaaagaggaacatgcccaggttcaggtctccccncccaaanacaagtcccggngtgggaagcttggagctgggatggcatgggcagccccanccgcagcgtctgttgactgccaa

SEQ ID NO: 505391 - DNA, 126 bp, Homo sapiens
cccccccccccccccctttttttttaataaaagggcccttgcctgtgttgcccccgtccccccccccgttaggtggttttccaatttttttcccttggcccccccctaaaaagacccctttgttta

SEQ ID NO: 505392 - DNA, 562 bp, Homo sapiens
taaacacgcagcagtatgaaaccggaggggatgacgatgtctcacacccagagaactcttagtgaacatagcatcatgagcaggccatctgtcaactctacaatgggaacagcaggcgcctctgagggagataggcacgtagctaaatgatggacaatattaaacaagatagcttagaagattcatatttattccaaatgggaggctgaatctctcagatgtcgattttgacacattggcactattttagtttctgatttattgccttggccgtaagtccaaaggcaacaataaagtgtactttcattaataccaccatggactttcgagtattaatatgacaagaaaagacaactattcatttttttgaaggggactggacacacaaacttcaggagggaagaatcccctctcccattagaatccctccatcttgatacaatggttgctttataggtcagattttggacttggatcgtctgttataatattaatagtacacagcatgtaagattttctgcgtccatttgaaattcctaataccaaccatcttttaatttat

SEQ ID NO: 505393 - DNA, 417 bp, Homo sapiens
atgtcttaaaacatttaatttattcatttagttatacatacatactgcaaatcacatgttctctaaaataatatattaatttagaaaataccccatttttgccaccctccctttcacgaaatcattttactctgactcctcaccgtcttcaccaacatgggaaccctgtttgagtcatcagacagtgtcaagacacacccagtcacttccatccgagctctgcacgggcgctcagtgacgatccctttatgaggctctattagaaaggggtaccagccataagaccactttgcagaaattaggacgattctcttgtcgtttttaatctggcctggacgtccattttacccccttaagtcatactttttaaaacacccttaaacgtcttttttttaaagcacccaaaatgtcatgggg

SEQ ID NO: 505394 - DNA, 550 bp, Homo sapiens
tggaactgcatcaacgtgtactacaatgatgtgccacctgtgctggcaagtacgtgccccgcgcctgtgctcgtgtgatctggagcccggcaccatggactcctgtgctgctctgtgtgtgcccttctgggcatgatcttcctgtgcctgtgacagacttctgtatttctgtgtcatgagtgtgttgcttggtgaacaacttgtggccaatgtgtgtgcactacacagaatgtgctgcggagctgtgtgtgactctggtgctggatgtatgtgagaaatgtgatgtgctgagatgcttgtgacttgcctgcatgggtttccatgcttgagccaactacgcctgtgtgttggtgtgtgtgacttgggtcttgggatgggtaccctcctcatcagcaatgatcctgggaggagtacccagacatggatcatgaacacgtttagtgtggtgccttcgcccaaatgtgtcagacacagtgtgtggagccctacaatgccacctctcagtccaccagctcgtaaaaacacagacgagactactgattgataacgg

SEQ ID NO: 505395 - DNA, 83 bp, Homo sapiens
tttttttttttatattacatcaaaaaaagttttaatggtcccaaatatatatactcaacaactaagcatacactcaggggagg

SEQ ID NO: 505396 - DNA, 340 bp, Homo sapiens
ttccataccctttgagaggcatcactactccttcgcactcactggtgtttgctattcaagcaaattattaatgtggctgatcttattttgaggggtttattgctgatcttcacagtttaaaaacatcacggtataatatggaatgttttagttttgtgttatccaagtccctcctgatctgcttatatgaagctctctttgaatttctgccttctgcttttattcccaaggaaggaactaactgaacacacttttcccctagtcttttttaattcctttttatgtgaaggagatactatcttcttcctgtatggagaaagcatcccttttcatagccctt

SEQ ID NO: 505397 - DNA, 218 bp, Homo sapiens
gacgtccacgagacgcagctccacgctcaccgcggccttggcggcggtagggcgaaggaggcccacgtcgtcgtcctggcggcggaaagcgatcttcgagatgcggcccacgatcacgaggctcacgccccatttctttccgttctcgctcacgcgcgccacgtcgagcttgtcggagtcgaggtagaaatcctgggagcgaagcggaacttcctttt

SEQ ID NO: 505398 - DNA, 145 bp, Homo sapiens
gatgtggagatggagtgtcagcatgttggtcaggctggtctcggaactccgtgacctcagtgtgatccacccgacctctggcctcccaagagtacttgggattacatggcgtagagccacgtgcactcggcagccctcccagggt

SEQ ID NO: 505399 - DNA, 1276 bp, Homo sapiens
caggattaggcacgagcaaaacatactcctacattactacctagagctccttacgactaacacattatgcacgataagggtatagagcccatacgactagttgcacaccttgtactacgagtcagtatatacgatcaccagcaacaggatgacaagtgatgacaagtaatatagtgaggcacaaatgacaataacagtgataagctcacgggtacttctgcgcacctttactatacgcctcacagtgactatagcactgcacctctgcaactcgtcaggcacacgtcactacctcccatgcccacagcgccagccagggggggacacagcctaacacgcactcgctcgcgaatcacaccccaggcaattcatggcgacacccatcaactgcatacatacgcgtacacaccatccagccccccaagcgcggatccatcgagtcgctcatccgacaccacatagacaccgtggactgtggcattgtactcacggcagcgtaaggcagtgaccgaacacacagccctaacctgcgcacagcgacctgaggtgaaataaggactagcgcttagctaccaaagcgtcatagtacattgctctgacagatcacaaagcgggagcagcgactctctggaacacgaacaggcaagcgcacctgcctacagactccgagcagtatgggaacagaacttggaagcactggtaccacctaccgaaagcagagtatacacatcaaaacctccctatagtagacaatgttcgcagtaagctactgcacaccataatgcgcttcaccagcgagatagctcagatcaggttatgaagccatagccgtcagagtagtcgtacgtgcacagtaaacacatgccgatgcgaagtcacacagtcactggcaaaggcagacttcgaagaccgtctgagaaattccaagcaaccttgagagatgcagtacagtcacacagggtcttcacattgggagcgagcgtcacacagcgcaaactatcgcagcaagaagaagaacacaccctaacacaaagacaccatacaactatagtcaaaatctaagaattatagagatatcatcctctgtcattagccttgagtcacacatagaaaccactgatgtaaccatgaaactgtcacgtagtgtatcacataaacggaggcatgcaaacacgacctcaagagacaccataaaaaggatgtctaataggaaaggtagcagaaacaaacagacagcaggagcaactagaccaatacggatacagctagtcatctc

SEQ ID NO: 505400 - DNA, 173 bp, Homo sapiens
  misc_feature (5)..(5): n is a, c, g, or t
gtgtngcaataggattatccagtccaaatccaagttgattatttctctaccaccaaactttttttgtggttttttttcttggctctgtctcctaggctgggagtgcagtcgccatgactcatggttcattggcagcctcaaccttcgtgaggcctcaaggtgactcttcccat

SEQ ID NO: 505401 - DNA, 125 bp, Homo sapiens
  misc_feature (80)..(80): n is a, c, g, or t
  misc_feature (100)..(100): n is a, c, g, or t
ctgctgctggtgtccctgttctgtgccagagcgtggccccttgccattgtccggcgggctgccgatgcaggtgaccttcnagactgttgaccggccgcgnctgtccactacatcatacctttctt

SEQ ID NO: 505402 - DNA, 329 bp, Homo sapiens
  misc_feature (173)..(173): n is a, c, g, or t
  misc_feature (195)..(195): n is a, c, g, or t
ggcccggcaataaattgaagaagtgcaatgcccccttttgggggaaagcctttagaaatgatataattattaaagatattaaatagacaaaaaataattttcctaataatgatgataataaaagaatcctctgaagtgagtattagaacttctgactacttctaactattggncctacccagccactgatgaacnccaatcatatagtctcaaactgctcacttggtgtttctttgcctccatttgcctttccgtgaaatgggaatttaaaacaaaaattaaaaagcccacgactgttgtgaggacaaataaaatggtacatggctgaa

SEQ ID NO: 505403 - DNA, 1966 bp, Homo sapiens
  misc_feature (384)..(384): n is a, c, g, or t
cggcgcagcccgagagcctcccgcggtgcccggagcggcagccctggagggcgggacccgccggcgggtgccggtggcggcggtcgagctcccgggggcagccgcggaggaggcgcccggctgcgagcccagcccctgtggctgcccccctgactgtgctagggacgatgactgctgtctgcctgctggacgatgctgctggccgagtctggcggcctgggtgccccgctgtgtagccctgcctccgtcgtcctgaccatgcccgtgcttccgaccctacgcggtcgcggggagcgcggtgtgcgcagagcagagcacagagggccacccggggagcggcaatgtctctgaagccccaggcagcggtcgcaagaagcccgagangccggcagccatctcctacgaccactcggaagaggggctgatggcgagcatcgagcgggagtactgccgctgaggacagcatgctccacccccgccaggcctcggaggcacctgctggctggggcaccctctgcttgcacagagctctagcaggagctgaaccacctccaaaacgcagtcactcccggatattcaaagctgccctttcaaatccactttcagaccgcgctgacctgggccagccactggcggtcatggttgctggtgggggcgattagctgtgtagacccacaggtgcgtgggcctgggccgccggcgcctcctccccaacgcggggagcctgcccagttcttctggagcctgaaatgcgtgcccctcttggttgcccgctctccacagtggggagggctcacgaggactaggtgacacaagcgagcccctcctggcatccgcgccacaacacttccggaaggttctgctgtggaaggtgcacccgcgctgctccctcagtctcgggcccatctctccagggtggccgggtcagcttagtgcttctcaactttaactccctaatgagcagcctgggggtgctgttgacttgcagggcctgaggttctgtacgtctaaccagctcccagcccaggcccgagctccgaagccccaactgcactttgaggagcgagaaccccagctctgatctgccttgcagtgggaggtagagctcgtcactgcctctctgggcctcagtttccctctctggaaaatcagctctggcagctcttggaggccctccccagctctgacaatctggaactgctgccactgctggtcccctgccccaggcacagcagtgccttccctgcggggagccagcgcccaggtccaaccgggagagggtctgcctgatactggctttccagttctccctctcacaggcagcctggccagtgcctgcggggcttttaaattctcttcctgcctgggtggaaggtgggaaagccacagcagtgaggcaggaagagccttggaatgttcctggttgacagatgggaaaactgacctgcccaggacgccctgggaacagggggcggagctccggctagaggggactcctgtgtgggcgggcaggtctggagcctgggcccaggtgtggcctgctgggggacagctccgggggagagctgtggggagaacagcggtctagggaggcaggaggcaggcggcaggctcctccccagcagcctgcagggcatcaggacagagcgggaacggaggagaccgaagggaacgaagggagatagagggggcaggaagaaaaccagggcgggctacgtgcatgacacccagacaagacctggtaattggcctgacccgcacacacggaagccacccaccgataggacaaaaccagacaaagagctcacgaccgcaggaccagacacagcagagcacaagaagcacaaaggaacaaggcaaccgtgcggcaagcacgaaagccaggcgcagaggcacacgaaaggagatgcctcaacatgagactgctgacagggaaagggcaacactggaacaaggcacgccccag

SEQ ID NO: 505404 - DNA, 713 bp, Homo sapiens
  misc_feature (3)..(3): n is a, c, g, or t
  misc_feature (25)..(25): n is a, c, g, or t
  misc_feature (33)..(33): n is a, c, g, or t
  misc_feature (47)..(47): n is a, c, g, or t
  misc_feature (51)..(51): n is a, c, g, or t
  misc_feature (72)..(72): n is a, c, g, or t
  misc_feature (83)..(83): n is a, c, g, or t
  misc_feature (130)..(130): n is a, c, g, or t
  misc_feature (140)..(140): n is a, c, g, or t
  misc_feature (169)..(169): n is a, c, g, or t
  misc_feature (224)..(224): n is a, c, g, or t
  misc_feature (231)..(231): n is a, c, g, or t
  misc_feature (302)..(302): n is a, c, g, or t
  misc_feature (317)..(317): n is a, c, g, or t
  misc_feature (327)..(327): n is a, c, g, or t
  misc_feature (351)..(351): n is a, c, g, or t
  misc_feature (355)..(356): n is a, c, g, or t
  misc_feature (370)..(370): n is a, c, g, or t
  misc_feature (418)..(418): n is a, c, g, or t
  misc_feature (477)..(477): n is a, c, g, or t
  misc_feature (512)..(512): n is a, c, g, or t
  misc_feature (516)..(516): n is a, c, g, or t
  misc_feature (524)..(524): n is a, c, g, or t
  misc_feature (530)..(530): n is a, c, g, or t
  misc_feature (567)..(567): n is a, c, g, or t
  misc_feature (616)..(616): n is a, c, g, or t
  misc_feature (633)..(633): n is a, c, g, or t
  misc_feature (678)..(678): n is a, c, g, or t
ganggattttgtgtggacgcgaggngccgttcncttagaacataggnttgnacatgtggagatgtggaattntttatttggcnatgatgtgtctttttccgtggagacccatggttatgattgttgacanagatcctganttttttaattgatcattctctgaaaagtngcaacgagtggtggagccaagatcatcgaggggtctggacgcacataacactatntaacatncaccagctgatgaacaaagtatcagaggatcatgatttttctcattatagaaagaaatggagtcagtgccnaaagcatcccatggntatggagttngtttttgattaaaaagagacctantggnnaatagtgcagtggnccatgagtatgtttccgaggtggagaagcactcttctcagacggattntgccaaatttttgggggtaagtacggagttgagatttgatatgtgcagacaagttatcngtcggctttgattataaagtagaagtggagaagcncacntctcatanagattnctctcgtggctttggtggccggtacgtggtggagaangataaatgggacaaagcagctctgggatatgactacaagggagagacgnagaaacacgagtcccanagagattatgccaagggctttggtggccagtatggaatccagaangaccgagtggataagagcgctgtcggcttcaatga

SEQ ID NO: 505405 - DNA, 661 bp, Homo sapiens
gcgagggggtggctgtcggtggctgccgctgactcccgagcctgtgaggctcccacgcggcaccgtcggggctgggcgttcctggggattcagagtcggcgctgggcctcctggagccaggaccgccgaagagcttgctgcatctctgtgtgactgctgtggccatggctcctctgctgctgtggccctcggccgcttcttccgcggccgcgggtaagacgcctccgtctcgggtcccagctggagccgtctgtccagacgcggcgcgtcgaagctgccgggagagctggctgaacctgactggctgagaggctgcggagctgggctgctggctgcgctggggtgcgtgccagggggcaccagacgcccagcttggacactgcgcccgagagggcatggcccctggggcagcctgtggatcggccgggcacgatggcgcgtcgcctcaagaccgggggtgtccgtgtcctccttccctcatgccctgggggcctgcggctccagcgctccaggcagctttgaaccgagactgctgcgtgtcaagctgggtgccaggggtgccccgtcctgacatagtggctgtaactcactcctggtgaggtactgggctcgggacagccgcggccgaaacacgacctggggccagacactccactacgaa

SEQ ID NO: 505406 - DNA, 1870 bp, Homo sapiens
aaaatgggccaagggccccgggcttggaagggcaggtggcgcctagacccagcgttcccgctccacaggtctccaggagttcgcccggcgtttcctctgcagcgggtgctactctagggtctgcgacctcccgctggactgcccagttcaggatgtgacagtgactcggggcgaccaggctatgttttcttgcatcgtaaacttccagctgccaaaggaggagatcacctattcctggaagttcgcaggaggagctccggactcaggacttgtcctatttccgagatatgccgcgggccgaaggatacctggcgcggatccggccggctcagctcacgcaccgcgggacgttctcctgcgtgatcaagcaagaccagcgccccctggcccggctctacttctttcttaacggtggggcggggcgcggccgcgtgagtgagcggggtcgggagaggggtggggctcgtgcctggctgacgtgcgcgcccccgcagtgacgggcccgcccccgcgggcggagacagagttgcaggccccgttccgggaagtgctgcgctgggcgccgcgggatgccgagctgatcgagccctggaggcccagcctgggcgagctgctggccaggcccgaggctctgacgcccagcaatctgttcctgcttgcagtcctcggggccctcgcatcagcgagtgcgacagtgttggcgtggtgagttctggggactccggagccccagcatctagctccccgctgtctcagatcccaccgagaagtctgggttcccaacaacctccaacccaggaggtcaggctttcagttcctcctctctcagacccacgagtccaggtcccagcccctctttactagcccaggaatccaagttcccagccccctcctcccttagatctaagagtccaggcccccagcccctcctccctcagacccaggagtccaggtccgcagcccctcctccctcagacccaggattccaggccccaaacccctactccttcagacccaggagtccaagtccccagtcccctcctcccgcagatccaagagtccaagcccccggaccccctcctccctcagacccaggagtccaggcccccagcccctcctccctcagatccaggagtccaggcccccagtccttccacccgcagacccagaaatccatgaccctagcccctcctccctcagacccaggtgtccaggaccccagccctctcctccctcagacccaggtttccatccaggcccctggcccctcctccctcagacccaggaatccaggcccccagcccttccacccgcagacccagaaatccaagcccccagcccctcctccctaagacccaggagtccaggcccccagccccctctccctcagacccaggtttccatccaggccccggaccctcctccctcagacccaggagtccaggccccagccctctcctccctcagacccaggtttccatccaggccccggaccctcctccctcagacccaggagtccaggccccagccctctcctccctcagacccaggagtccaggcccctggcccctcctccctcagatccaagagtccagacccccaagtttctcttccttcagacccaaaagcccaggccccctgccccctcctccctcagaaccaggagtctgggccctgtacacctttttgaccctggtgtccaggcctccgggacctaagtctctagtcaccaacccctcctgtagcacacatacctctttgtttccccaggatgttctttcgatggtactgcagtggcaactaacaaaggtatctttcctccttccctatcctatttccatcctgaaaataaagaatatatttcaactct

SEQ ID NO: 505407 - DNA, 254 bp, Homo sapiens
gcatcatctcaacctatagggagcgttctgcgcatcatctcagtctatagggagggttcagcgcatcatctcagtctatagggagggttcagcgcatcatctcaacctatagggagggttctgcgcatcatctcagcctatagggagggttcagcgcatcatctcagtctatagggagggttcagcgcatcatctcagcctatagggagggttcagcgcatcatctcagcctatagggagagttcagcgcatca

SEQ ID NO: 505408 - DNA, 1976 bp, Homo sapiens
  misc_feature (394)..(394): n is a, c, g, or t
gttacgtgcttgagaaaaaacaccgaggctcggagacacactggccttgcctgaggcgcgcgggtgagccgcagagctgggattcaagctcggtcttcccaccccagagcccgtcctccctcaaccagggcaggtgctggcttccactctgcgagggctcagcgttgtgggagatgaagcggaccagtagaagcctgctggtggatatgtgctgggcgagacgccacagggtgtcccagggcaaagacttcggtttgggtttcaggatgggcccactaggagccattgtggtggccaggggaaatgagtgtgaacgcaccatcctgcctcctgacagccctgtcccatttctgacccacagagccccaggcagcggtcgcaagaagcccgagangccggcagccatctcctacgaccactcggaagaggggctgatggcgagcatcgagcgggagtactgccgctgaggacagcatgctccacccccgccaggcctcggaggcacctgctggctggggcaccctctgcttgcacagagctctagcaggagctgaaccacctccaaaacgcagtcactcccggatattcaaagctgccctttcaaatccactttcagaccgcgctgacctgggccagccactggcggtcatggttgctggtgggggcgattagctgtgtagacccacaggtgcgtgggcctgggccgccggcgcctcctccccaacgcggggagcctgcccagttcttctggagcctgaaatgcgtgcccctcttggttgcccgctctccacagtggggagggctcacgaggactaggtgacacaagcgagcccctcctggcatccgcgccacaacacttccggaaggttctgctgtggaaggtgcacccgcgctgctccctcagtctcgggcccatctctccagggtggccgggtcagcttagtgcttctcaactttaactccctaatgagcagcctgggggtgctgttgacttgcagggcctgaggttctgtacgtctaaccagctcccagcccaggcccgagctccgaagccccaactgcactttgaggagcgagaaccccagctctgatctgccttgcagtgggaggtagagctcgtcactgcctctctgggcctcagtttccctctctggaaaatcagctctggcagctcttggaggccctccccagctctgacaatctggaactgctgccactgctggtcccctgccccaggcacagcagtgccttccctgcggggagccagcgcccaggtccaaccgggagagggtctgcctgatactggctttccagttctccctctcacaggcagcctggccagtgcctgcggggcttttaaattctcttcctgcctgggtggaaggtgggaaagccacagcagtgaggcaggaagagccttggaatgttcctggttgacagatgggaaaactgacctgcccaggacgccctgggaacagggggcggagctccggctagaggggactcctgtgtgggcgggcaggtctggagcctgggcccaggtgtggcctgctgggggacagctccgggggagagctgtggggagaacagcggtctagggaggcaggaggcaggcggcaggctcctccccagcagcctgcagggcatcaggacagagcgggaacggaggagaccgaagggaacgaagggagatagagggggcaggaagaaaaccagggcgggctacgtgcatgacacccagacaagacctggtaattggcctgacccgcacacacggaagccacccaccgataggacaaaaccagacaaagagctcacgaccgcaggaccagacacagcagagcacaagaagcacaaaggaacaaggcaaccgtgcggcaagcacgaaagccaggcgcagaggcacacgaaaggagatgcctcaacatgagactgctgacagggaaagggcaacactggaacaaggcacgccccag

SEQ ID NO: 505409 - DNA, 196 bp, Homo sapiens
ccggaacattctgtccgggagcataaacccataccaccaagcaaaacactatagcctctaagctattagctaacatgtcaactaggtaatgcatcttcagggaaaccagagtggaaaggacagcaaaacattgatttttttttttttttttttttttttttttttttgggaaaggggccacaagttgtcgcgggcc

SEQ ID NO: 505410 - DNA, 129 bp, Homo sapiens
ttccgcctagatgaaacggtacctgctttagtgagactcaatgcccggcggaggggagacaagtatataggtattagtcggcttgtcgtcaaatcacaaagtcctagcattacgagagactatagaaga

SEQ ID NO: 505411 - DNA, 982 bp, Homo sapiens
agcgggtcatgcccgcggccgcacagtaacgcgcacagttgccgtatccgcaagatctctctggtaccagctcgggtgcagggcctctgcgtggagcccttcctagaccatctgcgggcttctcctctatacatggccgattccgagaaagatcaggggcctgcgagagcctatgccaggtcggtgcgcatggggccggatgcatctgggccgcaggaggtaagtggtcgcgaaggacaggttgcggcagggggaggaatgagctgtgaccagacggcggcgcgtaaggttggacaccgtgaacctagacggcagtgtcatgggctcgaagaaatgggcatcgcagtggacgaccacaccaaggacccacgcgtgccaggaagtaagagcgccgcggaagaagcttctgcattgacacattcgtagctctctagtgcctgaagtacgacccattgtccccttacaattgcgggaggatcgaaaacactatgcgcgggaagttcgcataggagggcacccatgcgagaaaaaaaggccttgtgctaagagaaacggccgaaattggcgggaataataaggaataacggaaaaggcgcaaatagaatgtattgaagtacacggggacatttggttccacggaacctacgtaggggaacgggacaaacaccggtaagttcaaacttgtaacactacgtaagtaaaaggtccctccccttgagcatacggccgcatataggaaagtacaccagaagttaagcgtcgttgccagcaccgcggtgcggaacagcaaagtgtggcacgcggggggggttggcatggacacattgtgggaatcgcatttgggcgaacgcggaggcggaggaaagcggcaagcagaaaggaggaccagcgtacaccggcaacgggagaacggaatacccggtacggagggcaccttggaatcgcgaaatggggcattgggaaacgggagaggtggaaaccc

SEQ ID NO: 505412 - DNA, 430 bp, Homo sapiens
ctacttctcaggatgaaatctgtctgccccgcccctcagtaccatactcacagtccacagctagcatgggcaggagtggggtagggctcttggctccctgtatctcgctccacttgaagagtatgcctgttgccagtctccttcagcacctcctccatcatacgctaaaggcatctcagctccagtgtcagatgccactcctgattatgctgtagtgactgctttgcacaactacttccacacacactacaccaccgagtgcgaaacctcagcgacacgtatcgcaacatctcttaggttccgccttccaccctagtaactaccccattacgctacagttcctcgtcctctgaacaaaaactctcgaacttcttctacctgtgaacacagcctcttctcagtctccagctactacgccctgtgcctggtc

SEQ ID NO: 505413 - DNA, 358 bp, Homo sapiens
caagaggttactgatgatcgaagactagagcaaatgctatctcctctccaacgccttcctgtatggccgatttcttagctccttcctcggatgactcacattcttctgtagtcaccatcgtgccgtttattataagttatagtgtgacatatatctcgttaccaccacacaccagacctgccccaaagcgtaagcatccacattgtcattttcgtgtctttcataccccctaatcagggcttttagcaacgagtaccgtggcgtcaagcaatctatgtgtctaaagaggcaaatgcaaaagcatagtcacagtacaggcgggcaaggcatgcagagcatgggcaacaaatggcgctgg

SEQ ID NO: 505414 - DNA, 312 bp, Homo sapiens
gtctccaggatggcgtgcagcaggatcggccgggtgacgccgtgtttggcctccagcgaggccaagagctggtccatgtagaagatgtcccacggcccctcgaccttggggaccatgatcacgtcgatcttgtcgccggccttctcgacgatggtggcgacctcgtcgagatgccagggcgaattgaggcagttgatccgcgtccaaaagcccacgcccagggccttgaagtcgatctcgcgcgacatggccaccaagcccgccagcgccgcgcccttggcgtcggcggggatggcgtcctccagattggcc

SEQ ID NO: 505415 - DNA, 823 bp, Homo sapiens
  misc_feature (27)..(27): n is a, c, g, or t
  misc_feature (93)..(93): n is a, c, g, or t
  misc_feature (162)..(162): n is a, c, g, or t
  misc_feature (198)..(198): n is a, c, g, or t
  misc_feature (211)..(211): n is a, c, g, or t
  misc_feature (227)..(227): n is a, c, g, or t
  misc_feature (247)..(247): n is a, c, g, or t
  misc_feature (290)..(290): n is a, c, g, or t
  misc_feature (362)..(362): n is a, c, g, or t
  misc_feature (409)..(409): n is a, c, g, or t
  misc_feature (494)..(494): n is a, c, g, or t
  misc_feature (507)..(507): n is a, c, g, or t
  misc_feature (539)..(539): n is a, c, g, or t
  misc_feature (543)..(543): n is a, c, g, or t
  misc_feature (550)..(550): n is a, c, g, or t
  misc_feature (579)..(579): n is a, c, g, or t
  misc_feature (598)..(598): n is a, c, g, or t
  misc_feature (609)..(609): n is a, c, g, or t
  misc_feature (613)..(613): n is a, c, g, or t
  misc_feature (619)..(619): n is a, c, g, or t
  misc_feature (711)..(711): n is a, c, g, or t
  misc_feature (720)..(720): n is a, c, g, or t
  misc_feature (732)..(732): n is a, c, g, or t
  misc_feature (739)..(739): n is a, c, g, or t
  misc_feature (749)..(749): n is a, c, g, or t
  misc_feature (759)..(759): n is a, c, g, or t
  misc_feature (763)..(763): n is a, c, g, or t
  misc_feature (787)..(787): n is a, c, g, or t
ccagccgaacctcgtggggctccaggnccatctcgtcctcgttctcgttctcgcccagctggatctcctcggggttgacctgctgtgccagcnctgccagccccccccgggaggcgtcactcctcacgaacaggatcttgctctgggcgcgcaagggctggncacgctccgcctcagccgccagcggctctgcccgcngttccagcagctntcaagtcgtccatgcnactttgcccaggggccaggncagaaacggtgcccgtggcactgcccgagaccttgagcatctncgaggccatgaagttgacctgcgttttgtacgtggcctgcacgctgcgccggaaacgcagcatttccttganggtgttctcattgccatgccggacctcaaagtccttccacgtttgcnagaacgcgccggtcgtccgggggtaacagaactgggagcagaagctgtagaaggcccgggcgcggtcaatctccccgagcttgcnctccatgtttgcnaaccgcaggcacatcttacgcgcgttctcgtncganagctccncaatggccttctggtagatgccgcgggtnttggttacccatagatctnggccgcccgcntgangtagangttgaacatgttatactgctgggcgggctccacggcccttgtggcacgctcgttcacggccatggcatgccgggccaggccccacttctccnccagctgtncgttcagcaggnacaaggncttggcatantttggggggnagcngttcagagcctgttcaaacaggtnccgtgccccctccagcttgcggcccccatagcgggc

SEQ ID NO: 505416 - DNA, 248 bp, Homo sapiens
ttatcaggataatcagattcacctcaggtttacagtttatagaaacctagagcagtatctcacgttgaggtctgtggaagagacgtccattgcagaaatggctggtagttactctttttttccccccacccccttaatcagacttcaaacgtgcttaacccccttaaacttgttattttttacttgaagtcattttgggacttgtcttaaccagggcaagagacgacgggtgggggacacaaatgttt

SEQ ID NO: 505417 - DNA, 111 bp, Homo sapiens
ggtcgatctaagctccgtatccacaggggagtgaaataataagtgttgtctaggacgtcaagaaatagtaatccttggagtcattgtacacgcctattagaatgtaaaatg

SEQ ID NO: 505418 - DNA, 133 bp, Homo sapiens
tcaggcaatccacccggctcggctcccaaagtgctgggatataggcgtgagcaccatgccccgcctagagtgaatttacactgagagaccgaggcggagagtgagaatatattctcagagggaaagtacctgt

SEQ ID NO: 505419 - DNA, 159 bp, Homo sapiens
cataagtcaggaagtatctgtagcaccaccctgtatatcagaagatgagaaagctcctgaagtttaccatttgttctcattaggtcaccttcctactgcaaatactctagtaaatgaacgtgtgtcacgttcagatatctcatgctctttgactaaaag

SEQ ID NO: 505420 - DNA, 350 bp, Homo sapiens
ttcgaagaacccgtatacataaaatctagacaaaaaaggaaggaatcgaatgtgtggtagggcgatataggggaatacttatggcacggtatgtgcagaagagtatgaacgtccgatagttgcctgataataggtacgcaactggactactaggatgccgacgttagaccgatagtacagtcatgagtctatcgacgtaaaacattggttctgaactcgaagtatgtactcaatagatgcagggagaacaaataaaaaaaaaaatagtgaatataagaaaaaaagataatatggaagagcataagtgaaatattgaagatagaaaaaaaaaatataagagagaggataag

SEQ ID NO: 505421 - DNA, 502 bp, Homo sapiens
agtcggtccctatctgtgttcggggttgtatccgtcttcggggtggtgaggggctaacaaatggaggaagggaaaggggtaacagcgttgcccaaggggagactcagaggctctgacttgctgaagaacctacccagtagtggagatactgaaaaaaattttggggcgggccatttgtctaccatggtagttggttgattgccaggccaggagctgggaagttcccatttcctttgaccaaaacgcagcttagcgcaaggaattcttataacagtacacaggagggagctttgcaatgggcttataaggaaaatattactccttaccttctcagggtgtgcaaaagacacaaaaccattattcgccttagcaaaagggttataacccaacatccttagaaggaattgtcagggctaaaaaccccaaaagattctgaaggttggccttatattaccggattgcttaaaaacccaaaatgcctacgtttcaaccaacaaggatc

SEQ ID NO: 505422 - DNA, 374 bp, Homo sapiens
tcaggtgtacatgcagtcctggacccaatcaggtagctgctgcagtactctgagaagtaggcggatggtataataggcctcacaggcattctcaacccggtgaaaagatagctaaccacttccgttgtgcgtatccctatgaggcgtaattataacaagctcgagtctgcgtacgacaaacagacctaaagtcgttcattggatactcttcaatcaggcaatagccgcgtcgtgtacagccattctcatccaaaccccctgaagcttcaccggcgcagtcattctcataatcgcccacggactcccatgctcattactatggtgcctagcaaactcaaactaccgaaacgcactcaccgggtaccgaggtcgca

SEQ ID NO: 505423 - DNA, 119 bp, Homo sapiens
atgagctggcccttatatccaccatcactgcctccttttccttctccacctgaaacgccatccgcaaggtcagcatctgaaaagctaccggaggaactagggtgatcgtggggttgtaa

SEQ ID NO: 505424 - DNA, 765 bp, Homo sapiens
ccgccttgaggagcgcctgtaactgctattttgaatacctcatgagcatggaccgactacagtgtcgcaccatcactagcccctaggttataaggatgagcatctgcttgcagtccatggttgatgaactgacggtgatgaaatttggcgccaagttcatgataatgctgagccgcctatggccatacacatctgagacgctcatacagccagcaggcagcgcaagccctaccagtgttagagtcacctagagccacccgagagtacatgcacaaactatcacgactgctgagcgccgagtgctcgcgccaacattgatgtcacaacacatatgccagcgccagagatgtccacgacattgacgcattacaggcacatcgcagactgaggattagcatcatccactgtactaatgttagccatctacaccacaggcctattacagatgcttgcaatgtgtctgtgcgacccatgataaacccgcatgctaatactaactacctgactctatactactcacaatcatttgaagagaacgccagttatccagctaaccacgatcactgaactgactgtacagtagtatagctaattccctacaaagagccgtacttatatcactcacaggcacttgactaatcgcactttatatcatggtcgatagcatacttattcgaccttgactatatcacctgtgaggcactcatgcataatgcttgaaggagccatcctggtattgaccacctgtagctccttcccctctcc

SEQ ID NO: 505425 - DNA, 182 bp, Homo sapiens
gattttctgaaggggatgctgcaagccgagaagctgactcctcctcagagaaagcactggccaaccagttcccgggccctgtgccgtgtgccaaccactagccatgagagctgagatgcccggccacacaagacgtgtgcatcttgcagtcactgggcgcggtacaccatgcgatgatgcgt

SEQ ID NO: 505426 - DNA, 371 bp, Homo sapiens
  misc_feature (154)..(154): n is a, c, g, or t
  misc_feature (165)..(165): n is a, c, g, or t
  misc_feature (168)..(168): n is a, c, g, or t
  misc_feature (236)..(236): n is a, c, g, or t
agtcaaacataggtacgaacagtactaaatgtccgatggcaattagtcgcaacaggtggtgaagcagtatttccaattggaagatcattgaagggggctcctgccaccggctaatagcagttcaaactaaatttttggtatcaagtccctgaanggaagtatgangtngggtccctctgaagtttaattctgagttctcattaaaagaaatggcttcatggttttatttcttaatngctatgcttcagaatcaattggtgttttatgccctttcccccagtatggtagagcaagtctggtgttaaaagcccagagtgacagcgtcatgatgtagtagtgtcttactggttttttaataaatcctttggtat

SEQ ID NO: 505427 - DNA, 498 bp, Homo sapiens
atcacattcagcgcgccttcatgattattatcatcggtagcgtaacgggcgatttgtttaatgttttccgcagcattgcccatcgcaaaggaataacgcgccattttcagcatctccgcatcgttaccgtgtcgccaatcgctaccacattttgcggtgacagatcccagcgtttcagtaaccgcgaaataccgtttgctttatgtagaccgggaataatcaggtcgataaagccaaaaccactggtaacgggtttcataatgccatcgagcgctacgtgcagtttgtcgatcactaacgggatttgttcatccggcaggttgagcgaaaacttgaacagtacgtcgtcaatctcctgataatcttttacaggtttcaggcgatggtagtgttttgccatcagtgcgacaaatgcttcgggggcattttcgctgacatatgcactttgcagaccgcaggcgacaaaattgagttgcttatcttttagcaactcgccaa

SEQ ID NO: 505428 - DNA, 1012 bp, Homo sapiens
tcggcacgaggtacacgagtgatacagtcaccactcagtcaggacatgggacttggaactccaggatgggggtgtccatagacagacccagcccagtacgaactgtcacagaatggcctgctgaactgggatgtggaattgtggacgggtggagaggtctgaataaaccgtctgtgtcatggtcccgtctgcctctgtagtggtcaggactcaagtctgtagggcaaaggcccatgggatccctttggttggggacctgatggctgtggtacgtgcttgggtctggagtcagtgtgggggtctaacaagagacagagatttgatgctaacgtcccctcaagagtgagggtcagtcatgaggcttcttcagtcaggcagatgtgggtagctcgtgggccatgcctgtgtcgaggggagcatgcccgaccaagtaaagggctcacatggagtggatgccgcacaaaatgtgccaacgcggagtgggagagtgtcgagcactccgagttgcctcaggcaggctgcatttccttcatgctaccaagtgtgcaatcactgtggctaataatgtgtactgtgctctggctctattctctatataactagtaacgtgtgcctccaggttccttcccaatgtaatcgcggatgataggattgtctgtccttgtcagacgaataccattgccagcatttgtgcttaccaaaatctgtccacgcaatagagacttaaggctcgtggacatcatcttctggcgacccgctggaacattgctggcccgtagcaacattggtgcgtattcggctatgttttgaatgatactgatttacatctctaatatatgtaaccagcaagtgcgattgctgcctaccgggtgtggtccacaccactttagaagaacgaccacagttttcataaaggtggactagtttcatttggacaacgttccaggtcccttcaacattggggcagatatatcttgggtgacacacaggaccacgagtagggcaccaccag

SEQ ID NO: 505429 - DNA, 190 bp, Homo sapiens
tccaagcagacagaggttgagaggccgaagaagatatcccagtaaggctacctttggcagtggttccctccttctttctcttttcttttcttttctttcttggatttgagacgttgtctccttatgttgcccatgctcatcttcaaactcctgggctcatataattcttccaacccaggctcccgagtac

SEQ ID NO: 505430 - DNA, 540 bp, Homo sapiens
tataggcgctagtgtgtgtttgcatgctgcgggctcacctgggcagaaagaggaaccagagctgtccccagcgaacccacccccagcacactcctgtttcccagggattttgcagtacagctgagacatgaaccaaaacttttttttttttttttttggaaatggagtctcgctcggttgcccaggcgggagttgcaagggtgtgatctcggctcgtgtgccacctcggcctcgggggtccaggtgattcaccgtgcctcggcctccgtgagtagtggggataacgggtgcccaccaccatgccgggctagttcgggtatttacagtagagacagagtttggctagtgtgggccagtcgggtctcgaactcttgacctcgggtgatcggcaaactttgacttcccggggtgcgggcataccgggtgtgagccacggcactgggcctaatatatggtataatccttccctcggcttcgggaactccaataatgtcaatgtaacgcagtttggctatggtcccaaatacctaggggcctata

SEQ ID NO: 505431 - DNA, 904 bp, Homo sapiens
  misc_feature (584)..(584): n is a, c, g, or t
  misc_feature (586)..(586): n is a, c, g, or t
  misc_feature (609)..(609): n is a, c, g, or t
  misc_feature (729)..(729): n is a, c, g, or t
  misc_feature (883)..(883): n is a, c, g, or t
agcggagagtactgtatcaggacctcccccgagctctgacccgacctgcctaggcgtgtggcgccgacagagcctccggtcggactgggtcttcacccgctaatattgtgactttctagcaacgcctgattaatctctctgatctgagcccatacatcttgtgattccatctgtcccaggttatctttaataagatgcaagctaccatcacatcgaagtgtcgttgattagccgttttgtaaagatgctggagtcagtatagactagtttatgagatatcgtgcaatgagattggtccaaacaatgctagattattacgtacgtagcgattctacgactaccatagacatcatttactcatcgagtaagacggatatggagcctgtaacaccgtcatcgacaggtacactacagtggtatcgaatacttaggacgaattgcaaattgcataagtatgtgacaacgaggataatatatagagaacagataagtgcgtatagaatctctctggagtagaacggataaggaaggatcctatgtaaggtaaccgtaatatccctaggctgatgtgccttatctaggananctatgatctcactgtctataggnctcaacacgtgacacgactcttgcagagaaataggaggtctcgtgagcatatcctagctggttgtcagataattaccaacgcaatgatatactctgtattatcgctcattagtattaacntcgtgtgagatatccacttcggtgacctcataatggaaggctgactggggacaagttgtctacagcccatgtgagaagaaagagaggttttggttccagagttatcaggggcagaaagccaatctatgtgtgactatgttaggaaccagatgcnctccagaaagatgatattgtg

SEQ ID NO: 505432 - DNA, 1653 bp, Homo sapiens
ctagttctagatcgcgagggctgccattcattccaaaaaaaaaaaaaaaaaaaaaaaaaaaaaaaaaaaaaaaaaaaaaaaaaaaaaaaaaaaaaaaaaaaaaaaaaaaacaaaaaaaaaaaaaaaagagagagacagcaagaacataaataatattttgatatgaaagcgagcgaggagggcatcattaataagtactacatgattgatgtagaacgaatacgtcgagcgctaaatatgaatcttgtttataggtgggcatcacatcgtgatgaggtatccatattgactacaaatatagagaagacaaaagactagactaccgtaatatctgtatctgctgtcgcgagacagagccaacaactatgtagtgggagagaccaacaaccatagctctacattagcatggtacatattcagacaaacgactaataagcgcgagcagatcataatacaacaacgaatccataaaacataaatgtaaataacacgaatagactctacaacaaaccacaacacatcacgtagatataatatttatacatcccactgcccctatacattactctaacaaaactcacagcaccaaccaaacgaaaaaataattaatacttatatgttaagaaaacaacacaaatataaatataaacaacaacaagattcacattcagcactacgctacgaatatcaaaaagctaataatcattagataagatgcgaacgcccgtgacgaagagatagtcaatgctacaacgaagaagacagacaaataccgtcacgggcatgagggaaaggctgtgaaggaaagggagaaagaagaggaagcgagaagcaaaaaagaaaggacagagcaacgggaggagaccgaagcgaatgaaacagagcgaccgcagcaagacgagaaggagaacaccataggacaacaatcaatcccgcaaacacacgataaatcacatctaaagaagaatccacaccaatactgctcacacaaaacatacggataactaacaacaaacaactcaccacactcaacctaaacacgtcccatagataacaaacaatctcataccacaatcacgcttgcaccacgcaactattcaacgaactaacgcggaatagcaccaacactaacacacagagggagggatgagcggagacaggagagcgggaggcggggggcgcgagacagaggagggagaagagaggaggcgcgagagcacgaggggggcggaagggacgaaggaggaggggaggagctgtgcgtgggacgggagaatggagaagggcgcagagagaaagagagaaggacagacagataggaggaggaagaccgaaagctggagcgaggagcaaaacgaatgggagagcgacgggaaggaaacgggaagaggaggagcgcggggagaggcagagcgagagaaggagagggacagcgggcgacgagatgcgatgaatagacgagagaggacgagcgtaaggagacagaagggagcagagggaggggacggcaggaggagcgagagaaatgaaagagagagagaagagaagaggaaaggagtagagagggagagaaggaggcaaggacgaagagagagacatacagaccagtcgagcagcggggacgacaggaggcaagaggcagatcggacgcgg

SEQ ID NO: 505433 - DNA, 158 bp, Homo sapiens
aattatcggctatcccatcctgacaccagacaacatgagcaaataagttatgaactacaactgcctaaacatgtatatcaatatacaacgttgtagtgaaaatctagtcccatgggagtttccccctaatgcttccgtctcactactgcaagcaggat

SEQ ID NO: 505434 - DNA, 717 bp, Homo sapiens
aagtgctggtactggtctggagattttcggatcaagaatcggacagaagctgagtgtgaagctggtacacagagtgagaaggagaggcttgacatagagagaaggaagaaatccgggggcacctgtactcagctccgtgaaagagaaacggtgagctaaacggaaaccctactgaaatgcacacgacaaggaagtcctggtcgagcctggtagcagaagctgaaggaaattgacgatggagttgccgggtgcgagtgagtagcaggcgccgtggacctggagctcagcatcatggacggtgaaggacaacctgaagaaggctgaggcagggcctgtgacgttaggcaccagccgtggacaccactcctacctggatgaatgtgagccccgcgtgcctcgaatagctgtcacacctgcctctgacccagactgtaccccagtcaactctggctagactcgagcactcgaagaacaggcctctctcggtctgtggtcacaggcgagaaggtcgactgtactccagcaaagccaaggcaatggtcagaagaaaggagctagttagagaacaagcttcatctagaagactctcatgtcaatgtggaccttggtgacaatcctgctttgttaaagcgaagtactatgcgaaagggtgagtctgtataggacagacaaagcaaaggactagaggtactgtgaactggatgagcttcagcctca

SEQ ID NO: 505435 - DNA, 650 bp, Homo sapiens
gctatcccagccgggttttatgcttcttgttattaaaaaggattggggggtattgtcgtaaccgtggtgagcacggaggtcacgtccgaaggtgtgtgaaaggtgcccgcgtgccagcaccatcctgtgtggacgtggggagcctctcataccaggtattcgtgaaattttgggagccgatgggacaaccttgggtggaaaaaggggtcgtgcgcaccacgagttacattttgtggagagcgtccaggcccccgaattgctcctgggccaggcaccacggattccttatggggcgccaatttgatatggacccactctcttttgggagaaattggggatttgtcaccaatgtgggactcttgttgcgttggccccccgagatatcctcgtctgcctatcagggtacccctctccctgccatatcctggactggccaggctttgaactatgtaatcacgaggatatgtcatcacaccaacccctggtttgggtctgaggtcttgactccacgagagcacttggaaatgaaatggctgtctaagagatctggtccaaggccactggatactagatcttacatctgcagctcttttttttttgatttcccatcttaattctgcctatttaaaaaaatatttttttttatgcta

SEQ ID NO: 505436 - DNA, 311 bp, Homo sapiens
  misc_feature (256)..(256): n is a, c, g, or t
gcggccgcctactactactaaattcgcggccgcgtcgacgttccatgctgattctctgtttagcctggttatgttccatgctgattctctgcttagcctggttctgttccatgctgactgtctgtttagcctggttctgttccatgccgattctctgtttagcctggttctgttccatgctgattctctgtttagcctggttctgttccatgctgattctctctgtttagcctggttctgttccatgctgattctntgtttagccaggttctgttctatgctgactgtctgtttagcctggttctgttgtc

SEQ ID NO: 505437 - DNA, 155 bp, Homo sapiens
tgagcatggcccaggctggggagggctagttggcactggcaaagcccctctgccaggcttctctgctcaactgtaggtgcttccttgggcaatttgatccccatggcaacccacggatgctggatatccataatcttcataattatcctgctgga

SEQ ID NO: 505438 - DNA, 270 bp, Homo sapiens
  misc_feature (79)..(79): n is a, c, g, or t
  misc_feature (125)..(125): n is a, c, g, or t
  misc_feature (131)..(131): n is a, c, g, or t
  misc_feature (146)..(146): n is a, c, g, or t
  misc_feature (151)..(151): n is a, c, g, or t
  misc_feature (162)..(162): n is a, c, g, or t
  misc_feature (203)..(203): n is a, c, g, or t
  misc_feature (235)..(235): n is a, c, g, or t
cagattgcagcggacatcccagcaagtggttgtttcccttgcattggacgaaagcttggctccaaagcatccaggctcnaggaaaaacatggcctgctattgcagaataccagcgtgcattgcangagaangtcgctatggaaccngcatntaccagggaanactctgggcattctgctgctgagcttgcagaacaagaaaantgagctcagaatttgctttgagagctacaggnaagttgctattacgtcacagacacagtgcgagctg

SEQ ID NO: 505439 - DNA, 370 bp, Homo sapiens
tatctcgcgaaggaaagacacaaaaaagcgaaagatacattaagcacgaggcaaggattgtatgtcggtggaaaagtccaacgtatctttgcaactctcagggaaccccattatgcattagagaaaatagagggaagttgggggtctctaaaggggaaggctcccttgggggaggtgtcagggcttccccactagccaggtgacatttgaaactcatcctggcatcagttgtcctccctgaggagtcaggctgaggaccttgggttagggttaaatacccaaacatcagtcctgagtttcctgattcatctggggagtgagtgggtacgggaactggtgccctttcaaatgaagctttcctgccttctag

SEQ ID NO: 505440 - DNA, 714 bp, Homo sapiens
  misc_feature (714)..(714): n is a, c, g, or t
gtgagtgtgaaggcctaggacattattgtacactactgtagactttttgaacactgtacacttaggctacactgaatttattaaaaattttttctttctccaataataaattaaccttagcttactgtaatgtaacttttatgttataaactttttaatttaaaaaagtttttaacttctttgtgataaaacttagcttaaaatacaaacacattgtacaattagctgtacaaaaatattttctttatatccttattctgttagctattttctatttcaaaaaattttaatctttaaaaacgaagacgcaaacacacacattactctaggcctacacagagtcaggaaggtcccggtggaatgtctttagaggcagtaacacatagggaactgtcatctcttatgataacagtgccttctggaatacctcctgaaggacctgcctgaaactgttttacagctaatttttaaatttttaaataagtggatgagtacactctaaagatagtataggatagcaaatacatctggcacatagtttattatcaagtattatgtactgcacataattgtatgtgcttagcttttatactactggcagtgccgaggtctgttacatcagcataccacagacagatgagtaatgcatcattacaacagcttgtacatcactgggctacaggcattttctgctccatatgtgttgtacgggcn

SEQ ID NO: 505441 - DNA, 286 bp, Homo sapiens
  misc_feature (18)..(18): n is a, c, g, or t
tgttttagggaaaacaanctttccttcccccattatcacctcagaggaaagtatactgagaaatttttttgttttgttttgttttttgagacagagtcttgctctcttgtctaggctggagtgcagtggtgtgatcttggctcgctgcaacctctatctcccaggttcaagtgattctcttgcctcagctatttaggatgcttaggcaggaggattgcttgagcccggggatttgaggctgcagtgagccatcattgtgccacaatactccagcctgagttataga

SEQ ID NO: 505442 - DNA, 374 bp, Homo sapiens
cccccccacgagctcggaccgggagtggacgagagaaagaggatatagacacacttctctgtggcgggacatatggtgactgacccactgcacacaaacgggggccttagcgaaactgcagaggactgatccttagaccaatcacatcttcgccaagtctctgtcactgctgcgtgaccctcgcagattcgcacctttcaactcacggggaatagcaggccccactgagctggacactcttctctactgcgcttctccacggctagatgggccgactatgatgcagcacaaagtgtcaacaggcggctcgtgcactgtcataacttgaagctggtaggcactctgctgagaagcaatcccacagcaggggtatc

SEQ ID NO: 505443 - DNA, 384 bp, Homo sapiens
taggcagtggtgtttgactgcggaggataggtcaagaagggggacagctctctctttgtacgaatgagacccccctccagctcaggggcagcgagtttcacagaccgtagatactttcgtcactgtaggacaatgtagagaaagaagtcttcttcatggtgttcctggtacagctgacccattgtgtcactggtgggtggaatgacattgttgacaaagagaaacaaggcatcctcagctcggagagtgaattcggttccggatcaagaagtcgaactgagcaactgtgagatcagaaggcaccaggtatctctttttgtccaggtctcctatccgagctttgggagcctttgctagtatcaccggtagccggtccgggtattt

SEQ ID NO: 505444 - DNA, 786 bp, Homo sapiens
agcggaggactttgggaggccgaggtgggtggatcaactgaggtcgggagtttgagaccaacctgaccaacatatagaagccccatctctactaaaaatacaaaatcagccggatgtggtggctcatgcctgtaatcccagctactcaggaggctgaggcaggagaatcgcttgaactcggaaggcggaggttgcagtcagctgagatcgcgccattgcactctagcctgggcaacaggagcgagactgcgtctaaaaagaaaaacaaaaaatcctaacagacaaccttcataacaacgaagtgcctcttggagtaacattacaatggttactctgagctcttcacatgtaaaatcctagtgagatggacccggattttaatatcacatgttacaaataaggaagactaaaaggtgtaactagccgtgcttacggactacagaacctggggaggtgcgccgggcgcaggggttcacgcctgtaatcccagaaacttggggaggccgaggcgggcagatcacgacggtccaggaagaatcgaagatcatccagggcgtaaccacggggtgaaacccacggtccctacgtacaacattcacacaaaatttagccggggcatggtggaaggggcgccttgtattacccaagatactcagagaggctagaggcaggacgaaagggtgtgaacccaagagcggacatatgagtgagccgaaatggccccattggactccaagctgggtgataaacgaaatcggccacaaaaaaagccagcaaaaaacagga

SEQ ID NO: 505445 - DNA, 969 bp, Homo sapiens
ttctggaaaggtctgaacggagaccataatactaggtagcccccgatgtgggtctcaatgaccctatgaataggcataatttcttgctcaaaacgggtgtagggctcgcttaaaaacttcttagtactcactctcagtggaccaagtaatgatgaagtgtctgtgagtcaaaagattttaaatgtgagtaagggtttacagaacgatcatgtttgatacgaaggagagtagcttgtaatgagactctgaattgtgaatctgtaatagacgcatgtgaagagacgcatcggtggtgtgatctagatacattgacagtagaatatgtcttggaattaggcggtaatggtatgatatgccatgcaaatttcgggtttgatgacgcgcttggaaaaaatctgcttaagcctagcccctgcctaggtaggatcccatatggaggatactattgcataagcaacgcttacgattctgctacgaggaacagactcgtagtattcagctcattgcaataatcttcacatcaagcaacatagcccctcgtaggtaaacaagccgattgctcatccaaaccccactgaaaggttcaaacaggacgcagttaattgcttcactaatccgcccagcggagttacatacttcattacttattctggccttagagaaattcaaagttacgaaacgacatcagagttcggcttactaactccttcaattcaagggcgttcaaacgtcttagtccccacgtaaatacgccttttgggatgacttctagggaaaggctgggtaacatgagattagacccataattacctaatggaaaatccggggggtggaaccaggtttctgtgttattcatttctcctttagatcataatagtcagctatttcttacatttacacaaatgggtcatacccattacataaccttccggaaccgttacattccttccttcacaatatggttgcaaa

SEQ ID NO: 505446 - DNA, 1176 bp, Homo sapiens
  misc_feature (703)..(703): n is a, c, g, or t
  misc_feature (955)..(955): n is a, c, g, or t
agcggaggagggacggatggcggacgacgagaatcgtgccgcccggcctgggaccaatgcgcatgtagcccgcagcctcaggccgtcctgtactacttctaccacatcactagagccgctcagccagatgggagcaggcccacctggcccactacgctaggcacgtggtcggcgcatcatatccggggcatgcgccggagccctgtccacgaggctcccgcatgactctgactaccttgcctgagtgatagtcacaagcctaagatccacggtcggcccatccatccctcggtctggccacggagcattgatcacccggtcctctagggaagcgaaggcccactgcgcatgaactgtcctcaaacgcgcctacgtacaccatgtaaagacttcacctgctcgagaggaagaacgagaaggaaccttgtgaaacgctctcctggacgcatccaccaggatatccaagacgtagctaggcgagctcgtcaagaccgaaagggcccagaggagatgcacctgggagtggcccttgcgatggcatggacggtccatgattggcaggaagacccattggagaaacggagcagcctgcagtaatggccgctcgcggagaccgcgtgggaggactgagacagcgagccacagttgtcacaacagagagaattccggggcgattccacattctagtccccctcccggcacnaccttggagcttgcagaggtttgagagggaagccccccaggggcgcattgggctccttctcgtgaggcctggggccatgtgggtccggcgccacttagtcgctcgcggggccaaggattccgcccaccatggtccctcccgtccccaagggcagaaggttggcgcccgggagacacccccccgggaaatccctcccttgaggcgtatcccagtcgttgatccatgggcctttgatattcccgatgcgcgccnaggcagacctggggctagcggcacccgcggggcccccttatcccaaggaattccggcggcgtggcccctgtggtggttctccccttggttctcccttggtcgccattctcccgggattggggggacttggtgatatgcccgtcctggggatttcttcccccggttaagtggaatattctgaactttcaaggcatgcggggatgggggaagggcatccccgg

SEQ ID NO: 505447 - DNA, 1001 bp, Homo sapiens
  misc_feature (297)..(297): n is a, c, g, or t
gctgtttgaggctctggactgcttcctaccaccaactctttcaactgacaaccccttgagcctgcctctccatgatgtctacaaagattggtggtattggtactgtacctgtcggccgagtgtagactggctgttctcagatccggtcatggtggtcaccttctggctccgagtcaactgcttacaagcggaagctaaaatctgtcgataatgccagccatagaacgcctttgcagttgcaatgcctcttctctggcgcgacacactgctgcgagattcacattgctacatactaantgctgcttctggtcaaggaatgttcgctcgtgcgctgaacggttttgctgcgatgaccagtgcaaatgatgcaacccaaccaaatgtgaaggcagactggtttcacatgcctcaggctgtattatcctgcaacccatccaggtccatgactatagcgtccggctatgcccctgttattgggattcgccaccacgggctcacagtttgcatgcaaggtttgctagagctcgcataggagaaacgattgatccgccgatctggttaaaaagcctggaagatggccctaaattcttgaaatgtctggtgatgcgtgccgaatagttgagtatggttccctggctaaggcccactgttgtgtgtggacgagcttctccagattatccagcttttggggtcgcgtggctgtgcgtgatatgatgacagacagttgcggtggcgtgtcatcatatcagtggaccaagaaaagctgtgtggagctggtgcagtcaccaagtcttggccatgaagctcagaaggctaatgaatattatccttatactggcacccatcttaatcaggcggggagaaccggtctcccaactgtttgttcccattggcctcaagttgcgtaaaaagcgcgaagttacctggtttaaactttaagaaagacatgttttggcacccagagaccatgggggggcaaaaaaaacaaaatttggagaaaa

SEQ ID NO: 505448 - DNA, 181 bp, Homo sapiens
agaggacccgggcgggtgctatgatgctcaccgcctccctgttctgcagctgggaagttcaaattcggatccggcaaatggaaagaagaaaaatgtccatttgacgcctcaggactatatttaggttcctataaatccagggcaacaaaacagtgtattcaagcatcatagcacgctgccc

SEQ ID NO: 505449 - DNA, 264 bp, Homo sapiens
aatcggatacgggaggactctctagagtcaccagcctccatgtaaacgagtctttggaggtcagctactgatgctcacgtgtcgacggaacttgtacagggaggcatgcaccgcagtggtgaatacacgtcgaccaggctccatgtatacaagattgggtcgtcagcacggatctcctatatctcaaggaacttgtctaggaagttatgcaccgccgtggtgaatccacgtcgacgctggaggcatgcatgcatgctcgggtcc

SEQ ID NO: 505450 - DNA, 1567 bp, Homo sapiens
  misc_feature (251)..(251): n is a, c, g, or t
  misc_feature (318)..(318): n is a, c, g, or t
ataagttgggattactcgctctaattgctggcgatgatattggactcctggtgtcttccacgtgggggtaataccctcctcgtctcacacgtatgtgttatggccccacacgtttttagtgatggtgcgcatccctttcgtcgcaagaacgcggtgggttctgatcttaaagagtaggttttcttcatcgactcgtggggcaccaaacacaaaattgattcttcttttgggggggaaagtcaacaccacangccgttggtggagatccttcgtggttgtttcccacccacaaacatcgtgtgatgtaaccacaccggnagggcggtttctttccatccggcaacaaacagtggtttataaatatatggtttggcggaggagatattatcgactccattatatagggggggggtgtcttcataaatatggtgaccgcttctttctttattgaggagaggccctcttgtttgggagaaaaacgtgtccctcctgtctggcgcggtgtatgtgttgggaacaaacacccaccagagaagtatttggtagtatctataaaatacatctcctcgctttttgccaacagggtgtactacccgcccactatgagggttttccacacccacaggcttctgctggtggtctcacaaatggtggggagatgacaccacagggtttttggtggggggcggcggggcgctcgggcgcccacacgcacaacagaggaagagctacacccctgtggcgaaaaaaagaagagcggccgacaccggctactgcgcatcaccaggaggcgtagaagtattggcgaccaccgagggggccaccacaggaggggagttggtgctccccttggtgggggcacacacccacacacagtgcgcggataattatgtgtgttgtcctatatgtcatatcatgtgtgggggttctcaccaacacaacgacaccacgtcgtatcacatctctctggtggcgctcgtgtttgtctctatccgtgtgtgtcttatctgttgtgtttatacaaagagggcgcctctctagggccacatagtctcactctatagagacactgtctctgtgtctctctctcttctctctgtctcacaccggctgtgtcacagcggttctgctctgtgtgtgttctgtggagagagataaaagagaccacacatgtgtgggggtaacacacaccacacacacactttataactttttcacgagataagacacacatgccacatatatatgtgtgtggtggtatatctcacataacccgaatgtcgctttcacagagatggagaccctatccttaacacattgttcacaatgtgtgagagatataagaatataatgagaccacaataacacacacatgcactttataatctgcgtgggcacaatccacgttgagacttttaaaatgtaaagagaatggaaattccacaaacaccttgaaacacacacattcaagctatatattgaccacagagaaagtaaaatttatggatagtggtattttgtgtaaatgattttttaaataaaagagaaacccttacgtaataattta

SEQ ID NO: 505451 - DNA, 304 bp, Homo sapiens
ttatcccctgtcgccaccgaggtcgcacgcgtgagcattctccgccgcctccgcgtgcagacgccgccgcgatgcgctacgtcgcctcctacctgctgggtggccctagggggcaattcctcccccagcgccaaggccatcaagaagatctgggacagcgtgggtctcgaggcggacgaggacgggttcaacagggttatcagtgagctgactggaaaaacactatggaagaggtcatggcccagggtatgggcaagcttgcaagtgtacctgctgggggggctgtagccggtctctgctgccc

SEQ ID NO: 505452 - DNA, 653 bp, Homo sapiens
attttgttttttgttggattgtcttatttgttgctgctcgttcttctatgtgtggttcctctttctttgttcacattctattgtgtgtgccccttgaatctttcgctcgtcggtttttgctcagtcttaatgtaaatggaggtcaggtctatatgatgttgcgtgtttctgtagctattatgtgttgtatcctatgttggatctcttggtatcatcatctagttcgtccctgttgcttattctgttggttcgtatattttccatggggctctccagctcctctttcgtgcccctatcactcactttcctattctttacagccttaatttctatgtggattgtccctatttagtatgcccatcttcacgtggccaaatgtgagtacccgtgcacagcagcgggtgcggcccatacgatcatgagtccacgtggggccacacggctcccacctggtgccaaacaccagcccactgcggccgtcaccccgccagcctacacgtgccagccgccacacggggcagcacgggcctctgcttgccagccaggagtgcggacaccactgttcccagcttcagtgccaaagaggggtcacacgggggagctgtctgcggagcacagcgcctgcccgagagagaccccaccgccaccgtgta

SEQ ID NO: 505453 - DNA, 247 bp, Homo sapiens
ggggggttttccccctttttaaggttttttgaaccccccccttttgggaaaggggggggggggccccttttttcccccctgggccttttgcccccccttttttggggggcccgggggggggtttaattggggcccccttttttggggggtttttttttgggcccttcccgggggcccctttcccccccggggtttttttttttgggttggggttttttgggtttaggggggcctttttttcccttta

SEQ ID NO: 505454 - DNA, 265 bp, Homo sapiens
  misc_feature (5)..(5): n is a, c, g, or t
  misc_feature (15)..(15): n is a, c, g, or t
  misc_feature (18)..(18): n is a, c, g, or t
  misc_feature (21)..(21): n is a, c, g, or t
  misc_feature (33)..(33): n is a, c, g, or t
  misc_feature (35)..(36): n is a, c, g, or t
  misc_feature (47)..(47): n is a, c, g, or t
  misc_feature (87)..(87): n is a, c, g, or t
  misc_feature (89)..(90): n is a, c, g, or t
  misc_feature (104)..(104): n is a, c, g, or t
  misc_feature (108)..(108): n is a, c, g, or t
  misc_feature (110)..(110): n is a, c, g, or t
  misc_feature (118)..(118): n is a, c, g, or t
  misc_feature (123)..(123): n is a, c, g, or t
  misc_feature (132)..(132): n is a, c, g, or t
  misc_feature (148)..(148): n is a, c, g, or t
  misc_feature (172)..(172): n is a, c, g, or t
  misc_feature (195)..(197): n is a, c, g, or t
  misc_feature (203)..(203): n is a, c, g, or t
  misc_feature (208)..(208): n is a, c, g, or t
  misc_feature (255)..(256): n is a, c, g, or t
aacgnatttggctanagnaanaagggtggtggntnntcatggcccanatggcctccaaggagtaagacccctggaccaccagccccngnnagagcacaagaggnagtngngagacccncactnctggggagnccctgccacactcagncccccaccacactgaatctccccncctcacagttgccatgtagaccnnntgaagnggggnggggcctagggagccgcaccttgtcatgtaccatcaataaagtaccnngtgctcaac

SEQ ID NO: 505455 - DNA, 112 bp, Homo sapiens
agtgactcccgaggacacggctgtctattattgtgcaagagactattttgttgatagtggtaggttcaaaatcgactactggggccagggaacccggctcaccgtctcctca

SEQ ID NO: 505456 - DNA, 391 bp, Homo sapiens
  misc_feature (187)..(187): n is a, c, g, or t
ggatgatcgaaggcgttcggtcatcgaggaagtgaagcgcgttagccggtccaggcctgcgtcagttacaagtccgctgaagatctgccgaaagttcgtggcggtctgggcgtgtctatcgtctccaccaacaaaggtgtgatgacggatcgtgctgcgcgcgctgccgggtgtcggcggcgaagtncttttgcactgtgttctagaggggggataacgcatgtctcgcgtcgcttaagaaccccgtttaagctgccagccggttgtcgaagttcaaattcgcaggccaacagccttcggtgaaggggtgccaagggtactccttgaactgaacatttcattcggtccgttgaagatcgtcgaaaaagctggtgagcacgcggggtggggt

SEQ ID NO: 505457 - DNA, 421 bp, Homo sapiens
gcgggtgtcccactccaaagcctaggcttgccacacgcaggagggctggaccctctccatcacctgactcaaaggcccttataggggtcacccaatgaacacggtactggagacccgctgataccccttgaagactaatacacgggttatgattttcttttctttattcagatactgaagtgcctgccagcctccacatttccatctttgctttggccatcagaaagcttggaactaaatttaatctcgcgtcataataatcttaccacctttttgactccctccttctttggcatgagttttcaattttctgttcccattttagcaatcttattgtgcgtgtatcttttattggaagctgcctccaatcctttttagaagctgacagggtataaattgtaaataaaaataaatactgctg

SEQ ID NO: 505458 - DNA, 679 bp, Homo sapiens
  misc_feature (679)..(679): n is a, c, g, or t
aacaaaaaaaaaaaaaaaaaaaaaaaaaaaactctggttcgcgcgcgcgcgccccgcggcccctccggaaaagcttttctagaaaccacatccgcgtggggcgcgcgcgcgcgggcccccagtgtaggtgtaacgtgtggacacacatgtgggcgcatataacgcgtgtgtgtccctaagggagagaacccgggggccaatggacacatagaggcgcgtggggtatttctccacaccaatataaaaaaacacgcgccgcggggggcaacaccggagggcgtgtttcgtggagacacacatctctcacagagagtgtgagaggtctctcgagagagggggtctcactatcctagcgggagagtctctatatctacacacaagaggggaagggtctcacaaaagagagagagcgctctcgagaactatctctcaaaaatttttatacccgccactcccccgcgggcctccgtggtgtggtgggtacaactcaatcatcactcgtcgtggagacagcagaatagagttgttgggtgcgtggtaacacctcttcacaattagttcagagcacgtatatttctggtgggtgcgacgcgactactgctgtcggaggcagcagaccgcacagccacccaaacaacaaccacaggcggggggaaagtagaacgatagaaaaacactn

SEQ ID NO: 505459 - DNA, 1415 bp, Homo sapiens
gctgctctacctctcccgcgcgtcgcgcagatcctccgccggttctctcggtgtctacacggtctggtcttcagctacccgtcttcgtctccgagttctgtgacatcagcggagctcgcgccgtcggcccggcggcgagagatggctggcacattcgggagttacggttgacctggatgccatagtaggacgttgttcaatccgggaatgaagaccttggtgattggtaggtcgactggaacctggtgtaacgatctgcttggctcctagtcttcagcggatggaccatgttcctcgaggatgagtgtatcgtgcccagcaacgtgtctctgacgaatcgtactgatgcgccttgaatactcggaatgcgctgcgattgggaccaatctcgcgtaggaagtggggctctccgatcgtgtgactatcagatcgagagccgcgcgaccgtttgtacatgaaatctgctgcgtttactgggctgctcgtgcactaaccgcggagaaattacccggactttttgaagtatgcatagacatggctagcatctgaactacgccagattacgaaacacgttacccgtagcgagtactggctttctgaggagacataggcgatttggcccagaaaaaaaacggtgggaagcgccccaccgacggatacgggactccgaaaaggccgaatctatcgtagatcggcggcaaaagcgggtagttccgcgaaattccagttccccatgccggtttcgcgcggaaactttacacggcacacaccggaagttcgcttctccagaagaaacatttgcaacttgcaagtgcaatcacacacacagatggggaccggggggagacggctcatccagggccaaaacgcactttgcacaaccagcacaaccgggacagaggccccgccgcttggcaacagcaaccccgtaggaacacgcgaccacgcgctcacgggaacgcaacttacctttggcgccggaaacgatgccacggggtaaattctcggcggcgggcccgtgatatccaacggggagaataaaccctactctttgcgacacggacttgggcttctgtccactcgccggcacaagaaaaggtagccgcccgacacaacatcagaacgttacggggaccgcgtctggtacggaaccggaaacggagatctcatgtatgctgcggcacgtacgtatgggcccctttaagcctgaatcgcgaaccctcactttatgcgcttataccactcaggaacaccgccgctctaataatcgcggattcgtccaggacacaaccgaccaccaacgcagagatcttccctttgggggtggtttcccccgcctatcttaggattctctctcgcgctatggcccaacacgcgcgcctactgagcgccttgcccacatcggccacacacgc

SEQ ID NO: 505460 - DNA, 140 bp, Homo sapiens
ttctgctgggtggcagcagggcgggtgcctttcacttgctttgctctctgcttttacggtttttaccctttcatccaacttttcattccctttgctattcttctgcctcattttccctattctcctttctcacatggcca

SEQ ID NO: 505461 - DNA, 407 bp, Homo sapiens
ggccacgaggctcagctcctcttcaggtctgcagctgtagggccctcgatctagaacatcagctcctccctgagtcttctgctgcacgaccctcaaactagaatatcagctcctcccgggttttcaggtgcacgaacctcaaactagaaccttaggtcctccccgggtcttcagactgcatgacccttgatctagaacattaggtcctctccgggtcttcagctgtgaggaccctcgatctagaacatcaggtcctctccaggtttgcagctggatgacccttaaactgagaatctatcagctcctctccagggctgccagctgcgagaccctcaaactagaacatcagttcctccccgggtcttcagctgcatgaccctcaaactagaacatcagctcctctccag

SEQ ID NO: 505462 - DNA, 1012 bp, Homo sapiens
cgcggtggcttcatccctgtaatcccaacactttgggaggcccaggcaggtggaccccacctgacgctggagtttgagaccaggagaatcacttgaacccgggaggcggaggttgcagtgaaccgagattgcaccattgcactccagcctggcaaaaggagcaaaactcgggtcaattcacattaccttacataacataaattattcctgatctctaaaaaaaaaacaacaccaacaaaaaaaaccacttttgggcgccgcgccctcggcccaagaaaaaaagtttctctagacacccttttggtttgggggggccggggccccatatgatattcaagccttggggcacaccgtgtgtcccaaagaagatcctggggccaggctctggtgggggggtttccccccaataaaaaaaacgcccgggcggagacccagcgcgtgtgtctagaaccaaacccccaaggggggggttccaagccgcgcaaatacggcgacctacaacacacaacggcgggctccaacagcgagcgtcggatattaaaaattagcccgcgcgcggtgggggtgagtaacatcagtcacaactatcgtatcactatataacgatacgcatctcatatgcacctcttatagatcactagacgtactatcagtctatccatgaatgctacagacgaaccgtcccagatgcaatgacactcatctgattcacgtcacaacacatcgactatatcatactacctacaatctcatgtacatacataattatccacacatagagtcattattcttctacactcataacaactcaatacccctctacccaaaacaactcagcttcacccgtgcactatcacacactcagcactcacacatctaatacactccgttccactcaccaacataaatgaacatcaactcattaacatctcacccacacaaaccagaaaaccactcacatgcccacacccgaacacccatacatgatctactggattccaaacctcacact

SEQ ID NO: 505463 - DNA, 103 bp, Homo sapiens
tcctcatcaacctatagtacccctctggtcatgatacaaccagaaggaaagtctgtaaatctcatacaaaggtagaaagtgcacattcaacccacacacgctg

SEQ ID NO: 505464 - DNA, 377 bp, Homo sapiens
  misc_feature (98)..(99): n is a, c, g, or t
  misc_feature (110)..(110): n is a, c, g, or t
tcattttcaacttaattggatgtttcttttgcaaggtcttgtttttttcctagttctcattcaccgttcagttgccttcccccacctgtgagcttttnnagtcaaacttngtttattagcttttttcctgattcttctttcatgtctttctttcctatcccaaagtatgattgattagacctcaggttacccttctgaatgagctcttcctcaatcctaggcctggccaggcatggtgcctcatgcttataatcccagcaacatggtaaaaccttgtctctacaaaaaacacaaaaatgagctgggcatggtggcccatgcctgtagccccaactactcaggaggctgaggtgggaatatcacttgagcctcagagg

SEQ ID NO: 505465 - DNA, 280 bp, Homo sapiens
cgacggttagagtccatggtggtcgagcaaagatgtggtggcaggaacaggtaagagctcacatcttgatctgcaagtaggaggggggagggggagaggagagaagagaagagaaaggtagaggaggagaggcaggctatgaacaagtaggggggtggaatgcagagagataggggaagggaagcagagaaagagcaagagagcaaggagggggcaagcagccccttttatagtgagtaggacatacctggctgttgccaggtagctgtggggtcgacgc

SEQ ID NO: 505466 - DNA, 102 bp, Homo sapiens
caggcgcttaattggcctagaatgtgttgaatgcgttgaatggccctggtctatgagaactacaacaagttcatctctagccacatgacaccataccggtaa

SEQ ID NO: 505467 - DNA, 984 bp, Homo sapiens
gctggcggccgtggagtttgtgacatacgaaggtgacacccctcgagctcacttcccttcaactccagctggagcgcctgcttggctttgggttcgcttctgcatgccttctgccccgtctcctagcctcatgggccggactcctagacgcatgaagcccagtcgcactaggcgcagaccgtgccagcgagccacccagactcgccacagccgcccagaccccgacactgataaccccggagcgagcagtcttctctaggcgagtcccggagtcctatgaacacctgaaatgtatcatgacctcccgatgggagtgttggcgtgtctcaccagctgcactaatttctccatctccttcttctcttctctgcttggcaggggcatgtggtttccgttaacgctggacaacagtcgcctccggcagccagcgtggtggcctatagactaacaagatctgaacaggccactggactctcggtgaatcaactcatcttgatgtattgctgtgagcagaggagcgtggagatcctgacacgagcatgatccgagtagctgcgtggatcacgtaatctcccagcctagtagcgtgcacgaacacctcatgtttcgaagtactcctgtgtcaagccctcagcagcacgcgtggtagaacgttctcagtccttgtcttggatcgccctgcaaggagtccacgactcccgtaataccgctcactaagtgtgccctgaagcctcctggttgcgtactgcgggtgtaacgtggctctgttcatccacgggttgtgagcattaccgccacttaaaaactttgttgttcatccgtaagttccctttgccatgattagttggcaagggttcgcacgaatggcagtcatccgtctccgaaggcagcaacttttatcaccttatgcacgagtgtaggtggccaagaagagtgttcctaaggaaattggccaacttgggtccactcccaaggacagaaacc

SEQ ID NO: 505468 - DNA, 106 bp, Homo sapiens
atgggatcatcactcggatcacagatggccactgcgcattgccagccttgtgagctccagagatggattcagggagggtttcatttgatgtggctgcgctgctacg

SEQ ID NO: 505469 - DNA, 274 bp, Homo sapiens
tcagtatttgaaattgtggtgaaaagctgcagctgtcatcttcaaatcatctcataacatactttaaaatgttctggtagtagtgtgcattgttcatatgagaatgtcggttgggtgatctctttgctgtattaatgagttctttacatgtggtctcatctgcctgtgtgagttctgtgtcttaatatttactggaatggaaatctatgtattattgtaaattgtatatgctggtaatcaaaaattaatcctttggttaaagggaaaaaaaaaa

SEQ ID NO: 505470 - DNA, 262 bp, Homo sapiens
tccccccccccccttttttttttgggtcccctccctcccccccccctcaaggggggttttgtttggttttttatttgggcccaaaggtttccgggggttgcgaccattggcaggggtgtttttcaacccctggggttccgggcctttttagaacttttccgggttttcccccagttttttttcccccccgggttggggccccgcccccccccccggggcttggggttcccggccctgccccgggttcaaccgggccttttta

SEQ ID NO: 505471 - DNA, 285 bp, Homo sapiens
gcgtgtacgtgattaggtatacaatatagtgtacaggccgtgatttaaaaaccagaaaacagctatgcatgataatactcctagagcgtggttcccctctagacaggacatggaattgtcccgaggttcatttcccccaccattgattcatcttcctccatgtagactgggatgagaagtcaaagtcttcatcaaggtcaaaagccactttttacagaaaaagtgacttactccatagaggttacatgagatgctctggaagcacttaggttaattccttcacag

SEQ ID NO: 505472 - DNA, 908 bp, Homo sapiens
  misc_feature (45)..(45): n is a, c, g, or t
  misc_feature (158)..(159): n is a, c, g, or t
  misc_feature (164)..(165): n is a, c, g, or t
  misc_feature (183)..(184): n is a, c, g, or t
  misc_feature (209)..(209): n is a, c, g, or t
  misc_feature (211)..(211): n is a, c, g, or t
  misc_feature (262)..(262): n is a, c, g, or t
agcggggtacgctggctggatgggcgccggcaggagcgggcaggncgaggcgaaggccggggagggatcgagaacggtgtgggagagctaggctcggggggcgaggccccggcccggcggggcgatggaggcgctgctctccacccccatcaaccccnnacaannttcccctgccaagctgtnngcgcctggtgaacagcccgcgctancngctccatccagctgtggacgtgcctgcgagcgagggtgcttgcttatcgantcagaccgctctctcgagtgcctgacgctgctcagcctcgcccgggcctgggggtgcggtggcgggacctgcgggggccggggccgacgcccgacgctcttcgaaagccaccatgcttcaccatgctttcatcgcgcgcaggtcaagcctctacggccttccgcaagtgtggtgctgcggcgggccgggggagcggcgaaaccggcaaggcagatggtgccgactcacatcacgttcacacaagcccgtcaacttcctgcgcgcgtaccagtgccacaggctgtctcagtgcaccgtcaagtcggcctcatccagctgccagacataggccaagtctggcggaccggcctgtgagcgtgcccgtgcctgcgccgcccaaggcgcttccgagcggctgctcatcacctcggcctccgccgacaccgttgccaactgcagcaccatgcagaccgccgcgcgcccgacggggcccccgtgcccgagccgcacggaccagttggctgtagcgacaatttcacccggtcattccgtcgagatagtgtgtctcctttactcctgtgtatcaactccaatccatgaccacagtacttaccctctgaacggtttagatccggacccagttcctcatacaatatggcgaactcct

SEQ ID NO: 505473 - DNA, 498 bp, Homo sapiens
gaatgtaggctttgaggggtactgtagatgttgcagagagtactatataagggtttgaaatctgtaccaacaggtccttggacagctgcctgagccagtccagcactggggaaaagaggcttagtaactggacactgtgggacaggtacagttgctgttagtagcagatggtctattaagaattacctggctgctgaaacagtctgtgcttgagtcattggaagaattccaagacgtgaaacaggtggagggcatacctggtggcattccaggcatcagaggtgatattcctggtccaaggtggaattattccacccattggcatcataatgttatcaccgcaaaatgactgggtgtattttctctgatgatgcaatccaggtggcatgcctggcataactggtggcattcctggcatcagaggaggaacacctggccttaatggaggtatgcctggaggcattcctggtgctcctggtactggttgcagtcctggct

SEQ ID NO: 505474 - DNA, 89 bp, Homo sapiens
gcggccgcctactactactactgctcgaattcaagcttctaacgatgtacggggacatgtaataaaggtgtttattgttttgttcccac

SEQ ID NO: 505475 - DNA, 253 bp, Homo sapiens
gatccgagcgaggaagggacatgtgctcatgggggaggggaggggcacagaccgccagtccagctctttcttcttggaccccgatcccattaagtgaaactaaagacattgaatttgcctgcacatttcgcaactaaataggctccacgggacaatggcccctggggtgtggtttcatatctgcgtgtagatgctcctgcaggctgagattacgaaaacttggccctccgtttgcagcagggtggaatcggct

SEQ ID NO: 505476 - DNA, 345 bp, Homo sapiens
ggcacagtgtctcacacatacaagatgcctctgtctggtaacaggcacaccagcgtcgctgttcagttacagtctaagtctcgtaacgcggggagcgttcatcacaacgaattttatttacagctttatcatccatatgccactaaaattcacctgttttctttcaacctgcactcattttgattgcctggaactctggatttaattcttcgatcccactttgtatcttgcattcacttcactctctctccagcttttattctttctttctctttccctaggtccaatgcacttgacccaactcacatgcgtggactccgggaaggtactgctccctccctccaa

SEQ ID NO: 505477 - DNA, 960 bp, Homo sapiens
actgtgagcggtgccaagccaaggggttcgtctgtgaactctgcaaagaaggggacgtgctcttcccgttcgacagccacacgtctgtgtgcaatgactgttcggctgtcttccacagggactgttactatgacaactcgaccacgtgccccaagtgtgcccggctcacgtgaggaagcagtcactattccaggaacctggcctagacatggatgcctagaacactggagaacgccaggcaccgtatccacccctccggctggtgcctgctggccttgcccaccagatgtgcattctactctggagacgagccccccccccccgcagagaataaccccaaaaacacctaggaaccaggggccaaaaagaaagggcttaggggccccgggaaacaaacccacgggggggcggaagaatcacagaggggctgaataccacggcatctgtgaatggcgttggcaggaaatcgagggatcaaaaacacgggcgtgggccccaagtagatcggacacccctttaggggacgacagacacctgtgggtgtgggtacataccacccagaaaagggtggggaaactcaggcacactaatggaaaaaaaaccctacaaggggctttaaaacaaccaaggcacttatggcacaatagaaatgaccctggccacaggtaagcaacaaccttaaaaggtggccaaagctgaaaaggcagctccaggaaaccagaagatgcccggaagagaacaaccggagaagcaaataaggacaacgaggaccacaccattagacatgccccggtagaagtcgatactcgaagggggtgacacaggtcccgtgtagccggaccgaatagcactacaaagggtaaacgggtccacacgagtacagcggaagtgggcaacatgaaacggggcagaaacgacgggtacgaagaccccaagaacacagaagcggacagaacaaaa

SEQ ID NO: 505478 - DNA, 395 bp, Homo sapiens
tcattacacctgcaggaaacttggcatataccaccaaatgacaacattaatcatctttgaacatcatgctttattttatagcttgggaaatcacaatgaccattatgtctcaaaccattccctttataactccaatgagaccttattacccaaactttacaaatacaaaagccaaacttcaaagatcacatggctaacatggagcagataaaaatgtaacactgtatcttgataccaaaatcagtaagcaccctcctactacatgacgtagcctcccaattgctattcgaagagggtaactaaacaacttcaggaaagggaaaccgagtgtatagcacagaaaattcaattgtcgaagcactaacacacacttagttctaagttctgctttatta

SEQ ID NO: 505479 - DNA, 740 bp, Homo sapiens
ggagttctgagcagggcgggactcaggtgggcgggatgcgaagagctatggggaaggattcgaattccggtggatttaaatcgcgggaggagaagctaccgcggcctaaagaagacctctgttgaacacagactgcagttccagccaccacagctaatctggatcatgaatgggagccaccgtggtcttggcaagtccgaaaacatagctgagtagctcgtctagaaaagagatttgtgttcagctgagttaaaagaagtatttacctcaaacctctcctcttgcacaaccaacccccgttataaaaggaagtgcaaaatggaataaactgattttaagtgaatacaagctgtctttatatacaaaagtaactcaaggatggtgatgtacccagtcatgctttcaactgatttgggaagcctacaccattcaccttaggttacatatgaggataacttaaaacattaagctatgcataaaaactccaagagaaacaataatttaagagtttctcacacagaagcgaactctgtggatgctgagaaggaaaaaaatgagagtcaaaacaacttttttgaactgctgcctgcagaaatcacttttaaaattttcagtcagctggacattcggagtctgtgcagggcttcattgacatgcaggagctggaatgacacaataagaaacagtgactctttatggaaacctcactgcatgactgtaagagctgttgtaactggggg

SEQ ID NO: 505480 - DNA, 303 bp, Homo sapiens
  misc_feature (21)..(21): n is a, c, g, or t
  misc_feature (299)..(299): n is a, c, g, or t
cccatcctagatgtaccctanagttgtgacagtatttgaaaaggcccaggcatggtggctcatgcctgtaatcccggcactttgggaggccaaggcaggcaaattgcttgagccccaggagttcaagaccagcctgggcaatgtggcaaaaccccatctctacaaaacattcaaaaattagctgggcgtggtggcaaacacctgtggtctcagctacacaggaggctgaggttagaggctgcagtgagccgtgatcataccactgcactctagcctgagtgagagagcgagaccctttntgaa

SEQ ID NO: 505481 - DNA, 274 bp, Homo sapiens
acaagtgagaggatcacatctgatggagagtgggcatttgacaacgatgtaactggtaaccagccttgtgaaatctacaatataagtgtctttttaatgctctgaaagctgctgctggtcattcattaatgtgtcagcacatttaatcaggatgctggaccttcaagatcacactgaaaaatgcaaccaagaacaggcggttcgtgttttcaacatgatctttacttaaataaccctgtgacaggcaatgaacgcatctgcacaatttaagctc

SEQ ID NO: 505482 - DNA, 808 bp, Homo sapiens
aactaaggtcagagctgaactgaaggagatagagacacaaaaaacccttcaaaaaaatcaatgaatccaggagctggttttttgaaaagatcaacaaaattgatagaccgctagcaagactaataaagaagaaaagagagaagaagcaaatagatacaataaaaaaatgataaaggggatatcaccaccaatcccacagaaatacaaactaccatcagagaatactataaacacttctatgcaaataaactagaaaatccagaagaaatgggtacattcctggacacatacaccctcccaagactaaaccaggaagaagctgtatccctgaatagaccaataacaggctctgaaattgaggcaataattaatagcctaccaaccaaaaaaagtccaggaccagatggattcacagctgaattctaccagaggtacaaggaggagctgttaccattccttctgaaactattccaatcaatagaaaaagagggaatcctccctaactcattttatgaggccagcatcatcctgataccaaagcctggcagagacacaacaaaaaaagagaatattagaccaagatcctgatgaacatcgatgcaaaaatcctcaataaatactggcaaccgaaatcagcaacacatcaaaaggttatcaccatgatcaagtggggaaacatctaatcttcttaaatgcagtgtacttacatggcctgcgaatctcttatgtgttcacctcggtggagggcattggaattcctggtcattaatggttggattctggttacttttcccccgcctggaaccct

SEQ ID NO: 505483 - DNA, 497 bp, Homo sapiens
  misc_feature (194)..(194): n is a, c, g, or t
  misc_feature (227)..(227): n is a, c, g, or t
tcaaaaaatgcagccaatatttaagctccccgtgatttcagactacgaatgggtacctgcttcgtctgttctgtgttggttttctaaaaacgcacccatcagatacggagggcctttattgctcagccccacaggtgccgcccaatccggaagaagatgatggaaatcatgtccccagaggtgccgaccaattnctttaaaaaagtggtccattaatttattcccgnccgccttggaaaagacatagaaaaggcttgcccatctatttatcctctccctgatgtttttgttagaaaagtaaaaatgctgaaaaagccccagttttaattgggaaagctcatggagcttcctggtgaaggccgtagttttggaaaaacccctgggggccagaccggtgctaaagtttaaccagcttatggatattaaccccccgtcccaaaatttgtttaaagttccgacttccaatagtggccaataaaaagtgcttttttttatta

SEQ ID NO: 505484 - DNA, 337 bp, Homo sapiens
ccctggtgagtgaggggaggagaggcatggaagaaaaaatattttttcactgcactctgaacaactcccattaccggcccgatgcaggtcatgatgttccaggccctgcaggtgaggggaagcagacagccatgtgccgtcaccatgcagtacatcacctggctgtgcctcaggattcaatctctgctcttctcaatctggtctcccttcccaggagatcctacctatgcacttcctcaccttctaccctcatccacttgccaaaatcttccaaatctgcagattcagcccaggcctgaccatcctgagctccagacctacacatacaactgcctat

SEQ ID NO: 505485 - DNA, 403 bp, Homo sapiens
  misc_feature (88)..(88): n is a, c, g, or t
agatgtactgtgatgtgagtttgaaaaagagtttctgaagtattatatttgggagatatgttactagctgagcttttcaaaagtttantaagagctgaggaattgtatttttatctttagtataaagcaccttaaaaacagtaaaaggagcttttatatttcagataaatatagcactgataaagtgacagctgggctgaatattacagcattacatgggccatgcaatcaataatttaccattagcattagggccatggcaaaagcaaatttagacatttttaaaaggaaacagattttaggatgtacaaataaagtttttacagatatagtcttttaattagtacttttatcttataaactgattatgtatgtctgttttttcaataaacaaacaaatgaa

SEQ ID NO: 505486 - DNA, 207 bp, Homo sapiens
cacgaggcccgggttacttttgtagacttcacagttaaccgtaggagtttagaaagccagtgtctaaatgaagtacatactgcaggaagacctgatgtggacgacaagcgatctgatcttcctaagcttcaaggggaatttcagctccgtcttgcgtcaacttggaaaaatctctaccacaagctcctgaatgaggtgaaagggggc

SEQ ID NO: 505487 - DNA, 805 bp, Homo sapiens
ggcagagggctctcagggtccacgtcaagggtccagcagtcgtcaccattgctccctacgtcacactccggagggtgtctcaatgccgaaagcagcaaggctgaacttccctagacctaagagtgccttggagcgcctgtactcaggggatcaccagcgaggcaagatgatttgcataggagcagctggagcgcatgaagcgataccagaaggccctggtccgagagcgcaagaggacacatggcgtggcaaggtgacgagtgacggtgctcctgtccatcatctcgtgtacctcagccgtgccgctccctgtgagatcttggctcagtatgtaaggaggggccaggcagcgtggcatgggtacagggaatgccgatatgccccatcacaagtccccctataacgaggaagcacagtcatacctcccagtgaggagagctgtccattggacctacatggtttcagagaacgacctcccaaggtggtctgttagtccaccgatcgaggcgtggtaacgaatgccttggtcatgcaggggtgacctgaaccatagctggaggtgaggatcaaacaggcccagcgagcctgaggaaatacccagtcaggacctcccagccgcgatggacgaaggggccctttggcaggccgtttcggacagtctacggctgcaatttcagaggaactgggcaataccaggggttcacagcaggagaggctgaaccatggtgacctgattttgggtagaagccacaagcaaactggatttagctccccagaaacttgcagcgagaatactggggtgagg

SEQ ID NO: 505488 - DNA, 415 bp, Homo sapiens
  misc_feature (411)..(411): n is a, c, g, or t
cttaaagtcataaaagcttaatgaacaaaaggggccagaaccactgttgccactcaaccacccagtatcaaatccacaccctgggagagaccattccccagggaccacttcgggcccacggatcccttttagtccagaagacgtcccaaagcccaaattagatacggcatctaccaagtcggcagaatttgtggctaacttgcgccttcccactgttaaaccacaaaccctacccattttacaaccagctccatctaaggaagattcctccacaccagtcatttacaacccaacagctttccccaacacccacaagttttcagttaagaatccctctgaccaatgcagaggcaggcaggctgcagaagcagggaaggtgggcgaggtcactggggtcccgatctacatgtnatgc

SEQ ID NO: 505489 - DNA, 737 bp, Homo sapiens
ggcagaggggtccatacggcgtcgttctggattcccgtcgtaacttaaagggaaattttcacaaggtccggagccctgagtgtcctgcgaaaatgaaggaggaggatgtccttgaagttcctgtgcagcacggaacccacttcaggtggcaccaagtcttgacttccagatggaacagtacatctataaatagggataaagtgatggcatcatatatcatacaagtctcagagaggaccgtgggagaagcttctgctggcaggctcgtgcaagttgttgccatttgaataagccctgctgagtgtcacgctgttagtactcactcgcaggtaatactgggccagtaggagctgtgtctgaaagtgttgctggctagccagctggagtccatatccatattgtctggacgcagctgttcactgcctgtgcagccttgtcacgtaaaccaagatccacggcagtgctgtccagggaggccacggacttctatgtggtatactgaccgccagggtctgaccgagctagccctcctcacagggagggcagtcttatggttaacactacctaccaattgcgctggtgtaacacatgattctcctctgcgctatgtggacatggtcatcccatgcaagcaatgaagggagctcacgtcagtgcggcttgatggtggtggatgcctggctcgggaaaggttactgcgcaatgcgttggaccgatttacccggtgaactagccca

SEQ ID NO: 505490 - DNA, 116 bp, Homo sapiens
tcacacgtcacacccacagtcacacctcacagtccacacactcacagtcacacctcacagtcacaccgtcacagtcacacctcacagtccacacctcacagtcacacctcacagtc

SEQ ID NO: 505491 - DNA, 518 bp, Homo sapiens
cggttaagttcttgttagagccggagaatgtttcgagagtgaccgcgtagcgcaaacatgttccagggtcctgtgcctgatgatcggtcgccctcatgttggcgctagtggaggcgaatcgcttcggagaaaatgcgctgttggcgcacaagtttgcgcaggcgatgaggacaacagtgtgtacgaggaacaacctggggggcctgtggtacgccatttcatgggataatgagaactaggtgtggctttgctaagacaatgggttcttacagtggctggcccgaagttctgtgaggcacaaagccacatacaccggctactggttggtccaacaagacaaggtctgtccaagacacgtcggtgtgaagaagcgttctatgtgtgtcaattgtcccccgcccagctaaaagttggtgtacctctgggtgccactctctttgcctaatgcacttgttgacgtgattcttctgtgccaccggcacccaaagaaaaagaaaaaatcattaatagaaaaaaga

SEQ ID NO: 505492 - DNA, 170 bp, Homo sapiens
cccaaaagggggggggggggaaacccccctttcccccccttttgggggaaaggggggaccccttttaaaaatttttttttttggggggggtttcccccggggggggggtctaaaaggggcccgggggttcccccctttttttccccccccccaggggggtttttttccca

SEQ ID NO: 505493 - DNA, 255 bp, Homo sapiens
atgttgtgccttctcacgcaggggggagtgggtctcatcttattaccaacagccagagaaaggagttaatattcaggatgcatcattctctaaaaaataagagctgagctctgttgattccaggaaacatggtgcagggatcgatgaagggcctgtgataggagaatctagatccagtgcgcaggggtgcgtctaagcatacagtagagacagtcgcagagctagcaaacggtcaccttttttcggggaggtgca

SEQ ID NO: 505494 - DNA, 200 bp, Homo sapiens
ggagacgggggtctcacccgtgtcaccaggcttgactacaggtagtggctatcacagctcacggcagccttgaactccggggctaaggatcctcctacctgagcctccggagtagctaggactgggtctccatctggtggtccaaggctgggagtgtagtagtgctatcacagctgacggcagcctcaaccttccaggcg

SEQ ID NO: 505495 - DNA, 236 bp, Homo sapiens
cactcctcccactcacaatttacgaccacaggaccctctcaagtagcagggactacaggcgtatgctaccacgcccggctaatttttctattttttagtggagacaggattatgcgatgttgcccaagtggttcttcaagctccgtgggctcaatgtgattcacccagtgaccgtcccaatagtgttgaaggttactacggcgtgagccaccgcgaggggactccgtctagacgtc

SEQ ID NO: 505496 - DNA, 357 bp, Homo sapiens
ggggggtttgtcctgcatgtggcccagacccccctgacccccgggcctgcctgcctggccctgcatgttgcccgccccctgtatttgggcagatcctggccaggacaaagtcggggctcttgttttattttttcttacagagtctccccccctttatagaatgtcaaccaaagagggccccccccccctttcagcctcctttttagctagcccccccctttcatcccaacgcatgtttgtgacctttgggaatcatttacagggccccccggaaccctgttttttgcccccagccaaaccaccaatgtttagctttttttatgggatttgatgcggtaaatggaaataaatattgtt

SEQ ID NO: 505497 - DNA, 406 bp, Homo sapiens
  misc_feature (40)..(41): n is a, c, g, or t
  misc_feature (345)..(345): n is a, c, g, or t
gagagactggtcacagtttatccttcttatccttgtgttnnactcttggccgctagccagcagaggttgtggcttataaggggagaaactatgcattaccaatgttaatgatattatttgcatgaaaagagtgtgataatacaatggctcatttgccccacaaaagtgtagggcaagatgaattgattacttaattgatgggttgcacaattgccgttcgacggaaatgcaatcttaaacgcaacatagtaaccagtgcgactgccataacgaccattgcagccagtggaagctgttgtaactgcaggccaaatgccagcaaggtgccacccaaccaggcacctnatgcattgcctaaattgaacgcgctttggttaaaggttgatgccagattagggagtctcac

SEQ ID NO: 505498 - DNA, 389 bp, Homo sapiens
  misc_feature (74)..(74): n is a, c, g, or t
ttttttttgagatggagtctcactttgtcacacaggctagagtgcagtggcatgatcttggctcactgcaagcnctgcctcccaggttcacgccattctcttgcctcagcctcccaagtagctgggactacaggcgtctgccaccacgcctggctaattttttgtatttttagtagagacggggttttgccgtgttagccaggatggtctcgatctcctgacctcatgatccatctgcctcggcctactaaagtgctgggattacaggtgtgagccaccgcgcccagctcttttaatgtctttaatgtagcttacaagaaaatattaaattaatggtatgtgggctttatgttataattttatttcaacagcactgctctagctttgct

SEQ ID NO: 505499 - DNA, 162 bp, Homo sapiens
agcaggaccctgcacacgccgagccccatacacttcttcaatcccggtggacgaagtgtgcaacaacttcgtccataatgacctgtatgggttttcggcgtgtgcagtaacaacttcgtccactgggacctctcggactcgtctggatgttcggcgtgtgca

SEQ ID NO: 505500 - DNA, 313 bp, Homo sapiens
  misc_feature (1)..(1): n is a, c, g, or t
  misc_feature (46)..(46): n is a, c, g, or t
  misc_feature (146)..(146): n is a, c, g, or t
nttcggcacaggaaataccgccagacctgactgtgcctccaggtanctgacagacttcctgctgtggccagctctggtgctgtgcttcccgtgagacccaggaccccttcctgccatacccaccaaggtcctgcccacaggcaggnctgcctctagcgcccactacctcgagacccctgcccagagggtgggttgcttggtgtttgcgggaacgtgggcattttctgccgggaacggggtttgctgctgggctcgagggccttaagggagcggaacctaggcctgatgggttaccagctcctgccgttaccct

SEQ ID NO: 505501 - DNA, 145 bp, Homo sapiens
gaactagtgcagtggaggtgccccacagggatggtaccctacaagcacctcttggcaattaccatttccttagggggtgtgttattcagaaacccccctaacttcacgggtgaagatttttgagacaatttctgtgcctgtgtgc

SEQ ID NO: 505502 - DNA, 271 bp, Homo sapiens
gtcaacgcaatactcctgctggtcaggctggtcttgaactgccaacctcatgtgatccacccatctcggactcccaaagtgctgggactacaggcgtgagccactgtgcctggcctgagaggacaaatatttttacaaagaaatgatagttctttaatgtatagaatgtgggatgattattaaataattgccctcgtattcagaacatgtattcagtatgatcagtgattcccagatcttggcactacttgacatttagcggccggataaa

SEQ ID NO: 505503 - DNA, 119 bp, Homo sapiens
aaaggagcggggagggtaatgacttgagggcatagcaggaataatcaaggtttttcttgtaagcatgtggagacttaagcatgataatatgtaaaatgcctggcacatacatggtgcaa

SEQ ID NO: 505504 - DNA, 790 bp, Homo sapiens
  misc_feature (328)..(328): n is a, c, g, or t
  misc_feature (418)..(418): n is a, c, g, or t
tcccgtctcaggtccccgctgcaaagggacccgccgccatgtctgcgcatctgcaagggatggtcgggcggaactgccccagttccctgatcaaaagaaataagcaggacctctacagcaccgtgaccccaaataatcgttgaagggcccgcaattccctctctccgcatacaaccggaccgtgattctcacccgaaaaactgtggtgggcgtatgagacccaggcagccgacggacaaagtggtgctcggtgggtggctcattaaagcgagagactccgcgcacagcagagatacgcctgtgcacaccctctccttatgtgtgtgcngagaccccaccacatactcaaacacaaagagaatgtgctctcgcccgccacgtctctcagacaaccatctcaagaccaacatgtgatctnccgcaaagaaaacaagtgttacccgccccagacctgtgccggcatgtggtcagccatctccgacgaggggcccgaggcgcccactccgtggcgccgaggccagaagagcccgtgtgtgaagtggttgaaagaggaaaagcgggacccccggccccccaaccatagaatgcctcctgtagaagcccccgtgtgtcgcccccaagaaggcataataaaaggatcgagccgtgggctttccctcaaaaaaaacaaacaccaaacaaccaacaacaaaacacacttcgtagggggcaaataccataaatgacagggggggggagcagaaaaacaaacggggtaatgtaacaggtgggcatatatgtccacaaatgt

SEQ ID NO: 505505 - DNA, 773 bp, Homo sapiens
ttcctgcccagtcattgttcgacccagcaccccatacgatgcagtatcaaggcacactttctggccacgggacctgtggccttctccgcccagcccctgctcgctgccccgtacccaatattgcccggggacgccgagtggctcaatgaacacggagacatcctctccatgggatgatagacagcggccgcctcatcagctcgacgcggctcccccaaatgaccctgcgcatgccccccgcctggacactgactggcagcagtcgggctacagcctcctactcccagccctcgagatgagcttctaggtccaggtgatgactgcaaagcagtctccaggagcaggccactactgcccagagagcagaggaggaggttagttgcgcagggactgcagatccatgtcagacctggccaccaccttgggcacggccatctctgccctctggaccatgtctttcagtcgggagaaaccagctctagagatggatcaccagttcctctaaaggtctcacagcaaagtgagcacggagctcccaggcacccgtgtaccctgcctggcctgattcagggccattgtggcccccagcttctgtttcaagctcggcagatccccaggatcccttccctccctaaggactcagctgaggggcccctctgcccccattctactctccacctcagcaccctcccccagcttgatgtcttgggtctccccagcacccatcctcctggaccggtgcaaagtacagggatacaccgcaggcccttgca

SEQ ID NO: 505506 - DNA, 222 bp, Homo sapiens
tgaaacaaagctgcccagttatctctaagctcgaatttagactacttgtccataatattcatccctgtagcattgttcgatacatggtccatcatagaatacacactcgcagatatcaacatcggacacaatcattaagcatgatcttgaaatatctactcatcttgctaggtaccatactaatcttagataccgctaacaacctattccaactggtcatcg

SEQ ID NO: 505507 - DNA, 744 bp, Homo sapiens
agcgggggggctgcatggaagccgcgcgcgccgtcgttttggtggtcagggacccagcgaggagcgccgactcgccggccgccgcacaccctctctcggctgcagcctgctgtgcgctgcacggcctggggcccgtggagccccgatccgcgtctgctccatgagggggccccgcgaccagccgctgcttccagcaccggggcggtgcggtgctgaggcggtggcggcggcgctgccccctctgcggtaagcgggcggccccggccgcctccgcgagggcaccatggaggtgaatgcaggaggctgtgatatggctatatcagttcttccagctcagcctcaaggccatgcctcttgtcacagtgagggtcctgagaatagtttccatgtcctcctccgtcttctgttccatcttctccaaagtagctctaatgctgataccaatggtaatcccaagaatggtgatctcgccaagtattgaaggcatcttgacagaatgatcgagtagatgtgctactgacacacaagctaagtcgagtgcaccttgggatgcacaaaaagctcactagtggggtgacagaatttcagggactggctcctactgtgttaaagtactgtgggcgaatgtgcgcgatccaggattccacatatggaagttccatgcttgccaaggctgtgacaggttcctactcggcgcaagctattcagcaaaggatccagtaccagaggtgctgaagaatgaca

SEQ ID NO: 505508 - DNA, 249 bp, Homo sapiens
atagagaacagagtcccccattccccccacccctgctcacacacatacacacacagcataaaggccatgtgacgactgagcaagaaggcagccaactgcacgtcaggaagataggcctcaaaaaagaatttctcttcctcaagagtcaaaaagcacatttgaggttatttcagtttttaaattatttgtttgtttgtttttcatcaccatggtatttcatattatcttatatccaaggtggctgtaaac

SEQ ID NO: 505509 - DNA, 520 bp, Homo sapiens
cgagttggaggttacaccactgttgcccaggctggtcctgaactcctcagctcaaagcaatccacccacctcaagctcccaaagaactgggattacaggcgtgagctacgacacttggcctgaattttattcttttaaataagtatattttctttttgaactttggaagacctctaaaaagggataaaagtcataaacactgcttctgaagtctttttttttttttcccccctaagttcagagccaggccgtggctctgaacttagggcagaaaaaagagaaagatttaaagccgagcaagacaaaaagatagcagattgaccgagcaagaattggacccagaaaaaaaagcagctgcccaagaaagagaagggagagaggcagaaaagagggaaaagatgagggaggaagagaaaggggcagcagaggagaggcagaggataagggaggaagagaaaggggcagcaaaggaaaggcagaggataaaggaggaagagaaacgggccgcagaggacaggca

SEQ ID NO: 505510 - DNA, 347 bp, Homo sapiens
agttactagctcccaaagaaatctaggatacctctagtctggcacagtggctcacgtctgtcatcccagcggtggcagcccggggcgggccggtcacccgaggtctaaacaatattcttcatcttaaacatttaccttaatgtttaaattactgcttaaataaaactgggaacagtccatttgaccctcgaatgtgtactttaaaaagaaacatttacaattacctttaccaacggtagaactgacacaccttgagttactggctgaaacacatactggcataggtacttcaaccagaaacaggcagagcaagtggtccaatcaaaatcataaacaagatggttcaa

SEQ ID NO: 505511 - DNA, 233 bp, Homo sapiens
gcagcaggcaatattcttttcttccatgcctagtcaatctgagtagggtttcctcaatgagaaggggtaaatctgaaaatggctggtggtcggtaggggagctttttcttttctttccctttttttgtgttgggtttgtgtttttgtttttggtaacatgttaggagttaatgttgcaaagagtagtttacatctccactttctgaagacacttgaatttaggaccgatgtat

SEQ ID NO: 505512 - DNA, 509 bp, Homo sapiens
  misc_feature (125)..(125): n is a, c, g, or t
ggggagaaatgtcctaggcctccgccttttttcttttattcacccagagcaaagttgcaggtatgtgagcgcctttcatgattcgtgccctatcccgcggtgccatttttaaggatttatattgnatttttggtgggtatttcaaatacaggtgtctaacagattcagtgcattggccgggtcgacaggtttggtgccctggcccaatcgcgctgtttcaggtccgttatcctgcgtacagggcccttcaattaaaagttgtgtgagggtaaatccctgtcctcaccgataaaagtgtgcttagacgaatatctcatgtcgacgcctgggtgataaacccaatgaccgccttctgaggctccacttttacaaaaggtccctctcccttggaggtgggaagggaaatgttagtttttctttttctagaaaaaaccgggttaaatctttttataacggggttgattttttaacctatgggtcgaagtgggaacacacctttttaatctcta

SEQ ID NO: 505513 - DNA, 617 bp, Homo sapiens
  misc_feature (28)..(29): n is a, c, g, or t
  misc_feature (85)..(85): n is a, c, g, or t
  misc_feature (118)..(118): n is a, c, g, or t
  misc_feature (123)..(123): n is a, c, g, or t
caacggtgcaactttcttcggtcgtccnnaatccgggtcatccgacaccagccgcctccaccatgccgcccaagttcgaccccancgaggtcaaagtcgtgtacctgaggtgcaccgnaggcnaggtcgcgccacatccgccttggccccgaagatcggtcctctgggtctgtctccgaagaaagttggcgatgacattgccaaggctaccggtgactggaagggtctcagaattacagtgaaactgaccatccagaacagacaggcccagatcgaggtggtgccttctgcctcagccctgatcatcaaagccctcaaggagccaccgagagacaggaagaagcagaagaacattaaacacagtgggaacattacttttgatgagattgtcaacattgcccggcagatgagacaccggtctttggctagagaactttctggaactatcaaggagatcctgggtactgcacagtctgtgggctgcaatgtggatggccgccaccctcatgacatcatagatgacatcaacagtggtgcagtggagtgcccagctagttaagaagcaacaagaaaatattccaataaaagactatctgataaccagtgaaaaaaaaaaa

SEQ ID NO: 505514 - DNA, 102 bp, Homo sapiens
ctgccagtgtagagcgcgcgggcacagggtgccgctgaccgaggcgtgcacagactccagaattggaggcatgatgaagactctgctgctgtaatgtggggc

SEQ ID NO: 505515 - DNA, 293 bp, Homo sapiens
atgagtttactagtattttgttaaggatttttgcgtcagtattcatcagggacttatggcttgcagttttcttgtaatatatttgtctggcattggtatcagagtaatgctggcctgataaaatgagtttggaagtactccctccttttcagtttttttggaagattttgaaaaggattgacattaatttctttttaaatgtttggtggaattctgcagtgaagctatctgctcctgggcttttctttgttagaaggtttttgcttactgattcaatctccttgttagttata

SEQ ID NO: 505516 - DNA, 297 bp, Homo sapiens
ttcgacggtgttctgtactcaggagacccatatcacgtgcagagacacacataggctcaaataaagggatggagcaagatctaccaagcaaatgcaaagcaaaaaaaaaaaaaaaaaaaaaaagcagggttggaattcctactctctgataaaacaaattttaacccaacaaagttcaaaagagacaaggccattccatcatgtgggtacggggtatccatttcaaacaagaagagctaattatcctaaattttatatgccccctaatacagacaccccgtgtcaaagggttcacgg

SEQ ID NO: 505517 - DNA, 714 bp, Homo sapiens
tgacaaactgccctacaaagtcgccgaagtcggtctgggtgccttgggtgacgcaaggccctggacattgctgagaacgagatgccgggtcctgatgcgtatgcgggaggcggtactcggctccaagccattgaagggcgcccgtatcgctggatgcctgcgcatgaccgtggagacggccgtcctcattgagaccctcgtcagcctgggtgctgaggtgcagtggtccagctgcaagatcttctccacccaggaccatgcgtgcggctgctcattgccaaggctggccattccgagtgtatgcctggaaaggggcggaaaacggacgagggagtaccctgtggtgcattgagcgatgatccttgtagcgttcaagtgattgtggccccgtcgaaacatgaattctggacggacatggggggcgaaccctcaatccaaaactcatccacatccaaggtaccccgccagtcttcttgccaaggcatcctgaggcatctctgatgagaccactagtggagtccacaacctctacaagatgatggcccatgggatcctcaaggtgcctgccatcaagggtcaactgactccgtctgccaagagcaagtttgagcaacctctatgggctgccgggattccctcatagatggcatcaagcgggccacattcatgtgatgatttggccggcgacaggtaactggtgggtagccaggctat

SEQ ID NO: 505518 - DNA, 174 bp, Homo sapiens
ttgaaaagtgactaaaggaaatagcagtgagggagcagcacaaatgagacaggggacaaggaaaagccaacctaaaggtgcattatcagcagcagctataggcagtggggattcaattctaccttgacttctgagaagtgagaagatccttcttaaaactgtcccctaaaggat

SEQ ID NO: 505519 - DNA, 433 bp, Homo sapiens
gtggactggataaagaaaatgtggtacatataaatcatggagtattaggcagccataaaaagaacaaaatcatgtcctttgcagccagccacatggatgcagctggaagccataatctaagcaaattaagaacagaaaaccaagtactgcatgttctaacaaatgggagctaaatattgagtacctcaggatgcaaaggtgggaacaacagacactgcagactggaacactgtgggtgaggagggcagaaggataggttgaaaaactacctattgggtactatgctcactacctgggtgatgggatctgtacctcaaacctcagcatcacacaatatacccttgtaacaaacttgcacatttacccactgtttctaaatgaaaagttgaaatattttttattaaaaaacacaaaagcaatatgtttctcaata

SEQ ID NO: 505520 - DNA, 149 bp, Homo sapiens
  misc_feature (97)..(97): n is a, c, g, or t
  misc_feature (109)..(109): n is a, c, g, or t
cggcacgagcacagaatgctggagagatgcgtcctggtgaacgtggggcagcccctcccacgacccccaccagactgccttaggttttttagccccnctcctttccttncccctctgcctccacccactctgggtcacataagatagct

SEQ ID NO: 505521 - DNA, 296 bp, Homo sapiens
cgtcgggtgacgatggcgcgcgtcgggactggaccgagtgctcatgggctaccagacctatccgctggccctcagcctcgtcttcgataacgtgcaaggtcatgacctcatgggcaggtgtcccccttgaccactttggggaggtgccaggttgcccggctagagccagctagggccgttcactccagtggcaggtgtttgtccccagtgctgagagcatagagaatctcatctcgctgttggctcgcccttgggaggccctgtgtggccgtgagctgcctgtcgggctcaccggc

SEQ ID NO: 505522 - DNA, 205 bp, Homo sapiens
tttcagctcatttcagttcataaagagaatggtatgtactagacttaatctagcaaactactactagaatagatgcagtgccgctcgcacttatacattatgataagatgcagcttagatatatctttaatgcttgctgagagacgaaaaaatagtttggccaacaaatgttagctctatgatgcccaggctcgtctggaactcc

SEQ ID NO: 505523 - DNA, 159 bp, Homo sapiens
tcccagtaccaaattgcaataaagcatgtgccatatagaatttgtgcatgaaagtgttttagtagcccagatatagattgtacccctggcaaactaagcaagatttctttttcattactcatcttgcaatagggtaccgcagctcgcaattcgtcaatc

SEQ ID NO: 505524 - DNA, 1084 bp, Homo sapiens
gcttcctgccgcccgccgctgccatgctgcccgccgcgctgctccgccgccctgggacttgtgcctgcctctgtcctgccactgccctgtgccttatgcctgaggcctgcctgcctgcccctggctgccgcctctgtgccccaaccatgatgtccttcaccttctgcctctcccactgcaggtgttcttcaacggtgccaactgtcctggcagtgtggactgtgcccactgctgacctggagccttcggcatccttgtgctggcccactgtgcccactgctgcatggtcctgcggcctggggctggtcgtggtgcatgcagaggacgtgcaccacctccaaatactttgtgagcagctggttccatcgcagtgaacgcctgactcttcggtgcagttgttggcctgaagaggccgtgacgctggacatgtaggacctgggtggcagccaaggcaaacttggatgaaggcccaggcggagcttgttggcgtgacagctgaccgaggccactgcgggcagagatccagatccgaatcgaggccaacgaggccctgcgttgaaggccctggagtaggcgagccaagctgcatggttgacctcagcttcgtgcagacacctctggcttgaactagcaccagccaccggacaccagttaaagaacccggaaagcctgaagacaacaaacacaacgggagctggccacgaaacgaagaagacaccgcagagggaacacaacgaacaacgggaaaccacgacatacatgtaccacaggtgggcacacaaaagtggtggtgcgcaaattaatctggattagagtatggtgtcttattattttctacaaggagcctagtgtagatttgtaaaaagattgactgactgtgacgacatatatgtggaagagaacccagaaatttactggtggtgtacacataacttgtgtaccaaactagccgctaaagcagattataaagaagtcaaagtagagataataaaattacaagtagtcaaagttgtagacaaaaagcgaggaatattggtcacgttctgaattatggtaacatatgctacatgagatagcaaataca

SEQ ID NO: 505525 - DNA, 447 bp, Homo sapiens
cgtttttgtcctattgtcgcgacgacagagttggccgagaccgggtccgcagaacgataattctcgaggggcgttccttttgccgctgtgttccttaccgccttctgttcttttctattgcgcgaatcagctcgctgcggtccgctcgcatattcttccccgcgccgctccgccatgcgtcatcattgttcttgtcgcccccgtatacgcgccgcttccctctttttgcgtcctggcttgcccgcagagtcctctctctcccctttgtttgcgacctggtatctggtgggcgacaactcccccttaggatacccgccttgtccaactcatgttggacacaacatcacactccgttgaatactacttcttccacctcccctacttatttctaattaaccaataatttcttcctgattaaaccaaaaatcaatgggcccccaaataaca

SEQ ID NO: 505526 - DNA, 564 bp, Homo sapiens
ggagagtgacgaaaatgatagaatctatgccttgaactttgtacccccagtttaatcatttgttgtttctgtttacatcttatgtactgactatgccttgaaaagtggttgtagttactatttttgattggttaatcatttactcttctacttagggtaggggtagtttacacaccatagttacagtgttataatattctgtgtttttctatgtatttactattaacagtgagttttgtaccttcaggtgattacttattattgattaatatcattttctttctgattgaagtacttcctttagcatttcttgcaggaaaggtctagtgttgatgaaatgcctcagctttggtttgtctgggaatgtctttgtttctccttcatgtttgaaggatattttcactggatatactattttatggtaaaagtttttggccttcagcacttgaaatatgtcatgcccctctctcctggcctgtaagctttccactgaaaagtctgctggcagatatattgcaggtccactgtatgttattcgtctcttttctcttgcttgttccgctg

SEQ ID NO: 505527 - DNA, 304 bp, Homo sapiens
atgagacattatcctacaaaacagagagtccttatgtagaccaatatgctatatgtctgagatctagcacattatagatgttatcttttgaatcagtgggagaaagattgactgtatgccaggcactgttccaagcactgggatctaacagtgaacatatttctacagtcagtatgtatatgtcaattgtctccaccctcagctctccctggaatcacctattccaccaatcttctgattactctctgaagagaataaatccctgatcttctttacagttattttcaggctttcagtattccac

SEQ ID NO: 505528 - DNA, 916 bp, Homo sapiens
cgcggtgactcacacctgtaatcccagcacttgggaggccgaggtgggcggatcgcctgaggtcgggaggtcgagaccagcctggccggcatggggaagccccgtctctactaaaagtacaaagttggctgggcgtggtggctcatgcctgtggtcccagctgcttgggaggctgaggcgggagagtcgcttgagcccaggaggcggaggttgtggtgggcggaggtcgtgccattgcactccagcctgggcaacaagagcaggactctgtctcaaaaaagaaaaaaagatataaatcacaataaataaataggttcaatacagttgtgggccaggctgtgtgtggacactgtgccactatagtgcgcagctactctggaggcagaggcaggaggatcacttgagcccatgaatttgaggcagcagtgagctatgatggtgccactgtactccagtctgggtgacagagtgagaccccatctctaaataaataggtcaacccttaacaatatttcaaattcttacaaaattgaaaagatgattcttctcaaatttagttgagcttctaagagcaagcattgggcttttccactttactaatcatttcagttcgacctcataccgtttacgccactggtgaattttctttcctcagcttaaccgagtttatagactgaccggctggaagtgaaccttgacgagtatcaggtctgtcatttacggtcaggcacgagaccaaggggatgtactgggcccaattgcgtattacagacccgatcggcatttcgcgggagctcccggacttggtaggcagtttgttcccatcccggcccgcccccttcgctactattgccactattcaccctggcgcgacgagcgtaaccaaaactgggctctacacaattacgttatctct

SEQ ID NO: 505529 - DNA, 368 bp, Homo sapiens
tatttgtccacagaggccgggcagcgtgggtcggccctgggggacctggccccttttcggcccccgggtttcagtccctgccctgcaggggatctttttccgggacatcggtacgatggtgggctggactcaggcttccacagggttgatagtggcagcaagaggtggtctggaaatgggtccacaggtgaattttcggggctgtcattccggatctcaggggctggcccgggggccccgggggccccggggacgcaaggggggtggctcagcgggcgggggccctgtgcggattgacttcttcgaccgccttgtccccggggggggtggggggcggggccctgtgggggggcggcggccccctttta

SEQ ID NO: 505530 - DNA, 164 bp, Homo sapiens
gtccgcgcctgttgatctattgcgtcttgcgtctgtgggctgatatgacaagacagtctcagagtttggcttcctggcatttatgactgacgtgacccgtcatcccggcatgtgtctcggacttatgcactgggattttgtctatctttcagtgcatcccttta

SEQ ID NO: 505531 - DNA, 300 bp, Homo sapiens
  misc_feature (13)..(13): n is a, c, g, or t
  misc_feature (186)..(186): n is a, c, g, or t
  misc_feature (236)..(236): n is a, c, g, or t
  misc_feature (241)..(241): n is a, c, g, or t
tgttttcaccggnttttttgactaaaatagctattgcaacagaggctactcttgggttaaggaagaatgtagtttcgttttatgtttaatatcgctcaaagaaaaataaaagcatctccctctaacaccaccagacttttcctctctgtaccttatcatgtaaattttgctatttgattttcaccngggttgtttcctttaatgtgcaaaaatttaaggctatttagctgacaacngcctngggttgtaaaacaggttatcaaggatctgaaagtctaagttagggaaaaaaagtggggg

SEQ ID NO: 505532 - DNA, 210 bp, Homo sapiens
tatggtacaggatctagaatgtgcttcaggtgtgtgctcggagggagtgcggtgggttgggttgcattcttatggtagatttgctaaagaacaggtggtctaaaaaaggcctggatgcttggccagagcgtaggagctctgttgtgtacacaggcgtggctaaggatggtgggtaactaaagacttcgagttctgcattcactcaccagc

SEQ ID NO: 505533 - DNA, 126 bp, Homo sapiens
cacgaggggaaaaactggactgaactatggtttgtactaaaacccaacataatttcttactatgtgagtgaggatctgaacgataaagaaaggacacattctcttggttgacaattgctgtgtcaa

SEQ ID NO: 505534 - DNA, 355 bp, Homo sapiens
atctccgtacccacgatggagatgaaacatgaacaatatagaagcccatatattgcaggattcttatcaagcgggtatacaactaatcgattatggtttaaatgcattgagtgggtgtattcaggtggttgaccggaaccagtacactcaaagtttgactagatattgcaaggattaaaatttcccaatactgacaaggattctagttcatcagatacattctcattgttttcctcaaatagaggtgaatgaagtgaccttttattgacagtgattagcagtaataaggctattgtatgtaactggcatccccaagaattctttcctcactaccattcagtgtcatagggaggat

SEQ ID NO: 505535 - DNA, 310 bp, Homo sapiens
tgaaaaagtattaaaggagactcaaaccacgtgacaagttactgcggcataagtagtagtttttttgtttgtttgttttgagatggagtctcgctctgtcacccaggctggagtgcagtggcgcaatctcggctcacggcaacctccgcctcccgggttcacgccattctcctgcctcagcctcccatgtaactgggacttcaggcgcccaccaccatgcccggcaaatttttggtatttttagtagagatggggtttcaccatgttggccaggctgatctctgactcctgacctcaggtgatcctcccg

SEQ ID NO: 505536 - DNA, 116 bp, Homo sapiens
cccccgggagcggaagcgaagcatgcgtccctgctgagaagatgtactgaacaccgatggcgggctgggtggcctggcaggagggatctcaggcaaatggaagcacgtgaaaaggg

SEQ ID NO: 505537 - DNA, 236 bp, Homo sapiens
gtcggttcctgctattccggcgcctccactccgtcccccgcgggtctgctctgtgtgccgagggacggcagttgtcccagatatgccgttcggtacaatagcggggcactctgacgagcttttctctagcttgtgtcactaacggacctgtctatcatgagctagcattactcggcttctgcacgcaaacggataatgacagcaagaagttcaaaggtgacagccgaacgtgcagc

SEQ ID NO: 505538 - DNA, 860 bp, Homo sapiens
caagatctaaaccgagaatcgaaactaagctggggtcatggagcctgcacccgcccggatctccgaggccccagcatgtgacgccctgttctggccctagttgattgttcgctatgcttcgccaagtagagttgtcccgacgctgcattccttgagtccataagtacgagcagaaatatatacgggcaccaagtaatagttgacatattacaatcagagtctagcgactgctagacacttaccatccaaatcgtcaggacagtacaatggaacacagacgcaatggaccctaatagccatatgccatgcatgaaaactaacaatgcgacaatgtcacctcacgccatcgaacgacacacagaacgagagaaactatatccctgaatccctggccctcgtatatgaaccatttctcaatgggggcttccccggaaaggtactatggtagagcacatacgagtaacgtaaaccaacagcctgtaagcgtaagcgggcaccaatgatatatcacacagcatcaggccagcaacggacgctgatacgcaacatgtgagtagctacacatcgtatcgagcacaagaccagaagcaatacgagagcacgtcacactttacagcgtacatatggaatggaaccgtcccgagtcgaaaagtcgcgaccatatggaataagcgcaatttctccgagatcatatattactgcccgagaatagtacacccacgattcacgattacaaaaatcggggttggagctgtacgcaatcaccagcgataggatacaaaagacgacactacggaacataatattcaccagatgcacaccatatcagagagcgcagacaaacgtataccacgattagc

SEQ ID NO: 505539 - DNA, 256 bp, Homo sapiens
ctaaagcgacgtcgcttcacctagctaggtggacggtggggactcaaggacttggctggcggttttcctatgtcatttctgcttcagctcttggctggcttcacttcttggtaaagttaagtggtaaccggagggtaattagctggcttcattattttggtattacaaccgatatgttcattagaattcttggcatttaaggtggatactgtaagggtgtttcgttccctttaaatgaatcaacgctgccacctag

SEQ ID NO: 505540 - DNA, 302 bp, Homo sapiens
  misc_feature (5)..(5): n is a, c, g, or t
cttantgtatgctgatcatctgccagaggtgcttcaccctgagttttgtcttgtattgtattctgacagtttttctgttttgttggccaggaaaggggagaagggaatcctcctccaggtgattttatgatcagtgttgttgctctaggaagacatttttccgtttgcttttgttccactgtccctgtgaacgtccacctgaaacctacacacctgtcatgcttccactcattctttctcatctcgggcagacggttgacccacgttgtacgggttccagagacctatgtaagcattccgaa

SEQ ID NO: 505541 - DNA, 889 bp, Homo sapiens
cctgccagcatacctgatttattagtttctattagtttttcaaaagtatcagaaataacagattgttgggagaagatacttctgccttttgaaaccaattatttaatatttgcattaaattggttgaatacaatcttaggcatatgccatactagaagaccaagcccataaattcataggaaataatcttccatacaaggaacaccaaggtgatctgcttcgattccatttacaatactggtgatcataatggtgcttttcagttatctattctgtcgtgtgcttacgacattattctatcttcgcaatgcttttttatatctattgttgctagagtttctgtcgctgtctgataccctcgtatggctgcgtacaccctgttcatcggtgactgtctttacttattcgctcttatgcgacattattggcgtttttattttctcattttgtgtttctattttctgctgacgttacggcttagtgtcgtcgtagctacgggcatgatgcaggcttctttttatatggcgtcgggtacagaggatgagaccctgctgagcaatcttctatattcatcgaactgcttttttgatttcgttcgctatctttagttcgttgttgattttgtttcgagctcgcgctgctcttcttctattttgtgtagcccgtttatttgtcggcataagtaatcgtatttcttggtcttgacacgctgttattttccgttacgtttgtttgcttgttcgcgattttccgcctggcggtccccttttttgtttattgtcgttttcctgcgctgtgtttcttttatttattgtactccgcccgtggtttcgttgttttctttttgcgatcttgtctattgccggcgtttctcgcgtgtgctaatttt

SEQ ID NO: 505542 - DNA, 217 bp, Homo sapiens
tgcaggctgattcaggaaagtgatagtctctctaagcctcacattctttactacaacagcaaggcggcctgcccagcagtgttgcttttaacggtcccagagagaaactcctggacaacctactagccagacaactgatagatagaacagacactgcggctacaggccacagtcagcagatcctgacagagagacggtccatatacatcacctatct

SEQ ID NO: 505543 - DNA, 141 bp, Homo sapiens
gtgactgtgtggccacaagtgccgccacgggcccagtgcgtgacacaatcaatggctacacatgcacctgccccaggtctgcagtaggaccatgggtggggggtgtcacagaagggtccactgaagccctgggggcaggtg

SEQ ID NO: 505544 - DNA, 126 bp, Homo sapiens
  misc_feature (16)..(16): n is a, c, g, or t
cacgtatcgggaaaantaaccacgggttggcagttcacccacgctgagcgagacccactgcggggagaatgggtacagtcggcgggaaatcagggcaggcacataggcggtgacaagcccggtatg

SEQ ID NO: 505545 - DNA, 108 bp, Homo sapiens
atagacccatactcacatcaacgatcgccatgtaggaggcagagcggatccctgtgtaaatagacacttagaggagatttggaagctggtgtggagcttaggagtaac

SEQ ID NO: 505546 - DNA, 295 bp, Homo sapiens
ccccctccctgtcccccgcctcctcccttgacgtttgattgctgcctggcgggaccgactggcccggcggggtggccccgccccgccctgcccttccctgggccaatcccccccgactaggggccgactcttttctggactgacttcgagacatttccgatcgggcatttttctggagggggcgaacggcgcccctgccccccctgtttagaccccctgggttagccgggcagccccagcctaggcctttactccccctgcctgcttaggggcaataaaccagaaccaaagtcga

SEQ ID NO: 505547 - DNA, 1047 bp, Homo sapiens
ggtttcaccttatgaagtatagcaggctctgatgctggtgtctggtagaaggaaggttattcacgagttctgttgcttagctcagaaagtggcgcttacaacctctccattagacatgatgacgtagatgcatgttcctgggcaccccatactggtgtgctgcctcacttgggcctggagacagggaatggtggagtgggttatcttagcctcaatgcctttgagacacacagtcagtcgaagacgatgacgcagttcctagagacacggtgagcagtgccaccctctcatatggcagcgaatgatgccctggacgtgcccaggattgcgccatgtgctactcacggatcggaggtaagccttcctgggcgtccagtcacatgactcagataaggtaggtgttgtgtggggcatgaatttcatggtggcacgcacgtgcaaagaaacagaatcgtgcccagtggccaaggagaacctatcagtcgtggcaggcaaagatatcgctgcagctccaatcgtggcgggcctagtgatgacgtggatccgtgccatcagagagccaggaggatagcattcgggcacacgtggacgctagcgaccgtagagtacatcaggaaaaaggaacaaggcacacgcaccatcaaagaatccgacaccacgtctacaggactctggcttgccgacgattgaactggggacaacgtgcatcccagcaccaggcaaacacacaaccagatgggtattcaaagacaaagaaagagacccatgaattacgagcatttggagattcatacccacaggcgaagttgaaccagggggactaggtaccttgcgacacgccaccgctttcaacacgtgaccagcaaaaatggtggagccagtgacgccagaggcccatcacatacgttacaggacatgtgagccacccatcagcactgatcgccgtgagtcctaccccgagaacctatctagcatatgaatcacagggattatggtacccgttaaacaccaaaggagaatgtttatccgtaacatggggaacccccc

SEQ ID NO: 505548 - DNA, 766 bp, Homo sapiens
tcaacccctataaaccctcctcctcacatttatcgaatataaagagttacatgctgccagcgcctttacatgaccttggacagcgcggcggtgggtgaaagaagacagcttctatgccaacgttcaagacggctttaatggagacacgcccctgatctgtgcttgcaggcgagggcatcgcgagaatccgtttccttccttttaagaagaaatgctaatgtcaacctcagaaaccagaaagagagaacctgcttgcattatgctgtgaagaacccatgcaccttcattgatcatctactacttctcctcttattttttgttctgctccttggctattccctcatggcgtcaaataccaatcacaccgaggctattgtaccactcgctcttgacgctggcgcgctagtcgacgccacagaccacctcggctgcacctcatcccctcctacccagccagatgagtaaccacgtctctcaccgcccccgccctgggaaaccctactcccacccatcatattacaattccgcggtcgagaggtacccggcatccgcccggctacgtaatattcgcacacccacccttttcgttggtagcacagcgcccccccgtgccccaccgctaccgcgatcattccacgcacgtgaccgggatgctatcttcccttatacctcctccgcgcggcttagcctttctgtagctcccccgtcccactcgcacactccgctgcaccgcccccagggtgcagagaccctgaccagtcaccct

SEQ ID NO: 505549 - DNA, 380 bp, Homo sapiens
cccttgagtgcatgagaggagatggtctgcagatgggagggtatcttgattctgatttcctttaatgcaaggtgagagtaggttcttaagtggagattctgctgttgctgctgctgtattctgacaggctcgtgtccagcaagagggtagggaagctagaagcacactcctggagagtgacttaccacattttagttttgagcactgagcctatgggacagtgttttgttacactgccgggtttccaatgcagaggcttggtgaggtgtctgtctgcaaactgcatgcactgcgttcacccacgtacagctgggatgagaactgtcagtgtggaagggcctactgttaaagccctgagtgagctaggtaggtgactgttg

SEQ ID NO: 505550 - DNA, 199 bp, Homo sapiens
ccggcctgatgtagacttcgggtagtccgagtacgtgcgaggcatccggataggccgagaaagtgtgtgggaagaaagtagatttacgccgataatatatagtgaaatggattttggcgtagtatggtctagggtgtagctgataataggggaaatcagtgaatgaatgctcctatgatgggcaatactgctcctattg

SEQ ID NO: 505551 - DNA, 254 bp, Homo sapiens
  misc_feature (73)..(73): n is a, c, g, or t
  misc_feature (116)..(116): n is a, c, g, or t
  misc_feature (146)..(146): n is a, c, g, or t
  misc_feature (163)..(163): n is a, c, g, or t
  misc_feature (193)..(193): n is a, c, g, or t
  misc_feature (244)..(244): n is a, c, g, or t
catgacgttacacagccctgctggcttcttagatgagtgcaatcgcgaagagaattctcatcgcgattgcacncatcaaagaagccagcagggctgtgggatacgtcatgtgctcnttgctctacccactggtcaccttcttcttnctgtgcctctgcatcgnctactggggcagcactgctgtgcttcctgnccactttccaacgaagcggtctataagatcttttgatgacagcccctgccnatttaactgc

SEQ ID NO: 505552 - DNA, 733 bp, Homo sapiens
ggtgtacgaggaggccccaacgtctggatcaatgttcatgacatcttctatcccttcccccaatcagagggagaggacgagctcatgctttctccgcgccaatgaatgcaagaccggcttctgccattatgtacaaagtcacctgccgttataaaatcaccagtggctactgatatggagtgagcccttcagcccctggggaagatgaatttaagtgccccattaaaggagagagcattgctcatgacacagctggttgaattgggatgtgttatatggctgaggctccggctccaagatcttgggtcaatgcaggagaccaagctggtgtacttccagggcaccaaggacacgccgcatggaagcacacaactactacgtggtcagctatgaggcggccggctgagatcagtacgcctcaccacgacccggcttctcccatagctgctccatgagccagaacttcgacatgtacagacagccacatacagcagcgtgagcaacgccaggcctgcgtgcacagtctacaagctgagcggcccgaagacagacaccactgcacaagcagcccgcttcttgggactagacatgatggaggcagcagatggcccccggataatgttcctccagagatcttccattaccaaagcgctcggatgtgcggtctacgggatgatctaaagcccaagcttgaaacaaggagagaaccacgactcttgaatggggcccatgg

SEQ ID NO: 505553 - DNA, 792 bp, Homo sapiens
gggtgtcggtgggtggcttgtgcctattgtcccagactatttgggaggctgatactgtagaattgcttaagcctagaatagtggaggctgcggccggagtgcgatgtggctcacaccttgtaactcccaacactttgatgaggctgaatgtcggtgggatcacctgaggtcaggagttcgtagaccacgccttgccaaatcgtggtgagatacccccaatctcttacgtaagaaatataaacaagattaccttgagtgtcagtgggtgcgccacctgtaatcccacgtgtacttgtggaacgctgaggctaacgatgaatcacttgcatacgccagtgcaggaggagacgcgttcgcacgtgagcctacggtatcgctagcactgcactccagcctgggcaacagagcaaggagtccgtactctacaaaagaaatcacaaatacacaagaaaaagaaatccagggtctgcatttcccgggtccggcgcccagatgaccgtgcttggaagaggggcttccgcgggcgaagggtccgttgccgccgcgtactccagtcttctgtgcttccaagatgggtgccgcgaatcgaacggggggggacctcccacctaaatcaggggaggcccggcgagtacacattggggccacatgagccacgggctggtagccttcgtcctcaaagagggggcaggaacgaacacgcacgcgggacactaaagagcaacacacccctgggaagcagccgggtgggaaagggcggggagtcccttccagacggacgaaagcttcctg

SEQ ID NO: 505554 - DNA, 339 bp, Homo sapiens
ccggggcattaagagctggggccaggcagttgaagtcacagagtttcagagaatgtttgaaggcccagtcttctctcccagccttagttagatgccaaagctttgtcctttatccagcctcatagtatagctatggatcttaagagcaccagatccagagggggttgggtttgctgaccttcatcatgcattcattcatacagcaaatatttactgagtgctttcatttgccagggactgcgttaggccctggggaaacatcagtgaataaaacacggtccctgcccacagtgcttagggcctactgagggaaagaagtaaccaggctcgagtagctct

SEQ ID NO: 505555 - DNA, 206 bp, Homo sapiens
ggcagactccatccagagaccatcagccagatgtcagaagctacaccatcacaggtttacaaccaggcactgactacaggatctacctccacatgtcttggggaccggaaaagggaggaattcaaggtgtaaccctcatgaaggcaccggtgttatgatgatgggaagaccatcccacggtgggagcccaggtgcaagagggaatt

SEQ ID NO: 505556 - DNA, 1043 bp, Homo sapiens
  misc_feature (202)..(202): n is a, c, g, or t
  misc_feature (233)..(233): n is a, c, g, or t
  misc_feature (255)..(255): n is a, c, g, or t
  misc_feature (257)..(257): n is a, c, g, or t
  misc_feature (260)..(260): n is a, c, g, or t
  misc_feature (303)..(303): n is a, c, g, or t
  misc_feature (339)..(339): n is a, c, g, or t
  misc_feature (460)..(460): n is a, c, g, or t
  misc_feature (521)..(521): n is a, c, g, or t
  misc_feature (544)..(544): n is a, c, g, or t
  misc_feature (636)..(636): n is a, c, g, or t
  misc_feature (661)..(661): n is a, c, g, or t
  misc_feature (705)..(705): n is a, c, g, or t
  misc_feature (832)..(832): n is a, c, g, or t
  misc_feature (883)..(883): n is a, c, g, or t
  misc_feature (896)..(896): n is a, c, g, or t
  misc_feature (957)..(957): n is a, c, g, or t
  misc_feature (984)..(984): n is a, c, g, or t
gcccagcggcgccgccctctgttcggcgcaggccacactcgcagtgtacattacgcgcaatcattctatctggctcgcgtcagttcctcgcacctcacaagacctcctaccaagtggatggagagaggagaagcaacgaacaaggtccttataaatgatagtaaaacattaaaaggtatcgtagagtgcgctatcgagcaanatagaagtagatgctcgagagaacatatcgngccttgtgagtaattccttgangngtntagatttctttgaccatagggtcgactgagtgacatagtacanggcagaatgcaggacgaagaatatggaacggctacncacgtccttctctctcctcttttacatacatcgggcgcaccccctcctcaatctaacacgcacacacacacgaaaggtaacaactgatacaagctgacaacgagtgcgttcagattggtangttgagaaccctcctcctccaatcctagcaccagagacgaccccgacacaaccgcaccccntccactcccgtcgccgtgacccnacggtctgttctcttttcgctgtcgagttgtgatctgttgatgttctccttgttcctcatccctgtcagcccttcacgccccatgctccgcncctctgtcatacactcctactcatntcctctcctaacctccgtccttctaacgccatgcttatcatccnacgcgcaggtctaacgatacgatcgatcaagtattcgatgctaccaccacaccgtcacacgacctaatcctcgccacacacatcatttaatcatagacagtacaccactacgtctttacttcaactncaaggctgagacgcgtagatccagacgctagcgtctgtatgttaatcattntacctatactgcnacatactaatacaaacaccctagtgtcgatgaatgacatgacatgatataacgcatgcaancactaccacatactgagaccatcgccnacgtctcgtccatatctaccacgcgactagaatcaacgccagtccgctatatagcgagt

SEQ ID NO: 505557 - DNA, 208 bp, Homo sapiens
atccagcagcccctggtagacctttgggtcctccacaatcctgctgagtctcagcttcggctcactgagcaaatctgagatgaggtcatttcggtctctcaggactttcagcctcgcctgattcctcatgggggacatcaggatttttcttctgctgccctttgtcatgctggctctctagctggtgccctttttcctgtctacttcc

SEQ ID NO: 505558 - DNA, 152 bp, Homo sapiens
cctggccgcttatcagtggttgtgtcgttgtgtgcgtgcgttgtgagttgtgtgtgagatgtgtgttgtgtgcatgagttgtgtgcatgcgctgtatgtgagttgtgtgcattgcacgtgtgagttgcgttgtgtgcatggagtgttatgtg

SEQ ID NO: 505559 - DNA, 1151 bp, Homo sapiens
gcacgtccagcaaggctgtcctcatctggcctgggcgcaactcggggagccggaactgcgggacagccgggatgaacttgctgtgccagtcatgatggcaggtgcgtgaacgtgccgtctgtgactagttagcctgccccccgtgcagacggcctggagcagtagatcagtaggcgagcaggtcagtgtagtgcccggatcgcacccctgaggggcctccccgtggaaattccagtacgaaggaggatgaactgagcctctgagctgcatggccgttggtcgtccaccccgagcctgcgggtgacggtgcctcggaggcgggcacgtccctcgtaccagccacggcagagcccgctgcaagagaccccgcgcgagagatcgtggatggcgggcgtcccgccaagcgacagctggcgggctctgactcggacctggacagcgatgatgagtttgtcccctacgaacatgtcgggggacagagagctgaagagcagcaaggctcctgcctacgtccgggactgcgtggaagccctgaccacgtctgaggacatagagcggctgggaggcagccctgcgggcccttgagggcctggtctacaggagccccacagtcactcgggaggtgagcagtggagctggccaaggtgcttctgcatctggagggagaagactgtgtggcagggaatatcaggcagggcatgcgacaccgagaggccactgcgtaggccgacaacgggcacagaacccgggcaccggtgggcgactaacgtggacccacaagagcaaccccacagagaacagctcggccacccatggacacccctggatggcagaccacgagatgccccaggaacaagtaaggcaaggagtggaacaagaaggaaacccaaacacgggaccacaagtccaaacagccggtgcctgcaggagaacgcgataacacaagaacgaccaggaaaagaagagaagaggaaaagaaagaaaacagacgacgcacaacgccgcccacacagacagagaaccaccacaaacagcggagaaaacacagacacaaacgacaagaagcaaaaaaaaacgacggcacaacaggacagagaaacaaagaacaacagcaagaagagacacgacacgggggctcacggcaaacaccg

SEQ ID NO: 505560 - DNA, 149 bp, Homo sapiens
gaccggacgagggcaagatcccttctagtggaggctaaaaactttgggagtcatctttgataggtgtatatctcacattgagctccatcaacaaattttggcacgcacttaccttcaaaatgtatccaccatctgatcgtctgtaaacc

SEQ ID NO: 505561 - DNA, 414 bp, Homo sapiens
tctgagcccgcccttttacctccaccatccaaagtcgcaatccaggcactcttctgagaaggagccagctccagcacgctggagctgagcccacccccacggacagtgaccctgcttacagttccaaggtgacttggatggggtcagtgccaactttagcccatggctggaggctgagaaggctgtcgagtgtctccttcacgctgccctgccctgcacaggtcctgctgctctcttccccggggctggaggaactgtatcgttgctgcatgctcttcgtggatgacatggccgagccgagggagacgccagaacatcctctgacgcacattaaggtcagagctggcgtccaggaggcaagatgcagtcactaacggtgttcagccctgtcaggaccacttataacaccaggag

SEQ ID NO: 505562 - DNA, 124 bp, Homo sapiens
ggaccttacgcgctcagctcactatatttttactttattaactatattctgtatcagccatctgaattgacccacacagttcccgctcatcctctggcatccttatgcgcgtaagggccagcag

SEQ ID NO: 505563 - DNA, 376 bp, Homo sapiens
ctcatacaatcatagatgggatccctaatatgataccacaggcagctaggatgacacgtgaaagtgagaagcacgaggaagtggagcagagctatggtataatttaaaaaaattaaaaaaacgcaacaggcaacttttcttaataccatataccttttcacagtggcaggtaataagtggaagagaagaatgtgttctgtgtcttcctacgttgactgtgcttaatccactgggttctttagcaggactgtgctacttaacctctgtggaaggtcttggctattaccataccagtgtatggattctttcacctttggacttggatgggtattctcttcaggcataattgatgcaactagagtctatgctgtatatt

SEQ ID NO: 505564 - DNA, 305 bp, Homo sapiens
caggagtacgacgagggcggcccttcgtcgtccaccggcaagtgcttctagacacactccacctctagcacgagtacttctcaggtacgatgcattcttctcaatgggggggcggttgagctccagccaccccgcagtcactggctgtgtaacaacttcctttgctgccatcgtaaactgacacagtttttataacgggtgcatgcattaacttatggcctcatggggttatttttcgatttattgccctgtttaagaaaatggtaaacttgaagaagcatgaaagtcattctgttaaaatgcga

SEQ ID NO: 505565 - DNA, 312 bp, Homo sapiens
agcacaacctagggtcagtctgcaggttaaagccatttaccaagatagttgtaggtaaagaagggcagatttattagagaaatgtgaaaatatgttgcagtgggcagctcagactagagaaggggctacctgcaaagaggcaagggctggaggaaagttttatagggtcctgctgaagggtgctacgtgtggaatgaggtcattgtgcccgcaggttgtttgtgattagctgtctctaacaattgttcatacaataattgttcattattgttctcaacttggggctctccccaacctggggacccttcctta

SEQ ID NO: 505566 - DNA, 197 bp, Homo sapiens
tcaggatagcggagcatcagataagacggaaatcagataacgcggacgcggtcacgcctgctgcgagggtatgttgttgtttgcgaacgaacgaggaggcgagtgaggtggtgctcccttactgatgctccgattagctgaccgctcctacgtatgcttccgacttaactggggtaccgacgctcgaaacttcgtaa

SEQ ID NO: 505567 - DNA, 439 bp, Homo sapiens
ggcacgaggaaagacagcattccagcctttccaggcaatactcgtgtgtgtgtgtgtgtgtgtgtgtgagagagagagagacacacaccaccaccccacccacaccccctccccccccccacccccccccccacccacaccccacaccccccccaccccacccacccccccccccccccccccccccccaccccccccccccccccccacccccccaccccaccccccccacccaccccccccccaccccccaccccccctccccccccccccccccccccccccccccccacccccccccccccacccccccccccccccccccccccccccccccccccccccccccccccaccacccccccccccccacccccccccccccccccccccccccccccccccccccccccccccccccccacccccccccacccccc

SEQ ID NO: 505568 - DNA, 340 bp, Homo sapiens
gatccggagtactacctagctaccttagcctacctacctaactaccgaggtacctacctaattacggtagtacatacttcccaattacactaattacctacctaacgtgatgaccctaccttacctaagctacctcacctacctaagctcacggggaagtaacctaacctaacctaacctaagctaacctaaccggtagtaacctatcctaagccacctgaggtgtatactacttggggatccgtgcacgttaacgattactaggactatgcagaaaccagagagtttaagaaacccgcattgttcttcaagttattcatagcaaatacatttcgctcca

SEQ ID NO: 505569 - DNA, 156 bp, Homo sapiens
tgactctagagtgatccccctcacatgaccctgagaccttgtcagaaacaaaaacaaacaaaaaaaaatggaataaagaaagaaaaaggagagagggagggaaggagggagatgagggaaggaaggaaggaaggaagcaagggcagaagcatgaag

SEQ ID NO: 505570 - DNA, 825 bp, Homo sapiens
gggcagcgccggcagccaagagatggtgtttcactatgtagcccaggctgcacatccttcagatcccaggttagactcccttcttccaggatacgtaccccagctcctctctgcccctgtcagacggcagtctcgcctctgtcgacccaggctggagcgcagttgacgccatctcgcgctcactgcaacctcttccgtcccaggttcaagccagttctccaacctcagcctccccagtagctgggcattaccaggattttcagacacttcctgacatgtcattacttctaggacgcaacctatctgacactatccgcaccctggtcctgggactctagctcgatgacccttcggacacatgatcccacccaccactactctatcttatagcacgaaggccctgcactattagctcccaatttggacgctgaacacagccccggactggcgtacccggacaatctccccacacgcacttgcacccgggccttcccacaactggcatgtgtgcacttttttatggacgtgaacttggggccacaataccttttatcatgggggtggaagtacccccttgatacgcaacgggccttcgggccccagccactgccctggcccacatctgcttacccaaaccccatgtggaagctcccggctgcaaccacctaaacttctcgtacttgcaccctttggcacaccttctccggcagcatgccctccaaccactttgtacacccccgtacggaacactcaaatattccatcgtggaaaccaccctggaccaccacgtgtatacttccacaatccccctctccgaccgcaatg

SEQ ID NO: 505571 - DNA, 1190 bp, Homo sapiens
gcggctgttttcctgcgcaggatccgacaggggcgtaccgcagccatggcgcccatccggtagatgtgcatggtcttgaagccccacttccacaaggactggctatgcggcgcgtggcctactgtggttcaaccagccggcccgtaagatccgctagacgtaagtgcccggcatagccaacggcagcgccagccatcgccccgcgccccgcagtcggagtccgcagtccggcgccaatcgtgcgcgtgccccatcgtgttcgggtactcacatcgtaagcgtgcgctgcacggccgtcgtgattctagccctgtcaggatgtctcacgggttggcacggcatttcactaagcaaggtggccctgcgacctatcgcgtcatttcctgtgtgatccgaggcaggcggtcacaaggtccacggcagatccctgcagtgccaactgtgcatgctggctgaacggagtacctgctcctgaactcatctctcttctcccagtgaagccctcgtgccccctaagcaagggagaccagttctgactgaagaacgtgataactgtgccactcgcaggctgacctggaccgggtcatgcccgtccgcgaacgtctatacagaaggagacaagcctcgagtcactcactgcaggcaagcagcacacgaactctcacacgccttcgctagctctccgtatggcacgtgccaacgcccggctcttcggcattacgggcaagagagccaaggatcgccgcatgaacacgctcttgccctgcctcccgtacatggcctccttggcgacttggatccggacgcctccgcccccgccgcccgggcccctttcccgtcgggccacacgcgctctctcccgcccttgcctcctcgcctcgccctctcctgtacaccgtgtaaaattccagtcccccaaaacacgtaaataatttatacccgtaccgtctatatcatccataaatcacacttcataaccccacacaatccacgcacaaaccacgcccacacccgacaacaccaccaccagccccccacccccacgatgaccacataaacactcacaacgcatacacagcacaaccacaacataaccccccactcaccacatccacaacaccacctacctcaccctttacactctcctccttcagtccctcacaccaccaccacacacaccacccacccgc

SEQ ID NO: 505572 - DNA, 137 bp, Homo sapiens
ggcagggctctcaagcaaataactctacacacacatacacacacacacacacaaacggcgctttttagtttataaaatattttagtggaaatgtctgattcaaatggtctaaatcatgttcctgaactaatattcca

SEQ ID NO: 505573 - DNA, 456 bp, Homo sapiens
  misc_feature (349)..(349): n is a, c, g, or t
  misc_feature (423)..(423): n is a, c, g, or t
attccattgcattccattcgattgccatcgagttgattccattccattccattccataccattccattccattccattctttccattccattacggatgactccattccattgcattccattccattccattcccctgtactcgggttgattatattccattccattccactccattcggttccgttgcattccattctattgcattccattctattcgggttaattccatgccgttctattccattccattccattccattccattgcaatggagttgattccattccgttccattccattccggattattccattccattgcattccattccattccattcccctgnactcgtgttgattccattccgttccattccattccattccattccattacaatcgagttgattccattccattnctttccattccattccattgccttgattccact

SEQ ID NO: 505574 - DNA, 247 bp, Homo sapiens
  misc_feature (142)..(142): n is a, c, g, or t
  misc_feature (171)..(171): n is a, c, g, or t
  misc_feature (174)..(174): n is a, c, g, or t
  misc_feature (186)..(186): n is a, c, g, or t
  misc_feature (212)..(212): n is a, c, g, or t
  misc_feature (223)..(224): n is a, c, g, or t
  misc_feature (227)..(227): n is a, c, g, or t
  misc_feature (231)..(231): n is a, c, g, or t
cgggggttttccctttttttccccccccgggggcattggagggggaacagcctttccgtgggggttttccaacccaacccttgttttcggggggggggtttggggggttgctttaaagttttttaaaatggaaaaggtgggncttggttttttatgttaacttagaaaaanggnctttttggggcnggggcccaaaattaaggttggtacgnccctgggtttnnatnaacntggccctggtttttga

SEQ ID NO: 505575 - DNA, 238 bp, Homo sapiens
  misc_feature (1)..(1): n is a, c, g, or t
nccgactctagagtatcctcgcgccaactgtgaaaatgaaaaaatagtagatgggaagaaatgaaggagggttggtagacttcttggatttttcaggatgggaccgtagagcaattcagctgcaaatgtgtgctcttatttaagacaaggaaggaccctaaaagcaattcagagatcatccgggatgcttccttggttcaacaaaagaagggaccactgccttgctttcaatttggcg

SEQ ID NO: 505576 - DNA, 539 bp, Homo sapiens
gtatactgttaccagttagctagtgttccaggagagtcctggactgttttgttacggtgaagaagagttggtggggggcgcggtggatggtcccggtttcgggaaggatggaatgcgacaaggtggtggtgttacgagcctgtgtgggtttccgagtgtagcgagcgggctgttgctccgggtcctgtgctgacctttgagaagtgtttgtcgtggggtatatgacggttggaggaggtggagtgtagggggttgccgctgttgcagtggcgtgatattctgacggagggctgtgagcgagttttgacggagtgtctgttccttgccatagagtgtataaagggtgtggggaaacacagtgcgtagggcgggggatcgtgtgtctgctttttgttgctgaaactttgatctagtcttgtgaaggtcggtggggcgatgaggtttctcccgggcctgggtctagctctgtgccccccgtttgccagcgctgggaccctcgcccttctccttcctatactgctataaatggagaatgaata

SEQ ID NO: 505577 - DNA, 1071 bp, Homo sapiens
  misc_feature (149)..(149): n is a, c, g, or t
gactcgcatcggcatgcccgtgtgtgatgatcctccgtaccagtagacttcgaaggctagagatgtgcagatatcccaaggacaagactcaccgaaaatacgtactcctattgatggacgcgcctacgctcatatgtgctcgttcgctncccgcatgctcgctatctcttacgaagtatcacaatgctccactgtgactattgtgtgctaattgcagaggtctccgactcgagaaagactggcgattcaggctaggaccgggtccccgttcactgtgcgcacgtgcatgcgagagtgggacgtaacctcattcaatccagagtcgtcctggaaacagcctctgagtagcacaagcgcgaaggtgaacatgggctagaggacgcgatgcgcgaggatttctcactccacatgcttctctgcacgtgtctcccacgagtgtaccttaccgcctgtatactacgaaattgctagttcatcttgaggttaccgcacaatggccgttgtccttgcatagaagtcgaatggcatctagacgaagactcatgtccccatgtccccatcatatatatatgggaataggcgtcgaagtagttgttgccacagtcgcgtaccctggcagttctggaagaggcatattacgtagtgcatcacacgtacacgtccttgcacataggagtgcactcattgcctgccggatttggtcccttgtgtcgcatccttgccctgggaatgtttagcggaggaagtccttgcccccgatgccaggaggtctgtgggacgcgatggcgctgaagggcacgccttctcgttgactgcgctcgcactgtaggatagagtgggttcgcaggggcttgttgctcccgaatctgagtttggaggactgccgctctcagtgggctccggcatcatggtattcctgagacctggggctacaccgtcttgttccctttgttttggggaagaagtgcttgctggggagtctgggagggagcccgggcggtttttgaacgggggttcccggccgtagttccgggatggggtcggcccctcttttttggtcgtctccccttg

SEQ ID NO: 505578 - DNA, 914 bp, Homo sapiens
atgcggccctcgccatactctcttcgtgcatctttcggcggctccacgctcttttcggcgtccgcctatggctgccgccgccgtccccgagatcgcttccctcgtgccgcctgccgtagattcaccgttgatgcctcgcatctgcaacgcgcggccgccgtactacccttttcgctactatgctataccatgtattatgcgcatgggttttactccgtgtccagcgctgtgttcccgcgatctatattttcccccggtgtatttccggcgcactgtgccggtctccccgggttgcgtctttgtcgttatcgtgctacattgtcctcctctaattttcacgctttcgcatccctcccgcgttcttcacccgtgtttgtccccgctagtcgtgtcttacttcgctcctcgggcgaacctgattttcctttgcccacgggtgatttcgcctcacgtttttcggtttcctcgcctgaatttccccaacacgtttctatataacagttgcacaacactcctgcgaagcgaaagcgaaaagattagcgtaaggtgcggggaattttacggtccacaaacgaaacgggagcgccaaaatacaaaaaagaatttccccccccccccccagtttacgcaatcctccagttacttctttaggctttactgaatggaagcttgactgaaattaggaattagtgtaacattcctgcataaatgcattgtatactctgtaaaacctgctgtgaaaaaaaaagttgattaagaatgcaggaatctggttaatttgccctcacagcaggcagtgtaggtaaaacttttccttgctgggtgaccacaacttgtttagaagaggttacttaggtatttttttcagaaagtaagagctcttgaacaatgtggaaaatactaactaggtagtt

SEQ ID NO: 505579 - DNA, 448 bp, Homo sapiens
ctcactgcaacctccgcctcctgggtccaagcaattctcctgcctcagtctcccgggtagctgggattacaggcacccaccaccatgcccagctaatttttgtatttttagtagaagcagggtttcaccatgttggccagactggtctcgaactcctgaccttgtgatccacccacctcagcctcctaaagtgctgggattacaggcatgagccaccacccccagccaaaatttactctttatctaattattttttgctatatttcttagatatattggattctcttttatatgttctctttattctacattcatcattcttgtacttatacatacattaaagcctatattgtatgctcttatatttctggaacactgagttcttcaccctttatacctcccctgacacggcatggtcaccttcatgaggattatgtcactcggtccc

SEQ ID NO: 505580 - DNA, 206 bp, Homo sapiens
agcaaagagatggataacaccataaatataggtggggagacaattaacatccactaatgtttctctacataaactatactattaatgtcatttttttaagaacagttgcaaatagactcacatacatatacgtgggcaaaaaggcaattaagtgaatctcttgaaacactaaatgtataataaacagcatattatcaacatttcac

SEQ ID NO: 505581 - DNA, 210 bp, Homo sapiens
aacccagcttttggggttttggggccccctccgccccccttggggtggccccccctcctccatgggcagtgtgggccccgggccgggcatcctgctcagtgtgggggcagggttgggggtgagcccccttagctgcttcagtgaatgttcaggggccgggccgaggtgaacctcttgtgttcccctccccattaaaggttggccggggga

SEQ ID NO: 505582 - DNA, 101 bp, Homo sapiens
tcgatagggcaagatacggagccagacatacatacagcaatgggaaatgttcaggcagcatctaggaggagagagtaaatgttttggctatgagcacattt

SEQ ID NO: 505583 - DNA, 632 bp, Homo sapiens
gtattatcctttaagatcatttaattttagttgagtgcagagggctattataacaaacgtgcagaaatttgggagggctgtgatttttccagtatataaacatgcatgcattaatcttgcagtttattttctacattgtgtaatgtaatataatacgctattactctgcagcacgatttctcttatgtgataaatgcccttaagggccaccaactaggttactaacagtacactgaatgtgtatctaactcatatatggcatgcttactgtttatttccattaaacaagaggtttattcatattgttagcaataattagtatatcttgtggcacccaattaatttatatgttcgtggacattacaattttggttacaacaaagaacgaagtgttgtttgttagccttggaattgaacggaaatattggtataaaggatatatggggagaggatggttataaaaaacatatatatatatatggaaggacgaggggaaagaaaaaaaggctggtattgcatttacataggctgtacaacaggatatatcaatacagaattattgtacatggggtatggtgttgtatacaaaaattgaggacatgatactgaaggttaattggttgcggatatga

SEQ ID NO: 505584 - DNA, 150 bp, Homo sapiens
tgtgtcccaccctttttcccacacactgtccccactccccatgccccattcctttccagagaatcactggtttagaatagagacctacaaacttgggcccttaggctggccctccacctgtttctgtcaataaagttttattggaacaca

SEQ ID NO: 505585 - DNA, 175 bp, Homo sapiens
gctggtgtcgccatgggccgccgccccccgcccgttgttacccgtatttgtaagaacaagccgtaacccaaagtctcggtttctgccggaggtgttccctgatggccaaggattcgcattttggacttcgggccgaaaaaggcaaaagttggataggtttccgtttgttggccaa

SEQ ID NO: 505586 - DNA, 122 bp, Homo sapiens
  misc_feature (59)..(59): n is a, c, g, or t
ggctagggttgtcggtgtgggaagggcttgcggatgcggatcacgtcaagcccgactgntcggccagcttctgcaccagccgtccgagatctcctcgagcagacttgcaagtgagatgctct

SEQ ID NO: 505587 - DNA, 218 bp, Homo sapiens
ccgactaggggtgaggctgtgatcgattaacagaaaaatgggggtgagaagtgaaggtcaagctctgtgcacgccagattcacccctatgttctgccagtaacttttctttctagttctcgtgattttgtttattgacacatgggtcttgctgatccgtcccgctctcggtcctccctaaagtgcttgggattacacggcatgtagccacttgcgccc

SEQ ID NO: 505588 - DNA, 571 bp, Homo sapiens
  misc_feature (87)..(87): n is a, c, g, or t
cgggcctcaaggtgctctgtggaccacagcggggcccggggccctcgcgagggagggaagagttcgctccaggtccccgcgattccnccggaaagtgaaactgcagaggtgttgcgtggacacccgcggtcagacacgaccccaggccgcgcgggccccagaggaagcgagcgcgagtccgcggtggtggctgagcgctcagtgaggacgccattccgccacgaaaacgcccgcgacgccgctggcccctgcgcggtggggcgaggtaggctggccggacctgcgaagcccgacgagcccggcgccggctggctgcagcttgctctgcctccctggcctggccccgaggctcccgcgagccgggatccgcgaacaccggggccgaaccgactctctcgggcctcagacggcgtggaccctggaaggccccagttcggccgcttccccggaagtcccccagtgggctccggccgctctggcccgcgcgcgtccggctcgctggtgccctgggcggcgcccggccgctggcgcttctcgggcgctagggggggcccgccccaaacttttcctt

SEQ ID NO: 505589 - DNA, 424 bp, Homo sapiens
ctgacttacttattcattaaattttgaaggttttccacttgaagtaaattaggaaaggtaaagaagataacagaccaagtaaacacttaagaaaagtcaagctgaggccgggcagggtggctcacacctgtaatcctaacaaacactttgggaggccgagggaggcagctggattgcctgaactcaggagttcaagactagcctggccaacatggcgaaatcctgtttctgccaaaaaaaaaaaaaaaaaaccaaaaaaaaaacaactagctaggcatggtggcgtgcacctgtaatcctagctacttgggaagctgaggcaggagaattgcttgaacccaggaggcagaggttgcagtgagctgagatcgcaccagtgcactcctgcctgggcgacagagcaagactccatcttaaaaaaaaa

SEQ ID NO: 505590 - DNA, 344 bp, Homo sapiens
tgctgtccagagttccccatcagccctaaattgactatagcttcaaaaactaggacgatatggaatgacacaagaaaacataacatgggatcttccacaaaatgaaacattttggtgcagcaaaggacgttattaagaaagtaggcccagcgcagtggctcatgcctgtaatccgcagctactcaggaggttgagtcaggaggagtcacttgatcccggaggcagaggttgcatgctgattgtgccacttgcatgtccgtgctctgggaaacgtcagacactgctctgtttccaacaaggaactggaagacgaaaaaacagggaaaaaaaaattttaacatttg

SEQ ID NO: 505591 - DNA, 142 bp, Homo sapiens
aatgtacaaaagaaagttgtatgggagttgagctggaaggtaggattataagagcagcactgaccaataaaacttcctacaatgaaacatgttctataatgtatgttgcccagatacagtacgccactaagccaccatgtga

SEQ ID NO: 505592 - DNA, 285 bp, Homo sapiens
aaggatcacactgcgataagcacgtgatgtatgattatgcattgattttaccgagatggcactggtgtcgttggagtttgtacggaatataagatattacctatgcatttcgaatacaactggataacactaagtttagatctcatgagggagaaattgcctacatccgggttaaacgttgatgggcccagtaactctcaacgttatggaatatctctatctcgaagccgtagtcttagcataatgcctgctatcagaagcaagcagcaggagtcgcagttagtc

SEQ ID NO: 505593 - DNA, 171 bp, Homo sapiens
  misc_feature (8)..(8): n is a, c, g, or t
taccccgnggttatgtttacgttgcaggttcgatccctggcttgcccagtgggttaagggttcggcgtttgccgtgagctgtggtgtaggttgcagacgtggctgggatcctgcgttgctatggttgtggtgtaggccggtggctatagccgtaagacataaccgcgggac

SEQ ID NO: 505594 - DNA, 192 bp, Homo sapiens
gagaaaagcttctgcagcgaaggctgtgtgctgctgtacaaacaggacttcactaagaagctgtgcttgtgctgtatcaacttgacttacttgtcccagaacttccagcgcgggagtacctagcaacttgttggcagcacctgggtcttcttctgtgaggacttgtagtacaagaaccccctcgggtactcg

SEQ ID NO: 505595 - DNA, 878 bp, Homo sapiens
ggcgtcttgttcttgcgtggtgtcggtggttagtttctagcgagttgtgtagggactgctgataggaagatgtcttcaggaagtgctaaacattgggcaccctgcccccaatcttcaaagccacagctgttatgcccagatggtcagtttaacagatatcagcctgtctgaactacaaaggacaactatgtggtgtcttcttttaccctcttgattcacctttgtgtgccccacggagatcattgctttcaagtgactacgggcagaagaattaagaaatcaatgccaagtgattgggctcctgtggatctcacttctgtcatctagcgatggtcaataacctaggaacccaggaggactgggcacccatgaacattcctttgtatcagacccgaagcgcacattgtcaggataatggggtctaaaaaggctggatgaaggcatctcgtcaaggggccttttatcattgatgattaggggtatctacgggagatcactgtaatgacctccctgttggccgccatgtggattgagacgtgttgagactaggtcagggcgttccaagtttcacttgagagaacatggggaggtgtgccaaggtgtgttggaaacctgggagtgataccataaagctgttgtcaaagagcaagatatttctccaagagaagtgccggtggtgtataagtgcaggtgggggggaaccatgaaaaaagagtttgtgattgtttaccatagattaacaagagattacgttcaccgaatgggtgtaaaggggcctctagagggtgagaaggtttcatggagatggcagtggtgggagaatgtttttttaagacatcttgtggttttacaaaaaacaaatgggggagagaaaagag

SEQ ID NO: 505596 - DNA, 431 bp, Homo sapiens
tatatgatcctgcgctgccttgctagggaacagttcacttttcagttgctctttttttcttttttgtgacagagcaggacttcgtctctcaaaaaaaaaattttttttttaagtggggttgtggcccggtacggtggctcacgcctgtaatcccagtactttgggagaccgaggcaggcggatcacttgaggtgaggagttgaagaccagcctggccaacatggtgaaaccacgtctctgctaaaaataacaaaaattagccggacatggtgcctgtaattccagctacttgggaggctgaggcacgggaatcacttgaacccaggaggcggaggttgcaatgagccgagatcgcgccactgcactccatcctgagcaacagaacaagactgtctaaaaaaaaatgaaaggctagagaaataaaaccttgt

SEQ ID NO: 505597 - DNA, 227 bp, Homo sapiens
  misc_feature (39)..(39): n is a, c, g, or t
  misc_feature (47)..(47): n is a, c, g, or t
  misc_feature (166)..(166): n is a, c, g, or t
  misc_feature (219)..(219): n is a, c, g, or t
tcccacaggcacaagggaaagaagaggaacccagaaaangagaaatncctgcaaaagctgtttatgattttaaggctcagacatctaaggagttgtcatttaagaaggagatactgtctacatctcaggaaaattgatcaaaatttggtatttgagggagaacacncacgggagagtgggcatcttcccgatctcatacgtagagaaactcacacctcnctgagaaa

SEQ ID NO: 505598 - DNA, 204 bp, Homo sapiens
agtaaggttttgcatcctttgatcagcaggtaactgacgaattcttgagtcgaagattataccttgatgagctttgatgagctcttgcaaacgaatgagaccagtgctgtcatcatacacaaccatgacgttttccacttgaaaaactgcaccaggtctaaaatgcacgctgagtgaagagaagtctgggcagagactgacata

SEQ ID NO: 505599 - DNA, 210 bp, Homo sapiens
aactccttggaatgcagaaatcaccgtcttctgcgtcgcttacgctgggagctatagaccggagctgttcctattcggccatcttggctcctccctctagtattctggatttttaacagcaaatcagcaacaagcatcctcgggcacacacattttcactcttggacaaccatctccctcaggtagattcacaaagggggattaccgggc

SEQ ID NO: 505600 - DNA, 898 bp, Homo sapiens
  misc_feature (48)..(48): n is a, c, g, or t
  misc_feature (94)..(94): n is a, c, g, or t
  misc_feature (101)..(101): n is a, c, g, or t
  misc_feature (109)..(109): n is a, c, g, or t
  misc_feature (112)..(115): n is a, c, g, or t
  misc_feature (117)..(117): n is a, c, g, or t
  misc_feature (121)..(121): n is a, c, g, or t
  misc_feature (123)..(123): n is a, c, g, or t
  misc_feature (148)..(148): n is a, c, g, or t
  misc_feature (153)..(153): n is a, c, g, or t
  misc_feature (173)..(173): n is a, c, g, or t
  misc_feature (184)..(184): n is a, c, g, or t
  misc_feature (186)..(186): n is a, c, g, or t
  misc_feature (220)..(220): n is a, c, g, or t
  misc_feature (231)..(231): n is a, c, g, or t
  misc_feature (255)..(255): n is a, c, g, or t
  misc_feature (258)..(258): n is a, c, g, or t
  misc_feature (270)..(270): n is a, c, g, or t
  misc_feature (286)..(286): n is a, c, g, or t
  misc_feature (300)..(300): n is a, c, g, or t
  misc_feature (323)..(323): n is a, c, g, or t
  misc_feature (355)..(355): n is a, c, g, or t
  misc_feature (360)..(360): n is a, c, g, or t
  misc_feature (384)..(384): n is a, c, g, or t
  misc_feature (402)..(402): n is a, c, g, or t
  misc_feature (408)..(408): n is a, c, g, or t
  misc_feature (415)..(415): n is a, c, g, or t
  misc_feature (417)..(418): n is a, c, g, or t
  misc_feature (423)..(423): n is a, c, g, or t
  misc_feature (425)..(425): n is a, c, g, or t
  misc_feature (431)..(431): n is a, c, g, or t
  misc_feature (453)..(453): n is a, c, g, or t
  misc_feature (477)..(477): n is a, c, g, or t
  misc_feature (493)..(493): n is a, c, g, or t
  misc_feature (519)..(519): n is a, c, g, or t
  misc_feature (533)..(533): n is a, c, g, or t
  misc_feature (549)..(549): n is a, c, g, or t
  misc_feature (566)..(566): n is a, c, g, or t
  misc_feature (597)..(597): n is a, c, g, or t
  misc_feature (602)..(603): n is a, c, g, or t
  misc_feature (634)..(634): n is a, c, g, or t
  misc_feature (642)..(642): n is a, c, g, or t
  misc_feature (691)..(691): n is a, c, g, or t
  misc_feature (763)..(763): n is a, c, g, or t
  misc_feature (800)..(800): n is a, c, g, or t
  misc_feature (833)..(833): n is a, c, g, or t
aaaatttttgtataattaattagtaataatcatcaataaattaaaatnaaaaaaaaaaaaataaaattaaaatattaattaaaattatgtttgnagacttnatataatnaannnnantttntnctcccctcttctagtttcacttccnaaggntgtgagttctaagccctccntatgtggaganangttatcctccccttgttccatgttaagttcaggnatttgggtggngttgagttggtacttaaatatgcngcnaagtggctcacnaggggaaatgggttgngtatggggggaggngggtcaggtccttgtcccaatanggggctaggtttggaatctccagggtgcagcntggantcctaagggcagattagggctgangactggatgatgctcgtngtgggnttggacntnnacagntncctggnattcagaggtacccatcctaanttcctgggcaaaaaacaaaaatcntggaaaaaaaacaaanaccgtccgaacctccggagtttattnatttccagcggtantgggctggaccgagcnttggtggcatccgattnaactccagaagcatcccaggtcttatccagnatggnnggagaacgctgtaaaaaatctggacttaagnaatattanaaatcgtccctttcctcgaagtcgggctcgggctctgggtccggttctngctccagtaccggctctggttctgcttcagcctcgggttccagctctggctctggctccggctccggttcancctctttagacgcctcagcttccagctctggctctgnctcctccggggtcccggattgccccgcctcggngccctcagggcccccggcctcgtcagggtctgaagctctgggcaacccggggcatgtggtcccga

SEQ ID NO: 505601 - DNA, 234 bp, Homo sapiens
acaggagtcgcagccagaacagagatgacaacaagcccaggctcaggattatggcgtccacacattcagccgacgcagggctccttcaagggactctcctctctgtctgtacagaatgtggaggccctcctggaggcggaagtcacttggccagttacctccatagccgcctgagacccccagccagagccggcactgctcactggggctcctcggggggttttcagatgacgc

SEQ ID NO: 505602 - DNA, 113 bp, Homo sapiens
cacagaaacccaccatcacaaaaaaaaaaatttggcagcgaagagaactgaagaaaaactgacgaaaaagaacaaaccgggcaaaaaggacccatacaaatttttccccccac

SEQ ID NO: 505603 - DNA, 155 bp, Homo sapiens
aaacaaacaaacgaaaagaaagcccacaaaagtttgattcaggggtaggcatagtggtgcacacctgtagtcccagctacttgagaggctgaggcagaaggatttcttgagcccaggagcctcaaggctgcagtgagctatgattttgccactgc

SEQ ID NO: 505604 - DNA, 209 bp, Homo sapiens
tgctgggattactggcgtgagccactttacctgatgccctgcttgctatgtaaacaagctgtgaaataatgtgtcttaatttataaaacatatacagagagtatccatttactcttcaccctggcttgccccgaatgatacatatcttcatatgaccacagttacatttcaaaaccaggtaactgacattggtacgtactatgagtaac

SEQ ID NO: 505605 - DNA, 1348 bp, Homo sapiens
gcctcggtgccgtagccttccccgtgagcggagcgcgtggagcgcctctgatctcggcttgtttcttagtttgttccgcccgcatttcctgcgtttacttttcattatgtcaatgcatttgattattatcgaccttcttcatactattgacatgcagttgctgcggagagagaatgtcaccagaggaaaagtggacggggaggaggcgcaacttggaccacggatgagccggtgcagattactggcgatccaccattctccaagatctggcagcctatcttatgctttaaccgatgacagtaagccgtctgattacttttaccgtacacaaccactggccatgtctcgatgtcgtcaggacccgttggcaaggcaggttgtacacgcccatgactcttcactcgccctctgtgaggatcaacggtacttggtgcgccgaccacagtcctggacgacgtctacatcctttttccgtgttgcctagtactgccaccactggcctgctgtgcctgctcttacgcagctgtgcggcaaccatgcatctagtgcctgtcagactgctggcctgatgcagcttccctgtatgcacccgcttccattcactcatatgcccagaaccgggggaacacaacacagactcccagcgaacaacccaggggccacgccgggcagccacccactacgcacatcgaacttcccacatggcctcaggcgagcgacaccacaaggacgctacacgcggaagcccagtaattctacccgactgcgatgcccacaagctcacagcccgagagcacaagacataactaggaccctacccaaccatgcacagcaaacaggcaaccccaaagaccgagacccatggatcagtataccaacaagaagcagtagcacgccacacactgcacaatgagttagtcacacccggcgccaaagccctgacacagcacacgactgatcgcaaccacccaagacaccaccacacaaaaccatgcgcggctccccctaaggaaatggaattaccattgcttgcctctggacacacttgctgattgcgctccttgcttgacacggccaatccagtggtcctactacactttcacaaagtgacccccccctcatcatcaccttgcttatcgatcatacaacttacgttcctgatccatctcttcacccttttacttcacactaccccactctatttctactctcttgatctctcttcccccccactttttaatgaacaacattcaatcccccacattctcgatccacacaaaaaaaacttctctctactaactaactaatcaccaacccactacacatctatcaaccattcccctaccac

SEQ ID NO: 505606 - DNA, 283 bp, Homo sapiens
ttggggctttgcggtgacttacgcctgtaatccccgcactttgggaggccgaggcgggcggatcacctgaggtcaggagttcaagaccagcctggccaacatggcgaaacctcgtctctactaaaattacgaggcaggaaaatcgcttgaatccagggggtgcaggttgtagtgagccgagatcgcgccattgcactccagtctgggcgacagaataagactccgtctgaagaaaaataaaaaacaaaacaccgaacaaaacatccatcacgcacatcatggt

SEQ ID NO: 505607 - DNA, 443 bp, Homo sapiens
  misc_feature (379)..(379): n is a, c, g, or t
  misc_feature (433)..(433): n is a, c, g, or t
tgtgtgcctgtcaatcagagccaggtgtggtggtgtatgcctgtcaatcagagccaggtgtggtggtgtatgcctgtcaatcagagccaggtgtggtggtgtatgcctgtcaatcagagccaggcgtggtggtgtgcgcctgtcaatcagagccaggtgtggtggtgtatgcctgtcaatcagagccaggtgtggtggtgtgtgcctgtcaatcagagccaggtgtggtggtgtgcatctgtcaatcagagccaggcgtggtggtgtgcgcctggattcctggctactagggaggctaaggtgggcaatcacttgagcccgggagtttgaggctgcagtgagctatgattatgccactgtgctccagcctgggcaatanaatgaaaaataaatttaaaactgtctctgaaaaataaattaaaaagtgagtcanttagcccagc

SEQ ID NO: 505608 - DNA, 900 bp, Homo sapiens
attgccttgagacgcgtcatctccttttcctatgggttggtttcgtttggtaaatccattcagcccattatagacacataactgttaagttcgtagtctttgtttggttttattgaggtagggtctcttccctgatcctcgtcctgcttccacttcgccattgctgggataacagacgttatcacacttggctcattttaaatgcccttcagttatattccggacatctgagaagttatcttaaacattaaccagtttccatcattgaatttgatgtggtttttctcaacagcaaattattctaggttattctaggttaaaaaaaaaaaaaacaaaaaaacaaaaccaaaaaaaaaaaattggtaattctctggcctgttccctgagtactaagtgtacagactttcagttaccatcccccctcccccgcggggaacatcccagcagacacaattttattctttatagaaacaaagtcattccctagacacccttccctggtcttggtccctagcaaaaataaatagctgtccctttagaagtggtgacagaagtcctggggggtccagcagagatgaagaacttgcgggaaggccttagtcctggctctcagagtcaggtgtcatcctcctcctacagactctccctagaaaactcgctagaatcttccttaaaatttccctcagatagggcgcgactctggggaaggtcattggtccatcttgctcgcaatttccggaggggcatcccctggttttgtggagggcacttgagattggagattctaataccaaagagggaggaacgggacggctcgggaaatgcacccccttggagattataggcgaggaggggaccacctttgaggacgagaacccaagcctgggcacttagtcgact

SEQ ID NO: 505609 - DNA, 1237 bp, Homo sapiens
cacctttcaaaaagcaaccccatgtatgcctatatgtgtattgtatactttttttacataattggagtcatactgtcaaaccagttttcatcacagtcagcatctttttccattgccaacacatagcccaccattcctacttatgggccattcaacaaattttcaccacacacaaccatcacattttcaagtggctcatcattgatcattcccatttcaatggcatgccaactccagtactcatttaaccgattcccatgttgttaactatctaaggttgtttctaatatttcattaattataacagttgcagcaaatttggtgtaccataaacctgtctccatataattgattattaggatatcattcccatgcaaggcattcttttattcacaacaaatgtgcaaatgtccatcttgtacttacaccatttccatgaaacagggcatttcctgctttggtactgcatgggtggcagctgtgcaggcaaacagccagtcgcaatgcaccttacacacaacaagcaacatgcagggtccccttccagtcgagcagtgcactttcccaataccaacaagcatccactagcaagcaattcaactgtctccaaggaatccaaggtaacccgcaagtactactctcgcaccatacccacaactcagtctcgcggaggaactcggttattccacgctcctcggaacgcccacaccctggcaaaggtccacagggcacgcaaaaatggcccagcacaccaacaggtgccgcagtgcactaaacggcatgaccatcatcaaagcacacaaggagcgagatccacacagacacaaacatgcggctcgcaggctagcccacacacggaggcaggccaactgagaacaccgcacacgaaaacacccgcacaggcctgccaccaaacaaggtaaacacaagaccaacctatcgccacgaccaaaacagtcaccaaaagcgacgcacacaaaacccacgaagaaccaagaatcaccgccgaaaaggagaacaagaagaaccagacacacaaaaaccgaacagtcaggacaccacacccgccgcaacaggaagaacgacgcaaacagacacaagaacgagaaggacacaggggaacacgccacaacaagcaccaaacaaacccagacgaccacacccacacaccaaagacccgatagcaaaccaaccgcaaacgaaaacagagaaacaacgagcaaacagccgaagaaca

SEQ ID NO: 505610 - DNA, 424 bp, Homo sapiens
agacgctatgaccgatggataccagtacgagtaggcggcacgagactaccgaccgtgacgatgtggccggtcacaagctgaccttcctgcgcctgatgtcctccgaggcctcccagaacatcaactaacagtagcaagaacagcgtgccctacgtggaccagcagactggcaacctcaagtaaggccctgctcctccagaggctccaacgagatcgagatccgcgccgagggcaacagccgcttcagctacagagtacactgtcgatggctgcacgagtcacaccggagcctggggcaagacagtgattgaatacaaaaacaccaagacctcccgactgcccatcatcgatgtggcccccttggacgttggtgccccagaccaggaattcggcttcgacgttggccctgtctgcttcctgtaaa

SEQ ID NO: 505611 - DNA, 193 bp, Homo sapiens
tacaactagttattgatgccaaacgtctgatatggacgcagatatgatgatgctgttgtacagtctgatatgaaacatatggccttaataggtggtgaatgatagtaggaaggaccaaggtccaagtcgaatacaagggagagaacaaaagcttctatccagaggaggttgtcttctatggttctgacaaaga

SEQ ID NO: 505612 - DNA, 106 bp, Homo sapiens
tatacgattgagctctgtaccccgaacagcaccagttggcgctgattcacgcgacggtcaccgcgataaagctgatggcggtggccggtatcggctccagaatcat

SEQ ID NO: 505613 - DNA, 829 bp, Homo sapiens
gccgccttttttttcttttgtgaaaggggacgacatttattccttttccaaatgttacagtaaaaccaggtggaagagaagggttttagcagttagaaaaaaacaaaagtgtacaaattctgggggtatgggccattaacaacgtttatttaccaaccagtggggaaaaaaaacagacacaaaatgttggtgttcacttttttcagacctaccccccaccccaaagctctaataacttgggctttaaccacaagttccaacacaaagacagaacaccaaggtggaattcacgagggctgtgggaggttttggaaactgtgaagttcaaacactatttttcaaacacccttaacagcggggaccagggtgtccctccccaaacccgagggtgcccacttaaggccacaagccaccaagaaaacttaaaaaacaaacgaggggaagaggctggcacaacatcaaaggttggggaagtatataagccccccaaattccgtggcctcaagggaaattagggggcagtataggggttaacacaaaacacctatacatggggcacaaaaacacatgggggcaaaacaaacaccaacaaatgtggcctataatgcacggggaggttgggcgcacaggggaaaagcgaaggatcaggggccccagggacacaggaaagcatatttcaccatttacttaaaccttaccctggggaaaaaacatgtttaaggggaccaatttttccaactgtgggccttaacaggggaacaccccacaattggactgatagggggagaaaatccaaagagacggagcaactggcgccaaaggggaacct

SEQ ID NO: 505614 - DNA, 267 bp, Homo sapiens
  misc_feature (1)..(1): n is a, c, g, or t
  misc_feature (92)..(92): n is a, c, g, or t
  misc_feature (99)..(99): n is a, c, g, or t
ntgacatctgcttcagagtggctgcctccagcttcctccgccacaaggcctctcttctgcggccgcacgtgactactcgcgacccctgctgnatgtctnttttttagagagcgaggagccagcgacctcagggggccccccagccgtcaccctgcatggcatctcacccgacgtcttcactcacgtgctatactacatgtacagcgaccacactgagctgtcccccgaggcagcctatgatgtgctgagcgtcgccgacatgtaaat

SEQ ID NO: 505615 - DNA, 105 bp, Homo sapiens
tactaaaaacacaaaaaattagccgggacattggtggcagggcattctgtaaccccaggtactcggggaagggcttgagggcttggggtgaaaggccccaagggg

SEQ ID NO: 505616 - DNA, 918 bp, Homo sapiens
aagcgacagcctcatgctctccccgtcagagggcttctttgtcctctgaaggctatggcccaaggaagtgatgccccagcgagggactttgacggagaggactctgatctccgaggtatccacagcttccaacagttccaactaagcagcctccccaaatgcacagtttcaccccagaataagactaatgaggcctctccctggagagcactgacccgcgggacttggggacccggtgagtttggtttcagtactggagaccttatcgggtctcccgttcccttggacattttggctcttctcattttatctattccctcagacttcgtatgctctggtatgaatgcccactagggtgcttgacaaggcaatttccaggacagggatccaggagttcatgatgacaagattctcagatcgagtgcccctcagtactaatagctataaaaaagaggacacgactttccgtagccaagttaagataaaggtgagattccatttccatgcacttagagtggtttgcagtaagcatttttaccccctaactcccaagagtgtagcttaaatacgcacagattcacaattgtacgtgataaggaatacgattagacaggctttggcttgcacagtcgagttcattatagtcctaaaatagctcagggggctcccgcatcgacaggagagtgcccggagggtaactagctctaacagaagcaggggtttaccgatgtgcggaaccgtgattaaccaggtttctacggcgcgtaatgaacatcagggacccgcggttttaaggccggtcaaagggctccagaggtttcccaaacaaaaaaaggcggcgccaataaaagcggggagaaaattatcgcttcaacgcccactatctacgccctacttcccccaaaagcaaagggggaa

SEQ ID NO: 505617 - DNA, 287 bp, Homo sapiens
cgagctatataccagtagatgtatgtacggctaggggtgatggtaagcaacatctggtaatacgatagtgtcatagcggttgcttgctgtgaaaagatccaagcatagtaaaaagcctgtatattttttaaaaacacatcttaactccacgctttacgatattataaaagttgaatggttcctcttggtaaggatatttgcttacaagtgctaggaaataactcactgatacctgcgttaacatactttgttttgcctagagaggggcaataaaaatgaaccaaagg

SEQ ID NO: 505618 - DNA, 378 bp, Homo sapiens
tcataggggagatttaaaggaccagggacatgggaaccaagccatagggatcagagggccttgtccttgaacactactggggtatattcaggctcatccacgcagctgctgggttcttgccctaacggccctcccctgcaacatccgtcttggaggagaggctgcagccacagcaccctactgccctttaaataaaggagggctgtgggcagggccatgtccctttctcctctcccctcaacctcttactgctgttctccctttctccgtccttcatggaagccctgggagataacctggcttcctggagttgatggaataaaggttggggtggccataatggtttgttgggggtgagggaaaaaacccacagggacc

SEQ ID NO: 505619 - DNA, 99 bp, Homo sapiens
gcggccgcctactactactactactgctcgaattcaagcttctaagatgtacggggacatgccccaggagaagctggcctcctcccccaaggacaaaaa

SEQ ID NO: 505620 - DNA, 1174 bp, Homo sapiens
  misc_feature (609)..(609): n is a, c, g, or t
ttaaaaaaaaaaaaaaaagaggcaaccaaccccaacaaactaaaaaagaatggttttgggtattgggaagaagggatgggtcgagttaagcctggtctggtcagcacgacgggcaatgggatactggggcccgggtggaccacgtttcagtactcacggtcctctatccgtgggataccccaggggaagggcggaaccggttgttcggctcggtggtggtctggtcaccgcaagcatggttgggcgatcggggagttctcgggcacacaagactaatccgctatcaagccggttgggctcctttcaagctaacttacggttaccaacgtgttccttataaacgcgcaaggcgtcttccgggacctatgacgggaccacaaggggaggaagcgctaagtttgcgtttcagtggtggattgagaaaatggagtggactcttacgtcctgtaaaagagggcaagaaacacaaattatcccgtgggtgtgcaccgagaaagagagaaaacaaacacaaagcccccaacttcaagacttcgagctccacgaggggagtgagagaaccacggagaaaaggagtcttagagggaaatccagtgggaacctttctgngacaacaaaagagcgagaaaaagccttatattctgtgggccttggagggggtatccccttttaacaacaaatctacaagaacaacaactgtgtggtcccagaaagatatgcccggggggcaactccttggggaaagcacaggggatctcaaagggggcaaggtgtgtgcacacgcaagaggggaaacgtttaggaagtctgggggatttgaagcatgtgtgacaggtaataaattacatattgagggggaatttacaacggttatgaattggtaaaaggacatgttgacacacccaccaggggggccaagtaatttgagacgaggaaaccgacgaatgggcccggtacaatgggctgggtacgcggtaccactttacggttatttggcctgttaagaaggccacattttttgcgtcatggttggggtggtaaaaaagcaaaaaagggcgattgggattgaaaaaagggcaatagggtggcacggatgtgttattgacgaaacattcaatggtggcgagaaaatacatatccagggagaggtaggggggcggaacattttaagtct

SEQ ID NO: 505621 - DNA, 579 bp, Homo sapiens
gtgcacttaatgggatccccgccatgggtaatttcttactgtctgtgccccatcagcagtgaaccttggtctcacggagctctaggccgtatccaggccgttgctatccgttgcccagccccgggatgtataaccccctccctcttcacgtcccccgagtaatagtttcttgattctcgcacaaaacagaatgtcgtcgcgatcgtgtcacggattagaagatcaatggagtggggggatcttgcccgctttatttggccccgccgctatcggtactcgattcatgcccactaactttacgtaatcgcctgatcctcggccggcttgatttttcttgccccccttagcgccgatctccctttttttggtgctctggctcgggcgagtacgtcctcgctgtgtgaatcccggagtcgtcgagggcacggcccctaaggagtcccccgttatccaatcctctggccgacagatggtctgcgcctggtgtttaggggatgcctccgacgacgtgatgtgcttaaaacacaattattttcgcgcggcattatacccaaaactcccatgggcccaaacataaca

SEQ ID NO: 505622 - DNA, 110 bp, Homo sapiens
ggagaaaccgacccagaaggcagaggaacaccgcagcgccagcccaaggacatcgaaaaccagagcctgagcaacgagccggccttcaccgcccgcaagacgagggcgga

SEQ ID NO: 505623 - DNA, 91 bp, Homo sapiens
  misc_feature (5)..(5): n is a, c, g, or t
  misc_feature (55)..(55): n is a, c, g, or t
  misc_feature (62)..(62): n is a, c, g, or t
  misc_feature (80)..(80): n is a, c, g, or t
aagcncagggagagtgcgtgggctgagcatctgcaggccgaaggagccgtggccnttggaangggccacaagttccaccncactattcgag

SEQ ID NO: 505624 - DNA, 361 bp, Homo sapiens
  misc_feature (21)..(21): n is a, c, g, or t
  misc_feature (97)..(97): n is a, c, g, or t
  misc_feature (112)..(112): n is a, c, g, or t
  misc_feature (116)..(116): n is a, c, g, or t
  misc_feature (132)..(132): n is a, c, g, or t
  misc_feature (148)..(148): n is a, c, g, or t
  misc_feature (150)..(150): n is a, c, g, or t
  misc_feature (224)..(224): n is a, c, g, or t
  misc_feature (256)..(256): n is a, c, g, or t
  misc_feature (358)..(358): n is a, c, g, or t
  misc_feature (360)..(360): n is a, c, g, or t
tttttatttactgtatatttncctaactttttttttctctttttaacatatacattttatacttcaacatttcaaccccatataaggcaaggaagtncagccaggggaattnggangcagggaagaggcatnaggtgtgccgggagancnattatctgcatctcttcccaactctgagtccagtgcattcaataattctggcagcattacatagtacacttctnggagaatttacaccacataagctgcccaaatncaataaatcagggcttttttcccctcccagaaaactggtttactataaacgtgtgaaacaccgtcccgatctatttctgaacccacccaagcctggctactntna

SEQ ID NO: 505625 - DNA, 192 bp, Homo sapiens
tggaacgagatggggcgtatggaatgttgaaggctgctccgttgatgtcggtcggagcttccagtactaggcgagggcaggagtgaggcctcgggcacacagccggcgccctagtcacccggcccagtatggagggcggcacgggccctcgcacacggcactatgccaagagtggctctacactctacgcta

SEQ ID NO: 505626 - DNA, 203 bp, Homo sapiens
cttcccctttttttctggtaaaacctatgggaacccccaaattagcctccctcccctttaatgatttcccttgaatatataccgaaattgttatttgctttttttttaaaaaggggggttaagtaacccttttcttcttttgttaattataggtccttaatttccgccccccgtggggggtccattaaaatttttttgattta

SEQ ID NO: 505627 - DNA, 286 bp, Homo sapiens
  misc_feature (280)..(280): n is a, c, g, or t
ccctggatcgttgaatgtttggattgcatcgccacagctatcaatattctcgaatgtagcgattgcacaagatttatctcatgctttaaatgaacaaaagcaactgcaatatggccagtctattttgactttagatggttatcatgtcgggcaagattgggtaattgctcttatgtatgatgacgaaagtcaaagtgcgcaaggtatgctcagtcatcgtattcgtctagacgaaattgaacaagttcttcaaaagcagcaaccagaattacaaacattncagcca

SEQ ID NO: 505628 - DNA, 405 bp, Homo sapiens
tacatgatagaccgagctatacccattcgcgaatcacccacatagtaacatgggtgactgccggtgtctacagcactatgccatagcatggaaggcattagaacagagccagttgaaaggcagccacctgatccccatgcaactcttaaccttggaacaaaaatccttccttagtctcaagttcatccatcctaaaaggaaaaaggaggatccaatgagcactcggtttccttcggttgctatttttccagattcttgttagaccacagggtatcccgaaggagttttccatggcatgtcagcaaaatccaaataccactcttcagaaggtaatatacttaaaacagaaataaaacagtaaaattgcaccccatatattcacaaaatttacactggaaattatgt

SEQ ID NO: 505629 - DNA, 831 bp, Homo sapiens
gggaggcgctttaggctggccggcggcgctgtaaggtggagtcgtatgctgctgctgttgtgagcctgtggcgcggcttctgtgggccggaaccttaaagataggcgcaatggctgaacactggtgataatgaacagatggctgccctggaggccaaaatctgtcatcacattgcgtatactctcggcgacttcacattctgccacgggacaagtttctaaaggaacagataaaactggatgaaggctgggtacctttggcagatactgatacacattcaaacccggttgacaccgtctaacaatcagactttaatgtaattgtggaagcacttgagcaaatccaaggcagaactcactggaaatcagtgaacgataacaactaaaatcagaaggtctccaagacaaaccctacctgaagtgactgactgagtatacaaatgatgtcacacacacagatctgttctcatcttaccaggcttcccaaatgatgcaactcttgatgacctaaaaagaatggttagcacgatacaggtccccgtactaaatatcagatgagcaagaacatgcataaagcgatttaagggatcactcacgtcgtgttggataggcttgaatctgcctagaaattcggtgagacccctggggcagaagtacacagaaaagaactgctatcgttgcacgggagaatacttcggcaagcacctggaacgacacaactaaaggggcagcaaataaactaatcggacagagggacaatagcgagctggacgccctcgcaccagatggctgcgatccgggctgccccgaggaggaatcacccacggcaacg

SEQ ID NO: 505630 - DNA, 534 bp, Homo sapiens
  misc_feature (59)..(59): n is a, c, g, or t
ccctaaaggcactacattgaaaagtctgaaagagcacaaatcagataatctaaagtcancaccctcgaaggcaactacgagaaacaagaacaaaccaaacccaaattcagtcagacagcagaggacaactaaccaacgatcagacgccacgacacctaaacctgaaacctgacaacaaacaaaattacaaaagactaccagtcgacaacaaacatacgccctgatctcctcttgaaaccacaccgactaaaaccaagtttaagcaccctcgcggcgccaaaaaaccttctcggcccactttcaagggaacaacccccgaatatttgaaggcgccgaaacggaccttgcagaacgcgccctgagaaaggggcaaatttcacggcggccaactagcggacaagggcaaggggcaacaacaacgaagatttcccccaagagatagaaccgtcttttaaccccgaactgtgggaccccccgtttttcgccccactcgatacaacacaccgcaggcgttttgtcctccacaacgaaaag

SEQ ID NO: 505631 - DNA, 1207 bp, Homo sapiens
  misc_feature (66)..(66): n is a, c, g, or t
  misc_feature (91)..(91): n is a, c, g, or t
  misc_feature (110)..(110): n is a, c, g, or t
  misc_feature (167)..(167): n is a, c, g, or t
  misc_feature (220)..(221): n is a, c, g, or t
  misc_feature (226)..(226): n is a, c, g, or t
  misc_feature (258)..(258): n is a, c, g, or t
  misc_feature (275)..(275): n is a, c, g, or t
tagggctatcgtcgaccaggccgtcagcgcacgcgtgcggagccaccgtcaggagcaggtagctgntgggctccgtgggacactttgcgtncgggctgggagcgtgcttnccacgacggtgacacgcttccctggattggcagccagactgccttccgggtcactgncatggaggagccgcagtcagatcctagcgtcgagccccctctgagtcaggaannatttncagacctatggaaactacttcctgaaaacaangttctgtcccccttgcngtcccaagcaatggatgatttgatgctgtccccggacgatattgaacaatggttcactgaagacccaggtccagatgaagctcccagaatgccagaggctgctccccagcggtggaccctgaaccagcaagctcctacaccggcggaccactgcaagcagacaccctcctgggcccatgtaatcgttctgtcccttcaccagaaaacctaccatgggcagcatacgggataccagtctgggcattcttgcacttctgggacagacaaagtcatgtgacttggcacgtacctccccctgccctcaacaagatgtaattgccaactgtgcaatgacctgccctgttgcagctagtgggtttgattccaaaaaccaccggcacgtgaccccgagtacgccgccattgggccatctacaatgcagttcacaggaacatgacggaggataggtgaggcgcttgacccccagccatgcagcgctggctcagaattaccgatggctctgggccccttacttcaggcattctatatcacgaagtggcacggacaatcttgcaggtgatgcacgaatatgggactgaacagaacaacacatactacgaacatactgctggagaggtgccccacatgaagacccagccagaagatagaggaaccgagacggggccacccagtacagccacacagcttaccatagcgtgtaccacagacacacagtactgtcgccgcactgacaccggagggccactctctagcagaacaaactacaacggagacacccctgggaaacgcaactgagaacgacaaccgctctagcaggaagcagatcgacgcagaggcggccaacccgggaccaaaagccagaataccggaaacagggagacacagcagcagccaccgagaaacaaagacatccgcaacacgactgcccacaa

SEQ ID NO: 505632 - DNA, 597 bp, Homo sapiens
  misc_feature (54)..(54): n is a, c, g, or t
tttggggctccattcatgggtaaggagatgggaacggttcatggatggcgcccnaacccgaagctcgggtacacctagtttggcctttcaggagggagtcctgtatgatagggaaccggggagactgggggaggggtgaaaagatgctgaggccagctcggaacttctggatggtaccacttgccttgaaccaagggtgcctcttctcctgcggggtctacaagaaagtcatggctcagatgttcccaggggggggatgtaaacatacccaggatcttttgcaagtgaagacccagtgccaatgtccttccttatgggagggcgggaacaccgtcaagggatggttcgggtccatcgtaggtacggggagagagaaagtcgcaggctcaaatagattaggttcggtccggaggaccttccaggcgtgtagagatttcctcatcgaggaagctgatgtggagggggaggtcaaggtccaggtcatcgatagttccatattctcggatggatacagagttcgcacggtagatctccttcagggattcaaggtctgcatcaagcggtgggtgtcgagacaggtcagttgcacagctccct

SEQ ID NO: 505633 - DNA, 282 bp, Homo sapiens
  misc_feature (59)..(59): n is a, c, g, or t
  misc_feature (101)..(101): n is a, c, g, or t
  misc_feature (270)..(270): n is a, c, g, or t
catagagaggcaaaaaccccagaataatcaataatacaatactgaaggaggaaaacagnagccagaggcctgccgctgtctgactttgagacttactctgnagctacaggaatcaagacagtgtggtattgtgaaagaatacacaagtggatgaatagaacagaatagagcccccagaaacagacatatagagagacattttttacaaaggtgcaatgataatatgatacagcaaagatagtcttttcaacaaatggtgctgggacaacntgaatatccaca

SEQ ID NO: 505634 - DNA, 942 bp, Homo sapiens
taggcaacatacgtttttattactcaaggacaaccgggacgtcaccaatgcccagtttcacgggggcatgtagtgtgactcagggctgaacacaaaatcacgtggtgaagccgtgtgctacagcccgtgggctactttgggacacgcaagaggacactcggttacttgaaaccgtgactgtgcttctgaagacatgtgatacatgtcttttcccgtgaaaatgtttccccttccctgtctggccatgctcccaatctttttctggccttaccaggggcttctcactggtctggggtaaactaaggtctaggggcctaagtctagaccttgggtaagtgggccccttctgccacaatcagtgcctagggcctagaggtctgagcttgtgggcctccgaaagctctggaccttggctcggagctacgtctggtgaggcgcccagggatggcctggtcttgcaggccaccactatataggccagtctcgcaaggtcccccagtaaaagcctgaagcacactggcccgaggtttggaggctgggtagctgctcgaacattacgggaggatctcgaaaatcctcgactactgtgctaaggaactgaaccagtgacacttacaggccataacttcagctattcccagggttcacctatttgcgaaacaggggtcctggcatcttgtacaccccaaggttgggagtgcaggtccataacaatccatgcactccatgggagccctcgaacctcaccaagctataaaatgatccctcgcataactatagaacttcccccaagcaagctgggagaccacaaggggcgtgcgactaacaacgccaggccataacaagtttatagaaaacattttgtgggaaaaaaccgcggtcctaactcaatgttggcccgggagggtctagaccatatggggctccagggaaccctcctgg

SEQ ID NO: 505635 - DNA, 148 bp, Homo sapiens
atacctcacaaacagccctggaaaacctgttcacagtacttcagtgcatggtttaacttctgaaaagctcgtgagcccaggtctctccttctgaagtcaggaacatctggatggcaatggcttggccttttacattattatccctcaa

SEQ ID NO: 505636 - DNA, 702 bp, Homo sapiens
gccggagacaaaccggacccggcaaccagccatgaacagtagaggtcaatatccaagacagccaacctatcctgtgcggcctcctgggaatccagttgataccctcatgacctgtgtcatcttcctcacggctccatccctataccgagtgcatcctagctgcctactcagtagctctatcgtccgagctttgtgcacccgaggggctgccacgagtccccgaccatgtcaggcgcattgcctggagcctctctgtatcttcccatggccagctctgtggctgttgggcctgtaggttccacgaatccccatggcttattatccagtcggtcccatctatccacctggtctccacagtgctggtggaaggagggtatgatgcgaggtgccacgatttgtgagctggtggctactgctgggaacctggcctcctcctgctcctggatgccttccggtctgctgctcagtttgccgccctgcaggtggttctgcgtcctcgttactcagtggacggggaacgttcttcattggagtgggacagatgggggctaccaccatcctggttgagggaaccaaggccatctttgtgccggcgaaagacgatcacataccttcagcacttctcacaatgtacactgctttagtcatattcacctgaagttgcagtttagacacatgtgttgcggtgtcttgctggtgtcc

SEQ ID NO: 505637 - DNA, 106 bp, Homo sapiens
agatagcatagagtcagtgggactcatgtctgatcaggagtaaaaagagttgtttaaagaagctccattatccgagattttttctcgatcctggaacaatgtgtcc

SEQ ID NO: 505638 - DNA, 1305 bp, Homo sapiens
ttcggtctgctggtacgtgtctgcatggttcatggtttgtggttacacatcttctagcttactgggttctgggacttttggggactggaccgctttgtgatggggaggcctcctttctgatggtgactttgctctcttctaggatgggggtggatcgtcgcttgttggggcgccatagaccacttggggtgtttggagccgcctctcgggtgtccacggcctctccctatgttctccccctcctggatccgtgggtgtctacctggcgcgccgtttgtctgtcgccttagatgtgttcggttgttgtctaatttgtgagcccccctgtgggggggccgtgttttaataattggatggggatgttctcttctctcctgcgccatcaatctggcctccgtgtcccgttctcctcgcggtgtgttgtctctcccgcctgtttctcctggttttggggtatgggagggtcccccttttatgtcgcctatttttgttacgtcgccacattctctcccgtttccttccccctgggggggttgggctttcacggggatcacctgtccctttgatcgggggtattttgttgagagtgttttccgcgcgggttttatttttccggagctccgtagatgggggtccccgtttgtgcccttgtgcccgtgctctttatgatgggtgatatctttttggggtgcactcaccgtgtggtgtgaaatgtccctcgttcacactgttgggacacactgtgggtcctcacgtccccgcctccagtggcttctccccctctcccacagtgcgccacccactgggggtgggggcccccggtgttgatgtctttttgtgggcgtacaccaccctcggggcatcgtgggcccctcctggcaccgcactcttgtccacgcttctccctcggtaccaccggcttgagtgtttttcaccgccaccccccagcgagatgtgctcacattgcttacccgaggctgtcgtcccttccgacgatcccccgcggtttgtggcccctgggaggccccaaggatctcgcggcgacctgtggtatcccgcgaagtacgagttccctttgtgccccgcgaggaacccgcccgctgagtctcttattgaaccccccgctggccaccccctccccgcgtgtcctccaccccccatgccccaccccacgagtcggctcacgaacaaatggggataccccgggccacatttgttatatgtcctccttatctggggtttatttattaagtgtcaccaggtttttttataattaaacctaggtgatttcccccttaacaaaca

SEQ ID NO: 505639 - DNA, 113 bp, Homo sapiens
ttgttaactgattgtttggttggtcgttcggttcggtaaaccggtttagctccctaaaaggcggaattccgttttcaccgattcggggataccgcggaataaactttttaccg

SEQ ID NO: 505640 - DNA, 618 bp, Homo sapiens
  misc_feature (142)..(142): n is a, c, g, or t
  misc_feature (145)..(145): n is a, c, g, or t
  misc_feature (197)..(197): n is a, c, g, or t
  misc_feature (211)..(211): n is a, c, g, or t
  misc_feature (216)..(216): n is a, c, g, or t
  misc_feature (220)..(220): n is a, c, g, or t
  misc_feature (225)..(225): n is a, c, g, or t
  misc_feature (227)..(227): n is a, c, g, or t
  misc_feature (251)..(251): n is a, c, g, or t
  misc_feature (273)..(273): n is a, c, g, or t
  misc_feature (553)..(553): n is a, c, g, or t
  misc_feature (558)..(558): n is a, c, g, or t
ggcgaggagactcgtggtctggttctgggacttccctaacagcatggcccctaaacgccagtctccactcccgcctcaaaagaagaaaccaagaccacctcctgctctgggaccggagaagacatcggcctctgcaggcttncgnaagaagggaggaaaagaacagcaagaagcgattgaacacattgatgaagtanacaatgtgatatanacgantttntgtgnanaacccatgtggggagattttgaangtggcacagaatttttccaaantccgccaaccattttttcagaagaggtcagatttgatcgccaaaatcccaaatttttgggtaacaacatttgtcaaccatccacaagtgtctgcactgcttggggaggaagatgaagaggcactgcattatttgaccagagttgaagtgacagaatttgaagatattaaatcaggttacagaatagatttttattttgatgaaaatcctactttgaaaataaagttctctccaagaatttcatctgaatgagagtggtgatccatcttcgaagtcaccgnaatcnatggaatctggaaggatttgacgaacgttcgagtcaacgcgaataagccgcagaagaggc

SEQ ID NO: 505641 - DNA, 1595 bp, Homo sapiens
  misc_feature (1210)..(1210): n is a, c, g, or t
aacaaaccctgaagagtatacaacatagaaaccatggcaaatgcaatcgactactttgctacgaagaaagattcctttcctgcatctttcatagtttctcgttaaatattttggtcacatcgcttcttttctcaacaactagttcttacgcgaacagactctgatgccaagtgtcttctgtatctgggaggtattggacgcggaaacaaacattgcatggatggctggaacactgtactgaggaatgactcagacaaggcttccagatgtctaaacagattctttaaactactgaaactgttacctaggttaacaaacctgattgaaggtatttcgctgtttgtcccagttcagcgaatttctaggtaaagtattggtctatatgtgcgggctttctccagaacgcacattctcatcagttgtgaccagaaaaacaaccatgttctcatcgggtagccttcttaactcttttagtgcacacacaaaacacattaatctaggcctttctcaaacttccttattttcaggcccaattccccctctcacaaaaagctccttggaaatacagcacaagcggagtactatacgggggggtacgcacaccggggttgaaaaatcactccttagacccctacttatatgacagttcaaaatcggctaggcacagaaacgttcagaatcggaaagcgacacacacaaattataaataggcccactgtgtaatctttcaccgctcaaacacattcaacaagcatctctcccaaccaaaaacatcacctctagtgctctggtctaagacaccacaagggttcgccacggctcacggatcgcaccatagagtagtccctcgtttcaactaaactggaggactggcgacaccaacccacatgtgagaataacagcagcaacactatatggcgacactagtacgggtgtacaccacaagatctaacaccacatagaccccagcgtgcaacgagacgagaccgcctccccacaccaatcatcacaacgcaccactaacatcaccttggaccgaatacatatcggacaacacaacaacaacaacaaaccaaaaaccacaacataacaacgcaaacagcaactacaaccaaacagaagacagcaacaaacaaccagaaacaaccacgcaaaacaaacgaggatggggggaggcgtcagaacacgaagatcatagtcacgaaggagngaggcgagccaatatacactgtccacaagaccagtctacattagtgacacagagcggagcgccatataaagaagaagagtcacattatcataagagtcggatgaacggagcgagattaataaacaagtagtcggaggcaagcaccaccccaaagctgccttcaagtagagagaacacacacattcgaggagactaaactaagcaaagccaacacagacagtaaacggaagtcaagagattaatatagtgattattgttcgaacgctcccgctagcacagtcagaaagtcatagtaaaacatcaggagagatcatcatagcaaactatgagtaagcatgagataaacaacgaccatatcgcggagaacccagagcccgtacgcggc

SEQ ID NO: 505642 - DNA, 301 bp, Homo sapiens
tagtgcatagatttcactattccactggactatcgcaacaaaataagcaagactatcttcggtgaatcagccacacgtgacgaatcaagtacattctgtgggatcataccccaacatgcagtgccatctatcccagaaatacagcagcataggcaaaatagtcagcaatcacccaccctcagggccacacatgacactatgagaagaatggcactctgagtaataaatgtgactgaaatacaaataaaatgtgtggttttccagactcacaaagtcttggccgccacaactgtgcacaaac

SEQ ID NO: 505643 - DNA, 185 bp, Homo sapiens
gtcactaagcagaagacattctgttgataaccaggttgtcctgacgaggctggacagaagctgagcgaacaggcggcaaggtaggacggagatagaatgtgagaggccccagatactgtcgagcacacacagaacaccttgagaaataactctcgattcaatgctcctacacatgaagccgctga

SEQ ID NO: 505644 - DNA, 127 bp, Homo sapiens
ggtggatctagaggatcccacatggaatggctatttaagttatattgaagttagtttggctgcattttgcctgggttttaagtatttgagggattatgttcacaaaatattaaacagggtcaacaga

SEQ ID NO: 505645 - DNA, 137 bp, Homo sapiens
ttaagtccgtaccaacacgcagggcacacatgtgcagcacacgcacatacacacacacacacacacatatatacatatatatatgtttcatgttggtcattctatagacaaatccagatgctagacatacctaagcc

SEQ ID NO: 505646 - DNA, 120 bp, Homo sapiens
cctgcatcctgaacgtgattcctgcttctgctttcttccttccttccttccttttatccttcctatctttttttcttactctattttctttctttcttttttcttactattcttatcttt

SEQ ID NO: 505647 - DNA, 106 bp, Homo sapiens
ccccatcaatcgctggagccatctgcctccttagggactggcattatttcttcatccttattggcagagtaatggtgacagcggcacagaccctttgccaaatgtg

SEQ ID NO: 505648 - DNA, 137 bp, Homo sapiens
ccttgatgtcctgctataacctgctatctacacaagcagccagagtgattctgtaaaaaagtaagtcagcgcccagatggtagtttctaatgctattctccaatcaaaggaaccagggctccttagacgaaatggca

SEQ ID NO: 505649 - DNA, 153 bp, Homo sapiens
gtccatagagtgtgctacataaatgctgatcagacaaaggtgaatgaatgaatgatacaatctggctgtagttgatggaaacagctcgggggtgccacacactggactcccactgcgtgactcttcagatcgtgtgacaggagtctccgtctc

SEQ ID NO: 505650 - DNA, 992 bp, Homo sapiens
  misc_feature (897)..(897): n is a, c, g, or t
gagcgggaaatggagtggtggtgtgtgtctaacctaatggtctgcaacctggcctacagcgggaagctggaagagttgaacggagagtattctggccgataaatccctggctactagaactagaccagtgacagcagaactgcattgcactggagcatgctcagctggatcttatcagaaattgtagaatatctgtagcaactatggagtgccagtgaactgataacagacgatgcaggttggtctcctacttcatattgcggctactgctggccgggcatgagattgtacaagcccttctgggaacaaggtgctcaagtgactgctgtcaatcacaatggctgtacatcccgttacattatgcagcttcgagtaaacaggcatgagatcgctgtcatgttactggacatgcggggctaatccagatgctaaggaccactaatgaggcatacagcactgcacccaggcagcaggcaagggtaactttgaagaatgcattgcaatatccttctgtactacaaagcattccaccaaagatagcaaaggacagtgaggggtagacaacatcctactacactaagcacctggtgactgagtgaagagagtggcaagaaggcacaaaccggcatgggtggtaccccagaggggcagccacaggaagacacacaatacgacgaacataaacggacccgaggagagcaaggaaccgtcgttgaacaaagagttgagacgcaaacggggtgggcaccggggaggttagaaaagtaacagacccacaggaagcaaaatggcgcaggacaaggggataaaacaagacaagcagaagaaggaatagaactagccaaagacaacggccaagagcgatggacgagatgaacagggaaagccaacaagagnggtacaccaacaccagaggccaacaggagagtagcggagcgcaaaagaacaacaacacaaagacaagatgacagagagagagacaccgcacagcc

SEQ ID NO: 505651 - DNA, 119 bp, Homo sapiens
  misc_feature (110)..(111): n is a, c, g, or t
cggccgtaatctattctttgcaaataacaaaaaggacaaaaactacaattacagtaaaacataaagtagttctcaagtggaaaagttatcattcccacagtccttgagtnngttccttc

SEQ ID NO: 505652 - DNA, 681 bp, Homo sapiens
ccggctttacgtagcacctcggtgtactgcagcaccctccgcttcctactcctaggcgatgagagccagtggctagaagttcaccatgtctattctcaagatccatgccagggagatctttgactctcgctggggaatcccactgcttgaggtttgatctctctcacctcaaaaggtctcattacagagcattgctgtgcccagtttggttgctatcaacttggtatctatgagtgccctataatgctccgggacaatgataagactctgctatatgtgtggaacggtgtgtctcaaacgtgctgttggacgcacatcaataaacactattgctgccttgcccatggattaggcaacagaaacttgaacgtcaacatgaacaatgacgacagatttgcacaaacttgattgatctgaagatgtgatggacacatgacaaatacaatctagaggttatggattgctgaactgccatatctgaggtggttgtccacattgctcgtcttgcaacttgctcgtatgccatgttgacgaatggagggtccacccatgatacacgtccacactctgcatgaacttgagcatggacacctcttgaagtcaattcctgccaatatcccgggagttacaaatgtaaatcaaatgtgcggttctctttggttgaaaaaacgatggccatgg

SEQ ID NO: 505653 - DNA, 132 bp, Homo sapiens
ctagaggatcccgcttcggcgctaacctcagttcgcgtttactccctttattctctccacccagaaaggtgacaaatccaagccctggatgtgaggggagaatatgagcgaaggaaatggttaggcccgaag

SEQ ID NO: 505654 - DNA, 100 bp, Homo sapiens
cacgggcttatgatgtatcgcccaacacccgatcgagtatttggacatcaccctactgaaaacttgcgattcttcttagttttctgcatacttttcatca

SEQ ID NO: 505655 - DNA, 192 bp, Homo sapiens
ggggaccgtatgtaggagtttaagattagtccgccgataatctgtgtactcgtacgttcagtaccattggtggccaattgcatttgatggtaaagggagggatcgttgagcctcgctctgttatgtatcaggatgcgcttaggattgggacgcggcgattcaggactaggcatgatggacgggcaggtatac

SEQ ID NO: 505656 - DNA, 271 bp, Homo sapiens
tatgttacccagactgatcttgaactcctgggctccagtaatccacccaccttggctcccaaagtgctgggataacagacataaaccactgggctctgccagtttcaaaagtatctacaatgacagtgtatacgttaatacacagtatgtaaagtaagtttataactagagacaaggtctcactgtattgctcaggctagtactatgacctcctgagcttaagtgatcctaccaccttgggctcccaaaatgctggacttacaggcatgag

SEQ ID NO: 505657 - DNA, 749 bp, Homo sapiens
agcggggagctgactctctcccggtcggcgggcggttaggggaaagtacctggggtgaaacggtagaggaggtcaaggggaccctgggggatgcccctaggggctaccagggttcgaactgcacagtgacatggtcaggtcgcgggtatagccaagtcttctaggctgcatgactgggtcgggtggcctaggactgctactgctggcattagccagtgagacgatcctgtggctcgtttgcgcatgggacctctggacggccctcgtacgatacgtcgacaagctggacaaggtgcatggacgaactctgtgtaagaatgcaccagttgtggaagcagattgaggactccggtcatgattaactggagtttcaatggatcgacgggctggcgacaggagagaccccgcgacggcttgcacaggcagcagacagcggactggtcgagacacgggcaacccaagagtgccaggaccatcataaagagaagcgtgacaagagggcgattgagaaccagttgtggggcagccatggagcaacctggatgcccctccgtgtgagctggtcaaccccggagaaacagttcatgagtggactacatcctgagtgtgatgaacgtggctgacgtttgacttccctcccgaattctatgagcatgccaagggtctgtgggaggatgaaggagtgcgtgcctgctacgaacgctccaacgagtaccagttgattgactgtgcccagtattactggacac

SEQ ID NO: 505658 - DNA, 170 bp, Homo sapiens
  misc_feature (37)..(37): n is a, c, g, or t
tctagaggatcgccgggagcttaccttggagatctgnacttcgtggactgtggacttctccataaccctcccatgttctgaatgaactcctcggcttcctggaatcagctcctctctggaaagttctactccgttctcaggagccactggaagacctgacttttctgcag

SEQ ID NO: 505659 - DNA, 244 bp, Homo sapiens
aaaaaaaggccggggtgggcccaaaatcctctgtctatattttatttaaggaacaaggtttggctccttttatatggggaaccctggaacagtgagtcatattttaatatatttttaaatgtttggcatgtaaatgtaaactcagcctccaaatatttcagtgaatttgccctgttttatcatagttactgggtaaactcctttgaaatgtttccaaaattaactattaaaccaaaatttttta

SEQ ID NO: 505660 - DNA, 157 bp, Homo sapiens
gaggagggagtgggggatcaggttggagggcgcgagtcaccattgaggctgaggaacgattctctctcgtggggtcaagactagcccaggaaacagggcagtcgccagcgtgactggaaaaggagacctggggcagctgggacggcagtgttctcca

SEQ ID NO: 505661 - DNA, 302 bp, Homo sapiens
attaagaaaaaagagagtccactgaatgcatcatgtgtattaatgcaattaacatttcaaaaccacattaaaagggaggatatctaataagataactatttaatcaacccctctgaaacaatattattctgcagataaaaatacatttcttgtatatacatgtagagttctacatgaaagaaaagattcatcttcatatataaaaaggatgacccttgataaatacatcttatattgccaaactgatgtgattaccactgtttgaactataaacagaaggattaaacgattaagttattgga

SEQ ID NO: 505662 - DNA, 90 bp, Homo sapiens
tcctagggaggtattactcgtaatgtcacagtgggtgttcaccctgtgatgtcattcttatttgaccttggcgccttttttaaaccaccc

SEQ ID NO: 505663 - DNA, 561 bp, Homo sapiens
gtgccagcttactcttcactccaggtcggatgccacgtgctacaggacatgggagctgctgcttgtgggaatctggtgcctgttccactagagacaaggggtagagtttctcatttggatgaaaaccccttcaactggtggtgtacaactgaagctactatatctttttttgaaaatggcaaaaaaaaaaaaaaaaatttctggaggaccacagaaactcaagtgtgtgttcctcctctttggggccccctttaaagtagtggggatatttgggccctggagataccaccagtttacccattcctttaccagggaattgttgccatcaattcccagttgaaaattaattagaaaagactgaatttttatagtgctccacttaggcttacattgtgagttagactctaaaatttctgccttgctaaagtttctaacactgcctctcagattccagtttgggacattgcacaattaagaccttttaaacgctttggcttgctaactcggaagacacattagtctgcagcaagactttcctatttttgaagaactgcgagaaat

SEQ ID NO: 505664 - DNA, 117 bp, Homo sapiens
atcatagaacatttacagagagaaaccagaaatggcgtgagaagaaagaaacagacactgtggtagaaggaaaaaggaggctagcactgtgagtgactttaattccctaatctccag

SEQ ID NO: 505665 - DNA, 572 bp, Homo sapiens
  misc_feature (163)..(163): n is a, c, g, or t
gtgttatccaagtccgcactgcccttccccaaggcaagcaaaaccttattgtgtttgggagtccaaagaaggagaaattcccctggctcggtggtatggaacgccaccggatggacattccccaaagtggaccgcggttttgttgggcactggggaaccgttntgtcccaatggtctgtggggtggaaccccaagcaccccaataccctcagggtggctggtaaaaagaccgtgttacccttccaccctgttttgcaaaggcccatccagtgtgcaaaagccgaggccggggaaggagtggggcccacccccatcacctggaattgcggatggtccaaagcaaaagggacatcgaggacccaaagattgtcgtccaggccccggttctgtgagggcccccccgctttgcccgtaacacacagggcggttggtgtctccgtggtttgtccctgtgaaaacatgtaacgtctgccttagagccatgcccgaaacttgatatttttttctttcatgaggggccggcatctgctggttttcattgtgaaacgggccagtcgtgctttgtgaaaaat

SEQ ID NO: 505666 - DNA, 150 bp, Homo sapiens
caatctcgagcatctcaaaatccatcctgcagtgacccctgcatggagacagagccctccttcgtagactggagacctctgcaatgcctcgcgaagacgtgatagaggcccaggctgtgaccaatctcatggggccattcaacgcctccg

SEQ ID NO: 505667 - DNA, 738 bp, Homo sapiens
  misc_feature (33)..(33): n is a, c, g, or t
  misc_feature (321)..(321): n is a, c, g, or t
  misc_feature (479)..(479): n is a, c, g, or t
tgaggaagtggctgctgctccggcgcggagccnagagccggttcggcgcgtcgactgcccagagtccgcggccggggcgcgggaggagccaagccgccatggcctaccacagcttcctggtggagcccatcagctgccacgcctggaacaaggaccgcacccagattgccatctgccccaacaaccatgaggtgcatatctatgaaaagagcggtgccaaatggaccaaggtgcacgatgctcaaggagcacaacgggcaggtgacaggcatcgactgggcccccgagagtaaccgtattgtgacctgcggcacagaccgnaacgcctacgtgtggacgctgaagggccgcacatggaagcccacgctggtcatcctgcggatcaaccggggctgcccgctgcgtgcgcttgggcccccaacgagaacaagtttgctagtgggcagcgggctctcgtggtgatctccatctgttatatncgagcaggagaatgactggtgggttttgcaagcacattcaagaagcccatcctgctccaccgtcctcagcctggacttggcaccccaacaatgtgctagctggctgccggctcctgtgacttcaaggtgtcggatcttttcagcctacatcaaggaggtggaggaacggccgggaccaacccgtggggtccaagatgccttggggactgatgtccgaatcagaagtagttgctgtggtacatggcgctgtctcaacaag

SEQ ID NO: 505668 - DNA, 1429 bp, Homo sapiens
  misc_feature (33)..(33): n is a, c, g, or t
  misc_feature (418)..(418): n is a, c, g, or t
tgaggaagtggctgctgctccggcgcggagccnagagccggttcggcgcgtcgactgcccagagtccgcggccggggcgcgggaggctggagtgtggtgacataccttgactcactgcagcatctgcctcccgggttccagtgattctcctgcctcagcctctcaggtagctgggattacaggagccaagccgccatggcctaccacagcttcctggtggagcccatcagctgccacgcctggaacaaggaccgcacccagattgccatctgccccaacaaccatgaggtgcatatctatgaaaagagcggtgccaaatggaccaaggtgcacgatgctcaaggagcacaacgggcaggtgacaggcatcgactgggcccccgagagtaaccgtattgtgacctgcggcacagaccgnaacgcctacgtgtggacgctgaagggccgcacatggaagcccacgctggtcatcctgcggatcaaccggggctgcccgctgcgtgcgcttgggcccccaacgagaacaagtttgcaatagaacgagcatcacacttaaaagctaccttactagaataatctataaaaaaaaacaaaataatattagcacatactagtagaacccttgcactacctccttctgaagcagactaacaccccagggataaacaatcaattcgatctcaatatctaaaactatctggagacggatactatataacatcctaacatacaaaagaggttggaggaaacggggccggcacccaccccgtgggagctaccaagatgccctttatggggaactggatagtaacgaataccagcagtagctagcggctaagggtacatagacgtactaaatttctacatccagcgaggagagccgcgtaggcctgggtaagccacgacagcaccgtctagcctagggctggatagccgacaagaagataggccgtacgcgactactaggcctactagaaacactaaccacttgctaggcgctgacctatcatacacagacaacagcctggtggcagcgggccacgactgctaacccggtgctagttcacctatggacgccgccgcggggatagctagagcttcggcgggcggtggacgtacctaagcagagctacgcagcgtggctagacggccgcgagcgcctccagaacctggacaagaaggcgagctccgagggtggcacggctggggcgcgggcctaaatcgctgccaagaaagcgtcagccaaacatcgggtcacggggggaagccatggcccagttgcaccctggctggaggggtgagacaggggtggaaacggggggcctgagacccaaaaaccgggggaatggcccccaacgggaggggaggaagggccacaaggccagagggccacccaggcgcccacagaggagggccaaaataattaaac

SEQ ID NO: 505669 - DNA, 820 bp, Homo sapiens
gcttccatccgttcgcgcagaccctgccggatccgctgccggtatggatgatcgagaggatctggtgtaccaggcgaagttggccgagcgaggctgggcgagtacgacgcacaggtggtggcagtcaattgcaacgacatagtagcagggatggatgtggagctgacagttgacagaatagaaacctcctatctgtagcatataagaatgtgattggagctagaagagcctccgtggagaataatcagcagcattgaagcagaaagaagaaaacaagggaggagaagacaagctataaatgattcgggaatatcggcaaagtggttgagacgtgagctaaagttacctctgttgtgacattctggatgtactgacaaatcaccgtcattccagcgagctaacactggcgagtccaaggttttctattataccacactgaaaggggactaccacaggtatctggcagaatttgccacaggaaacgacaggaaggaggctgcggagaacagcctagtgggttataaagctgctagtgatattgcaattgacagaacttccaccaagggcaatccatatttggcttaggtctatgcttctcaattgtttccgtatttctaacctacgaaaattctttatttccccctgaaccgtgcctgcagggttgggcaaaaagcagatttgtggatgaatgccattgcaggaaactgggatacggctgggttgagagaaaagggttaaggacttctacacttaattaatggaggaggttaccgtggataaatctgaacactatgggattagaaacatgtaggggtgaacg

SEQ ID NO: 505670 - DNA, 748 bp, Homo sapiens
  misc_feature (9)..(9): n is a, c, g, or t
  misc_feature (16)..(16): n is a, c, g, or t
  misc_feature (79)..(79): n is a, c, g, or t
  misc_feature (112)..(114): n is a, c, g, or t
  misc_feature (116)..(116): n is a, c, g, or t
  misc_feature (118)..(118): n is a, c, g, or t
  misc_feature (140)..(140): n is a, c, g, or t
  misc_feature (175)..(175): n is a, c, g, or t
  misc_feature (184)..(184): n is a, c, g, or t
  misc_feature (186)..(186): n is a, c, g, or t
  misc_feature (356)..(356): n is a, c, g, or t
  misc_feature (473)..(473): n is a, c, g, or t
  misc_feature (739)..(739): n is a, c, g, or t
  misc_feature (743)..(743): n is a, c, g, or t
ttttttttngttacgntattaagtagatgctcttgcacagaagatcagcatgatatctataagtacatagatgcagacnatccacctatagctagcttcttcttctccactnnncnanttcacacacttgaatgactgcnttcatgctaagcactgcggatccacagagagaganagtgtgtcnanttagctcacgtgtcatcactcttgttgaaaatttaagaagaaaggcttcagcggtagtacacatttttacatgtcctcatagcctttcctactttactcagggtcaaatctgtagagtccagacggcattgatggagcatcctggagtttatagaaggttgtctgtctgnagctgggaaaagtccacagactaggaaaaggatatatattattataaggaattggcttccatgattctaaaggctgagaagtctcaaggtctgtggtcagcaagctggagacccacncaggagagccaacggtgcagttccagtctgagtctgaaggcctttgaaacacgtagtgatctttcagtagatttcatttttccaatgttgcttcatttcaaagcacaccaactgctctggcttggctttgctgaaccatttaacacccacttgcatctcagaaagtttcagggaaagctccactttggtttcagtcatcatctttggaagaaaaggaagttggatttttccattaacacctcacctcgtgccgaattcctgcagcncggnggatc

SEQ ID NO: 505671 - DNA, 192 bp, Homo sapiens
tggatcaagcgtatgatattctgggttgaaaactcttggctttcttttctgtggagacagagtttgctcttgtggcccaggctggagtgcaatggcatgatcttggatacctgcaacccccgcctcccaggtccaaatgattgtcttgcctcagcctcctgagagtagctgagattacaggcacccccacca

SEQ ID NO: 505672 - DNA, 205 bp, Homo sapiens
agcctggtggtatgggtggcatatgcaggggtgtgtatgtaggtgtatgcaatgtaggtgtgtatgtgtcaggtgtcagttgtgtgtcaggtgtatgcagtgtgtaggtgtggtgtgtgtaagggtgtgtgtaggtgtatgcagtatcaggtgtggtagtgtagtaggtagtgggtagtagcatgtagtgtgtaggtgtagtgta

SEQ ID NO: 505673 - DNA, 460 bp, Homo sapiens
tcctcacttccatgtcacaaccctagcagcggtgcagcatgctgtctccaacccttatcccaggtttaagggtggtttatggccatacgtggaggttttttgttgttgtttttgagactgagtttcactcttgttgcccaggctggagtgcaatggcaccatctcggctcactgcaacctccacctcctggttcaagcgattctcaggcctcagcttcccaagtagttgggattacaggcgcctgccaacacaactggctcatattgtatttttagtagagatggggtatctccatgtaggtcaggctggtctcaaaatcccgaactcaagtgatatgaccgacttggcctcccaaagtgctgggattacaggcgtgagacaacgaaaccagaagagataaataatgaaaaattaaataatattctagtatgaagtgaggaggatactgaacaggatgtg

SEQ ID NO: 505674 - DNA, 231 bp, Homo sapiens
  misc_feature (201)..(201): n is a, c, g, or t
gaatatgctgtccccaagcagggctagaccgtcatctcagaaaacttagcagagtgggagcaaaccgcaccgccccagcaggaacatgcccatggagaggccttccctgagcacgagcaggggcctcctaaggcagtaggaaacgtgagggaagctgctgtagacgaggaggcctctgcctctggtgcccgttggggtcangggagaaaggtacagggtatgacgcgctgg

SEQ ID NO: 505675 - DNA, 694 bp, Homo sapiens
  misc_feature (9)..(9): n is a, c, g, or t
  misc_feature (16)..(16): n is a, c, g, or t
  misc_feature (79)..(79): n is a, c, g, or t
  misc_feature (112)..(114): n is a, c, g, or t
  misc_feature (116)..(116): n is a, c, g, or t
  misc_feature (118)..(118): n is a, c, g, or t
  misc_feature (140)..(140): n is a, c, g, or t
  misc_feature (175)..(175): n is a, c, g, or t
  misc_feature (184)..(184): n is a, c, g, or t
  misc_feature (186)..(186): n is a, c, g, or t
  misc_feature (356)..(356): n is a, c, g, or t
  misc_feature (473)..(473): n is a, c, g, or t
  misc_feature (685)..(685): n is a, c, g, or t
  misc_feature (689)..(689): n is a, c, g, or t
ttttttttngttacgntattaagtagatgctcttgcacagaagatcagcatgatatctataagtacatagatgcagacnatccacctatagctagcttcttcttctccactnnncnanttcacacacttgaatgactgcnttcatgctaagcactgcggatccacagagagaganagtgtgtcnanttagctcacgtgtcatcactcttgttgaaaatttaagaagaaaggcttcagcggtagtacacatttttacatgtcctcatagcctttcctactttactcagggtcaaatctgtagagtccagacggcattgatggagcatcctggagtttatagaaggttgtctgtctgnagctgggaaaagtccacagactaggaaaaggatatatattattataaggaattggcttccatgattctaaaggctgagaagtctcaaggtctgtggtcagcaagctggagacccacncaggagagccaacggtgcagttccagtccaatgttgcttcatttcaaagcacaccaactgctctggcttggctttgctgaaccatttaacacccacttgcatctcagaaagtttcagggaaagctccactttggtttcagtcatcatctttggaagaaaaggaagttggatttttccattaacacctcacctcgtgccgaattcctgcagcncggnggatc

SEQ ID NO: 505676 - DNA, 402 bp, Homo sapiens
ggaccccccgcgacagagttgtgctcatcaagtgagacttttcttccgtgttgttttggctgtgttctgcaagttaaatgtgtaaaagcacttcttttttccccttttttttttccccctggggaaaatctaaagtcttcaagaatccttgaggaattcaagttctgtcttataaatagaactaaccttgtttcataaattagcatctgaaattaaattaggcatccaataaatatttgctgaatgaagtagactttaaaatctaaatatgttaaatagggtttcctgtttaagactattttctattataaaattaatacctgcaaattttaaaggttttagtgtctttaaaaaatatttcttacaatcaaatacagtgttcttcaccaggggagttctgaa

SEQ ID NO: 505677 - DNA, 370 bp, Homo sapiens
cgatgacttcctcgtcatggctcgcgctcagggggatgacaccagtgccgctgcgcgctcaacttatggacggccacgaggcgcgcactgacaaacgaggctggtacctcaacgccaagcattccctcgccatcggagaaaacggggagtactaccacctcgtcgtccccggtggtttcgctgcgcgactgcgtggggtcaagcttcacccttccctgcccccgatgcatattggcagaggcggtcgcgacggtgagactggagaacttaaagagttcctgacgtggctgattgactctcgttaggcttcgacggcggccggggtgtgacgctgaccacctagtcgacggcgtctcttggacctccagta

SEQ ID NO: 505678 - DNA, 223 bp, Homo sapiens
acagcagttaatacagactcagcagatgcttagaatttgctgcatgggttaattgagaatagaaatttgccccgtgggatagtgcacacacctcagtgctagcctcacgaaagtggaatacgccttcgaaaagaatttgtccttgaagcttgtatctgatatcagcagtggattgtagaacttgtagctagattgagaccttgtataggaagttaacttgtgc

SEQ ID NO: 505679 - DNA, 102 bp, Homo sapiens
actctgctgcggattgaccgaaaccgttggacgccgcagtggtggtcaccgaccacagcacggtacctggtggtgccgaagcgtgtttccttgtccttacca

SEQ ID NO: 505680 - DNA, 230 bp, Homo sapiens
ttgtttaggaaatgtctagacagcgcagttggattcccagccaaagctccataccaaagaatggctggggggggacaattggaaattcaccacatggcccgtgtccccctagtactggtcaagaactgaaaagaaatggagcatacagattgcacccaaggctgctgaggctgccagagctaccaccagtcttggactacctttagacagttcacatgaatgagaatggc

SEQ ID NO: 505681 - DNA, 546 bp, Homo sapiens
cattgctggcattagagtctgcggagggctcgggggatgccaccttggaagtaagccacgatagctccatagtctttgaacaattatagtgtcactgctgtggccaatccattgagacttcagtggatgaagctgcatatgagtttcgataacatccgcgagggttgagttaccagtgaggccagaataccagcaaatatcccacagctgaaatttgtaataggaataagggttgcatccacctggtcatgaggcactatatttttggtctggttgtaaaacatcaggtagattcctgagaagggcgcatctcgaaggagagttgctgtcaggccactgaagaggccccggtgcccctcactgtgatagatgctcctcagggcagcgtagatactctcatagccatatttcccactctcatagcgcgtcttgattacagtgataggtgacatacagacccctgcaacagagcgagagcccacccccagcatgactgactccagggcggttgggggatggcctcgcaagaaatactgcttcaaagag

SEQ ID NO: 505682 - DNA, 322 bp, Homo sapiens
taaattcgcggccgcgtcgacggtcaccagtaccattacctcttctagaataagcaattaccatgttttttttaaaatccattttaccgccacgtgaggtgactcatgcctataatcctggcactttgggaggccaaggcaggtggattgcctgaggtcaggaattcgagaccggcctggccaaaatggtgaaaccctgactctcctaaaaatacaaaaattagctgggagtggtggcacgcacctgtaatcccagctactcgggaggctgagccaggagaatcactttaacctgggaggcggaggttgcagtgagccaaga

SEQ ID NO: 505683 - DNA, 265 bp, Homo sapiens
tgggtttaaagggggggccctttttttttttgccaggggccctttttcccaaaattgttgggttgggccggtttgccccctttttttaacccaaggggggtatttttttggggtatttttggaaaaaaattggctggtttttccttcctggggcctttttcaggggtttcttgggaaggggcccttttttttttttgccggaaaggttggtgttttttttggtaaaatgtttttggtttccattaaatggttacttgcccgggga

SEQ ID NO: 505684 - DNA, 740 bp, Homo sapiens
  misc_feature (703)..(703): n is a, c, g, or t
tcaaaactccctttacctcacctcaaatgacttttgaggagggctagagtctcctggtctggcactggcacctggtcaggaactcggagcccatctctggggtcactaacaggctgactggaaggaggcagctcaggcctcactgtcacacactgatctggaggtctctctggttacaaaatggcctcagtcttcttcagcagaatgattactgactctgaaaacatcctagctcatcacaatatctgtctgggccaggtgtactgcttacaacagaatctacaaggacaacaactcaccgtgtttttcaattcagatttttaagttatgaattcaaatctactaaataaatatcagaaacaaacaaaaacagataaagctatagctcactgcattttagaacctgagtgatgtcatggttctctagagctttcattccacaggagagttcttgtctctagggcctcgcacactatgcacaggtgaagggacgaagtgtagccccacagggtagaattcatgatcagaggacagggaaatactgctttattcatttttctattattgtagaagtttttatcctctctaaaaaaatacttattggttatacacagaagttagtcaacttttacaccaattacacattttccagaaaaattcataaaatatcaaacatacaaaagttggttaaaaaatggcctcncaggccatgatgactaaagaaatcataccaaagtttc

SEQ ID NO: 505685 - DNA, 210 bp, Homo sapiens
tctggctaggcacaactggtgattggggctaagtcgtaacaaggtagccgtaccggaaggtgcgtgcaactgtcatataagcgaacgtcatatagcgctccgcagtgccgtgggcctgaccctggcggtgccgatcctgatggcctcactgaaccatccaatcggtagtagcgacgggcggtgtgtacaaagggcagagaattaatcaat

SEQ ID NO: 505686 - DNA, 431 bp, Homo sapiens
tcaaaactccctttacctcacctcaaatgacttttgaggagggctagagtctcctggtctggcactggcacctggtcaggaactcggagcccatctctggggtcactaacaggctgactggaaggaggcagctcaggcctcactgtcacacactgatctggaggtctctctggtagtgccattattttggtgattgatatttgaactcctttgctcttgtttcaatttggtaaatctacaagggaactctctccctctggtttacttagtttacctcctccttaccataggaaatcgtgttgtaggcataatttccacatgtgtaaactgacatgctctgaggacaaaagaatgatgacagttaacattttccgagcatttttaaaattgtcagactgtatttcattgaactctcatgataaaactgatag

SEQ ID NO: 505687 - DNA, 503 bp, Homo sapiens
tgtgcgacacacagtacgtataactaacagtctagtgaggtcgtgaaatgcatgaaatgtgagtatctttcccccaccctatagattaaaagtgctaccccttaacttgtattttacttgaagcattggatggtcttacaggaagagagagggtgggagaaaatgttttttctaagatttccacagatgctatagtactattgacaaactgggttagagaaggagtgtaccgctgtgctgttggcacgaacaccttcagggactggagctgcttttatccttggaggagtattcccagttgaagctgaaagtacagcacagtccagctttgggtcatattcagtcatctcaggagaacttcagagagctttagtaggcaaatgttgaggtaagtttccaataatgggactcttaaaggtttattaagggggggccaatattgcaattagttgcagggcctcttaccgttgggttgggggggggttaggaattttagttatatc

SEQ ID NO: 505688 - DNA, 293 bp, Homo sapiens
ggggatttgggcccctttttgggggccccccccgggtttggggggggcttttttttgccccccccggggttcctttttgccccccctgtttgccaagggggggcccccgggggggggggcctttaaacccccggcctgggggccctgggaaattggattccccccccccttttaagcccccggggtttttttttttccctttttgccccccccccccccccctctttttttttttttttttggaggggggttttggggcccccaaaaatttttttcccccttttggggggcca

SEQ ID NO: 505689 - DNA, 297 bp, Homo sapiens
gaataataggtagacttaccatctagatctcttccacttgattattcattcatctgtactatagaggatgattgactttatctctaatactaaaaactgtttcagtcgcattaactatgatgagcttattataattttaagtttacatcttttaaatggataataggaaactaaactgtatagtgtttagatatttaggtcacgttcagacactaagaatccagctgagaatagattttatacttaaaaatatctgtaaagtatgctagtccgcctttaatagcacctcagtagtta

SEQ ID NO: 505690 - DNA, 1550 bp, Homo sapiens
cggccggtcgttggcggctccggtcttcgtgcttgtgtgcgtcgtcgcgtgcggctgctggttgtgcccccatcgctgtgctgcttgtcgtgcgtcgtttctcgtgtgtgtgtgtgctcctcctcttcgtgtctctgcgttgctgctcgatctgcctgtgcttacttgctttcgctgtccggttttctcgtctcgtgtcacgacgtccccgctgttcctgtgtgtcgggctgttgcgctgctccacttttgcttggctccccagtctttccgtccgtggtccgctgctcctgtctccggtacttgccccgtgtttttgtggcgctggctcttgccgttcctggtgtcgtctctgcctggcgcctggccgtcctcgtcgttcgtttggtgtttctgacgttcttccgggttgcggtggtgcttctcggtcccgggggccttctcttgctttgcttcgagcgcttgtctgtgtgcttatttcggtgcctactgtggccggtgcctctcgtggttctctgctcatcgccgttctggtgtcctggtcgttcgtcctttgctctctttgtgttgcccccgccttttagtttcctgctgttgtggcctcgttctgttcgttcttctatgtccttgtgtcccgtattgttttggcctccttgcactcttgtgctctattgtgtgtcgtcccatctctttgtcggatcgtcggttgcaccctcgtatggttccagtctcctcttgtccctatgtgtgccctttgtactcgtttgggtctactcgatcgcactcggcccctcatgctattttgactgttctccgaactgcctcgatttctattccaggggatcctgtctagtgccccgctcgttttgggtcgtgatctgtcgccggtcactcttagggggagttcctgttgtcccagcggtgttccactgtgtgtgctctgccacgcctgctccttgcttccgttgcttgtagtccatgtcatcatcatggatcgtccccgtgatgcaagcgccctctccttcttaggccgatgctggacaaactcgcaatactctcgcgggccgccccacgtctacggtactctcaatgtcgatcgcgctttctgggcttgccgtggtgtctgctccaaccggtctactggtgccctaccctcggggaggtaccgctcggggtggttctgcattgcagcttgcaagttccctgacagggcattaggcacggacgtcttaccttgctggctcctgccacatcgatgcccccgggaggaaagttctccggatcgtgacccctcagccatttggcactgcgtcatcaccgaccagctctgggactgcattccctgcaggaacctcccggcggtcaggcagggcggccccctgctctcacacatctgctgcatcttgggtctcagggacccagatcagatggacttacaaggagctgggcactgacctgcctcaacagggtccaattgcctcctcgcctccagaacttggagaaagggaagtggcacctgaggcctccagataagcttccgtgattctcgtt

SEQ ID NO: 505691 - DNA, 176 bp, Homo sapiens
tcaagctgaagtttatttaaaatgtaaaagaaatgttcccccaaaatgctggtgatagcaaaaggataccataggcccttcctagttacagtacagatcggggacactgggtacgccatggatgaggaagcgcctgcttgaagcgtctgacagatagactcgagagatagtctagg

SEQ ID NO: 505692 - DNA, 342 bp, Homo sapiens
agttctctcacctcagactctcaagtagctgtgattacagacgtgtgccaccatacctgtgtaatttttgcatttttagtggagagggagtttcaccatgttggccacgttggtcttgaacttctgacctcaggtgatccttctggcttgggcttccaaagtgctgggattacaggcatgagccaccgtgcttagccgcttctttatgaattttacacttggcaaatgtgtaatgaccgaagccatagtctggtcctaatacatgtccgcattgactgttgtgtcattagctgtctggttacattagcttcctggcttcttgtttagaccactgcttccctt

SEQ ID NO: 505693 - DNA, 1092 bp, Homo sapiens
  misc_feature (871)..(871): n is a, c, g, or t
tagggggtggaaaaaacccgggcgttgagccgtcccaaacagggggggtgagcaacccgcaacggttgttgttggaaagagcaggccctgggaaagaaggggccggtactctgaccggctggtggacccgcacctcgtgtctggacgaagaagaggggcgccgccaaaaccccaccgtggaggaagtcccataggcctctcccgcccgggggatgaaacaaagccccgccaaggacattcatgtcccccgcggggaagcgtttttgtgcccgagtaaccaccccccgaatctggtcgcccctggttcaaaaaacgatggtctatgtgcaacaaaaaaaacgcgccagtcgaagttgctccccagcaagcagatggtttttgctgagggcaaaccccccgcccccggagcaaggtgccctgctcccaaaagaagctgtgcttgctcgaagataccacgcagtggcgtgtcggaacccacagctcgggcgcgggggaagaataacaaacgacctccttcttgttaaaaggatctgccgcttcgccccccctctctcgttagacgacagtagaagtaagtgcgcgcccgccggcaaaagacgagcctcgctttaacagaacattttctgctggctactaaaaaagaaaggtggtgctatgacaaagctgtttcatcactcccccatacggggggcagacacttgcatcaggcaaaacaggccttcccgcctgcgtgctcccccaaggaggcgtgttagagcaccgagccgttctagcgccaacaaatttgtagccccgacccacgttggcgcgtcttcaccaccgcaacgcgggtttcgctggactttacatcacccagtggattggttccccngagagagacaggagtagacagacacacagaacggggtagccaccaacacgtcgtacagaaaaaaatagagagaaacaagcgtttcgcaacagagtgttctatggataattacagactcattttggtccgaccaggtggagtggtcggatattttccaacatagttatcatttttttctagggcggcccaaaaaaaaccctttttaaacccaaaccataaca

SEQ ID NO: 505694 - DNA, 223 bp, Homo sapiens
  misc_feature (19)..(19): n is a, c, g, or t
  misc_feature (33)..(33): n is a, c, g, or t
  misc_feature (164)..(164): n is a, c, g, or t
ccgagacgggctgatcatnaggtcaggagattnaaatcaagaccatcctggcggctgggcgtggtggctcacgcctggaatcccagcactttgggaggtcgaggtgggtggatcacgaggttgggagatcaagaccatcctggctggcacggtgaaaccctgtntctactaaaagtacagaaggttagctgggcgtggtggcgggcgcctgtagtcccagcta

SEQ ID NO: 505695 - DNA, 97 bp, Homo sapiens
tgaacccgggtcccccgatggggttttcccccggcccgggggaaaattttgggaaaattccggccccccctttttggaaaaacttcccggggggccc

SEQ ID NO: 505696 - DNA, 499 bp, Homo sapiens
agtgagtcatgagtatcccctccttctggactacgcgatccctgcagctattagaatgcattgtgaaacgaggggagtatattaaaagtcgtgactgcgcgaaagactcgtgactagtgattgttgaaggaaaaaatccagctgagtgataaaggctgagtgttgaggaaatttctgcagttttaagcagccgtatttgtgattgaagctgagtacattttgctggtgtatttttaggtaaaatgctttttgttcatttctggtggtgggaggggactgaagcctttagtcttttccagatgcaaccttaaaatcagtgacaagaaacattccaaacaagcaacagtcttcaagaaattaaactggcaagtggaaatgtttaaacagttcagtgatctttagtgcattgtttatgtgtgggtttctctctcccctcccttggtcttaattcttacatgcaggaacactcagcagacacacgtatgcgtggccagaagga

SEQ ID NO: 505697 - DNA, 398 bp, Homo sapiens
  misc_feature (54)..(54): n is a, c, g, or t
aattttataaactaagatgctactgggaagaaaaaagctaaatctgaaatacanaaacaacatatttacactggtgatatggtttagatctggtatgccaaagctgaatctcatgtcatattgtaatctccaatgttggagatggggcctaggaggaggtgattggattggatcatgggggcggatttcctcctttggtgctattctggtgatggagttctcactaaatcttgttgtttaaaagtgtgtggtacctcccttccccagcttcctcctgttccagccaggtaagacatgtctgcttcccctttgccttctgccatgattgtaagtttcctgaggcctccccagccatgcttcctgtacagcctgcagaaccatgagccaattaaacctct

SEQ ID NO: 505698 - DNA, 1405 bp, Homo sapiens
gagctggagtgtgctccccgccccctgccgctgcgcctcgcctcccggctcacctccccaccccatctgccctgctgcggctctcctgcgtagacattctcagccgctactagttgagacgatgggactcgctcggctcgtcacgtgtaatcgctgagtagaggtacaccgggctgtccgtgcggaccgttattgaacaaatgccgcatgcatggtataaagggcactgagtggtaacaggcctcggaacgtaaaggcaacttaaccattcacacggagcggctctcctaactattgctatgcgattcctttgtcgcggcttgcaattcgccttctctctgtctcgtagaggcgtgaggtctcgatccgcatttgcgctcattccattgtgtgccttgttgcagcatgtgggtgtgcttgcctaagttgatcgccctccgtgacggactcgctgcgcagattctcgtgcgcctgtgtgaccactgtcttccttcaacttgggagacatagcgttccccttcgtgtggctctttgtaccactttccacttcgaatagcacgtttcggtcgcctttgcgttgcaaaaccttacgcgatattagcagactgtccttaaccagaaagtactctcccccccattcgtgtggacccccccattctcccctattgtaaccacctgatctggccccacatgttgtgcgagtgcgccttggatagcgaaggtgtcgaggtgagcctgcttggtgacatatcatagcctatgcggccccgctttttaagacctactggcccaccctccgcaaatgtgtgccctttcgttctttaagagcgcgcctgccgtgcctactggagtctcaaggcccccgcttcttttcgcgtgtgcccctctgctatcgtgcgcgcactcagcatgtgtcttcgccggcttgtgcttgcgtacccgggccgtgaatggcccgcccctggacttggcgtggcgcgttgtgaactttataggggcacgcccattctgtgccgtgggccggcggtagtcctggaaccgccgtgcaacgtggccttcgtttcgtttcaggctcgggtggtgcactgccttttgttcggactcgcccttaatacgtcctcctgtgccgtcccgtcctaacccatcccccccctttcttagccgttcgcttgtgccgcctcccgtggcgatggcgcacgcgtcttgccgccccgtgtaacggcgccatttttgtgcgaagggatccagggtgtcccccatatgtccgggcacgtgctcgcgagtcggcttgcaccacctcccgcgaaggtcggcggcccttttgtgcagcatcgcccgcttgtaagtgctcccgtgttgtggcgacctggccgctcccccttccttccagtgtctcgacggtacc

SEQ ID NO: 505699 - DNA, 264 bp, Homo sapiens
cgcttcatgccttcctgctttctgcttcctggcttctgactttcctgtttactgcggcttcctgtttctgtctacctgctactagactgcttcctgtttctgcccgtcaccctcatcctaccacttctcctccttcttccttgcatccctgcttctgcccttcctgttctgctgcttcctgcttctgcctttgcagactcactctgcatctgactatacttccaggcgggtgctttttctgtctgccagatgaacattccaggg

SEQ ID NO: 505700 - DNA, 272 bp, Homo sapiens
  misc_feature (13)..(13): n is a, c, g, or t
  misc_feature (62)..(62): n is a, c, g, or t
  misc_feature (69)..(69): n is a, c, g, or t
  misc_feature (124)..(124): n is a, c, g, or t
  misc_feature (132)..(132): n is a, c, g, or t
  misc_feature (238)..(238): n is a, c, g, or t
tcggattaagaantttgccgtatgaaagactacattcagtgtgggcaggtcaacagtgttancagaacncagttgttaagcgcacccagcactgggaggaaatgtggcttgagaggagcggctnccgaggcncccttcactggtctccaagtcgaaagccctggcccagttgtgtctccctcctcctccattctgatcagcagctctcctcatgctagcagggggcacaccaaatccntgatactcctcctctcctactgggcaagcagcgg

SEQ ID NO: 505701 - DNA, 265 bp, Homo sapiens
  misc_feature (40)..(40): n is a, c, g, or t
gggttttttttaaccggccccccccccttttcaaaaaggnccttttaaaggtgggcccgggttttttccggccccccgggggtttggggggtttagttaacccaaaaaaggccccccccccccccaagttttttaaattattgggggggtttccccccggggctttttcccccctttttttcctccggggttaatttccctaaatccggggggtttgtttttttttggggggttcccccaaataaaagggacccggttttcccca

SEQ ID NO: 505702 - DNA, 181 bp, Homo sapiens
aagcttttttttttggtgatagtagtaagatacatacaatataaaatttatcatttgagcttttaaagcatagtggaatttagtgcatacaccttgttgtgaaggcatcatcactacctagttctggagcgttttgtattattccaaacagaaattccacacctgttcagcactcaagctt

SEQ ID NO: 505703 - DNA, 844 bp, Homo sapiens
agcggggtgggagggcgaggaggtggagaagggcggggaggtgtagcgtggcgctcagtccgcctgctactcggtcccggcgctgggctgaggggaggggttgtcttaaaagtctctccttccccctgtagtgtggcggcctggcgagtcccagtgagagctggagtgtgtgccagaggtagtggggccgagaaacaaatgttccctggtggcttcctccgtgtggccgcggtcgtgggctgcgctgtttgacctgccccctcctcgcgaagtgcaatggcttccaaactcctgcgcgcggtcatcctcgtggccgcccggctcgggcaaggtgcaccgtgtgccagaggatcgcccagaaactttggtctccatgcatctctccagctggccacttcttgctgggagaacatcaaggccagcaccgacagttcggtgagcatggccacagcagtcatactagagcaacaagtcttctatgggttccatgaccatgtgatcacacgcctaatgcatgtcccgagttcggagaacaggcttggccaagcacaggctcctttgtatggaatatcgccatccgtgtacccttcagaggacagaggccgtacgacacccatggaaccacagagattcttgactgcagctgttgtgattcctagtcttgaataccagagatttgacataattgcccaaaataacgaacaggaacttgtaaaagcatccgcatctaccgagcacgggcacccatgagcataccactccccatcggctctaacacggaagcgggctaactcgttaactcttgccaccagtacacaatcaccacccatcgaatcgcacacct

SEQ ID NO: 505704 - DNA, 124 bp, Homo sapiens
tgatacgctcggttagtaccctcgataaggcacctcatacatatctatgaaaaaacttcctaccactcacccgtagcattacttatatgacatgtctccatacccagttacaatctccagcatt

SEQ ID NO: 505705 - DNA, 309 bp, Homo sapiens
  misc_feature (203)..(203): n is a, c, g, or t
cgaagttgtggaagaagttgaagctcctgtacgtcctctagtggttcgtgaaacaccacacagtgcacctacggggacctgttgtccacccccgcagcgtcaaaggagtccccatggtcaaggggaggtacctcgtcgaccgacggtacgaggggtcgcaccacgtcgtaaagcccaagttcatacactaaccgtagcctcanccgcggcctcggatacacgaccggttcaaacgtgagtagaaggggctggaccacctccccgaccacgaccacttgtagctggggttaccgtttccgacctatctga

SEQ ID NO: 505706 - DNA, 101 bp, Homo sapiens
gggtatacatagccgacggtaatcgctgatgtatggatctacaaaaaaaaaaggatacaaatgactttattggcaaaagagaaacagctttcagagacata

SEQ ID NO: 505707 - DNA, 203 bp, Homo sapiens
agtctccgaggctagggtgtcagtggtgcaatcatagactacagtgccaccttgaattccgaggctcaagggatcctcctgcctcagcctcattgagtagatgggactataagcatatgccaccacacccagctaatttatttatgtatgtgagatggagtctcactctgtcactcaggctgagtgcagtggaatgatctctg

SEQ ID NO: 505708 - DNA, 400 bp, Homo sapiens
ctggcgcacagttcgtgacactatgtacaaggaggtgatgataatgtcatacgattagtgaagggttgaacgcataagtatgcctattctggtccagagatccagatgctcaagaagcgtacgagatgagttttgcgataagggagcaagtagtattagtatagactctcacaatgtcaggagctgactgtaagactgcgatcatatgactgaggcactatacatgtgctgctacggggatgcatgcagtgccgatgttcaagaggacgccataagttgcaagcatgactgcatgttcgctagttactggagacacacaggaaggtgtattgagtgagctgcacatccaatacttcaataacatttatcttcatatacaagtccaatgctgcctgtctct

SEQ ID NO: 505709 - DNA, 875 bp, Homo sapiens
  misc_feature (7)..(7): n is a, c, g, or t
  misc_feature (9)..(9): n is a, c, g, or t
  misc_feature (167)..(167): n is a, c, g, or t
  misc_feature (169)..(169): n is a, c, g, or t
  misc_feature (224)..(224): n is a, c, g, or t
  misc_feature (232)..(232): n is a, c, g, or t
  misc_feature (279)..(279): n is a, c, g, or t
  misc_feature (285)..(285): n is a, c, g, or t
  misc_feature (405)..(405): n is a, c, g, or t
  misc_feature (427)..(427): n is a, c, g, or t
  misc_feature (436)..(436): n is a, c, g, or t
  misc_feature (478)..(478): n is a, c, g, or t
  misc_feature (482)..(482): n is a, c, g, or t
  misc_feature (484)..(484): n is a, c, g, or t
  misc_feature (487)..(487): n is a, c, g, or t
  misc_feature (493)..(494): n is a, c, g, or t
  misc_feature (497)..(497): n is a, c, g, or t
  misc_feature (501)..(501): n is a, c, g, or t
  misc_feature (510)..(511): n is a, c, g, or t
  misc_feature (513)..(514): n is a, c, g, or t
  misc_feature (516)..(516): n is a, c, g, or t
  misc_feature (520)..(520): n is a, c, g, or t
  misc_feature (524)..(524): n is a, c, g, or t
  misc_feature (532)..(532): n is a, c, g, or t
  misc_feature (534)..(534): n is a, c, g, or t
  misc_feature (549)..(549): n is a, c, g, or t
  misc_feature (570)..(570): n is a, c, g, or t
  misc_feature (577)..(577): n is a, c, g, or t
  misc_feature (579)..(580): n is a, c, g, or t
  misc_feature (591)..(591): n is a, c, g, or t
  misc_feature (594)..(594): n is a, c, g, or t
  misc_feature (596)..(597): n is a, c, g, or t
  misc_feature (600)..(601): n is a, c, g, or t
  misc_feature (604)..(604): n is a, c, g, or t
  misc_feature (607)..(607): n is a, c, g, or t
  misc_feature (615)..(615): n is a, c, g, or t
  misc_feature (632)..(632): n is a, c, g, or t
  misc_feature (634)..(634): n is a, c, g, or t
  misc_feature (636)..(636): n is a, c, g, or t
  misc_feature (638)..(638): n is a, c, g, or t
  misc_feature (640)..(640): n is a, c, g, or t
  misc_feature (650)..(650): n is a, c, g, or t
  misc_feature (691)..(691): n is a, c, g, or t
  misc_feature (710)..(710): n is a, c, g, or t
  misc_feature (713)..(713): n is a, c, g, or t
  misc_feature (763)..(763): n is a, c, g, or t
  misc_feature (850)..(850): n is a, c, g, or t
gcgcggngncaggttccgggctgcttaggttggcaccggtccgtggtccccgggggcgcagtcgcagcgctcccgccctccaggcgtcacgagtgcgcggtccagtgcggccggaacctggcgcaactcctagagcggtccttggggagacgcgggtcccagtcctntngctcctactggggcgtgcgctggtcggaagattgctggactcgctgaagagaganaacgcagnaaagccccagccacccatcaaatcagagagaaggaataccacccttntaacgnaaggcagttaaaaaagttacccatgtttcatgcacaccaggaacccaggtctttcaacggatccttgaagaatgtggctgtagatgaatgagcagcaggctgcaccgtcacagtgtctgnttgtagccagaatttgaaccgnaggccaaanaaaataaaccatggtaatcttccaaaccgaagtttttccaantagngnggnaaaccnnggnactncacaaccanntnntngggntgancgctaccngntgagacgagaaaagnttcggggggctgcccttatgntatttcnanngctctaccacngantnnagnntgnctnccagactngtaacaacacaccccangnangngnaaggggattnttttccatactcttcctttttgctcggtttatcacaaactngtggtccaaaagtgggtgntgntgacagctcctcgtcccctccctggcttgcccagggccagcatcaggggntgtcatcactggggggatgcagagctacctgtaacagcaacaaggaccattgtcaactccgttcccgtctgacacccacactgcacnttcagagctgaacataagggttacc

SEQ ID NO: 505710 - DNA, 364 bp, Homo sapiens
  misc_feature (9)..(9): n is a, c, g, or t
  misc_feature (162)..(162): n is a, c, g, or t
  misc_feature (353)..(353): n is a, c, g, or t
tcacttttntagagatgggggtctccctatgttgcccaggctggtctctaactcctggattcaagtgatcctcccaactcaacctcccaaagtgctgggactacaggtatgagccactgcacccagactttttttttctttttggaggcagggtctctattnttcaggctagagtgcaatgacacaatcgtggctcactgcatcctcaacctcctaggctcaagagatcctcctacctcagtctcccaaatacctggggactataagcacacaccaacacatctgggctaatttggttttttttttttgtaaagtttcactgatgttgtccgggttggtttcagactccgggnctcaagcaatt

SEQ ID NO: 505711 - DNA, 770 bp, Homo sapiens
  misc_feature (439)..(439): n is a, c, g, or t
ggcttggtcaccgccagcgtaggtgctaccaccgttgccgtcgccgcgccatttgtgatggcaggaagagtccggttctggacagctgagacagtggtggtgactgaaataattttaccaaaggaaaagctattgggcgaactatcttctccagcggagtatgccaatgtggcttgtgtaaccagagccagagtgtttcctatctcccaggatttgcgctctttaagtaaaaaaggttggtcaatcccaaaggccttttcgctggcaggatcatcaaggtcgggatgagtctcaatgtgggctggttgaccctccaagatatattgtctcgaacagggttggcctgattgaacatctagtgggacctttgtgacctcaaagatcagagggtcccagcttccgtgcaaccatacggttgggatgtggtcacctcaagtgngacttgtttccacagaaaggaaaagcgtgttccataaaacttgggcctgatgtctaggcagaaccttaatcagtgtgaacgacattggtttggtgcatcgcccaattattgttgactgactttccagggtaactcgatgctccttgttgcacaagcaaattacctgtgcagaacctttacttggacatgtgcccaacgtagctgtgtgccatacacaactttccggatgtgctgcgaaaggtttgactcctggtccagaagtcctaatggcaccctatgattctgctgtaccaaaaactagatgttgccggtggggacactcatgaacaag

SEQ ID NO: 505712 - DNA, 162 bp, Homo sapiens
tctacctgctgcagcctaatttggtttacgactcgagtgccctgttggggtcttgtgcgtgatcacgctaacccataatgggaacctttctgaggccttctcccttccttctattgtcccagccttttgcctccaagtggccgagcttctgaattagaatct

SEQ ID NO: 505713 - DNA, 988 bp, Homo sapiens
  misc_feature (70)..(70): n is a, c, g, or t
cccctgtgtaattggtgtgggcagttgtacacgggttgtcattcgcaagtattaattgggctccgggagnggagagcccgccaccggttataggcccacgggcacggtacttgcgaaaagccggaatttgtattcttgcgacgctccccccgtttactgggggcccacatgcgcaagacggctggtttgtgaaggtcgaacacagagaagggctgtgtccccggaagcagggcttcgctactatgtagtgggtggaccaaaagtgaatcaggggcacctggggtcacagaaaccaataacggcggtaaatcttgccccacgttgcagttactataacaacgctggcgtgtgtggcacaaaatctttgaaacagggtgtgacccgccgcccggacttcggcttgtttaattataacggagtagtttaaaggacagtctaattagggggaggggaccacaacacaccagagcggcggtcaaatatatttattagggcacattgtgcaagtagaacccgcccaggcacgcttgttttccgaaaagtcggcgtaacaatatgaataaacaattccgcgtcgagtgcgtcagaaaacaagttgtgtaagacccccttgctctacaatgtcgaaggaacccttgcgccactcggtgataaaggaagacccgccctgtggaagctgataacagagaaagttttctcccaccggtcatgccggggcttcttgtgaggcaaatttccaccttcgtgcagtcacacttagtgcgagattcgtgtattcctttcgactcactgcccgcacttaattatgtgagtgatatccacgccccgaacatccacacgcaagtgcgattagggtagcgagtatttctgtaagacaataaaagagatagacgcgaatatagggggtatctccaggaacatataattcctccggggctccacggtggggggttcatctcacccccttgcagaacccgcccacatgaca

SEQ ID NO: 505714 - DNA, 269 bp, Homo sapiens
  misc_feature (160)..(160): n is a, c, g, or t
  misc_feature (195)..(195): n is a, c, g, or t
tcgacttgatgtgaaatagggctccaagatgaggtggaacttggccaggtgatcctctacgagactagttatgtccctcagcccagaactgtacacatgctgaggagaaattgaagacattatcatcaataaaatcacatcgagcccgctctcaaccaanattaaccacatgtggcctgggcgcatgtggctcantagcctgtatatccccatgcactttgatgggctgaagcagtgcgggatccactatcagaatccgtgaatatctt

SEQ ID NO: 505715 - DNA, 210 bp, Homo sapiens
caatcagcttacttctaattgtttaaaaaatcgggcgagttatgcataaatctaagacctttttgaatgtaacattgtaagacctgtatcccacagaaaggagggtctcagaacgccggaggatggtagttaaatcataaagatatatattgtttcccacagttactgggtcaccacatagcaggcattcaataaaaaagtgtttgttta

SEQ ID NO: 505716 - DNA, 90 bp, Homo sapiens
  misc_feature (59)..(59): n is a, c, g, or t
atttggcgggtttttcggccactcagttctgccaccgtcactgagaagctcagcgatanttttgggaagcaggacgttctcaccaggaga

SEQ ID NO: 505717 - DNA, 645 bp, Homo sapiens
  misc_feature (130)..(130): n is a, c, g, or t
  misc_feature (195)..(196): n is a, c, g, or t
ctcatttcagtttttctgattctcaaatttaaaaagccaccctaacaagcaaagtaataaatactaaaggtgtgttttcatagagaatcagaaaaattgagaccaggtgagcccaaaagtgaagcttaanagaaagcaccttactggcttttctactcatggcaattattatttgttaccttgtattatagttanntgatgtacctctgtgccatgttacttcaagtaagtatgaaattcctggtggggtagagactgtgaactgacattttgcctttacagacctagcactgcttttacaaggtggatccttaaataattattgaacaaatagcctctgattgatatgagaggtgatatttatagttaagtgttacctttctaaaatgtcattcaggccgggtgtggtggtttacacctataatcccagcactttgggagaccgaggtgggttgatcactagaggtcaggaattcaagaccagcctggccgacatggtgaaaccctgtctctactaaaaatacaaaaatcagccatgtgtggcgcacatgcctataatcccagctactccagtggctgagggaggagaatcacttgggaggcggagattgcagtgagccaagattctgccattgcactccagtc

SEQ ID NO: 505718 - DNA, 874 bp, Homo sapiens
  misc_feature (132)..(132): n is a, c, g, or t
ggctagtcatcacaccatgtgcgtatgagtgttcctctgtgtagactcaacctgacgcctcgctcgtcccccattacgcacacccgatgcccgagggtgctcgactacgcgtaccttacagaaatgctccgncgaccgcatccgctcgcagcctcagaagacgtatcctgggagtccgaagcgagctgcctctctctgagtgaacctatggagatgatccgcggactcgccatgcgccactggaaggtgggcttcaggcgctcgtctggagagaaggtctggagaggataggaggacagaggcaaagggagaaagggacgtcagagcatcggcccttatacttcaggatttccatcctctcgcgatgtctccacgatgacagtgtagagattgggaagcaagagctgcacctgaggcaggtggatccatgggaagggagctcatctagccacagactattggactcgcgacgacggagcgtgatgaggttcctagatagagatgtcatagttgcttgttagtggcaagcatagaggagttggcatcatggggcctgtcattactcgcgatagcaactagtcatgtgcatagtggtaaacccatgaataagtatgaacgccctggcgccactgaaagtccagagtagacgtcgagcggtatccctggcgtcaagctgcgcgagtacgcaaacacgcggcaacgatcctaagggtgcgacatagtgggttcaaccgtgggccgttcgacttagggtagaccgttggaattggaggaaggcccggaaaccgaatgaaaagcgagagaagacgtcgaccatttagcctagcaagtccctttgataagggaggcaagtgcgtggggaaacctgaaacgc

SEQ ID NO: 505719 - DNA, 386 bp, Homo sapiens
ggcgggcactgttagatactacgccagcaacagtcacgacgatgtcaaacgtcggccagtagattctaataagacacgctataggaccaactgggtaccgggccacgcctctagccttctagccatagatcagctagcgtttcttttgcaacttgaatcgtattttatactgaaaagaattcaggctagagttggtagtaggatgcaacagcttctgggaagggggagctcagtctgaacctggggaatcaggggagtagtggactctcaccttgtccactgatgttaggtatgactgttactcctctcccttaagcacagtaagaacttggtcagtaacaatgcctgtgtaagtgctcatggctgctgtgcgtctgctgtacaag

SEQ ID NO: 505720 - DNA, 143 bp, Homo sapiens
cgctcgtgtgctcacacgataaacccgaggagcacccaacgcgccacccaaagagccacgcgatgagccaccccatgagccacgcgacgagccacccgaagagccgcgcaaatgtagccacccgcacgcgccacccgagtgag

SEQ ID NO: 505721 - DNA, 103 bp, Homo sapiens
  misc_feature (1)..(1): n is a, c, g, or t
ntcggtaatttactaaacacaagttgttatagccagaggaacaaagatgatataaaatattgtgctctgacaaggaatacatgtatttcattctcgtatggtg

SEQ ID NO: 505722 - DNA, 105 bp, Homo sapiens
agataatagggatggcgagtgatgtcggcgcatgggggggaatcgatatatatgaatcgcggcgctgaggtcgacatatgggaagctcccaagcgtgatgcatag

SEQ ID NO: 505723 - DNA, 229 bp, Homo sapiens
cttctccatgttcattgaattgaaatgcctgctttgaatgtggaatattatgattatgaaagggattatcgtttgttctgaaggtcaactatttttgtctttagatggctttgtaacactttttctccagataactcggaacttttgaaaaatgtcatgagattttcattaaaaggacccttttcctatgtttattgtatacagaaattatgcaataaaatttctttat

SEQ ID NO: 505724 - DNA, 214 bp, Homo sapiens
ctctataggatcccctcaaagttatgatcaattgagtatagtagtacgctttgactggatgaagtcttagcatgctactgctcggaggattgggattctgctccgaggatcgccccaaccgcaaatttttaaatgcagcgtttaggtagatttagcgaccatgtggagtttgcttagcgtatctgttctgcagttacataaacttaagatgctc

SEQ ID NO: 505725 - DNA, 400 bp, Homo sapiens
cgagatcacaccactgcactccagcctggtgacagagcgagactccatctccaaaaaaaaaaaaggaaccataagaatactatcataatgttgttacccttgactgaagatccaaacagattggtgaaatgaggctctaggaagattatctgcagtatatgcagccagatcgttctctatactttaacatggggcctccctgtgcaaggtatcttgtgagggtagcctgagtaaaatgtctaaatcattaaaatgtctggtcatttaacatgaagcaatttatcaacactttggtcactaacacttaacaagtgcagcataattatgctttcaaagccttcacactcagccattaatactttggtcccagtcatagaaacttattaatattcctcctcca

SEQ ID NO: 505726 - DNA, 113 bp, Homo sapiens
accacataggtcacgtcatgaaaccactttttaaatatgaattaaatgtgagcttcccctatatataatttctctgattggctgcgcatggtggctcatgcctgtaatctcag

SEQ ID NO: 505727 - DNA, 1478 bp, Homo sapiens
  misc_feature (572)..(572): n is a, c, g, or t
  misc_feature (576)..(576): n is a, c, g, or t
catagcctgacacagaagacacatactcgtggcacacaccgccacaaagccatgcttgcacagagcaaaggtgtcataagcatctctgtgcctggactgcacctgcatgacctcccagggtccccacctcatcagagattaaggagagctttgcttggagacaccacccctgaggggtgtctccaagggggagtagagccagtcacaagcaccacatacaggcacacagcctgaggtctagggatgcaattgggatgactggataccaccaagttcagctccttattgaacagatgggcgcctgaggcccagggagcagtggtggctggccttatcacccagcagggcaggggatactctggggccagagcctggctctgggcagactctgtttcctggccctgccctcccctgggccaatcctctgggccaggctgcctctgaaggcccctggctgaaccgatccagcagagctccaggcagctcccttctcaagctagagctgagctgcagtggccacgggagccggagccaggatgcggtgggcagggcctaggcctgggcgggaggancatncctgcaccatctcctccccaagcatgtgaggagccagcccgccctgcccgcctgcccgctgactcaggcctccaggagccaagcctgctcagctcccgcacgcaaccgtaagctgcttgcccgactagttcggctctggttcccctctccactggctggggcaggagaagacggtgagccctggtaggaagaccatggggacacaaatcaaagcctcacagcccccgacatagctcagaagggctgattgtgaaacccagctctgttcaacatagttgaacaccaaaacttttattttcttctggtataggattaggttttggtacggtcaaaccccaagtgcatgtgcagtctggtgtaacgaagtcagtgtcgcatagcctgtgggctggatctgcctcagcaagccccagtaggcagcactttattccctttcgcaacaaagagactgagactggggccagagggacagatgggacctgctagagttgcacaacaggggaaatctctgggcgcgggctgacactcgaaaccaggctccctgcatcaactccttagaagtcacactgaagaacctcgtttagggccaaggaagacggggacagcagatctccccgtccagatgagcgacgggacaaggcgcgggatgaaccccaacgggggcgggaactgctcaacggcggcaaacagggcacggggaggagaacccgccagagccctggcggggcatggcagggtagcgaagcagggaacatcgatgcagaaaacgcgtgagccaacctgagggacgaccgcgctagaagcggaccagcggaggaggacacaacgtcgaaagaacaatagcggcaccgaacatcgggtataacaccccaatacgcaaaagggaagagggagacagcgcc

SEQ ID NO: 505728 - DNA, 145 bp, Homo sapiens
atgctcggtaacctgtggttcaggtgagaggacggtgaatccaggacgagcatggaggacgagaagactgcctagtgccagcgtactaaaactgtggacactgaaggcaatgttctcgtcctccatgctctccctggaaccacag

SEQ ID NO: 505729 - DNA, 1055 bp, Homo sapiens
  misc_feature (311)..(311): n is a, c, g, or t
  misc_feature (436)..(436): n is a, c, g, or t
  misc_feature (657)..(657): n is a, c, g, or t
  misc_feature (762)..(762): n is a, c, g, or t
  misc_feature (959)..(959): n is a, c, g, or t
  misc_feature (1015)..(1015): n is a, c, g, or t
gaagcagatggcggatgacgccgagtcgaacgcgcgaggcccgaggggccctgggtggccctggtgctgatgatcgacaccgcatctgaggttccgcaagaccgcttatcatccagtgttcatccaggcgagccggcgatcatcgatgcgtgagaaggcgacctgatgcgcatgcacgcgaaacatctgcgagagagcgaaagcgcggagcgcataaagcgacgtggcatgcccggtcgagcgaggtctgcgcgtctgatatggtcaaagagcacatcgtagagatcgaaagtaacccaatcgtgggcacnatcgctattcatcgtatgctgcccttggccccacattgcacacgtgaatcaagaactatgcgatatggaatcttcgtatcacatagcgtggcgctcgtactttccatcagataggacatagcagngtcattgcgcaggggctatattattgcaccacagtcggcgagcaccatgtcaagaaaccaactggtagacgcagagacacgaagtctggcaaacctacgcagttgcaaaaagtgccaaatttgtatgcgtattccgtagaggaaactaacagaggtggacacagacggtcaggattcatggacgctgttttagacgttgacgtctcgaacgtgcaggtgtntggtccgagccgatcatctcacgttgtgggggcacaagtcaagtctcttggtccaaatggcttctcacaatccggtcccctctcgtgcttggcaggtaatgtgcntacttgtgcgcggggatatcgacacgcatccggggtcaatgtcccccgaccaacattgtgtcccgttggccgaagtgtggacgagtgccggtctgcttggcggtcatgatgcatgagttaccagcgcgtcaatcctccgttgcaacccatggggtcaactgtggcctatcagatcttccggtgaactggtggccgtnaaagaaatgctgggtcaatgaatgggctgtgtagtcggattggacgtgcgtaacancatctagtccaggaggctttggactttgacaaaccttggg

SEQ ID NO: 505730 - DNA, 143 bp, Homo sapiens
gttgtctatccccttccaccctcatcttattataatctcaagacactttcctgatgcgtcatctcactccccttccatcctcatgctcgcacctcagcaactataatatcaatacacctgccagagcgtctgctgaattccgc

SEQ ID NO: 505731 - DNA, 151 bp, Homo sapiens
tatctgacttcttttgtattttattttattttaatttttttattgccatagcctttgggggaaacaggtggtatttggttacatgagtaagttctttagtggtgatttgtgagattttggtgcacccgtcacccgagcagcatatactgca

SEQ ID NO: 505732 - DNA, 405 bp, Homo sapiens
tgtttatcgatgccacaaaaatacacctgacactgatgaaagaaatcatagatggcacaaacaaatggaaacaaatcccacgctcatggataagtagaatcaatactgtgaaaatgaccatactgccaaaagcaatctacaaattcagtgcaatccttatcaaaataccaccataattcttcacagaattaaaaaaaattctaaaattcatgtggaacaaaaaagagcctgcgtagccaaaacaaggctaagcaaaaagaacaaatctggaggcataacattacctgatttcaaactacactataaggccatagtcaccaaaacagcatgttactggtttaaaaataggcacatagaccaatggaacagaatagagaacccagaaataaacccaaatacttacag

SEQ ID NO: 505733 - DNA, 227 bp, Homo sapiens
atccatagaaaatctgatctcttccctggtggctctggctcttccctgaagtcatcaggcacctgccatgcattgtggttctatccccagagcatctttccctgtcccccaactacctacccaaaatgcctccagaatcaacctgcaggaccacccatggctcctacccccatggaccacccatgtgctcctccccttgccacaacctgggataccgacgctcgaat

SEQ ID NO: 505734 - DNA, 1417 bp, Homo sapiens
ctcgtggggcgcccggtcgtgttgggttcttccgctgtgcgtttggcgtccctcctgttttattggtgtgttgggccgcgcgccttctatttgtgagttccgccggctgtgtgtgtgtgtggtcgcattcataggtctatcgcgcgtctgtgttggggttcattcgtgcttctcttgcggtgggtggtttctcctccgcgccgaggagtgattgtgtgtgttgcggcgccgatcgcggcgatgttgctgggttgcgtctccctggtcggtgatcgcgtcgggtctgtttttgttttctttatttcagtaatcggagtgttgatcatcacagacaagaaggtagatggttgttgtaatgtgagtaggtgttatgtgtataatttttgttctatttagtgattagggtaggtgcgcggcggcggcggagaggaatagtaagagagaggaccgcccgtgcttgttggtagtgcggatgatatgaattatagtatttctgcgtcgcgcggcggcagcatgataagcttgatatggtagtatattgtggtgtattgtgtattggggtagcgcgcctctccgccgtctcttcttcggctttttgtttgttgtgatgtttgctcgtttgttgtattctatgtattcggcttcgtcgtggccgaggacggtgtggtggttgacacttagatgtatgttgttactgcatcgcctgctacatcttgcttgttctgctgctcttccacggcaactactcgtcctgtagtagtgtggcgcggcgccccgccccgctggtggtgggtttggtggtagctctcctctcgctcggcggtggggtcacgtcgcgccgcgttcgtggcggcgcgcgcgcgtgatttatatatatctctctcgcctctcgtgccacctcgcatatatatctgcccccccctcttgtttgttatttgttttgctcatctcccgcgcgcgtgcgcatctcgtgtgcgctcgtatctcttcttatcggtggtgtgcgcacactacgctgtgtgagtgtgtttctctctctctcgtgtatatacacccccccctctcttgtgtatagataataaacactcaccactcccaacagaatatagtttcgttcttctccttgtgagagttgtgctcccccccctttgtggtgtgttatacacacacaaaaacctttctctccgcgcgtgtgttttcacaccaccccccctttttctctctctccccctccccgcgcgcgggggagaacaccgctgctgcccttattttttaaaattttggggcgcgcccccccctttttttctcccccttttttgaggagagtttctctctctctctattttttttaaaagagggcgcgcgtgttttttcttctctttgcccgcccccctcctctctcccttttttgccccca

SEQ ID NO: 505735 - DNA, 198 bp, Homo sapiens
  misc_feature (6)..(6): n is a, c, g, or t
ggcgangaaatcactgaaactcctcctgctcagaatgaagattatcaatatatggtcaaataaatatacgcaaatttttccctaaaaaaaaaaaaaatccctcagaaaagaatgtttttgagttctatcatgttggccaggctggtcttgaactcctgacctccagtgatctgcccaccttggccttgcaatatgcaa

SEQ ID NO: 505736 - DNA, 780 bp, Homo sapiens
  misc_feature (6)..(6): n is a, c, g, or t
  misc_feature (63)..(63): n is a, c, g, or t
  misc_feature (76)..(76): n is a, c, g, or t
  misc_feature (118)..(120): n is a, c, g, or t
  misc_feature (122)..(122): n is a, c, g, or t
  misc_feature (158)..(158): n is a, c, g, or t
  misc_feature (164)..(164): n is a, c, g, or t
  misc_feature (174)..(174): n is a, c, g, or t
  misc_feature (188)..(188): n is a, c, g, or t
  misc_feature (195)..(195): n is a, c, g, or t
  misc_feature (201)..(201): n is a, c, g, or t
  misc_feature (219)..(219): n is a, c, g, or t
  misc_feature (264)..(265): n is a, c, g, or t
  misc_feature (281)..(281): n is a, c, g, or t
  misc_feature (308)..(308): n is a, c, g, or t
  misc_feature (347)..(347): n is a, c, g, or t
  misc_feature (366)..(366): n is a, c, g, or t
  misc_feature (549)..(549): n is a, c, g, or t
  misc_feature (602)..(602): n is a, c, g, or t
  misc_feature (607)..(607): n is a, c, g, or t
  misc_feature (610)..(610): n is a, c, g, or t
  misc_feature (677)..(677): n is a, c, g, or t
  misc_feature (692)..(692): n is a, c, g, or t
  misc_feature (704)..(705): n is a, c, g, or t
  misc_feature (742)..(742): n is a, c, g, or t
tatgtnactttttttttttaaccaagaataatctaagttatggcagcatgttcaatgaaaggnaagtccggcccantttttctatatctgtttctcagataatccggcccatcatccnnncnttacattacgataccataatggccctcagagcgcangtgccnttaggtgggnatggggcgtcatangtgttcntttttnggggagggcccccctttngtggtataggcatacccctaataatcttactctactgtgcaaatnncttttcacccacaagngcggcctcaagtaactttcattttggnaagctatcaaggcatgagacagagtagcaaaatgccacnctggactttgcatcttggngtttcaattttgctttaggatttagaccccagtttataattaaaaccaaatcattcccacattattatacttatgtaggaaagccttgctgtgtccactgttaacacaaagatagaaaatgtcaaatagtttaagcaagtatttggcagaccacagacatgaaacagtgccgtcggaaacggnaacactttagtgttttagaggtgaagagattgatgggtgtcattcaaatttcncatcnccntcttctacatctttcagattgagtacttccaaagaacctttgcctttagtttccttttttattagcncatcaatttctcggnagcagcccgggnnaatcagacatacgatttctaactgttggccataatcntcactttctatgaccttgatcagtggcttgagcctttc

SEQ ID NO: 505737 - DNA, 573 bp, Homo sapiens
  misc_feature (8)..(8): n is a, c, g, or t
  misc_feature (27)..(27): n is a, c, g, or t
tgggcccntaaccaagcccgacccacntgaatggggaagaattaaccggtgacaagtgtgaaaaaaccatttatggtctttaataactgtttttgctaggttctgtttattcctttcaaagtatgttatttaaaatgttctgcaattaaaaaaaaaagaaacaggatggtctttttaaaaacaggtttgagataaggaaaaaattgattctatcagcttggcaaaaacacctcctgcagcacaaaaactccacgaacgtctgtgtgtgccttgactgggaacgaggagagggagtcagagggcagcgaggccgggcagcgagggagcagagcccttctgttggtgtggggtggaggcagccttttatcctgcgctccggtgctgtggctgggaaggcaaggtactcatgccaccctccaaggtgaagagaagacccacctgcttttctctgccatcaccagatcctcccaggcactgtccccacagtcggtccagccaggcacactcggcctgatctagtgattcaagctgtctttccaggacttggcctctgcaggtaagtccttagtcttc

SEQ ID NO: 505738 - DNA, 785 bp, Homo sapiens
  misc_feature (23)..(23): n is a, c, g, or t
  misc_feature (66)..(66): n is a, c, g, or t
  misc_feature (71)..(71): n is a, c, g, or t
  misc_feature (105)..(105): n is a, c, g, or t
  misc_feature (149)..(149): n is a, c, g, or t
  misc_feature (152)..(152): n is a, c, g, or t
  misc_feature (154)..(154): n is a, c, g, or t
  misc_feature (169)..(169): n is a, c, g, or t
  misc_feature (171)..(171): n is a, c, g, or t
  misc_feature (180)..(180): n is a, c, g, or t
  misc_feature (185)..(185): n is a, c, g, or t
  misc_feature (192)..(192): n is a, c, g, or t
  misc_feature (196)..(197): n is a, c, g, or t
  misc_feature (199)..(200): n is a, c, g, or t
  misc_feature (205)..(206): n is a, c, g, or t
  misc_feature (209)..(209): n is a, c, g, or t
  misc_feature (211)..(211): n is a, c, g, or t
  misc_feature (229)..(229): n is a, c, g, or t
  misc_feature (231)..(231): n is a, c, g, or t
  misc_feature (248)..(248): n is a, c, g, or t
  misc_feature (255)..(255): n is a, c, g, or t
  misc_feature (258)..(258): n is a, c, g, or t
  misc_feature (270)..(270): n is a, c, g, or t
  misc_feature (275)..(275): n is a, c, g, or t
  misc_feature (277)..(277): n is a, c, g, or t
  misc_feature (280)..(280): n is a, c, g, or t
  misc_feature (283)..(285): n is a, c, g, or t
  misc_feature (287)..(287): n is a, c, g, or t
  misc_feature (289)..(293): n is a, c, g, or t
  misc_feature (295)..(296): n is a, c, g, or t
  misc_feature (305)..(305): n is a, c, g, or t
  misc_feature (308)..(310): n is a, c, g, or t
  misc_feature (315)..(315): n is a, c, g, or t
  misc_feature (317)..(317): n is a, c, g, or t
  misc_feature (319)..(319): n is a, c, g, or t
  misc_feature (321)..(321): n is a, c, g, or t
  misc_feature (355)..(355): n is a, c, g, or t
  misc_feature (357)..(357): n is a, c, g, or t
  misc_feature (360)..(360): n is a, c, g, or t
  misc_feature (362)..(364): n is a, c, g, or t
  misc_feature (379)..(379): n is a, c, g, or t
  misc_feature (384)..(384): n is a, c, g, or t
  misc_feature (388)..(388): n is a, c, g, or t
  misc_feature (399)..(399): n is a, c, g, or t
  misc_feature (408)..(408): n is a, c, g, or t
  misc_feature (412)..(412): n is a, c, g, or t
  misc_feature (422)..(422): n is a, c, g, or t
  misc_feature (425)..(425): n is a, c, g, or t
  misc_feature (428)..(428): n is a, c, g, or t
  misc_feature (447)..(447): n is a, c, g, or t
  misc_feature (461)..(461): n is a, c, g, or t
  misc_feature (483)..(483): n is a, c, g, or t
  misc_feature (488)..(488): n is a, c, g, or t
  misc_feature (493)..(493): n is a, c, g, or t
  misc_feature (498)..(498): n is a, c, g, or t
  misc_feature (500)..(500): n is a, c, g, or t
  misc_feature (614)..(614): n is a, c, g, or t
  misc_feature (752)..(752): n is a, c, g, or t
aaataatgcaggagaggattagntttaatagtggtgtggtggtaggattagaggtgtgtaaaaagngaaangagggagagtggtggattagtgaataaaaaaagntgtggagattgttaaaaaaaggagagtatatcaagggggttganaantnaaggattttggattnanaaaaatggnttggnaggttgngggnngnntgtgnntgngnagtgatgtgggggagggngnggggattagatgttagnatagggntgnggaagaagtggnagggntnagngannnantnnnnngnntaatatagnagnnnaaaangngngngagagagttgaagaaaaaaagattaggatgtgangnatntnnngaaataagaaaaggnaaagnaagngaataaatttnagggatagnaagngtgggtttgnggnagnatgggaaaaggagttttgntgaaatgagagggnaaaaaggtgtggatgagaaagnaagtngtganaaatngngtgtaaaggtaagtgtggagaatattaagtgtaacatattaacaagagccttccaagataatatacagtagacaagaatgttaatcctacaatgctgccttcttgtacattggnagcacatacttctcctataatagacatccaagatccattctcaaagtctttagcattctattacgaaaagcacagccatgctaacttcagtacacaaaccataatcccacacctacaaaacaaaaatagattagtggnagtttattgccttatacaaatttaaccaacatg

SEQ ID NO: 505739 - DNA, 766 bp, Homo sapiens
tgcagtggctcacacctgtaatcacagcactttgggaggtcgaggcgggtggatcatgaggtcaagagatcgagaccatcctggccaaccatggttgaaacttctgtctctactaaaattaacaaaaatttagccttgggcgtggttggcgcacaccctgttagttcccagctaacctcaggagacctgaggcagggagaatttgctttgaaacctgggacggtgcgaggtttgcagtgagcccgaggatttgcaccacgcggcgactccaagcaggagcaagactctgcctcaaaaagaagaagacaaagaaaagaacacaaaatccctgtgtgtggcgcgcggcctttggggcccctctggagagaaaaacgctgttctatagacacacacattgcggttgtgtggcgcgccgcgggggcccccaagagagagcgtatacggggttagaccaatgtggctccaatacgcgtggggtccccctatagggagaacacccggggggtccctgtggaccataaacggggcgtgggggtatctcttcacccccagattaagaaaagcgcgccaccggggggggtacaaaaccgggagagcggcgtttctgtggagacaaagatatcttccagaaagtgagcgagattttacgatgagagggtgctcaatataggcgggggagactctctactttcacacgcgaggggagtctcacaagaggcgaaagcctccgcgaattattcacatttttaggccccccggggcctgt

SEQ ID NO: 505740 - DNA, 1295 bp, Homo sapiens
gtctctacaaaaaaaaaaaaaaaaaaagaacattccagaatatagaaatctcaggtacagagtaccccaggtaaaaaaagctggcccctttgtgggatttaagtgggtcagaagtgcgtgagtggagtttaaggtagttaagcaagcaagaaaagacagttcttagatatagtggtgatgaggagattgagccaggtacgtgcaggggcatggtaaggcccgtgcgtgaaagaaaatttgcattatgtgggtttgtgggagtgggtattttttattattttgtggagaaaaggaagttcttggggtaggcccgcgggcctgtggaaggtgaaagaggggggggagaactcgtggaggaacacaccggggacaacacgcctcgcggcgctctccacaaagagtcacacgcgcacatattcctcacctccctcagagagcccccacaaagaaagagagggtgagagaggcgcgccgcggtgcacacacacaaacccagagagacatagagtatctgcggagcgacaattttgacaagagaaagaaaaagagggggggggtaccaccccaaaatacccccgaggggaggggggcccgctcgagagctctttatgcgtgagcaccccgcggagaaaccccacaccacacaccccgggggggcaccctgcccacaaagaggggcggcgagggggaaatatacagcgcgggggcgatatagagcccccaacccacaggggcgcgcgcgggggagaaaaagagacataattggggagaacaaatttcaaaaattatccccaacagacgaggggagaccaacagagggggcacaaccccccatatgtggggaccccgcgtgggcccgtgtaaacagccgcccagggggcccacaacaagtggacacgctctcccccaacgcgtacaccacggcggcaacacaacacgagctcccacaaaagacgcgtcacacaacaaaatcacgtgccgcgccggacacaaccacaaacagggtactatctgcaacagatgtgacaacacaagattatgtaagaagtgggggagagataaagagagggcgcgtcccaaaccaccggggggggggacaacaacccgagagagggcacaaccacaaatctctcgctccaatccaacaacgcccactagttgtgatagaaaacacccgcccgcgtcttcgaagagaaacacaacatcccgatggagagacacacccatatgggggggcgccacccacgcacacaacactccacaaaaaaccaacaggggcgcgccggggaaacaat

SEQ ID NO: 505741 - DNA, 299 bp, Homo sapiens
gcttcagtgatcttcccatttgccccccagtttttttttctttaaaaaaacggtttttccctctctatgggcctgagtgatgaaaccatccctgtttagttactaaatgaacaaatccccagaatgggtaaaaagtagaatttgaactatatcttgccaaatattattccaacttgaatgtaaatataaccagtatgtatattttttaaaaaaatttgcctgccatgcccttataagtgccctttaatgtcatagcatgtaaagggttttttttgtaataaaaattatagaatttccca

SEQ ID NO: 505742 - DNA, 159 bp, Homo sapiens
atgtctagtcgtacgggctgcattaccaaaatctaagctgagtgactgtaagcacagatttaatttccacattcctaggtgggaggagtcagagatcaggggccagcatgccagcttctggttcaagcctccttccaggttgcaggtggctgcctcccc

SEQ ID NO: 505743 - DNA, 105 bp, Homo sapiens
  misc_feature (5)..(5): n is a, c, g, or t
  misc_feature (24)..(24): n is a, c, g, or t
  misc_feature (73)..(73): n is a, c, g, or t
  misc_feature (87)..(87): n is a, c, g, or t
  misc_feature (89)..(90): n is a, c, g, or t
  misc_feature (97)..(98): n is a, c, g, or t
gctcncgcggagaaggtcgggttntagaagctggggtggccggcagctcgctcatcggtgttcgtgggctttntcggtccgtgcctngnntctcccnngaaaggg

SEQ ID NO: 505744 - DNA, 136 bp, Homo sapiens
  misc_feature (83)..(83): n is a, c, g, or t
atccctcgaaagaggagtggtctaggagcagctgggcggatagcaccgggcattattttggaatggagtgaggtcttggcacncctgatgcagtaccagcgatggacttggtctatagttagagcaattgtggcta

SEQ ID NO: 505745 - DNA, 476 bp, Homo sapiens
cggcaagagacatggactgagactttgatgagaaagtattcagaccctcagaatgatcaacccagcacgtggtggacttgctatgtgaagagacagtacatgaacaagagtacttatcaggacctggacagtgaagggagcccgggcagccaccgtctccagagaccctgggcataattatccagcaagaaatgtccacaatcttttgccttcatttctgtcaccagttttatcacagcaagcagcagcaagcagcatgtctttacttgaataactcttgctcaagcaatttgggtgggagacaagacaagtgggttatcaagggtgcattagcaattttctgcagcattaaagctggcgcttcactaagcaatcagtcatacataaagcaatttctaacattccatgtcagaaaaaacttaattgccagtctttgacattcacttacaatttgtcatggagctgttgtaaactgg

SEQ ID NO: 505746 - DNA, 171 bp, Homo sapiens
cttctaaatcagtgcaaactttctatgtggtccctcttgctgggagaggagatctgatagaaatactgactttctgaagatcggaatgtggtcctgacagggcgaggaccattcattctttcatacagtgagcatttgtctgctctggccctgtgccttgaactgctccat

SEQ ID NO: 505747 - DNA, 1270 bp, Homo sapiens
  misc_feature (545)..(545): n is a, c, g, or t
ccaaacggtatccagctttattaaagatacttcccataaacaatcagggttattccaggcaggaacagtgggcagacaactcgtttaacagttatacaacaacttttcaaacctccctttcttcaagtggactaccaaaaactcagaaaagccacttataaaacccaagtgaagttcttcatcgtgagtgctcgtgaacgagggaaagttttaaaggtgagggttgtgcacattttcacatttatagcattgctgtgctttaacaactttttcacaagccgacccgtgactttctcaggaagtgtgaaagtgaaccagtggcagaatttactctgaaagatccacaactctaaaagtgtggaaccactgtgcctcttttggacagggtgccactcttcaggtggccttccactgggacaaagttcccagaatggccgtgacacacgtggttacacccaatgtgactaggggtcccgggttctctcaacagaatgttcgtgggccttagagggcagcttaagttcatatggcgtgaaaagcgtggnacagggggacgaaggaggaccttaaaacacaaatttgggtttttcatttacccacagggcctttgggtgcccagggggggcccaggggtggttgctccaaatgtcggggaaaatcccttcccttccgtgggggacgcccaagagggaaagttcttctcaaaaactcttaagaccggggcaaccgggtgttttcctcccaaatcaaatcccaggtttgggacaaacatttccatatcagcgagaaatttttgccccctttccccccaaaaaaaaaactaattgacagtgtctcgggggtcgctaaccacaattagtttttcacagacaccaacatcatccggctaacccaaacttccggcgttttcataacactgtgtaacgaaatctcgttgtccccccttgtcctgcccccaaaaattccaccgccttctcataacttcgcactctctccgtggggctctcaccaactcccgatttggtcgcccgcggggggggggctctcccttcgtgggggggtatccctcctgtgggaagcaggtttcctgttcccggggggagttctccctcgtgggaggcgcttgagtggcgccggctgacgcggcattatcaacacagctgttctcgtggaccgtgttggctcaccaccctatcgtggggcgagggaacacttgattatggtcgtatcgcatgttctctttcttccgtgatcctgttcctggttgcgc

SEQ ID NO: 505748 - DNA, 1041 bp, Homo sapiens
cccggggtgaattcggacggagggcgtacaagggggatgaaagtcacgggagcatgttcactgagagcgtctacgtcctggccaacgagccatccgtggcctggacccggctgcatgagcatgtgcgtcgctccctccccgaggctggtcccagcacaaggcagacatgcagcgttgggaggagcagagccagggagccatctacactgtggagtacgcctgcagcgaccgtgaagaacctggtggacagcatcgtctacttccgcagcgtggtagggtctgctcaatacaggccatcagcgatccgggaccatatgtaatgcccacgtgcccaggccacaggtagcctcctgggaccgctccgccccccactgccactcccagctgcaaggatccgtctctcagctgcgctgggaaccgctgcttctcgcttattagagaattgtctctttcctttcgtcctggtgtctggtgacctcctcttgtcctgtggcatctatacacctgacgttcatgtcacttaagttaccgtaggtcctgcatctctgctgtgtgcctggtccctggggctgggcactggggacataggcagtgaccgagacagacaggctctacaaggagacatacgatcaaccaggtaaacatggcagacaagagcatgtcagatgcgctgtgaagaacactgcggggcctcctagcggtggcatgagttacatgcgacagaggacgatccagggccaagactggagttccatgtggggcagtggtgagggctagacgctctgtgggctggatccctgggagtgtcgagaagcaccgagagcttctgtggctgagcggccagctgggaaatgggccggaaatgggggggcactcctgtccgacccaaccaaggaggttagccagactggttaaagaaaccaagctgacttgcgaatttagtacccttgatggcttataaacgtttagacaacaacaaacggttgtggaaaatagggtctatccattagaacgctagtcacacaataagctctcaaacaa

SEQ ID NO: 505749 - DNA, 172 bp, Homo sapiens
gagggcccatgttgcacggatcggtgaggagtataggagcagggcgtctttgtgcagagtgtcctgccatacttcgtagctacaaaacgggctaaaatccggaagccaactgtggataagccctctccggagacgttgtgaagtctgcaattaaaacagtcggcctgcaatc

SEQ ID NO: 505750 - DNA, 1009 bp, Homo sapiens
  misc_feature (775)..(775): n is a, c, g, or t
tcctctgtgatgtgctgcacacgatggtctgctgtgacacatcgctgcaactccacctgtgacgttgcctgcttgatgtgtgatggtagtgacccaaagtcctttgcacatgtgccagcgtctactatctgcattacttggacgggctagaccccctgcctcttcgtttcctccaaggacgacctgtccgaaggtgtcgcggtgtctggccccatcaacggacgagtgtggtccgcaggtcgcacagggatacaaccgtcgtacctcgttgtccgttatcatcccatgatgactaggtccacagtcgccggagcccgacgactaacccatcacttcctattcacccagtctcggcaacatggacgtcttcgcacattgggtccaccgccagtagttctgaatccctcttgccttctgggttctcgagtgagtgcatgcatgggggggtttcgtcatgggctctggacagttgagctcggaagtccacatctaagtcgttcctccaccttcttaactaagtggtaccattgggttgagaaaagtcatgtgaagggcccggcgtacccaaagtcgccgcgtcccctgatctagtgggttgtagactcggctgctgaggtgctctgcgacagggtagcataagattggtcgtgcaaagccaggcttgcattccggtaaacgcctttgcggcaaggattattagtctctgaatggcatcgtcgatctgtatcgcgtggctgtatgctgggcatgccaccagccctggcttctgctggancctcagggtgggccgtggccttgtggctgaggccggagctcgcgagagttgcgggcaccgctgtcagggattggccacccctgggctcatgtgtgtgggccgggagcactggtgtggacactgtatcccagactaaatcttagggtctcgccctttctggcctggtggccgggttttgcggaggtggccggggtttggccaccaggtgggggcccccgtggctcttttaacccg

SEQ ID NO: 505751 - DNA, 208 bp, Homo sapiens
acgatcctcacacactccccatttgttgtcccaggaagtataacaccccctttaagactctgttccttactatcacagtggggatgagagtgaaggaaaagaaaagaaaatttgttaagttaagagaaaaacaaaactaagaagactctgtgcctttacaacatcctcgtgcaaagccattactgagacatctaccactatgcttagc

SEQ ID NO: 505752 - DNA, 320 bp, Homo sapiens
tattcatgctgtatgacttacacctggtgaatcagatgtacaaataagaaaggtaatagttggtcaggccaatgttatcaatcgaaagtagttagaaaaatgctcgtcctattctaccaaatttttaatatctttcttcccttatcttgctacacacttgatcacagagttactccatcgtgctttgacacttagaaattatgtataggatattttaaatcattgagttatgtggaggataaaaaggtaaggtgtgtattcttttgtttcagggaaaatccgtgtctttatcttgtattcccacatggtagaaccagatt

SEQ ID NO: 505753 - DNA, 398 bp, Homo sapiens
catttttgagcagtactgactagtcatagaacatccttcttaatatttcttcatggttgaatttagattatgccattttttgcaagaataccataaaggtgatgcttgtgcccttctcagtgcatcatatcaggaggcacacgatactgatttgttgcattactaatggtattaacttcaatcatttggttaaggtgctgtcttccatgtttctcaatattttcccctttgtaattaacagtatcttgtgggaaaagcctttgaggttatgtaaatagcccatttctcatcaaactttttctcacaaactttagcatccattgatgattcttgcctgcaacaattattactgtggtgcttgccaaatgttgactttctatttctaccatttccattat

SEQ ID NO: 505754 - DNA, 341 bp, Homo sapiens
  misc_feature (43)..(43): n is a, c, g, or t
  misc_feature (50)..(50): n is a, c, g, or t
tcctgagttcaggcgattcccctgcctcagcctcccgagtagnggggatnacaggcgtgcaccacaccactcagctagtttttgtatttttagtagagagagggtttcatcatgttggccaggctggtcttgaactcctgacctctggtgatctgcccgtctctgcctcccaaattgctgggattacaggcgtgaggcaccacacccagcctggttttgtatcttacataacatttttttctgagcattaaatattcttcaaagatatcttctaaaaaacattttattgacatcaaatatgctgacagaaaagtgaataaaatataagcgtactgtgtgaa

SEQ ID NO: 505755 - DNA, 464 bp, Homo sapiens
aaggttatggctcatagttcaccccaaagcattttagatgatgttgccatggtccttgatgaagaagcagaagtttttatagtcaaaatgtggagattattgatatatgaaccagaagccaagaaaattggtcttgtgaagtaaaactttttatatttagagttccatttcagattttttttttgccccccttttaaggactttgaatttttctttgtctttgaaaccattgtgagatctgtaattttttttttttgtaaaaaatgtgaattttttggtcctctaatttgttgttgccctgtgtactcccttggttgtaaagtcatttgaatccttggttttttttatactccccaggtacaaatttttggttttttttataacccccagctcctgtacccaccctttttgatataatcttgttttgctgattttttttttttaaatattaaaacgcctcccca

SEQ ID NO: 505756 - DNA, 139 bp, Homo sapiens
tcacagaagagataaggggcttccagcagaagaagcacctctcacgtttctcggaatgtatgacttcttgcaaatgatcatcccaggtaaggaagaacagataaggaatgcttggtagcaagtgactcagagccatagg

SEQ ID NO: 505757 - DNA, 733 bp, Homo sapiens
gggtgcagactcagtcaaaggaggatgtcgacaatgaccgagacagaaccctcgactgtggctgatggacaggccacttccatgatgatctggactctgaccactcagtacatcatccacaattacagacacaggcgtcatcccaggacctgttatccctactgcagtgaggagaggccgccgatcgtcaagaggatagggagacaggagattcctgcatggacgggccccggagggactgggcatgttatgccacagtcgacagaggatatcccagacgtgcccccgatgacactggtcggagaatgtgattggggcggactgtgtccttaaccaatacgtcatagcagctcgaatgacgaattcatcacagatccacagacaatgatggatcagacaacagaagcagacgctgccctttaaggagggccaatatcctacaggactttgaaggaagagatgctcgtatgccacaagtaaaggagtaaacatctatggtaccatataacctattggaaaaacaaataacaggatcttctaaacaagacgcagagtcaaagaggctaggattatagcaaaaggagcccaggaggaacattccaacggaacaacataacagagtacatgtacagaaggattctgcagcaggcgcggattatacagtttgcacaacttcagttcctggacactaaagagctcttcagaagcggacaacttgatgtccgtgaactga

SEQ ID NO: 505758 - DNA, 654 bp, Homo sapiens
ctagagtaacactggtcatccagtgactgcgtagctaggattacaggtgtgcactgccacacccagctaagttttgtatttttagtagagacggggtttcaacatgttggccaggttggtcttgaactcctggcctcaaatgatccgccagccttggcctcccaaagtgctgggattataggcgtgaaccactgtgcctggccaaggcattcagttttaagagagaaacagggcataaaagtttggaaaatttgcagcctgacaatgttaaagaaaagaaaattccattttttgaggagaaattcaagctggctgcagaaatttgcataagtaacgaggagccaaatgttaatccccaagacaatagggaaaatgtatctggggcatgtcagagacctttgcggtagcccctcccatcacaggcctgaagatttaggaggaaaaaattgttccatgggcagggcccagggtcccagtgctgtgtacagcctagggacttggtgtcctgtgtctcagccattccagccatggctaaaaggggcaacatagagctcgggctgtggttcgaggatggctggcagctcctgtggtgtgatcaagcgtgagtgccgaagccagatgaggttggaaacccggccgattcgagatgttgga

SEQ ID NO: 505759 - DNA, 850 bp, Homo sapiens
  misc_feature (99)..(99): n is a, c, g, or t
  misc_feature (103)..(103): n is a, c, g, or t
  misc_feature (117)..(117): n is a, c, g, or t
  misc_feature (139)..(139): n is a, c, g, or t
  misc_feature (141)..(141): n is a, c, g, or t
  misc_feature (143)..(144): n is a, c, g, or t
  misc_feature (162)..(162): n is a, c, g, or t
  misc_feature (174)..(174): n is a, c, g, or t
  misc_feature (181)..(181): n is a, c, g, or t
  misc_feature (189)..(189): n is a, c, g, or t
  misc_feature (215)..(215): n is a, c, g, or t
  misc_feature (228)..(228): n is a, c, g, or t
  misc_feature (234)..(234): n is a, c, g, or t
  misc_feature (247)..(247): n is a, c, g, or t
  misc_feature (262)..(262): n is a, c, g, or t
  misc_feature (270)..(270): n is a, c, g, or t
  misc_feature (289)..(289): n is a, c, g, or t
  misc_feature (291)..(291): n is a, c, g, or t
  misc_feature (314)..(314): n is a, c, g, or t
  misc_feature (321)..(321): n is a, c, g, or t
  misc_feature (326)..(326): n is a, c, g, or t
  misc_feature (332)..(332): n is a, c, g, or t
  misc_feature (348)..(348): n is a, c, g, or t
  misc_feature (351)..(351): n is a, c, g, or t
  misc_feature (372)..(372): n is a, c, g, or t
  misc_feature (380)..(380): n is a, c, g, or t
  misc_feature (384)..(384): n is a, c, g, or t
  misc_feature (389)..(389): n is a, c, g, or t
  misc_feature (415)..(415): n is a, c, g, or t
  misc_feature (438)..(438): n is a, c, g, or t
  misc_feature (460)..(460): n is a, c, g, or t
  misc_feature (488)..(488): n is a, c, g, or t
  misc_feature (495)..(495): n is a, c, g, or t
  misc_feature (501)..(501): n is a, c, g, or t
  misc_feature (669)..(669): n is a, c, g, or t
  misc_feature (816)..(816): n is a, c, g, or t
tgcctggacccagaggcccccagggagctcttggggagcccggaaagcagggatctcggggagaccccggtgatgcaggaccccgtggagactcagganagcnaggccccaaggganaccccggcaggcctggattcancnanncagaaccccgaggagcanccggagaaaaangcgagcncggcccangcggccccgagggaggccgaggcgantttggcttgaaangagaanctgggaagaaaanaaaaaaaagaaaacntgcggatnctggtccccctggtgagcnangccctcgggggccaaaaagagtnccaaganccganggtgancccggcccccctgganaanccggtctcacggagtgatgangtcatganctangtganggaaaactgcgggtgctgcgactgtnaaaagcgctgtggcgccctggangtggtcttcgtcatcgaaaacnccgaaaacattgggtacaacaacttcanactgganaagaanttcgtcatcaacgtggtcaacaagctgggtgccatcgctaaggaccccaagtccgagacagggacgcgtgtgggcgtggtgcagtacagccacgagggcacctttgaggccatccagctggacgacgaacatatcgactccctgtcgagcttcaaggaggctgtcaanaacctcgagtggattgcaggtggcacctggacaccctcagccctcaagtttgcctacgaccgcctcatcaaggagagccggcgccagaagacacgtgtgtttgcggtagttatcacggacgggcgccacgaccctcgggacgatganctcaacttgcgggcgctgtggacccgacgtcaca

SEQ ID NO: 505760 - DNA, 211 bp, Homo sapiens
ccgcacagtttaagtcggctgctaggcgcggcgaggtgaggtgcgcgcggggtcaagcgattctcccgcctcagcctcctgagtggctgggattacaggcacatcccaccatgcctggctaatattccttttttcgtttttgaggcaagattttgtcgtgttgcccaggctggtctcaaacccctaggctcaagcaattcacttacctcag

SEQ ID NO: 505761 - DNA, 432 bp, Homo sapiens
  misc_feature (15)..(15): n is a, c, g, or t
  misc_feature (28)..(28): n is a, c, g, or t
  misc_feature (46)..(46): n is a, c, g, or t
  misc_feature (222)..(222): n is a, c, g, or t
aatggggaaaaactncccaaggtgtgtncctaaaaactgtgaagcnaaattaaaactccaattgaaatactattttccacaaaatacatgtaatgccttatcctcactttaggatgaacccaattcctaaaaatccctacttaagaaatagttatgacccggcatggtggctcatgcctgtggtcccggcactttgggaggccgaggcaggcagatcgctanaggtcaggagtctgagaccggcctggccagcatggtgaaacactgtctctactaaaaacaaaaattaaattagccaggtgtggtggtgggtgcctgtggtcccggctactcaggaggctgaggcaggagaatctcttgagcccaggaggtagaggttgcagcgagccaggattgcaccattgcactccagcctgggtggcagagcaagac

SEQ ID NO: 505762 - DNA, 267 bp, Homo sapiens
acatgatcgagtcgagctcggaccatgcttaagtcatttcagtgcagtattcacacataagagatgcacacaacatgtgcttggggcatacatagaaatagaacctcgagttatagagatggcaaaggttttttaaaggaagaggtcatgaagttgaaccttaaaagagaagaatgtcccggtataaatggcaagtagaaattgcatatatttaaggcatacaatgtgatgttttgatatatgtatatattgtggcatcgataaaca

SEQ ID NO: 505763 - DNA, 289 bp, Homo sapiens
agtgaccaagattgtttcactgtgtccagttttcaagatgtgtttagaaatactgtaataactaggcagtagtgatataaagaatgatatccaaggtaatataaaacccattgcgtatgaatgcacccgtgtgtcatgatgtgtgatattctgtgatctattgtccactaggtatcttgttaaatgccagtatttcagtttttgtgaagccctgaaatggtaattgtcgcatttcagaaaatgtctttcacatcaatcaataaaaagcttttgtcaagaaaacaataga

SEQ ID NO: 505764 - DNA, 182 bp, Homo sapiens
tgatgtgtcgttcctatcaaaaggattcgaaactataccatctgtgaagaaagtggccctttctcccgcttgcaaatagacattctcaattccaaatgccggccaagaccccaatttacctgaaagcgccataacagaaaggaagaatataaactgagggcatactgtctcctgattgatcg

SEQ ID NO: 505765 - DNA, 108 bp, Homo sapiens
taaggtttatagcctactgaggtagtgtgtatggtaataagaataagaggggaggttatataggtctcttccgatatatagtggttagagcaaatgcttaaaagccat

SEQ ID NO: 505766 - DNA, 273 bp, Homo sapiens
catgttggctctcgctgtaatcccagcactttgagaggctgaggcagaaggatcacttgagcccaggagttcgaggctgcagtgagccatgactgagtcaatgcactccagcctgggtaacagagtgagaccctgactctcaaaaaaaaaaatggaggtggggggcggaacggggggctgatagacattattcagaatgtcaaaagatagaaaatgaatgacaaatgaatggataaatgaaatgtggtatatacatacaatggtccgagcgga

SEQ ID NO: 505767 - DNA, 186 bp, Homo sapiens
  misc_feature (37)..(37): n is a, c, g, or t
  misc_feature (46)..(46): n is a, c, g, or t
  misc_feature (93)..(95): n is a, c, g, or t
  misc_feature (98)..(99): n is a, c, g, or t
  misc_feature (160)..(160): n is a, c, g, or t
aaaaactctaaactttttaaagattatagatacactnccaaacatntcaccttaaaattgtataaggctgaatgaaccttccatacagaatgnnnggnnactctcataaaaatacagtaaactagtgtagcaaaagtatctgtaaaatccatggaaaatnaaagttgtatcattctttttcaaaaa

SEQ ID NO: 505768 - DNA, 1094 bp, Homo sapiens
  misc_feature (1094)..(1094): n is a, c, g, or t
tagtagatatggggattcaccaggtgggtcaggcgggtctcgaactcctggacctggtggatctggcgctggcctcggcctcccagtattggggattacagggctatggagccaccatggcccgggccttaaaatggccttcttaaaggaaaaatggccaactccatccttaatctcaaggaaattctggattggtgccaaattaagatctggtgaatattggtaacatatttaatagggtaactggctggtggtaaaattataaggccatattttaaaagggttttaaaagatacttatggtggctccttgtgggtgatataatttctaacatttcgtgctcgtggtgagtggggggtataaattgggtaagaattaagaggcaagaggaagtggttagcattacgcaaaagagtggtgttgtgacagtgagtttaacctttttaactcgcaacccttagtggtgacataaaattacctccacgggttaaaaaaaaaaaaaaaaaaaaaaaaaaaaaaaaaaaaaaaagggggggggggcgccaaaaaaccccgggggggcccaaaataaggccacacccattttcggtgacacaggggggccccaaagaggggacaacataaaaccacgagccgcgccgccgcacaaacgaggctggcgagcgaggcacacacgcacacagagggacactcggggaagagcaacccaaaacgagggggggggacacactggcgcgccacaccccaccaagaaaatatcaagcgcccagggggacacacacaatacacggagtaccgcggtaacaccagggcacacacacagcgctagaaaaacggcacagcgcacacaagaaacttcggggccacctacactcaacacagagacgaacgaccaacacacagccaagccacgcagcagagaaacgcaggcgccacaagacggcacaaaccacggagggcaccgcgagagcgaacaactcggccgagacaccagagagaacacagggagcgagagcaccaggcgcgccagagccgagcacaggcgaggactactacaacgcggaccacgagccccgacccaagcacacaaaacn

SEQ ID NO: 505769 - DNA, 957 bp, Homo sapiens
ggagtcagttccgtggtaaggtgatctgactctctgtacgctcattttgcatatgtttgagaattgtccccgtagtatccaatcgatgtctgaaccactcagagtcctggtgactggagcagctggtcaatttgcttattctctgctgtacagtatcagtgaacatgagagtctgtctttggtaaaggatcagtcgctataattcttgtgctgttggatatctgcccccatgatgggtgtcctggagtggtgtcctaatggcaatctagagagtttgtgcaccttctcgcctcctgtaaagatgtcatcagctaaacacgaataagaagagacgacgttagcctatgcaaatgacccatggagtagtcgtgcgcagtaattctttggtggggctcctatgacaccacaagagaggggaagggcgaatgtgacgaggatgagagattgcagcgttgaataggcacagattgttgacaaaaatctatcacatagtcccctaagtggcttgtcgatgctctgtagcatggatttaacgccatggaagttccaagctaaggttcatcggtacgtggggtaaatactcaagcctagataacctaatctggtccttggtagtaggtttcccaagttccagactaccaatacctatcccccaaggggaggaacttttcaagtaaggcatagagtccgtttgagagtcaacaaatccggcacggctaatagtgcctccccattggctcttgaaaaagtatgcgcagtggactttgctcaaattgagttgtccaatgaaatgttcatttaagtcttggggcgcacaaccatttgcctccaagatcagtaattccaaggattgtcgaaccaattggccaaaggcgaaaatttcgcacacgaagcagcgaaggtcaggtcgttattgaagcctcctgaaagatgaacagtgggctcacgggacaattc

SEQ ID NO: 505770 - DNA, 773 bp, Homo sapiens
aagaggagctcccctgcatgagatctcacttttgcctgctaccatttatgtaagatgtgacttgctccttcttgccttccatcatgactgtgaagcttccccagccatatggaattgtaagttcaattaaacttcttttctttgtaaattacccagtctcgggtatgtctttatcggcagcatgaaaacggactaatacagtaaattggtaccaggagtgggatgttctgaaaagatacctgaaaatgtggaaacgactttggaactgggtaataggcagaggttggaacagttttgagggctcagaaaaagacaggaaaatgtggaaaagcttggaactttctagagacttgttgaatggctttgccaaaaatgctgataatgatatggacaataagacccaggctgacgtggtctccgatggagctgaggaacttactgggaactggagcaaaggtgactcttgttatgttttagcaaagcgactggcagcattttgcccctgccctagagatgtgtggaactttgaacttgagagagatgatttagggtatctggcagaagaaatttctaagcagcaaagcattcaagaggtgacttgggtgctgttgaaagcattcagttttaaaaggaaaacagaggatagaagttcgaaaaatctgcagctggaatgcgatagaaaatggcatttctgatagaaatcaggcagtgcgaattgctaaggaaggagggcaatttatcccagaatggggaaatgttccggcgttgagtta

SEQ ID NO: 505771 - DNA, 113 bp, Homo sapiens
caacttttatttcctcagagtcttccttaatcctatggaacacgaagctgcactgaatctgggcccagtatagggggctggcttttctacctccctccccccaactataacaa

SEQ ID NO: 505772 - DNA, 113 bp, Homo sapiens
agtcaaatctacagatccccacctgtagcttccaaagcatcgtcaaccacatcaccacgaaatccacaaacacacagatcaataccacaatgccacggttccatcccacaaat

SEQ ID NO: 505773 - DNA, 354 bp, Homo sapiens
caagtattgctgaatgaataaataaataatacatggtaaatgtctttttaaataaatgccaacataggctgggcacggtgcctcacacctgtaaccccacttctttgggaggccaaggcgggaggatcgcttgagcccgggagttccggatcaccctgggcaacatggtgaaaccccatctctgtaaaaagtgcagaaattaactggacatggtggcacatgcctgtagacccagctacttgggaggctgaggtgggagggtcgcttgagcccgggaggttgaggctgcggtgagccatgattgccccactgccctccagctcgggtgatgcagtgagacccttgtctcaaaaa

SEQ ID NO: 505774 - DNA, 148 bp, Homo sapiens
cctccctaaaaattggatggctgtaagcctttaaaaggcactctaggcactcttgtaagactcagctccaaggcaggaccccatatggtccttattacaagtgaaatatatttgaggccaggcctattgtaaaacctcctggcctgct

SEQ ID NO: 505775 - DNA, 1396 bp, Homo sapiens
gcacgggagaaaggtctcggtgaggtatcgggccagcgacgcaagagatggaagctcggggcggatgcgggagcggcggctcaatgagacacgggagtgctgggcggcgacgtcccgtgcgtccagcttccgtctcgacctctaccacgttaacgctcgtcggtgcggcttccaccgcatgcgactctaagcggcgcgagaaaactcgggtgacacacaggaaagatcccgtgggttagcttgttactgtaaaaggaactgtcgatgggaaatagcgatagacccaggacgtcctgtagtgctagttttgcgtcgtctcgagaggtgtagcctccgcgagtgatcgcgttgtataccgcggctgtaccgtgtcatggagcagagtggtattgcgcgcaggctagaaggggtgtgaccgcggccaggctcttaccgcagggcgtcacgcataagagggacatgctcagacgcagcgtgaggcgcccggtcgcgtgcatggcgtaacccatgtgctacgtccgcctgactgcgcgtaggctgcgaaaaaagcgatgcgggggcaacgacgctattgaaggaccttgctagctagccactgggaaacttgcgtttgcgtaccaccaccgggtagagagccaaacatcctgtgctccgaggagttgagggcttgatacccttggcctacgaggtaatgcgctatacgcgggcacggaagacgttatgttcgcggataggagcacacctctcgaagcgcaatacatacaggtggaggctttaacccgcctggggggcgtccccggccagaggtcataaacgctttgaagcccttagcgcacgtcgaaacgaaaagtccggagggtccgggatatcccaagggtacacctgtgaggcccacagataggcttgagacatatatattagccctgtggttgcgcccaaaggactcgaaggcaccaagggatgttatagttagacgttctaccgaggcgatggcgtagtaggtccattgcgagtggcgcaagcagtattggggatgcagtgctacgggggggtaagccgcaagtgggggaataggcccaaggacgacctaacgacggagcagttcccaaatataagagacctgtgttcgcaaaccttggggacctctcagaaacctacttttaacggtccaagcactaggaatcgcggaattactggaggtgacaagttcaggcgaaaagtttgggaatcttacctggggaaggtatatacaacccagggttttatggaaaacgtaagggtaacgaaactaagtgaaaaattaagaacacgggcgtcggggaccagagaggggcagtatcatctgcacgagagtggaagtatctgggaatggcagggtgcccgggaaagaggcggg

SEQ ID NO: 505776 - DNA, 436 bp, Homo sapiens
tctacctaggagagtgccttcgagagcgagagggaggtgtctcctgacgctaagagcttgctgctgaacctgggcaaagacagcaacaacgctggtgcgctgctacttcaactcctctgcttcaaccgcaccacggacgaccccaacaccatcgtgcgcaacagaagcgacggcggggcctgggagcaccgaacagcgggaggctgtttttcccttacaccctgaaagtgtcgcagaggtgcgcatcatcttagaccagcccaacctgaccgtcaagctgccatatggatacaaattcaagttccccaaccgtctaaacctggaggccatcaactacatggcaggtgacggagacttaaagatcaagtgtggggcctttgactgaaatcacccaccccatggcccccaataaaggcagctgcctgtgctctctctg

SEQ ID NO: 505777 - DNA, 1698 bp, Homo sapiens
tattagggggggtgaaaaattgttgtgtgtggttaaacacatcttttggggtggtagtaatgcctcttcgtatgtttggttggtgttaaaaattgtgtggcgattagttgtggttgggttgtgattaattaacagcgttgtggtgtgtatgatatagtttggtgtgttgccccccataacaacaggaagtgagtgttttgcgtgggggttgccgcccactacatatgtggtggcccattccttttgtgggccccccccgttttggttttgtgatggttcgggccctctcgagtaggtatcttgggtgggccgtgtgttcttcgtcagtgatagaggactcgtctttggtgatctcacctttcgttggtggttgaagaaagtaggattgttggtggctttcttgtggtgatgttactccccccacctcaccgcaggatggattgtttttgtggtgtaggtccctcctcccccctctggtggtggtgtactacacttgttgggagtgagtcgttctccccccctcacttgttagtaggtaggaggtggtagtatgtaataaatatggtgtccattcagcgtgcgggatggaattgttgtagaattattgttggtgtggttgttgtaggtgctgctagcaggaggtggaatatgtaagtgggagataaatatatggttgtgtgctcccccacactcgtgtacaccaccacagttgtgttgtcgtctccacagtgattattacttgttcatgatgagacttgctggttctgttgagggacgaccaccactccactaccctacactgtggttgtagaattagtgtggtggtgttgtgtgattaggagtgtgagtagtgtggcccccctctgctgtctctgtgtttgcctcttcttgtgtgcgctctgtgtgtgtgtgtccctctcactgtctccacactgtggtctcctcccctcgcccctactgtggtctccctgtgtcaccctcgcagtctgtgatgtgtgtgtgtgtgtgtgtgagagagctcccaccatggggtgtgccacaagcagtgtgtgtggtggtgtgtcctccctctgtagtagtgtgtagtagttgagtagtagtatagtagttgtgtgataaacagagcgagtagtgtaagtgtgtggagacacccacatgtagtgtgtgtgtgtgcgggtgtgtgtgtgtgtgtgatagaactgtggtctcgtgtgtgagaacctgctcccccacgcggtgagaaggcgcgtgaaagagtagaggactcacacatacgcgtgtcgctgcggggtgtgggtgtgtggtgtggcggctcacacacagcagccctggagaagtctccacaccaccgctgtgtgtggagagaccgctgtggggtgatgagagagagaagtgtgcagctgtgagagcccaccagagaggtgtgtgtataaccaccccgctgtgtgccacacacgcgcgccacaaccccacgtgctgtgtgtgtcccacacaaaataaaaagtgagaccccgtgggtggtcacgtaaaaagtcgtggtgggtcccacacccccgctggggaagtgcgtgggggtatagaagagtcacccgtgaacgtgccccgtgggggtgtgaagtcgtcccagtgaacgtggtgggccccccggcacgtcccaaccgtggggtgaaccaaggtaagaacccggtgtaaaaccca

SEQ ID NO: 505778 - DNA, 210 bp, Homo sapiens
gtgtctggtgtgagaacgatgggcacctcaactgcttcgtctcggccgctgaaggcgtgttcctgtcgctaattcagaagcactttcctgtccaccaatgagaaatgcgggacagatggagcgggcagcaatgcggaaacggcgacctcggtggacgctgtggccaaagccccctgtgcttggtgtgcgagacacgcgggcgtcactccg

SEQ ID NO: 505779 - DNA, 793 bp, Homo sapiens
ggttccggcgcacgtaatcgccgagggcacgtgcatgcccccctgggttaagagttgcaggtagcggtagcgatggaccactctggatcgagtagtaaagcccaaaacggaaaagagccaagagattccttgaagaagagagaaccgaaactcaattgacaattattaaaaagtgccatgcttgattaaaagcgggggaaaatggcaaatatgccacaggtgacaaaacagtaccttaacacgattgtgtatgcaacgtggaaagaaacccataggggtggtacctaatataaaccacgggacaaaactatttacaaggaccctttttgagggattcagaacattcaccgtgacaatttccttttacaaaggaacgtccaggattgtgttccttttattcacaatgttttgggcctccccaataaataaggaagccggccaaataatctagtacactaaggtcgtatgtattgaccttacccattgttgcctgggatattgattggacacttgacggtatggcagaaatttggtctctctaagagaccttaggaaccagtaaattgtcctgagggaacaaaaacccaatgctgatattggctggcgatgatttgcgatgtaacagaagattatagaagattaaaaaagtcttcttaatggattcttcagaggcccacagtatcaatattccgctggtggatcagagtatgtcctgcacttcacttgcactgaatggcacgattactttcgagctaaagtgctgtggaaacactcgtgttgcgaaccacacgga

SEQ ID NO: 505780 - DNA, 117 bp, Homo sapiens
agacgagatagccatagtacgactagtttactagtctacagttagatagaccataccagtacatcccaaggctggtaaacccatacgaggaccccatgcccttacactagcccaaca

SEQ ID NO: 505781 - DNA, 874 bp, Homo sapiens
ccctgacccaccgcgggtaactgcagttctccgccccgaatccggtttccggcccccacataacgatcgggcggtgccacagccccacccctcgtgtggggccgctctgcaacccggggatgcagtggagcccctgtatagtggccgtgcacagtgccacacccccatatttgtgcgtccctccaggtggtatggctccctttctacgagaccacaggcgagccgtaccgttttgagatctccgcccagcaccaagagaagctcagccaacattcccgcgggtacctatatattcgggccccgctactgtttttcccaccggcgggacagcgcggcgtgtgccgcactaccatgatcgcggcgcattcctggaacggggagtcaccaccgctagcggcatttcgtccacgacaccgcgacacctttctcgcacgtgcagacccgcccctagggtagccccccacccttggctgcaggcatgaaaacgccttgtcgccgccgcacctccgtgcctagaaatatattagaaatcgttattcctccactccagggtgtccatcatctcgcctccacaaagccattgagaaagaccaccagtgattctctgtggccatgcatacacttctcagcaatagaattgctgcttcctcctccagggctcccctcagtcgcgcgattcttcaagccaccgcagatacccactcctcaacagttcatgaggggcacccccacttatcacttattccctaacatgtgtgtaggctttcccatcatcatacccattactgttcctaccccccacccaagacaccatgtgatcaccaccctgtcatccccaccctccatcatgaaatttttcccaccccacatgaca

SEQ ID NO: 505782 - DNA, 931 bp, Homo sapiens
  misc_feature (32)..(32): n is a, c, g, or t
  misc_feature (65)..(65): n is a, c, g, or t
  misc_feature (68)..(68): n is a, c, g, or t
  misc_feature (91)..(91): n is a, c, g, or t
  misc_feature (97)..(98): n is a, c, g, or t
  misc_feature (104)..(104): n is a, c, g, or t
  misc_feature (118)..(118): n is a, c, g, or t
  misc_feature (123)..(123): n is a, c, g, or t
  misc_feature (129)..(129): n is a, c, g, or t
  misc_feature (131)..(131): n is a, c, g, or t
  misc_feature (148)..(148): n is a, c, g, or t
  misc_feature (152)..(152): n is a, c, g, or t
  misc_feature (159)..(159): n is a, c, g, or t
  misc_feature (164)..(164): n is a, c, g, or t
  misc_feature (172)..(172): n is a, c, g, or t
  misc_feature (186)..(186): n is a, c, g, or t
  misc_feature (210)..(210): n is a, c, g, or t
  misc_feature (219)..(219): n is a, c, g, or t
  misc_feature (227)..(227): n is a, c, g, or t
  misc_feature (331)..(331): n is a, c, g, or t
  misc_feature (434)..(434): n is a, c, g, or t
  misc_feature (449)..(449): n is a, c, g, or t
  misc_feature (453)..(453): n is a, c, g, or t
  misc_feature (459)..(459): n is a, c, g, or t
  misc_feature (461)..(461): n is a, c, g, or t
  misc_feature (819)..(820): n is a, c, g, or t
  misc_feature (916)..(916): n is a, c, g, or t
ccaggatggtctcaaactcctaggctcaagtnatcctcccgtcttgccctcccataatgctgggntgncgtgtgagccactataccttgcngttttnntttttnaatggttgagttantaggntttgantnttggggacatgagaatnttgngggagtnaaatntgggggtncataaatggttttnggtggggcgcagccatgctcattngtttatgtntctgtggntgcttccccaccacaacagcacagttaatagctgcaacagaggctatatattgtgcacaaagcctacaactttactactaggccctttacagaaaacatttgcngacccctgctctagaccactgaaaaccctcatgctcatcattctcaacctgaagatctctctaccaaatcctaactttaaaaccttgctcagaaatccatctnttccatgaagttatntttnattatntnacccatctttaatcaatcaatttcactaatctccaaagcacaattacacacataatttcttggagctgattcagttacactttttgtaagtggctttctccttactaaagtttctgtaagaacaaactacagcagctgttttttattttatttttctatttctgagtataaagctctgatacacaaacactttattaatgtttttgaatgactggctgctcagagtctttcaggttattgtacctttcattgaagactcaggtccgctggttctttgagagccatgagcagagctgttgttggacaccaccactggcccaggactctggcccagggaagggatggtgttaagggtatnnccaatttggccacttcattgctattttcgcctgtcacacaggtcgcttcacagtgacaaagctggcaatgctcactgcaggtggagaggggaaggngggagctagcttggg

SEQ ID NO: 505783 - DNA, 315 bp, Homo sapiens
agtacacatgatataacacagactgaactaagtctgaaaagcagaatacagccaggagcggtggcccacaactgtaatcccagcactttgggaggccaaggtgggtggatcacttgaggtcaggagtttgagaccagcctggccaacatgacgaaatcctgtctctactaaaaaatacaaaaattagccaggcatggtggcgggtgcctgtaatcccagctactcaggaggctgaggcaggagaatctcttgagcccggaaggcggaggttgcagtaagctgagattgtgccactgcactccagcctgggcgaca

SEQ ID NO: 505784 - DNA, 1730 bp, Homo sapiens
  misc_feature (307)..(307): n is a, c, g, or t
gctggaagcttgcgccgcttgtcccggtcggtggctacggcgtcgtgcggatgcgcgtcgttacccgctcctactggcgcgtcgttcgtgcggcgtgcgtggctctcggcgcctggctctggtgccatgggccctcggctcgtggaccgcgtggcgggcgtcccgcccaggtcgctctcttacctagctgagtgctgtgcatgcacgagtagggctccggggcacgtcaaagcagcgaggacgctcgaacagtggtcgtatcgtggtggcgaggaaagaggcttagtgtgggcatcatgaataaggngaaacgtagctatcaaccccaagcgtagctaatgcaagataggtaacacaaaaagggtacatttcttgtggcgaaaaagtaccaaaccaagttcccagtcaaaggcattagcagaaggatgccgtagttctcctcgggaataagtagtagagacagggattcgccgtagtgggggaagcagaggggtggcgtgctacccaagccaaagtcgcgctaaacgcgaacttacatgcagaaaagctcctttttaaccggaatggcaagccccttgagggggaggcattcagtgtggggaactcgcgaaacgccagcgccaaacttacaagtgccgtcgattaccaaccggggaagccctggcgaccggggagggattagccacctgcacgggcccgatgttaggcaactgagaacgcgtgggccccgcgtgtccatgcccttttcgcgacgccattgtcttatctgagcgcgcattaatgcaacacacgaaatgggacccgttgggtagccaccctttcgcgttttagggccccatagctttggcagacgatggtctgtgggtagccttcccttcattgggaattccgaatgagccaagactgtggcttgcaaaagcgactttggaggcgcctttggacattaccaatagtggacccccaatactacaggctttagaccccacttacttgtggtagggggcacagccggagtcgaacggttgccacttgaagcctttggaaccttggaaggggcctggcataacacagaggcgggcccacttgaaaggcgtccttccaaggccattctttaagtgggtaccccaacgaaaactttttccacagaggaagtgtcgccagcgagattccaagagcaagcttaactctcgcttacagcttggcgggacatccgtggtatagccgtggtggtggaaacacctggggtttgtccccgggtgggcctcctgtcgtggagaaagagacacgcgagtcccaaacacaaaggatagccaagcacccaaacaagacggggaacgatgtagcccgtgacaacgtttcaaattcgcaacgtcaaaggggggccacaggtcttggccaagcccacagtagacgcccatgagcaaaaaaccccccagggagaaggcaaccacacactagaagaaacatcagcaggacacccccccttggtgagacaaaccaccctttcgtcggtacatagagtatcgagtgcgcacaacccactaggggaggccacaaaacagcaaacagccgtgcaacgggacacacagaccaaagagaaagccggtgtatggccacccgacctacatgaatggcagcctcaacagagacaacccaacttagtgcaaaaatagacagaccgacacacatagcgaacgagcaccacgacgcgcgcgcaaacagctcagcaa

SEQ ID NO: 505785 - DNA, 545 bp, Homo sapiens
tcagcggtaccgcactgctcccatcagtgtgtaagttacatcatggtcactgtatgtaaggcagttaaaaatctcatgtgttaatttatgaaagttttttttttttaagattcatggcttccaagtgcaacaaaaataaaaataaataaaggggatctaattaaactaaaatgcttctgtatagccaaagaaataaccatcagaggaaacacacaacccacagagaaaatattggcaaactacgtatctgaaaaaggactgatatccagaatagaaggaacacaaacaaatcagcaagaaaaaaacaaataatcccatcaaaaagggggcaaatgagatgaacagccatttctcaaaagaagatatacagatggctaccaaacatatgaaaaatgctcaacatcactaatcagggaaatgcaaattaaaaccacagtgagacaccaccttactctggtaagaagggccattattaaaaggtgaaaaaaaaaacatatggaggtggatatggtgaaggggaatgcttatatacggcagaggggacg

SEQ ID NO: 505786 - DNA, 817 bp, Homo sapiens
gacagaggctgtcgcagagctgtgggagatgaatgccagaggacttggatctgagctaaaggacggtcttccagttactgaggacttgtcagcaagtggaccttttgaaagtggcatgatcttcttcggtgacagaggttatgttctctgttgtggaataggcattgaccttttgccatagttgccatcccgcattgagatgtagtccagtaggaataggaaatttccaggctccacatcaggatcaacatgatcttttgcggcaccactgagaaagattcagggtctattggcttccgcgcatcatcattgcgaggatggaattcaagggcagtgcgagctgggttcatgcgtcttcggattggcttgtcaatgctcaaatctttcatctggatgtatggaggggtaatgattgagactattggagtttgatggatattcttgagatgatccattcacaagatgcgaagtcgatgggagaggcagcacttgaatggtggaagtatagtagcttggtttacatgtgaaggtagtgtgctgttcatgggaaaccgaggggcatgcatcttgttgaataggttcgattctttcgtaacggtacattttgggtgtaactcaaacgattcatgagtgctgaccacctgagaaatttctgcccaaggtaggatcgggatcaatcttacaccttggggggggaccttggtctacagcccatgttgacacattaaagggccctaaagggggacatgtcaacgctctgaatttatttaacacacgttccttggccttacaaggttgtggcgccgagattttactg

SEQ ID NO: 505787 - DNA, 87 bp, Homo sapiens
  misc_feature (5)..(5): n is a, c, g, or t
ggaanccttctcctccctcccccctcccccctcctcaagggagtggccgtggatatccggtttgttaataaagacaattcaaccagc

SEQ ID NO: 505788 - DNA, 130 bp, Homo sapiens
cacatgatcaacactacatcgacatcagaagagctaacaattgctggaatgacctttacaacctttgatcttggtgggcacgagcaagcacgtcgcgtttggaaaaattatctcccagcaattaatgaga

SEQ ID NO: 505789 - DNA, 183 bp, Homo sapiens
ggggggggggttggtttttaccccccccccccgggttttggcccccttgggccaaaaaaaaaaaacccccggggggcggggggtaaaaattggggttccccccccccccccggggtttttttttttttcttttttttttggggcccccccccttaaagggggggggggttttttttttcccca

SEQ ID NO: 505790 - DNA, 859 bp, Homo sapiens
  misc_feature (56)..(56): n is a, c, g, or t
  misc_feature (78)..(78): n is a, c, g, or t
  misc_feature (102)..(102): n is a, c, g, or t
gaaaaagtacattgaaattaggaaagaagccagagaagcagcaaatggggattcanatggtccttcctatatgtcttncctgtcatatttggcagacagtancctgagtgaggaaatgagtcaatttgatttctcaaccggagttcagagctattcatacagctcccaagaccctagacctgccactggtcgttttcggagacgggagcagcgggaccccacggtgcatgatgatgtgctggagctggagatggacgagctcaatcggcatgagtgcatggcgcccctgacggccctggtcaagcacatgcacagaagcctgggcccgcctcaaggagaagaggattcagtgccaagagatcttccttcttggatgaaattcctccatggcaaactgggaaatccaatagtaccattaaatatccgtctcttcttagccaagcttgttattaatacagaagaggtctttcgcccttacgcgaagcactggcttagccccttgctgcagctggctgcttctgaaaacaatggaggagaaggaattcactacatggtggttgagatagtggccactattctttcatggacaggcttggccactccaacaggggtccctaaagatgaagtgttagcaaatcgattgcttaatttcctaatgaaacatgtctttcatccaaaaagagctgtgtttagacacaaccttgaaattataaagacctgtcgagtgctgaaggattgttatccatcccttataggttaatatttgaaaagttttccggtaaagatcctaattctaaagacaactcagtagggattcaattgctaggcatcgtgatggccaatgcctgcctccctatta

SEQ ID NO: 505791 - DNA, 806 bp, Homo sapiens
  misc_feature (2)..(3): n is a, c, g, or t
  misc_feature (5)..(5): n is a, c, g, or t
  misc_feature (20)..(20): n is a, c, g, or t
anngnatcaggctacagtgncacagcagagtgaggagggagcggtccacaaaggactggcgtgtgaaacttaggcgggggtcatccttcctgaacatttcatacacgctttccagaaggcctagacctgccactggtcgttttcggagacgggagcagcgggaccccacggtgcatgatgatgtgctggagctggagatggacgagctcaatcggcatgagtgcatggcgcccctgacggccctggtcaagcacatgcacagaagcctgggcccgcctcaaggagaagaggattcagtgccaagagatcttccttcttggatgaaattcctccatggcaaactgggaaatccaatagtaccattaaatatccgtctcttcttagccaagcttgttattaatacagaagaggtctttcgcccttacgcgaagcactggcttagccccttgctgcagctggctgcttctgaaaacaatggaggagaaggaattcactacatggtggttgagatagtggccactattctttcatggacaggcttggccactccaacaggggtccctaaagatgaagtgttagcaaatcgattgcttaatttcctaatgaaacatgtctttcatccaaaaagagctgtgtttagacacaaccttgaaattataaagacctgtcgagtgctgaaggattgttatccatcccttataggttaatatttgaaaagttttccggtaaagatcctaattctaaagacaactcagtagggattcaattgctaggcatcgtgatggccaatgcctgcctccctatta

SEQ ID NO: 505792 - DNA, 699 bp, Homo sapiens
gcgcaataacctagacctgccaatgaccgggaacgcacaactgaccgcagaaagaccacaagagcgcgagatgatgtgctggagctggagatggacgagctcaatcggcatgagtgcatggcgcccctgacggccctggtcaagcacatgcacagaagcctgggcccgcctcaaggagaagaggattcagtgccaagagatcttccttcttggatgaaattcctccatggcaaactgggaaatccaatagtaccattaaatatccgtctcttcttagccaagcttgttattaatacagaagaggtctttcgcccttacgcgaagcactggcttagccccttgctgcagctggctgcttctgaaaacaatggaggagaaggaattcactacatggtggttgagatagtggccactattctttcatggacaggcttggccactccaacaggggtccctaaagatgaagtgttagcaaatcgattgcttaatttcctaatgaaacatgtctttcatccaaaaagagctgtgtttagacacaaccttgaaattataaagacctgtcgagtgctgaaggattgttatccatcccttataggttaatatttgaaaagttttccggtaaagatcctaattctaaagacaactcagtagggattcaattgctaggcatcgtgatggccaatgcctgcctccctatta

SEQ ID NO: 505793 - DNA, 938 bp, Homo sapiens
ggggtggggcggcaggcgcccgccggagcacctccagttctgccggcttctgcgcgcggggccgctctcctcccgccggtgccgcgcgcttcatggaagccccggaggggcggcggaggggggcctgcagcgcgtggccggagggggcaggcggggcgccgaaggccagggtgcaccttccgagtggccgaggttcactcatgcaggcggggtgtccaacggctcggggatgggggccatttccccatgtgcctagtgtttgcccccattttcacccataagtttcctttgtgggcgagaaccaaaaccgtggaggccttatggaccctttaacctggatgtggccagttgtttcttccacaatttatcgtgggggcccgggcaaaggtggaaccagagccagcgcaaccgttgcgggacctcccgtggaacattcactccagttggtggttccaacgagggttacttttaaacccacagggcggggaggccccgtgggaagtgggacctccccgttgcgggaagaacctcgcgggaaccacgccattcgggggcaaggtggtggagcctcctcacattggctggaggagttctgggcgcttccccagggttctctttccaggctatccacgacaaaggtaccttgctcacactaacctgggtttcccctccaaaaagtgggtagaacgggccacaggtgggaagggaacccctggtggccggcaccgcctgggccgtggtgggggacagctacactggggcgctgggcctccgttcagggccagaaatcggcggaggggggccaacgtggcctgagggttacgggagtcgaggggccggcgaggaaaggagaaacggggggggagattaaccgggaccgagtccttaggcggccaggcggcaaaaagcaagggggggccggatgacagcgcgagggc

SEQ ID NO: 505794 - DNA, 932 bp, Homo sapiens
  misc_feature (4)..(4): n is a, c, g, or t
ctanctcttacctgagaggtgtctttataaaaacaaatcttggcagctgtccttagacatggtttatttaagaggaaatgtaactgggatctagttaaaattagatgtttgggcaacatatcccactcacaaaacattcaggttggaagccagcccggatcatgaaggaggaactagggtgatatgctaatcctccctttgggatttagatgaggctgtgcttttaaaaggtccttggccgtgacttgaggtggaaaggggaccttttggagtggtcatttggcactttcaaaactaatttgctgggaaaacaatatttatagggcttaaagccagatttcacatatcataatctaaatatgtgtgcctatctgaaaacttggggctcattacatggtatcttacccaaaattcacgaagttaaaggggctttaatggtgttgatctatatttgtttttatttcaatggattgggcctgtctatgttaggctacaaaaataagctgaggagtatggcttaccaatttaaatgtgcatgatttgtataagcggaacgacataacgagggcagaatacatgaaaaaagaaaaacagcagagaaagcacaaaggagaaggagaaacaaacagaccgagcggcggccccccaacaaaaagacacccaacacagagaggcaggcaagaaaccacgagaacaccgccaacagttgtcactatcacaagagaggacactgacataaaaggatgagaccacaaaaatgaacaaccagcgcacccccactagtagaacaacaccgaaacaagtgaacaacacacgcacgagacgcgactcacagatacaacacaccacacaagcgagacaggagacaaaagaccagcacacccacacggagaaatcgaccagacacagacaaacaagacgaggcagcagaa

SEQ ID NO: 505795 - DNA, 1406 bp, Homo sapiens
  misc_feature (638)..(638): n is a, c, g, or t
  misc_feature (652)..(652): n is a, c, g, or t
  misc_feature (684)..(684): n is a, c, g, or t
  misc_feature (1013)..(1013): n is a, c, g, or t
catacccacaccgcggcgtggggttgatacccgcccccctatgatgtaggtgaagacacctccgcgggggggcctgcggatgtctccattctcctttccccggagatattttttttagcccccttttgtggcgcccctccgggggggcccggggtagtgttacacccaacggtggtttgccaccgcaccacggggggtaataccatggcctttaatgcggcacccccacttaatgggggccccccatattattttttatagggtgagatcccagacgtaatattattgagggaacacacaagagtgttgtggggcacccacaaagaatatatcagcctacgggccgtggggggttacacccgggtttccccgggaaatttttcccccccggggggataactccggtccggaaaccccccaaccaggcggttcctccgcggggatacgacctttggggggggaaaagaatgtgtgcgggagaggtgcacacgagtaccctcggggggctcttggattgggtttcgaagggcccactagaatgcccttggggcccgccttgtgcagggccaacatttgttgggccttaaaccacacgcgtgatccttggcctggggccgcgaaaaaggttgtgattgtgntctgtatacacgcntgtgtgaaaaggcaacgtctaaaacaacaatngtctgtgcgcgaaaatgttgtctgtatcaaagagagagcacaaggttgaaaagtaaccctgggcgttttctctttctcggaatagccgcgagtgagatcaccccacaacccccttttctcgcgaggggcgccccctataccacacgtgttctcgggcgccacccacagcccgacacatttttctgggcgggagccaggtgtcagagagagtatatgctgtcgctcccatcccaaaaccacacagcgagagacccacaggccccgcttctttggagccccggtcttcaaaagaggtgttttgagccggcgaatctccacctccgcccctnttcggaccacaagagaaaaaagcgcgaattggtgggtgttctctcgctgcccttctcacaaggttcgtggcgttctgagaagcgctacacacacaagagaaagtttggcctaattcttggggcgcctcgggtctcacacgagaggtttggctgggagaagtgaaccacggcacgtgacacgccacccctggaaggaagaaagaggagaaagaggaaaggcccaagagatccacctatccggagaagaagaaaacacgctcacatgaggggctacggagaaacacggccgagagaaagaaacgtggagagaaagaaaattgacaaataacacagaggtcctcaagacccaccggaatcctggtttgagccccataaagactgttaattcctcca

SEQ ID NO: 505796 - DNA, 660 bp, Homo sapiens
tgtagtgtcactgtatatcaacttactaacattttcctcatcccttccactcacccataatgtatctatgcctctcttaactgtgaggctaacttctctattcatgggatttattccagccagataccaggcttaaacagtattctctgatccttaagtctatattccctgagtggatgaaactgttaattatccatccattgtccccgtctttctttctaataataaaaaggctccccaaggttttaggtagacacatggttacccagaaaggaaaactaaatttccccaggactccctttccagctaaggggtgacatgttataaatctctgggtcaagggtggatgggaggcaggattgtggccatataccaatgtccatggttcacatcttttaaaaaagggaaaactggcttggcctttccatttacttcctctctacatttccactggctagaaaatggtgacagtgagtaccagactcattgtacaccaggagacggaagccacattttgaagatacagagctgacctactgacctgagcccttgatgacatcattggtctagcgcccaaaatcaggtaccccctgtcaagtgacctcaaggtacgagctcgatcgaatctggtctgtgttctgtggatgtttcggtaccgaa

SEQ ID NO: 505797 - DNA, 485 bp, Homo sapiens
ttggtagcgaggggcgtaaggcttgaacgaatgtggggggtcggccacaactgaagttcacgactatttgattgagagccgtttattgcttctctaagcggatacaggtgctttagatgcgaaataatggcaacctataaggttactcggcaacgtgttggacatcgccctagcgtaatgaatcgggccgtcactcattgcgcgtacatggataaatcggccgctcttattgacgatgaaattcggcaaccatcggcatcgcgctatggcagcttcgcggaatgggtacttgctccagcagtcattgccgcattgctgattgccatcattcggcttgaggcgacggggcaggcggctcgcttactctggagcattcttttagcgtcattctgcgtggggctacttgtcgtggcctatgccaactacacgcgtcagtgtcgatgtcttgcgatcgtccgtccgtagtaagagcctctagagccaat

SEQ ID NO: 505798 - DNA, 937 bp, Homo sapiens
gcttaccacttcaggatgactatcctccctccagtggagaagctgaagacggtgctgcagaaggtgaaagacttccactatcaacttccgtggagaagtacgcgtgaggacgcctgagccccagcgggagacctgtccttgggctcttcctcccaatgcccgtcaggctgaactcgcctcccccgtgactctgcctcgggcctcgcagaggccgctggtcacttcgtcatcatttgcccctggagacgtctttcttgtgccttgatgttgagagcgcctctctttggagcaaacgaaggcattctatatgcaacagagtagaggggagctgctcaggcgggtgtgagccagggtgctctgaagctcgcgtagtggtgctcgtggatggaaagttcgaagtgtggggggttgacaacaactaggatgtgtgggtgagactgtgtcaagatgcttggagaaaactgagcgagttgtggagaacagtgtgtgaacttagacgtggtgagggtgaaaatgcgtaactcgcactaggatctgggagtaaagcctttaacggtgtgaagatccggtctttgaacagaaggcctggaaggcccctggggtgagaaaaggggtcgccgggggcactggaggcgaggcgcagggagccgcatagcaccgtgggacgggacgggctgtcgcacctaagctgggcggaagacgccgggggatgcgaccccggggccagaaagcgccccacgggaaaggtaggtgagaacccacgatcaaggagaaagggggccccccgctccccagcaacgccgccaggcctgaacaatcagggagccgccggcatgagaagagggcccctcacatcgctggtgacccgcgaaccgccccaccgcaaaacacacgggccgcaccacccccgggcaacgcgcagctgcccccctccaga

SEQ ID NO: 505799 - DNA, 604 bp, Homo sapiens
gcttttatagcaagggagcagcactcactcaatctgcagatagtcagcagcagaggagtggcagttttatagaggaaaatgggaaagcttcaagcctgccctgactggaggctgttcgctaggaagctggcggctggctaaggggaagcagctcatccactgtgatcggctaggggagcatatttggctttctctctggttggtctgaagttagaagtggggacaaaaatgagggaaactaatcaagtcctagctgttctgggcagactgttgcagaggtccttgtttggcttctcggattgtttgctagagacagtggtccgggccgggcatggtggctcatgcctgtaatcccagcactttgggaggccgaggcgggtggatcacaaggtcaggagttcaagactagcctggccaacatggtgaaatcctgtctctactaaaaataaaaaaattagctggatgtggtggtgggtgcctgtaatcccagctactcgggaggctgaggcaggagaatcgttttaacctcggaggcagaggttgcagtgagctgagattgcgccactgcactccagcctgggtgacagagtgagactccatctca

SEQ ID NO: 505800 - DNA, 408 bp, Homo sapiens
taaggatccgctgctcctcttaggacttcagcctagttgggggaaggcaggtacatgatcactccattacaaagtatctaagtacagaggcagcttgatggggggcaggatcagtaaagctttatcagagagtggtcttgagctgtgccttgaggacaggtggctggtggtatgaagacagcatttacaggggccctaactggtgcaggctctgtgaaggaggctttatagagatagatgtatttttcaccacggtccaatgcattaggtttcgttgtcttttgcacatgacaaatctgacaggctaaggacacattcaggtaggtgttggagcttggctttgagcttccagcctgtgctgtggggagaattccatcttatgaggtgaagaggggggcgcagcggtac

SEQ ID NO: 505801 - DNA, 265 bp, Homo sapiens
tagttacctctgcccctatgagaaacatccttgctcacactctgaaaataaggtcatcgtgtactctccttagcgcccctttcaaacgagtaggaaaggctaggagattagtctttaaactctaggtgtggactaagaacctctggatgtttcctacatactataagggttctctgaacaccagcagcggcaactggttgcagctaactcaagaccaatgtaaatttttcagatggctatgtgaagctcctagaaccaaagagaa

SEQ ID NO: 505802 - DNA, 343 bp, Homo sapiens
tatctaggctgtattacgtatatccattaaccaagttctgggtatataccctttccagtccctagataactactattctactctctaattctatgagaccaactttttttaccttccatttggaagtgagaacatgtgatatttgtctttctgtgcctggtttatttatttaacataatttcctccaagctcatccatgtagctgtgaatgacaagatttatttcatttttatggctggatagttggacagtactccatcatatatatgtaccacattttctttatctcttcttctgttgatggacacttaggttgattccatatcttgcctatagtgaatag

SEQ ID NO: 505803 - DNA, 465 bp, Homo sapiens
catatgggcgagcgtccctacagctttcagacgtgcggtcgcagcttccctgcaacgcgcattctgcggcgtcacctggctattctatcggagcccgggcaggagcatgccgagccccgcagtgagtgcgtggagtgcgtgtagagcttcagctgcagctgcaatctgctgcgacacctgctggtgcacactggcgcaggccctactccgtactgcagtgtggccgcagcttcagccgtaactcccaccttgcgtccacctgcgcactcacgctcgcgagacgctgtactagcttggcccgccttccgccagtttcgccctgcgccacctacccggggtcctccacagcggatgcctgcattaatgtcccttcccaccacaccccacttccctctccttccattttcatagctgtccttccctggccgtttcattgctttctggcctcagctatgtaattaaaac

SEQ ID NO: 505804 - DNA, 382 bp, Homo sapiens
cacaccacctgagtcataaatggagtccgtccagaggtatgtttactatctaagctatcgtgtgagctagtcatatataagttgttggctcacgaggatgataattcttgtgccgcgagagtgagtagtagaatgtttattgagcctccggtgttgtgagtgtaaattattgcgacgagtaggggaagggagcctcctacggtgtagaataagaaaaatgtgcctgcgtttaagcgtctggctggttgtctcatcgggggatgataaccaccgtggggataagtgtggtttctaagaaaatataaaatatgattagttctgtggctgtgaatgttataattaaagagatttgttgggagattagtatatagagggggagttt

SEQ ID NO: 505805 - DNA, 131 bp, Homo sapiens
  misc_feature (4)..(4): n is a, c, g, or t
  misc_feature (46)..(46): n is a, c, g, or t
  misc_feature (118)..(119): n is a, c, g, or t
gctnttcagtgactgtccggtcagtggcaagcaaggaggcaaggcncgcgccaaggccaagtcgcggtcttcccgggccggcatacagttcccggtggggcgtgtgcaccggctgctnngcaatggcaact

SEQ ID NO: 505806 - DNA, 297 bp, Homo sapiens
  misc_feature (40)..(40): n is a, c, g, or t
  misc_feature (58)..(58): n is a, c, g, or t
  misc_feature (62)..(63): n is a, c, g, or t
  misc_feature (71)..(71): n is a, c, g, or t
  misc_feature (85)..(85): n is a, c, g, or t
  misc_feature (101)..(101): n is a, c, g, or t
  misc_feature (105)..(105): n is a, c, g, or t
  misc_feature (107)..(107): n is a, c, g, or t
  misc_feature (119)..(120): n is a, c, g, or t
  misc_feature (125)..(125): n is a, c, g, or t
ttcggcacaggtagaatgttggcttctcttgggctgtctnctccttgacatcaaaggnaaannaggcaatntgtgaagccaattngtccctaaccggggtncttnangcaatttcagannaaccntctgactgttgacagacactccctggaggcccacaggacctcaaatccgccatgacataagcacacacggagctcatggcctgccccacacctcagtgtgcatgggatatcccgccttagcccatggcattcccatccagaagctaaatcgtggtaaaatacacataacagc

SEQ ID NO: 505807 - DNA, 707 bp, Homo sapiens
agcgggttgccggccgttcccacccctgtgttcggtcggccgggtgttctgcaaggctggtcaaaaaggggaagcggcccagatatgttaagttctatggccgctgcagggtctgtgaaggcggcgttgcaggtggcctgatggtgctggaagacatcgtagagctgctgcgtggggcccagaagcacggcaagtgaggtgtacgaagccccacttggcgaggtgcttctcagaccggaatgggaggcccggctccctggagggcagctatactttaggaggcaatccccaatagccacgggatgactagtcggcactggtgtatcctaagtacatctcacagacaaacaccaggaaggattggtagcaccaaaagcaattttattaatccgtacccgtattgcccatattggcgttaggaagggaactatgcaattgcgaatcacaaggaccacgcagcaccacacgggaatccttttgaactggttggtagagaacagcgcattcacaaacgtccattgtgacaagggtcaattcggcgcacaacgcatattcgtcaccttcagagcggggcacatctttaatattaccacaaaggcgtcctcccataaagccggttttccaagaaccaccaggataatttacgaccgcggtcatgacattgcggacccaggtaaccttcaagttgaaccacctttgaggcctat

SEQ ID NO: 505808 - DNA, 1751 bp, Homo sapiens
tattacaacagatcttttaatgactatttattaacataaagatggggtggtttgtgggaacaacatcttattctctttggcacacaatttccactaaaattttcaagtggtattaaatacacgtgcaccgaaacataacgtccgtggtggtccgtggtcacacaattaagaggctcccatgaacatacatacacccccctcccaagaccccccacccaagagcctcacaattctgtgcggcagtgggttccgagcgcagaaacacatcagacacagagcgcccagaaaatacaacacagagaaatcaccagtgagcacattaacgacagagagtgttacacagagacacacacgcgcactaaggggtatgtaccacactcacatgtgcgggtgtctccctcacaccacacaaacacagacatatccacacacagtgacacagaagacacacgtgggacagtgacaactcccagacacagtgagtccacaacacacactacaaataggggtgccgcacacacacgagtgcgcatgtcatccagaactgtgcgtcgctgtctcacacacacatctcacaaaccattgagaggggcggctcacacaccactctctcacacacaacaccagagccggcacacacggagacagccacacagcatcaacacggaggcaacacgacaacacacaccaccacatccaccgatctcaaccacaccacgccgtcgctcacaacgtcatcacaacgaacgactagtagagaaggagcacatcaccctcccaagcacccaccccatccaacccgcacgctggcgggatacataatcaagcatcaccacgcacgaaaaacgatcaacctgatcaagcaacaaccccgatctggtggcgcgacaaaacacaccaccaacaacaacaccacgcgtggctgggcgtcgcgcacaccccaccagactgcacgaaagagcaagcgcctcgcacgcgcacagacagcgagagacgaccgactacaacaccacccaaccagacgactagctggtcactgcttgtcctgaggggcggacacaaacaacgatacctcacgccgacaggcgacgcactcaacacacacagacagacacgaccggcgctcgctaggtagcacccaccctgggtgggtgtcgaccccaccatgcaaggactggcgccaccaacacaaagaagtggcatgtatacaccacgctcccccgaccccccacacagagaagaaagcgaacgacacactcatccccgcaaccttcctgtggacagcacaaacacagccaacacccggggcgcccaacacacacacacaaagcaagtgagtgtaagacacgaggtggacacataccaaccaaacaaaccaagccactaatcccacacgaaacacccacggcgtgatgcctccccatacaagaagctcactccaccgaggagtaaaacccatcttgaaggccacacaggctaggccaccgataacagacaccgtggaccaagcagcacacaacacctcgacgcacaacagaaacaaaaaatgccgacacattgagacccgcgcaagcctcccccacactaccactcaatagggaggacagagtggagacacgcatgaggcgaacaacactaatgccgttgggcacacacaacccaaatacacaaaaaagaccacagactagaagaactccagaaccaacagcactcccagcgtcagacacaactactaacaccccaagaccgac

SEQ ID NO: 505809 - DNA, 411 bp, Homo sapiens
  misc_feature (340)..(340): n is a, c, g, or t
gggtagctgggactacaggcgtccaacactatacccagctcatttttgtgtggtggtttttttgttttttgtttgtttgttgtttgtttttgtagagacagggtcttgtcatgtcgcctgagctggtctcgaactcctgggcttgagatactcccatcttggcctcccaaagggctgggattacaggtgggagccactgcacctggctggaactggtttttgtatgagatgtcttactggtggcttttcctaggcaaagggaataagatctcgagttcctactggaacctaagtgttagagatggggattcaggttaaatgagtggatgtgattacctgngcaaagcatgaggcatgcgaaggaatgggtaaagaatggctcttgagcagaatcagcctttagtggtgaaa

SEQ ID NO: 505810 - DNA, 776 bp, Homo sapiens
ctggagtggattaataacaatggaggtgccgcggccatgggggacgcttagctccatcacatctcaaatcgaatttagtgagattattgataattctcacagggattctacgtttgtcccgtggagccccaagagatttaagctagagtgaatattgccattccgcagttgtgcaatgccagaatggagatgatgctttataaaaacagattctcttgatattagctcttgtagactcaaattatgttgtccttgaaagggcagtaggtctgtgggaggcatccgggcctctctgtataatgctgtcacaacttgaagacgttcagaagctggccgccttcatgaaaaaatttttggagatgcatcagctatgaacacatcctaaccaggatatactctgttcttgaacaacatacaacgtttacaatgtaacttggggatggctactaataaagttaaccacagtagtgttttctcgaaatgaacgatgttttgattgccaggattgcttcatttctttgaaatgaacaagcaggcgaaaacgatccacaaatcttgttaacagctggtggggacctaaatgtcgaccttaagttctgacttgaactggaagcattttaagaaatcttgtagctttttacttaacaaaattccccgcgtattttgccttttgctgcgtacttttagctagttaggattttcaaacttgccctgtggactttaataacttgcaacgtttgcgaatttaacttaatttctagggaagtcatggggac

SEQ ID NO: 505811 - DNA, 954 bp, Homo sapiens
gtctaggaccttgttcagtccatatcctagaaaggtggctacagattcgattctgtgcttcctagtagcaaaagcaaaaaagggaaataggatccgtttcaaatgccaaacatttagaattggaaactaatcagttatttaaggagaagcagatttttttcctggtactggaccccatgcaaaatttctttcataatttctttttttttttttttggaagacgggagttccggctctggtcccccaggctgggatgtggcagtggaccgcgatctcagctcactggagaacctctggcctccggggtccaaggcaattctcctggcctaagcctcccgagtagctggggatccacgggcactggccaccaaacccagctaatttgggtgattttcagtcaaacgatgggggttccatcatatgggtcaggtgggtctgggagctcctgacctcaggtgatctggcctggcctgggccacccaaagtgctggggaaattacacggtggtgagccacggtgcccggggctcataattcctagtaagaagatgctagggatatgataggcatggcctcaaggacttgatcaacaaagttatatttcatggttttaccatagccctttatggcataaccaatccaaagcatcatcagagtgttatcatacatatatcgggggtacagaggtaatccttgggtaagactccagaatttctggaaattggttgacaggattggtatgctaagaccatagtaatattccggtaaatataatctgggaattgggaaacacggtgatatcggggttattcaaggcggaaacttcagttgtaacatgtaagggtaatggcaactctaagttggaataaagagggtggattaaagtcctgtcttgaagaaggtagagtaggggaataacggttaaagggaatggagcacagggtatggcagagaa

SEQ ID NO: 505812 - DNA, 627 bp, Homo sapiens
ccagacaaccttagtccaaagcacatttagccaaagtaaagtataggcgatagaaattgagaacctggtcgcaatatcatatagtaccgcaagggaaagatgagaaacttatagtccaacgcatacagtataggcaacggactaaccccgtatagccttctgcgagtaatgaacttaagcgtagtaaataatctttgcaaggagagcctaaacgctagagagcccccgaaaccagacgagctacctaagaacagctaccaagagcgcacccgtcttatgtatgcaacaatagtgggatagactccatagggctagaggcggagcgaaacctacccgaagcctggctgagtagctgggttgtccaaagactacgaaatccttagcttgcgaagctttaagggttgtggcccacacgtaatccccgtcttacaagtccccctttgggtagaaggtttaaaacatgggttcaggatccgagagagggaggggagaccaagtccgtcatttctgggatacacaacctaagggaaagatgacacacacccatttgattagccaagcaggcaggctacatataaaaacttgctacagcgaacccccaaacttaagattagcgggccataaaaa

SEQ ID NO: 505813 - DNA, 209 bp, Homo sapiens
ccgccagaaagggagtaggttggccacgctgtaacagtcttgagagttacatgttgcagtttttattcatcatagacttaaaaaaaatttcccacctctgtcttaacgtgtctgcctttgctcacgtatccgtgcttacctggtcaatctacttctctttatcctacatcgacgtttctgccctattctggttggggtggatccctcta

SEQ ID NO: 505814 - DNA, 380 bp, Homo sapiens
gtgcatagcctgtggaagccactcacggtactcagccagcaggtatataggggtaattcttccaagcagccagcaaggctacataggcagtcagcctatctctgcaacccagggctacgcagcaaggctctaccgtacaggggctagcagcctaggcccacgtacttcagcataggtgccggggctaggacagcaagacaggctccgcgtatgacggccagctatgcggaaagacctgccctatccagacaggaaaccggagcaaacgtgcttgtaagcgggtcaattcccctactggaaaaatccactctcgataggcgcgggagccggccaggcccacgacgatagaaccacgctgggccccggtgacccgggctacg

SEQ ID NO: 505815 - DNA, 455 bp, Homo sapiens
  misc_feature (58)..(59): n is a, c, g, or t
  misc_feature (92)..(92): n is a, c, g, or t
  misc_feature (109)..(109): n is a, c, g, or t
ccaaaccccacagcagtcaacaatttgtttatctgggtagatgtcctgcactacaccnncaggccatatcttattacaaagctgttaggaanccctctcaggaaccaanttatactgtcgattccttcctctctctgacttgtaatgttaacagccttatcaaagaggaactagctgggcgtggtggcccatgcctgtatctcagcactttgggaagccgagatgggcggattacctgaggtcaggagttcaagaccagcctggccaatgtggtgaaaccccttctctactaaaaatacaaaattagccaggcatggtgacttgtgcctgtagtcccagctactcgggaggctgaggcatgagaatcgcttgaacctgggaagtggaggttgtagagtgagctgagatcacgccattgtactccagcctgggcaacaagagtgaaactctgtccc

SEQ ID NO: 505816 - DNA, 185 bp, Homo sapiens
aattcaagcttctaacgatgtacggggacatgatttgaggttgaatagcttcgtgccgaaaccatccccccacccccatcccgctaccccgagtccgtgaaaaattgtcttccgtgaaaccggtccctggtaccagaaaggttggggaccactggcttaaaataccaataaatttttgaacctta

SEQ ID NO: 505817 - DNA, 278 bp, Homo sapiens
cggtgggtttcattgccagaaggtgagcaggatagagaaagagactggtgagtgcctggttggataagaggattgaggcagattacgatgcccgaccaggtgatcctgagtcagcactgattctgtctctgggttagtttaatacgggaaagggttccatccaagagcccaataggactcctctcgcaaagctgcataggatagtcaaacttataggggtggtggagggtcgtttagcaggctaggagtactgcctatgtatctgcaaggaacccacg

SEQ ID NO: 505818 - DNA, 972 bp, Homo sapiens
ggcgctatgacctggtgcggctgttgggagaagctggtcgagcctggaggtccggcatggacggagcatgcattggggatgatacctaggcgcttaatggaggtctgcctggtcgctggtgctgaagaagtggggcacgcccgaggaggcctccaggaggggccgggggactcaggacgtctcgggccaaggacgcctgtatcttgcgcttgtccacgccagtgacggggccgcctgtgaactaggacgataggacagttccaagttacatggacattcgtgcggatgtccaggatcagttggcccatgggactggtaccctgcagcatgcattggaacggcacgatggtgtcatgccagggcgcgagactgcgcctgtccaggaattgggatcccacggaggccctcaggggaagcgcgtttgatgggacccgtcgaaggaactcttggaaccgctcgatccatggttttgacgcaagggcacgggtgccccgcttcggcccattgtgacttacagaacattcccttgaagacccaaagaaaggggggccccgttccgcttcttgggcttgggccctgggccatagcaagcaggggggaacttggacaacgggggttagggcacggccgggaatgggggcaccttttggcttcggacgggagcttatgcgacataatgccgggcggtcaaacactcaatctccgccaattcaaatcgcggaccagacggacatacgaagcacacatactggacacaccgccgagagccataaaggaccgaatcagagacaactaggaccgcaatggcataacgtgacaaccaaaagacaacatgaacacaaataggtacaaccacacaacaatgcacacacacacacgaccccgaacatctactagacacccagacactctcaagcgcacacgggacacaactgtatacacagccgacagtagtgagcagcagcacccctc

SEQ ID NO: 505819 - DNA, 1256 bp, Homo sapiens
  misc_feature (770)..(770): n is a, c, g, or t
  misc_feature (776)..(776): n is a, c, g, or t
  misc_feature (866)..(866): n is a, c, g, or t
gcgaaatctgtcagagtaggagttgcagcagctgaatactctaagcaggctagtattgagctgggtgctcgtactgaggtcacatcacgtgctggaaagactgctaaacgtccgtgggagcatactagtgttgtgcgtgattgaactgaagcaggtaacgttcaggttgcggacgccgcctgagttgctctatcgtcagttgcaagatcagcgagcaacaaggcaagcttggacatgacacgcgatatgcccgttggagtggtctttaattatgggagcgatgcttgccactgcgattatagtacctcatccgttccgacaacaggacctgtctgactggcagagagcggtttggcatagaataacacaccacctagcgtctctgtgtctgcaacgagtgtctctgctcacgggtgcattgtgtggcgcctggcgccaatattctagccatgctgttgcaatatgccctaggtgagtgcgagcacttcctggactcgctacgcagataccacacaatcgatagatccttgtggagacacactacgcatgcgaacattcctctgtctcctatggcgcatttttccagcgaaatcacgcaatttccgagatgttcgaaggctatctccttaccggtcgttccttatccagtagcggtccactgcaattgcaacagtaaagcgtagggaagcccgcatcgttctacatgggcccacttgtatcaatgtaccattgggttacccccagcttgcgagttccctcttgtttgagcnactaanttcataggccgcaacattacaaatttaagcccaatacgacacacttaattctcttgatcatgcgatggacagatattacccagagttgtnaacctggttaagagccttgtggccgttacggacaccgccaagtctggggcggacgccttacatgtcccccgatttaccttaacagaatctcccgaaggaaaccgaacggcacccccccattagacgccgccctggctttgccaacacgttatcactttgactcgctttccggcagtgatatatcataggcacatctgctgcctgggagcggtaacagcgccccggaacacttggcaactcgtaggaaaccactctatcgccacacagcatgggtcgcgtcctccatcactatatccgacacacgactattccgccatttcacccctcgcgccataccgtccacaacctcacaaccatcatcgcgcgcgacagcaatgtgtgcttaggcac

SEQ ID NO: 505820 - DNA, 353 bp, Homo sapiens
gccatagcgacacgtacgggtagtggtgctggtggccagaggcttaagacagctagaaaaggagactttcaagtgcatcattccacaagtaatcattacctactatgtgaattattcagtgcagaaatttgaatggtgaatggagggacacattgttcctgaaggctgtcttgagcagcatctctttcaaaagctacaagagcttctctaaatatagttatgacacttttcaaagctgacaattctacaactctgttccttcaaactctgaggcttgtccttttataggtttcatttcttaaaaaaaaaaacctttgaagagcaaatgtactaacagtgtacggtgtcgctat

SEQ ID NO: 505821 - DNA, 186 bp, Homo sapiens
  misc_feature (52)..(52): n is a, c, g, or t
  misc_feature (145)..(145): n is a, c, g, or t
  misc_feature (155)..(155): n is a, c, g, or t
atgtagttttggtgttcacagactgcaaccctggacagagcgcagcagtggncacaagagcgaggagagcgagaaaagatgaacggcccttttaaaagattggaagccctttgagctacttcttacaaaattcttactcctgggngccaaacctncaaaaaaagaacagcaagtttcatcaagcct

SEQ ID NO: 505822 - DNA, 337 bp, Homo sapiens
  misc_feature (188)..(188): n is a, c, g, or t
  misc_feature (218)..(218): n is a, c, g, or t
  misc_feature (223)..(223): n is a, c, g, or t
  misc_feature (229)..(229): n is a, c, g, or t
cacagccagctggccctttcttcagtatcctgggactgaaagccttaggtaagttgccttgtaggtaagcggcctaaggggtgtctaagtacaaaagtgacccatttagagactgtccctgaaaccttgtacttccccccatgaggaaggaacagcaatggtgtcagtatccaggcttggtacagagngcttttctttttttttttactttttttgtnttgtnttttanaagatgaaataaagactcagggggagaatggtttttttatggggagtcaagtttggggggtccttctccacacccactttgtccatttgcaaatatattttggaaaac

SEQ ID NO: 505823 - DNA, 717 bp, Homo sapiens
  misc_feature (109)..(109): n is a, c, g, or t
  misc_feature (165)..(165): n is a, c, g, or t
  misc_feature (200)..(200): n is a, c, g, or t
  misc_feature (206)..(206): n is a, c, g, or t
  misc_feature (211)..(211): n is a, c, g, or t
  misc_feature (394)..(394): n is a, c, g, or t
  misc_feature (414)..(414): n is a, c, g, or t
  misc_feature (452)..(452): n is a, c, g, or t
  misc_feature (530)..(530): n is a, c, g, or t
  misc_feature (623)..(623): n is a, c, g, or t
caggaattcggcaccaggccggatgccccacacaccgacagtgtcataccaaagagctgagctgcttcggggccatgcagccctcctgccagccccctgcccttttctngccctgtctctgaaccttcagaacattgatccttgccgcagcccactagccagagnaacagagaagaccattcccctgcctgtcctgcggncctgtnttctnagggtctctgtctggggttggctctcttaaccctttctctgctcccagactgcctcaccagggaaggttggaggggcctccctctggcttctgcatctgcgccagcaaacatcactgtcgctggtctctcatgacttaactggcgttcctctgctgctggcttgggcttctcctaaagctcgngctctcctgtgcttctgagntgctccttgggcaaatcttcaagctccttcttggtttnctcaatcctctaccctgtactctccccaaaccatgggtccttaggcaccgctcttgtcttctcattggccaacaatanggaggggcaggggtaaggggaactgaggataagggtggggaaacaaggtgtccctgagggctctgggggcttcaggggaagaggaattacttntggctcttttaaaggcgctaattccaacccaggggctctttggtttcttgctggctacacgttggtagggtggtctttggcttggttttgtccg

SEQ ID NO: 505824 - DNA, 127 bp, Homo sapiens
gagcatccgattatggatctgggtacctgacaacctgaaataagcggaaggagcgccagcgctattacaacccaggcaatcctcacaacgtctacatgcccacgagccagccgccgcacctccctac

SEQ ID NO: 505825 - DNA, 371 bp, Homo sapiens
  misc_feature (1)..(1): n is a, c, g, or t
natcccgggtttatcgatgccacctaggattatgaaactgagctcaatctcaaaattaaagaactgtactataggcggggagcagtggctcacgcctataaccccagcacttggggaggccaaggcaggcaaatcacttgaggccaggagttcaagaccagccgggccaacatagtgaaaacccatctctgctaaaaatacaaagattagccaggtgtggtggctggggcctggaaccccacctacttaggaggctgaggcacaagaatggcttgaacctgggaggcgggccatgagcctagatcgcaccactgcactccagctgggatcacagagcgagagtgcagtggcatcgataaacaccgggtacc

SEQ ID NO: 505826 - DNA, 129 bp, Homo sapiens
acgtgttgggagagagtagagaattaagacacgcgcatagtgaggctaagagcagccaggcaattgaagaaagcgttcaagctcaacacccactacctaaaaaatcccaaacatatgactgaactcacg

SEQ ID NO: 505827 - DNA, 415 bp, Homo sapiens
cctttcccctgggggggggctttggggggtggccccttggggggggttttccctttggggggggggcccccctgtggggggttttttttttttggggcccccccgggggggggggttttttttttttttttgcctttccccctttggggccggtttgggggtcccctcctttccccggggggggggtttctttgggggctggggcccccccccccctttttttttttttggggcccctttttgggggccccccccccttgggggggggggggttgtttttttttttggcccccccccccgttttgggggtttttttttttggccccttgggggttgggggggaatttttgggtttttcttttttcttcggggggggtttttcccctttgggttttttaaattttttcccccggta

SEQ ID NO: 505828 - DNA, 126 bp, Homo sapiens
aaatgagaacacctaataatatttcatagatgagagcagcaccgttcccgctcacctacgggtgcacccacccctttgatacttgcagagaccctacgactcagtggaatcaaacgtggagaggta

SEQ ID NO: 505829 - DNA, 1546 bp, Homo sapiens
  misc_feature (961)..(961): n is a, c, g, or t
  misc_feature (1141)..(1141): n is a, c, g, or t
ggagagagacactgtcgcacacataacctaaaagttagacttgaaaagctccagcataggtgtgactataccagtgtcttgtgagaggggtgctctctgcgtgttctgcgcgaggacgtagcatgggcgagctaggagcagagtctccgtggtcacgtgcacagcttacgtggcgcatcccaggagtcccaggtgattgcgtccttgccttctgggcatctctcgagttgagctttcacatgtgaggaaggggactcctaggcatgaagttgtaattctatgtgtgtatcttctttgtatgcacatatgtaccataagagcacgatgtctgcccttgtgagacgcccacgaggggaggcgaaggagggtccgcctgagaagggtaccattgcctccagagtgtgcaagcggggggacacaagcccactctcgtcgtgcgccgagggtgtacccatacagtgtgggtgtgccctctctctacacgcgtgcctcgtgcgcacacacgcgcgatatgtacgagtgggcgcgccatagatacgcgccgttgcgttgcgctccgtgccgcctttacggtagagtacatacaccgtgtgtacctccacgcgggtatatggtagggatttgtatataaccaatggatcctacgagccgaggtgagcgctcctaaacccatgacagtccaattcgagacctaaggaggaccgaaggatgccttcggaattgtgccactttggaacggcttgcacgggtgccattgcgcgccggcgcggggtgggcgggggccctcccccacgaaaaaacgtttagtcggcgagggggagtataaccccgcgtggagtataagcacccctcaaggggcagagcgacacggggaaggccccttaataatggtttccgcagagactatggatggacacatgccagcaaaaagggcacgggggttcctcccttaactcgtttngcatggagcgcccacatgggggtatgtcacctgcactcacgccacgcaccgtggtaaacaacatgggggtggggcagaaaacaagggctctgtcgccccctagtgaggggggagtccacccgagaacatggggggtccatgggggaagacccctaaccagcggcgccccatgcgggaacngcaacactctgggatggacgctcgtgaattaggacagaccctgggggacagtcgcgtagcgacacagagtggcgacgcggaaggaaatgcgaaaccgcggagagagaacacaagagcgcccctccgtttggcaccacgcacggataaactaattttgaaaagccgtgcaacatttataccaaaaggcagtgaaatgtgtacacaagagacgataatgagaggagcacacatatatcgtgggccgagcagactagccgacgaagaaacaaccaccactatcccacccaccatacatactaggggccaacaccactcagaccacgggcggccactaatagtcatgtgacacctcgaccagctgcgaaccacaacacgccactctaaaatacgtggaccacccctggt

SEQ ID NO: 505830 - DNA, 655 bp, Homo sapiens
gctgcaggaattcggcacgagggcatttgcctgtagtcccagctacttgggaggctgaggtgaaggatcactttgagcccgggaggagtttcagtctgcagctgcactgagctatgaagctgccactacactccagcctgggcaacagaacaagaccctgtctcaagaaaataaacaaacaaaaaaacccgaaagaatagaaaaggcactttgggaggccaaggcgggtggatcacctgaggtcaggagttcgacaccagcctggccaacatggtgaaaccccatctctactaaaaatacaaaaaattagccgggcatggtggtgggcgcctgtaaccccagctactcaggaggctgaagcagaagaatcacttgaaccagggaggcagaggttgcagtgagccgagattgcactgctgcactccagcctggacaagaatgaaattccatcttaaaaaaacaaacacagagactatatctctgtaagaagacaggtgcaggggggtggaagtggacacctgattttctcctatttagatataatcccgggcttaatgcacgacctaatgaggtaagtgaggtcttgacccacagaatccctctcaggaattcgcagtttaggcaagccacctttggtgggcctttttttcttgcg

SEQ ID NO: 505831 - DNA, 180 bp, Homo sapiens
agtcaataatgtttgatgtattttacactaacctgtgtagccattggaaagcataatgaatcatacctgagtaaaagtgttccgtataactacgggggagttctaattgaccttttaatctatcattattacccttgatcggtcgtttttgtttagacatacgttttctcctatctaggg

SEQ ID NO: 505832 - DNA, 194 bp, Homo sapiens
gaaaacaccatagtatctaaagactcaggaggaagcagaactattataaaccatccagaaaggaaagacagatactatactttctcatatttaggatgctgaaagcacctggtatgccacataaatacttagctgtctgttgcccacttcttcgtcaacttggcaagattattttaaaggcttccacttgggtg

SEQ ID NO: 505833 - DNA, 449 bp, Homo sapiens
  misc_feature (3)..(3): n is a, c, g, or t
  misc_feature (33)..(33): n is a, c, g, or t
  misc_feature (38)..(38): n is a, c, g, or t
  misc_feature (420)..(420): n is a, c, g, or t
aancgaggctgctcagaacccgtgaaaataatntatcntttaccgattgattcatcccaaacaataattgggtacacacctacatccccaggtatcggggaataaagagcaatgaaaagcaagtccccttgtccctcaaggagccttagtttaacttaaaagtgttctccctatttaaggccagtgagtggctcacacccagtaatcccagcacgttaggaggctgaggcaggagaatcatttgaggcccaggaatttgagaccagcctgggcaacaaagtgagacattgtttctacaaaaaaaattttttttaaaacttagcctggcacagtggtgcgtgcctgtggtccagctacccagaagactgaggcaggaggatcacttgggcccgggagttcgaggctgcagtgagctatganctggctactgcactccagcccgagcgaca

SEQ ID NO: 505834 - DNA, 783 bp, Homo sapiens
atgcttgcatcgatgttattcgtagagaggagcatacttgtacaaatatttggcactgtcaaaccagatgtacagttgtacctactgtggaataaagctccagtcatatagatgtgtgtcgatcattaatagtgaggccctctgctcgtagtgtcgccccagtctgctctcttacgcagaacgaagtcgaagaacatattcaagaatcttttgaagataggaacgtagatgttgaattgaatcacgtgtgccggtgtcccatgcagtttgcatgatgagtgactctctgctcaacgatttgtccattgacgtttaagccaaagaaagttacacgtcctattgacgatcttaatcctgggaatagagtagctatgtagagtcgcctctgaacacgttccagtctgtgtaatgctcgatcccagtaaaatcgtcactggcacgtgtatcttagtgtaaatcagtcagaggcttgggtaaactagtttttgctcgtgcagtccctaatctgatttcaatgaagcaccagtggctctagtgtgactggactcggcatccggcaaaaccattggatccaccgtggggttaccttgtattttgatccgtactggtgctcagtgcacccaggaaaactttacacaactggcagcgcacgcagaaactatccaaaggtattcacgaaacgcgcacaccccagcaagtggtcccgccacccggcatttgagaaccacattgccgcgcacaattgaacccgccttgaaccggccacaccaacatccttgggcc

SEQ ID NO: 505835 - DNA, 93 bp, Homo sapiens
aaggaaagactcatatcacattgtcgtcattgacacgtagattcggcagtcacactactgcatctgatctataaatgcgtgcatcgacaaaga

SEQ ID NO: 505836 - DNA, 500 bp, Homo sapiens
  misc_feature (170)..(170): n is a, c, g, or t
tacctatgaacgggacatactctccccagttggagtggtcccgcttaaccagacagaagcaaggtatatcttatatatgtggatggatgtctcatgtataaaatgtataaaaccaagtggtgccccaaccagttgggtcttatgtggccaggacctcctgagggctgggntcacaggcacatgcccttagggtgggcaaaataaacttcctaaagtggacggagatctctctcagatatggggggtccacagcaacacagggagaccccatttctatccaaaaaaaatttatctataaaaaaaccaacaacagtacaaaaggacaaggaaggtactcacataatggatgaaggggttcaatgcaaggagaaagattaactatccaaaatatacacacacccaagatggaaccatccagtttcataaaacaagctctaagagatctatagagatagcaatagggtggggagaggtccaatcccatggacagcattagacag

SEQ ID NO: 505837 - DNA, 1023 bp, Homo sapiens
attagtgctccagtgaatgatgaggcgacacaaatacgacggctgccgaaggcgatatcgcacatggctgcatgttgatgaccggagcaaaattgcactgggcgagcatgcattccatgaatttgaattgtgagtattggttccatcgatggtgagcgatccggatcatcgcgtgaaattcccatccaccaattggaggcaaaagagagtggtgccgcatataggaagctcagagcttgaggtcggaggtgatcatcgtgagtgtcaaaccaggaagtcgaagtagtgtcttcactcatcatctaccaaattgaagggagctggctcatcatgtaaaagtcatggactattggccttctttggtaaagttttggcatctggtcgctctgtttagccagccagtacacctcttcgcgagatgggctatcatacttcagtctactctttcactatatcgctataagagatcccctgatggtatcgctctattcgagattagcgatctacgtaccgaaaggatgaacttgaatcacgtccgagtggcgtggatccgaggagcatgtcaaggaagattactagatagggtcatgatctccatgactcagtcaggtgggaacagctggttgaccgattggtgcctttattgggacgtttagccatttttggaagtcttcaaagtgaacagacgcgctgggtggtgaaaggagattagtaactgatttcccacttgaacttgtcatttggtaccccaatagatagtcaggttgcgacaggaaaggttgcgcagcgcagaaatgacgatgatagggcgaaacaattggtataggaccctactatcagacctaatgcaggccactgggtcttgtctatcacaaaaaaaagaggaaaattttggtgcgcccggaggatcataacgtggtggtggccatggtatgtcgtctcgacgcgcaaggagtgtacaacccgcgggggcaacgaatctgtacactcacagccctacgcatacaaatcactcatgcagtg

SEQ ID NO: 505838 - DNA, 826 bp, Homo sapiens
  misc_feature (544)..(544): n is a, c, g, or t
atgacccaccaatcacatgcctatcatatagttaaaacccaagcgcctatgagcctctaacagggtgccctcttctagcgccttccttagatgtacgcgtccgcggccatagaccatgtgatttcgacgttccgacgtccgataactgctccatcgatacgtaggccttacataaccaatcacactaaccatataccagtgatggcgcgatgtaacagcgacgaaatgcacatagcgcaaggccgaccacgacagccgactctgtccaagaaaggccttcgatgacggggataagtccgtatttattagcctcagaaattttccttcgttcgcaggattgtttctggagccttttaccactccagtctagccccttagcgcaccctaattagagatgggcacgtggtgccgcccaaataggctatctagacctcggctaaagtccgctcttagtaagtccacatctgcctataaacatcattccggatagttacgtcgtctattccggagttctcgaatcgaccatgagccgtcactcagtagntgctaatagaacagcagtgccgaaagccaacattcagttcaaggctgctgactgtattagacacttgttacctggcgtctctattttttaaccctcctactaggccctcgagagctacttcgagtcttcccttgcacccaatttcgccgaggagcattctacgtgcatcaagattttacttggtagccacaaggcttccaacgggacttcacgtcatgtattgggctcgacttttacctcgatatcaggtgcatgcggccactaatattgcactttacatca

SEQ ID NO: 505839 - DNA, 275 bp, Homo sapiens
gaaaggggcccccccgcccaaaaagccaaaaggccccaggagcccccagcaaaattttttaaaagggccccttaaggtgtggttcttcccaaaaatcagttttagggttggggctaaccttgggggacccttttggggattaagcccccaggagggccagaatttgaaaattccttggggttgttctttttccaaaaaaaacgggggccgaaaagttggaagggggggccaatccctccctcccctcccaagttttggggggtgcctccttccca

SEQ ID NO: 505840 - DNA, 492 bp, Homo sapiens
tgaggcagtccccgaaaaaagttcatgcatgctgctccatcagaatccactcttctatggatatgagatatctcttaacacccacccatacagtacacagcacacagcaacagcacaccgctcatggagcagagcaccctccccacacaccaagtccactggcaccttgatcttggacttccagcctcagaactgtgagcaaccaatttctgttgtttataaatgacccagtctaaggtattttgttatggcagccaaacagactaagacacatggtctcatggtccagcccttacttgagatatgagcttcttattcttgttaaatgagtcaatcaagatgggaatgataattcatttactcttagaagtgggagaaatgaccacacctcagatgggaggtacaggacctgccaatactcagggctagtatcaagtgtcgcatagtattcctgggctcctgcatgaaggagcatcttaagcagcggcaaat

SEQ ID NO: 505841 - DNA, 220 bp, Homo sapiens
caaatgtgcacggagtgtgacgtgaacggacggataaacagacattgtacctacatcccaactggtaccggcacacggataaacagacatgtgcacctacatccatgaatggatggataaaccagacgttgcaccttaccattccgtcggacggcatggactcacaccagacgttgcagctacatccacgaacggatgaataaacagacgtggcacctac

SEQ ID NO: 505842 - DNA, 472 bp, Homo sapiens
ccatattccatacccttcttgccaagccagggactaagcagcccagaagcccagtaactgccctttccctgcatatgcttctgatggtgtcatctgctccttcctgtggcctcatccaaactgtatcttccgttactgtttatatcagaaccaggtattggttgggtgcaggccaatcccttattgacttagtataatggttggaactaaacgtcaccaaggtggcttctccttgcatgagagatggaaggcgtggtgggatttgctcctgggttccctaggccctagtgagggcagaagagaaaccatcctctcccttggtacacctgaagaacaacatcccctctgaaggctggggtgagaccctctcccatggtgcccgtgcctctgtgctgtgtatgtgaaccacccatgtgagggactaaacctccgccttggccgtataataaagagcctacccccaaaaaaaaaa

SEQ ID NO: 505843 - DNA, 354 bp, Homo sapiens
tcttctccgaaaaggcacatgaggagagggctctgcagcgctgagaggggcctgtaggacgtgtgggaccgagtagctagcagacgcactttaggtgcttataactcttcctgctggaggaggaggtggtggtgtacttaatggtggaactgccgcctccagacagaggctgaggccacccccaatgggctctggccagctgctggaactgaagccaactccaacgccaagaccaccgccataggagtagctgcttcctccaccctggcctaagccactgccgacaccactggcaccgccatagccactggagacggtggactgcaccacagagatgttgcctttcggagaaga

SEQ ID NO: 505844 - DNA, 396 bp, Homo sapiens
cagatcttcaccaaggccttcttcagatccaaggccaaggtgatctacatcgggccgaacccccgggtacgatgtggtctccctctatcattactccaagatcgccgggcagttacaaagacccgggcacacccgaccagttcctgagggacttcctcaaaggcgaagtgcagttaggctcctgattcgaacacattaagggctggcttcggatgaaaggaaaagacaacttcctatatatcacctacgaggagctgcagcaggacttacagggctccgtggagcgcatctgtgggttcctgggccgtccgctgggcaaggaggcactgggctccgtcgtggcacactcaaccttcagcgccatgaaggccaacaccatgtccaactacacgctgc

SEQ ID NO: 505845 - DNA, 482 bp, Homo sapiens
gactgctggccagacctccaagctagcccgccaggcctccatagagctgcccagcatggctgcatccagttacaagagttggtggaagccgggtaggttataggctcagtctgcggccaagactccgtcctgcaagactctttggcagttgcactgggtactggctgagttctggaaaacaggaatgtgagcagagtgctgcagatctccttgtcaggagcacctaagaactggcatgactctacaccctctctccttctgcaatgacctcgtgtcaagatggcagacccgcagagatgaatgtgcctggatacctgagtcaccaggtggaggaaactcccattgacatgcatcacactccacatatgaaacccttctttttctgccctgtcactggggttagggattattactcactgcaacttagcctagcattaagttgcttgactaaaacaccttcccataaatgtcgcttcatttcc

SEQ ID NO: 505846 - DNA, 1174 bp, Homo sapiens
  misc_feature (380)..(380): n is a, c, g, or t
  misc_feature (800)..(800): n is a, c, g, or t
  misc_feature (1151)..(1151): n is a, c, g, or t
ttgattcggtgttgtgttttgtgggggttctgtccacgatcgccaggtggttcgggggttccatatcgcggcttgtgagcctggactcctgttgggggtccccccctctcggctgaaccgggtattgggcgcaatttgagggtagatgaagataccagcgtgcggccccatggcatcaggacaaatcagggtgtgcctcccagttactaccccaccactttggtgctccgggaccaccgccctctgccctgggccccacgctcccatattctggagaattcggagattcaacactgcccatgatgataacgttactcaggtcgggccattctatgtgaacgtgctgaatgaggaaccgaggaaacgtctgtgtgagaacnttgccggccacctgaaggatgcacaaattttcatccagaagaaagcggtcaagaacttcactgaggtccaccctgactacgggagccacatccaggctcttctggacaagtacaatgctgagaagcctaagaatgcgattcacacctttgtgcagtccggatctcacttggcggcaagggagaaggcaaatctgtgaggccggggccctgcacctgtgcagcgaagcttagcgtcatccgtgtaacccgctcatcactggatgaagattctcctgtgctagatgtgcaaatgcaagctagtggcttcaaaatagagaatcccactttctatagcagattgtgtaacaattttaatgctatttccccaggggaaaatgaaggttaggatttaacagtcatttaaaaaaaaaaatttgtttngacggatgattggattattcatttaaaatgattagaaggcaagtttctagctagaaatatgattttatttgacaaaatttgtcgaaacttatgtatgtttacatatcacctcatggcctattatattaaaatatggctataaattatataaacaagaccagataaagatgatctactcagaaatttttatttttctaaggttctcataggaaaagtacatttaatacagcagtgtcatcagaagataacttgagcaccgtcatggcttaatgtttattcctgataataattgatcaaattcatttttttcacaggagttacattaatgttaattcagcactgatttcacancagatcaattttaattgcttaca

SEQ ID NO: 505847 - DNA, 247 bp, Homo sapiens
  misc_feature (5)..(5): n is a, c, g, or t
ggtanactggactcctctcaagacatctcacatacagtgcaagtgtgccccagctgattaaacattgcacctatgcaggtgcacttctttctgaagtaggtagagtagaggctcatgaacagtatctactataagatccctgcagaaaagccatcaagagacacacattctaatgccactgagagttggtctcttaaatctgaagattggaccacaaagctgtacagtcattctatttagacggtac

SEQ ID NO: 505848 - DNA, 199 bp, Homo sapiens
taagcagtgccccccaagtgactccagtgatatccttgacgtgtaccattcttcctgatccatggagggaaaaacccattgcagcaaagtatggaatttaactcaaggctcaacatccacgggtttaagttcctaacattcaccttagagatttgcacgtactgaccaactccaggatgctacggcatggacgggggac

SEQ ID NO: 505849 - DNA, 739 bp, Homo sapiens
  misc_feature (153)..(153): n is a, c, g, or t
  misc_feature (547)..(547): n is a, c, g, or t
aaaaaaaaaaaaaaaaaaaaatccaccattgaataaatattggcaggcctacatccaggggcacagatggatgtttctgtgggtctctgtgtgtgcaggatttcttccacactatgactgatcagggaaaggggtgggtttgggctaatttanagatcacaggcaggaccaacatgtcaaggcctttcacctgagacacaggacattatgaattctcctaagtgtcttggcagatggtgatagtggcaggaacaaaaccaaatgatctatagctatgtttacagtgagaattattcatatttcattcggtagctgggactatgatgggcaagcatgccactcaagcaagtgcatgccctcttaatacagccctcctcagtcttggattcacaatcttttacatggatttctaagttttcataaaggttcttttgtcagggcataactgctgtattttcataactagaagttgtgggtagagaacctcctattctgccatcttgctatgtcactccccttgtatgtttcactttctgatatgttctangccaaattatctgatttcaaattcaaaatttctgaaataaaatgcccaagtttacacattgtgtaataagtacatgtattgacatggctcattttcattagagcattttattaattattgagatgcattttcttttactgctttacatttcatgccaaagattcaaaatcctggctcttcaataagaacata

SEQ ID NO: 505850 - DNA, 1277 bp, Homo sapiens
  misc_feature (380)..(380): n is a, c, g, or t
  misc_feature (800)..(800): n is a, c, g, or t
  misc_feature (1158)..(1158): n is a, c, g, or t
ttgattcggtgttgtgttttgtgggggttctgtccacgatcgccaggtggttcgggggttccatatcgcggcttgtgagcctggactcctgttgggggtccccccctctcggctgaaccgggtattgggcgcaatttgagggtagatgaagataccagcgtgcggccccatggcatcaggacaaatcagggtgtgcctcccagttactaccccaccactttggtgctccgggaccaccgccctctgccctgggccccacgctcccatattctggagaattcggagattcaacactgcccatgatgataacgttactcaggtcgggccattctatgtgaacgtgctgaatgaggaaccgaggaaacgtctgtgtgagaacnttgccggccacctgaaggatgcacaaattttcatccagaagaaagcggtcaagaacttcactgaggtccaccctgactacgggagccacatccaggctcttctggacaagtacaatgctgagaagcctaagaatgcgattcacacctttgtgcagtccggatctcacttggcggcaagggagaaggcaaatctgtgaggccggggccctgcacctgtgcagcgaagcttagcgtcatccgtgtaacccgctcatcactggatgaagattctcctgtgctagatgtgcaaatgcaagctagtggcttcaaaatagagaatcccactttctatagcagattgtgtaacaattttaatgctatttccccaggggaaaatgaaggttaggatttaacagtcatttaaaaaaaaaaatttgtttngacggatgattggattattcatttaaaatgattagaaggcaagtttctagctagaaatatgattttatttgacaaaatttgtcgaaacttatgtatgtttacatatcacctcatggcctattatattaaaatatggctataaattatataaacaagaccagataaagatgatctactcagaaatttttatttttctaaggttctcataggaaaagtacatttaatacagcagtgtcatcagaagataacttgagcaccgtcatggcttaatgtttattcctgataataattgatcaaattcatttttttcacagtgggaggttacatttaagtgttcaaattccaggcactggttttnccacaacgaggatcaacttgggtaatgcttaacatttttaccaataaaattaattcgtggaggttaagaaaaacacaaaaaagaaaacagtaaaataactacaagaaaaagagaaggtg

SEQ ID NO: 505851 - DNA, 104 bp, Homo sapiens
atcagtgcacacatacgcgtgtgctgcgtccctccagcaacaggatcaagaactggctggcctgaagcagcaggccaaagagaatgcaggcccagctagtgggt

SEQ ID NO: 505852 - DNA, 646 bp, Homo sapiens
ggcaaaatttaccatcaacctctacatcatcgctacgagattagctctcaccatcgatctatctactatgaagctcataggcgatagaaatagaaacctggtgcaatatgatatatgatagccgtcaatggtgaaatgatgagaaaatttataagcaaagcatgatatatcaaggattaatgactcctaatatgcattctgcataattgaattaacgtagatagataagcgttgtgcaaggaagagcgcaaagctaaagaaactctgatatgaagatgagcttaactaagaatagttatatgagcacacccgtctatgtaggcaacaatagtgggcataagattccataagtgtacgaggcgagaaacactatcctgagtccatgtgctcgtagtacgacttggtttagtcctaaggatagacatcttgaattcatacttctaaattatgcaggagagaaaccgtataaatctctcgttgtaagttgaacgtggtgaagtccgaaagaggaacaggtcttatggatacgtaggaagaagaacgtgtgtagagagagtaataaatatttaagcacgacatagtaggcctaaatagctaggtcacccaattaagaaagctgttcaaggctcataagcacaatatttag

SEQ ID NO: 505853 - DNA, 109 bp, Homo sapiens
cggtaccttcttatgcaaggcaaggagttgtgttaaggcgagcggacgatagaaaaagctacctatggagctgcgcccctacgcaggtacttggccttgccatatgcaa

SEQ ID NO: 505854 - DNA, 508 bp, Homo sapiens
  misc_feature (102)..(102): n is a, c, g, or t
  misc_feature (108)..(108): n is a, c, g, or t
  misc_feature (129)..(129): n is a, c, g, or t
  misc_feature (153)..(153): n is a, c, g, or t
  misc_feature (156)..(156): n is a, c, g, or t
  misc_feature (221)..(221): n is a, c, g, or t
  misc_feature (231)..(231): n is a, c, g, or t
  misc_feature (246)..(246): n is a, c, g, or t
  misc_feature (254)..(254): n is a, c, g, or t
  misc_feature (328)..(328): n is a, c, g, or t
  misc_feature (357)..(357): n is a, c, g, or t
  misc_feature (405)..(405): n is a, c, g, or t
  misc_feature (464)..(464): n is a, c, g, or t
  misc_feature (467)..(467): n is a, c, g, or t
ggctccggctaactctgaggacacgcatttggtggacccaaagactgatccgtcggacagccagacggggttagcggagcaatgcgcaggaataaggaagcnacctgnaacccgacgattcttctactnaaaacaaaagagccaacagaacanaanaaaatgtttcagacggtccccaaatgcccggttctgtggagcagacgcccaagaagcctggcctnataagacgtnaaacgtaaacagctngaattaanaatatgtttccttggttatcagatcatcactgcttgatgaagcaaggaagatatacatgaaaattttaaaaatncatatcgctgacttcatggaatggacatnctgtataagcactgaaaacacaacacaatacccttaaatttaggcctnttaaatgattgcctttaaaacgttggatgtagcattatgcaaatagggttttcctatgnttnatggctacctgggatggtttacctttatgtgcacttttggg

SEQ ID NO: 505855 - DNA, 513 bp, Homo sapiens
actagcctttgatccttcctgtttaaggagctcagcatatagcttcacttccctgtcattcatcagaattcattctcagattggaattgtccagtcttagagtgatttttgtccccagtgacacttcccttatatccgtgctgacacaggttcaggagaacaggtcgagtcgaaatcctggctgttccgccttctaacaagctgcttcatctttctgtgcctcacacatctataaaatggagctgggcatctgtctccttcagttatggtgagaattaaaataaaaaacacaaagcacttctaagaaagtacaggagaggccgggcacgatggctggcgcctggagtcccagcactttgggaggcagagcctggcagatcacctgaggtcaggagttcaagaccagcctggccaacatggtggaaccatgtttctactaaaaatacaaaaattggcctgccgtggtggtgggcacctgtattcccagctactcgggatgctgaggtgcgagaa

SEQ ID NO: 505856 - DNA, 660 bp, Homo sapiens
  misc_feature (509)..(509): n is a, c, g, or t
  misc_feature (613)..(613): n is a, c, g, or t
  misc_feature (660)..(660): n is a, c, g, or t
gccacgtcagaaggcgattattctcggtagctttagcggcagcacgcccaatgattatgacgcaggttacaacctggagtcagtgtacgcgtttttgcgttcccgcctgtcgattccactcattaccggcctcgattttggtcatgaacaacgcacggttacgctgccgttgggcgcacatgccattctgaataacacccgggaaggcactcagttgacgattagcggtcactgagtcgttttaccagaacccgtttccccggcgacgatcaccacctggtgatcacgaatcgcttcgagaatgtcctgttttttctgactaaccggtaaattgtcaggataagtaatttccggtcgtgccgcttcacgcagcaggactttccctgccgcctggtcaatctctttcgccatctcctggaaaatggcctgttgtgcatcaggatttttaaccttcttcacgccgtgcagacggcgagaaaaggtcaatctttgttggtctgtcataacgntagtgggcagtagtcttgctgattaactttcttttaaatgatagatttagagtaccacatcgcgcctttctatgcgttgttaataaattcgaacataagcttcngattcattgcgctatctctttggcaggcatgtgaataaagtgccaan

SEQ ID NO: 505857 - DNA, 510 bp, Homo sapiens
accccgggctgtacgaatttggcacgagagcaatcaacacgtgattataacggtcactgtgaacctagcacagacgtgcgcataaggaaaggggaaaaaacgtgaaaggagcttgggaaatattaacccggctgtgcacagagtttgagaactatgtggccgatatcgaggtggatggaaagcgcgtagagagggctttgtgggacacaggttgtcaggaagagaatgaacgcctgagagccctcttctatccagataccggtaggatactgaggcgtgtttccatatacaggcctgagaggttagaaaacatatccaggtggagcccacaaggcaaggatttatgtgccaacgtgcccataaatctgtgtgggaataagaaggaacttcagaatgatgagcacacaaagcgggagctagcccagatgaagcacgagccggtggaacctgagaaaggcgcagatatggccaggtggcgctcttggggacatggagtggttaccacagccc

SEQ ID NO: 505858 - DNA, 99 bp, Homo sapiens
cttattctgacccatcatttgtcaacccggagcctctttttttttctttccaagaaaggctgagttctacattgatgtgattgaagtccctccgtcagg

SEQ ID NO: 505859 - DNA, 263 bp, Homo sapiens
  misc_feature (9)..(9): n is a, c, g, or t
  misc_feature (25)..(25): n is a, c, g, or t
  misc_feature (89)..(89): n is a, c, g, or t
  misc_feature (95)..(95): n is a, c, g, or t
  misc_feature (114)..(114): n is a, c, g, or t
  misc_feature (140)..(140): n is a, c, g, or t
  misc_feature (256)..(256): n is a, c, g, or t
ggaatagtnctttaatctcgcttgnttttcataaccttgatatttgtagttgaagccatgcattttgtggaatgtctctcaatttgggnctgttngatatattctcatgatganattcacctcatgcattgttgtgaggnatgccatagaaaagatgcttacggaggcacatgctgtcagttgctccgtttctggtgatgttaacattaatcacttggttaagttagtgtctataaggttactccactgtaaagtnatttttc

SEQ ID NO: 505860 - DNA, 725 bp, Homo sapiens
gggcagacccaagtgccggcggcggagactgcagtggagccagtaccggctgtagtggccgtgggccgtggcgggagagtcatgtcagagccgcagccgcggggcgcaaaagcgcgatctctaccgggacacgtgggtgcgatacctgggctatgccaatgaggtgggcgaggctttccgctctcttgtgccagcggacggtggctgtggctgagctatggcgtggccagctcctacgtgcttggcggatgccattgacaacaggccaagaaggctggagaggtgcccagcccttgaaagcaaggcccgcagccgcccggggttggactgtgcgctgtgcgtgcgacaccctttgtagtggcaggctctagcgtctgtggccatcccgggccttcaccatcaacccgcgtgtgtgctgcccttctctctatgtccgtgggcacgtgcccacccggtggcccctggcttgttccgcaagtggaccaccaccgcgcttgggcttgtagaccatcgcccatcattatccaggccccattggaacaggtcgggcggcattgccctccttggactcccagccctggcgcaagctcgtaaccccgaacagtggggggaaggcccaaggttcactcctgatcaatactcgtggtaaccttggcttggtgcaattcgggcctcctggtttcattgtcaacgcttcctaactcttgccgaggaatggtggcacc

SEQ ID NO: 505861 - DNA, 461 bp, Homo sapiens
acacttcaggagttcatccaagcagtcaatcggtcattttttataggatccaatgaaggctttcaaaagtgattcttgagtctgttataacaactggtagtgaatgaatgcatgaatgaatgaatgaatgaatggatttttcactgactgattgattgactgagaatctcactctgtcacccaggctggagtatgttggtgcaatcacagctcactgcagcctcaaactcccgggcccaagcaattctcctgcctcagcctgccaagtagctgggattgcaggcatgtgccaccatatcctggtaattttgtatttttagaggagatggggtttctccatgttggtcgggctggtctcgaactcccgacctcaggtgatctgcctgcctcagcctcccaaggtgctgggattacaggagtgagccaccaggcccgactggagatagctttttcaattttgt

SEQ ID NO: 505862 - DNA, 290 bp, Homo sapiens
  misc_feature (19)..(19): n is a, c, g, or t
  misc_feature (160)..(160): n is a, c, g, or t
  misc_feature (232)..(232): n is a, c, g, or t
  misc_feature (249)..(249): n is a, c, g, or t
aattcggcagaggtgcctncccccagaggtggagcctacagaggcaggcaggcctccttgagctgtggtgggctccacccagttcgagcttccttgctgctttgtttacctaagcaagcctgggcaatggcgggcgcccctcctccagcctcactgccgncttgcagtttgatcttagactgctgtgctagcaatcagccagactccgtgggcgtaggaccctccaagccanttgtgggatataatctnatgcccgtttttaagcccatcggaaaacacagtattcggtt

SEQ ID NO: 505863 - DNA, 128 bp, Homo sapiens
  misc_feature (111)..(111): n is a, c, g, or t
tttttcattttctatcattaactatgtgcctgatggcaactgtgacagcataggagagacgggcagctccaggcccactccttaacaggtacatcctaagcatccaccccntcatcctctgcccactg

SEQ ID NO: 505864 - DNA, 509 bp, Homo sapiens
gaggatgcagttttgttttggaagctctctcagaacaaacaagacacctggattgatcagttaactaaaagttttctcccctattgggtttgacccacaggtcctgtgaaggagcagagggataaaaagagtagaggacatgatacattgtactttactagttcaagacagatgaatgtggaaagcataaaaactcaatggaactgactgagatttaccacagggaaggcccaaacttggggccaaaagcctacccaagtgattgaccagtggccccctaatgggacctgagctgttggaagaagagaactgttccttggtcttcaccatccttgtgagagaagggcagtttcctgcattggaacctggagcaagcgctctatctttcacacaaattccctcacctgagattgaggtgctcttgttactgggtgtctgtgtgctgtaattctggttttggatatgttctgtaaagattttgacaaatgaaaatgtgtttttctctgtta

SEQ ID NO: 505865 - DNA, 1920 bp, Homo sapiens
gaggatgcagttttgttttggaagctctctcagaacaaacaagacacctggattgatcagttaactaaaagttttctcccctattgggtttgacccacaggtcctgtgaaggagcagagggataaaaagagtagaggacatgatacattgtactttactagttcaagacagatgaatgtggaaagcataaaaactcaatggaactgactgagatttaccacagggaaggcccaaacttggggccaaaagcctacccaagtgattgaccagtggccccctaatgggacctgagctgttggaagaagagaactgttccttggtcttcaccatccttgtgagagaagggcagtttcctgcattggaacctggagcaagcgctctatctttcacacaaattccctcacctgagattgaggtgctcttgttactgggtgtctgtgtgctgtaattctggttttggatatgttctgtaaagattttgacaaatgaaaatgtgtttttctctgttaaaacttgtcagagtactagaagttgtatctctgtaggtgcaggtccatttctgcccacaggtagggtgtttttctttgattaagagattgacacttctgttgcctaggacctcccaactcaaccatttctaggtgaaggcagaaaaatccacattagttactcctcttcagacatttcagctgagataacaaatcttttggaattttttcacccatagaaagagtggtagatatttgaatttagcaggtggagtttcatagtaaaaacagcttttgactcagctttgatttatcctcatttgatttggccagaaagtaggtaatatgcattgattggcttctgattccaattcagtatagcaaggtgctaggttttttcctttccccacctgtctcttagcctggggaattaaatgagaagccttagaatgggtggcccttgtgacctgaaacacttcccacataagctacttaacaagattgtcatggagctgcagattccattgcccaccaaagactagaacacacacatatccatacaccaaaggaaagacaattctgaaatgctgtttctctggtggttccctctctggctgctgcctcacagtatgggaacctgtactctgcagaggtgacaggccagatttgcattatctcacaaccttagctcttggtgctaactgtcctacagtgaagtgcctggggggttgtcctatcccataagccacttggatgctgacagcagccaccatcagaatgacccacgcaaaaaaaagaaaaaaaaaattaaaaagtcccctcacaacccagtgacacctttctgctttcctctagactggaacattgattagggagtgcctcagacatgacattcttgtgctgtccttggaattaatctggcagcaggagggagcagactatgtaaacagagataaaaattaattttcaatattgaaggaaaaaagaaataagagagagagaaagaaagcatcacacaaagattttcttaaaagaaacaattttgcttgaaatctctttagatggggcttatttctcacggtggcacttggcctccactgggcagcaggaccagctccaagcgctagtgttctgttctctttttgtaatcttggaatcttttgttgctctaaatacaattaaaaatggcagaaacttgtttgttggactacatgtgtgactttgggtctgtctctgcctctgctttcagaaatgtcatccattgtgtaaaatattggcttactggtctgccagctaaaacttggccacatcccctgttatggctgcaggatcgagttattgttaacaaagagacccaagaaaagctgctaatgtcctcttatcattgttgttaatttgttaaaacataaagaaatctaaaatttcaaaaaaa

SEQ ID NO: 505866 - DNA, 529 bp, Homo sapiens
ggccagcgtaatcagagttagaggcaggaagaacactgagacttagaagaagagcaacttcactgtggcaccattgcatagtccattatcatagtgaagttctagtactgaaactcaagatgtataagcaatgaatgcagcttagtttaataaggaggagaaagatcatatggatattatcgtgcaatttttaagtagtctttcaaaggccattcatcccttagatggtgtattagtccgttctcacattgctataaagaaatacctgagactgggtaatttataagagaaaagtttaattggctcacagttccacaggctgtacgggaagcatggtggcatctgtttctggggaggcctcaggaaacttacaatcatggcagaaggcgaagtgggagccagcacatcacatggcaggagcaggaccaagagagagagtgggtagacgtcacacacttttttttttattttttttttttttttttaattttgtttatatgttcactacataacaaaagaaccacactct

SEQ ID NO: 505867 - DNA, 373 bp, Homo sapiens
aggctggtctgcaagcctaacctgcggtctatccgcctgcctcagtgctcccgtggcttctggtccttatcaggctcgggccagctgtgcgtcggtctctcagccccgtttctttcctttccttctcttttctttttatttttagaccggatcttgctgtgttgcccacgctggtctgcatcgttgccgtcgttgctttctgctgtataaaactcctgggctcaagcgatcccctttgtctcaaccttctgagtagctaggattctcaggtgcacaccaccatgcctggctaattttttttttcagagatggtgggggtcttgctatgttgcccaggctggtctcaaactcctgagcttaagcagtcctccca

SEQ ID NO: 505868 - DNA, 427 bp, Homo sapiens
agcagttctcagctgccgcgccgtctgtccgactcgcccgtgttcgacgcgcccttcagtcccccggactcactgtcggaccgcgacagctacctaagcggatccatgagctccagcagcctcagcggctctgagtctgccagcctagaccctggccgccgcctgccaatcgttagccgcctctccatcttcgacgactgaggcatgagggcgccagtgaggaggaagggaaggcggctcagagatgttggaggacacccctcgccatatcgcccttgctgggggcacggaagtgttgggggtgacatgggccctaagcagactgcaagcccgaccgctcacttgaactagaactctgtggctggaggaccgcacaccacagcacatgtacgcttcctgctgacactagatgacggctgaccccccc

SEQ ID NO: 505869 - DNA, 333 bp, Homo sapiens
aatgttgagattacagttgtgagccactaaacctggctagttttaaaagtttgctagctgatgccaaattggtttccatagaggttgtaccaatttacagtctcaccaacaatctgtgagcctgcttgtttccccacaccctcacgaacacaatatgctggtcttcgccaatctgataggtgcaatatagcatctcattttcttcatatgcatttctccagagccacggtgactcacacccgcaaccccagcacttggggagcccgacgccggagcatagcttgcgctccagccctgcctgggtgacacagcgacacccccccccattctcca

SEQ ID NO: 505870 - DNA, 350 bp, Homo sapiens
ttagaagtaggctgtgtttccaggtgttcacccgtggtgcccacagttgcgacccgtggctgggtcggagctccatgttcctaagctaggtctaggtctacacgcctagcaccaccgcatagaggcccgtgtaccctgtgacagtgactgtccccacctcctgtgtttagtggtgcccttactgccgtcgctcatcaactcgttgtgggacgtagatttcaccagcactgtccagtggcgtgtagggaacactgccctggctcagcgtgcgagctaaggtggcgatgtatgcgatgggactctgcatgggatagtacagttgtgtagacgtcttccaaataaattatgtg

SEQ ID NO: 505871 - DNA, 191 bp, Homo sapiens
attgaggaagtatacaagcgtttgaggacagtataagcgttgaggcagtataagcgttgcagaacagtatcacgcgttgaggcaagtatcaagcgttgagaaagtcataagcgttgaggaagtataaagcgttgagaagtatcaagcgtttgaggcaagtataaagcgttgaggaagtataaagcgttgag

SEQ ID NO: 505872 - DNA, 105 bp, Homo sapiens
atctgtgtacatgagctatgtaggaaggggatagtagcagcaagccaagcccccagcattgggagctgtcaggccacagctgctgctcccgtagtcctcaggctg

SEQ ID NO: 505873 - DNA, 442 bp, Homo sapiens
  misc_feature (38)..(38): n is a, c, g, or t
  misc_feature (134)..(134): n is a, c, g, or t
  misc_feature (167)..(167): n is a, c, g, or t
  misc_feature (173)..(173): n is a, c, g, or t
  misc_feature (176)..(176): n is a, c, g, or t
  misc_feature (197)..(197): n is a, c, g, or t
  misc_feature (230)..(230): n is a, c, g, or t
  misc_feature (276)..(277): n is a, c, g, or t
  misc_feature (305)..(305): n is a, c, g, or t
  misc_feature (339)..(339): n is a, c, g, or t
  misc_feature (375)..(375): n is a, c, g, or t
ctatgtcaagaaatggggagccataccagcattaagtnccactgaggtggcaatgcacacttcaacctcttccttcagtcacaaagagttacatctcatcacagacaaatggagaaacgggacaacttgtccancgtttcactgtacccagctcctgtagtgataanactcantantttgtgtgtgatggctggtantattggaacgatcctcttaaattcttacagtantcgccgactgataaaggcatgaggatgtggcctgcatgctgcctgnncttgcctagaaccggctgcacctgctgntctcttgtttatgcaaactggctgcacctgctantcctttgcttatgcccctacccctggctatcctaantccctgttctcctgcctcactattactgtattctctacttctaaataaaaataaaacaaaatacaaa

SEQ ID NO: 505874 - DNA, 100 bp, Homo sapiens
tctgcgcggctcgtgatgtgtctctgccgcggctgctgcctgctgtgctctttgcttccctggtcgtgtgaaggacttcccggcatgagctcatgaccag

SEQ ID NO: 505875 - DNA, 161 bp, Homo sapiens
ttacgagtcgaggtttaaccctccgactgagcaactggcatgatgatgcagctcatctccttcttagcaggtgtgttgtctttctctaggatcaggaacttgcagtccttgtgcaaaaggtcatcgctctgaacacttgttgttgcaggcggcggaggtgg

SEQ ID NO: 505876 - DNA, 970 bp, Homo sapiens
gaagatctcacgagagaggatcggcgccctcctctgtggatcctggccaggccgtgttcgacggttgctgtgagagcgtgcttcccataccatgctgtccgccttctctgtcagctctttcccgcgttggcttcccagccgtgctccgcgctctacggactgtactgcacgtcctggatcatggggctggccacctttctacgcgttctgtgtgctccatccatgcgtgcattgtcctcccgaaacatagagactacagatctggtgaactttgtggtgtcatagtctatcatggagttctacctgtggcttggattcccagtcatttggagagcgggctacgaataaggggtggaagataattctcgacaagtaccatgatattgtctgattccaggggggagctcgtcatttcatatagattatttgacagccccactagctggtggacatgccatgattccatgggtggtaactgtggggttgaatagacttgtgaactggtatgactgacctgaatgaggtgcctatgaggagtagcgtaactgggcctgaaataggctattggcaagactactggcgcgttcatgcagcgtgctcggagtggcgtcccttccgcgttcgacccctagtggcggctccccagtgctagcagttggtgcgtttggtggtggatccttaccagctgactcagtggtgttggaaaacccgtgtgtaatttgaactatacacaggggtatggacacactggaagtttgggtgtcaagcagccatgaatgggttcctccgggacatgcgtttcaggtggccggacattagaaccaagggtggggagacgactggaagaatccaaaacgcgaattgttgaaactctgctgtttgggagcactttattttggagctctaatttgtgcggagaaagcaaaaattgggtgcgcgccaaaaaatatttggttgcgcgaagaatgaa

SEQ ID NO: 505877 - DNA, 297 bp, Homo sapiens
cagtggttcgggggtggataatgaaatatattattgaatacttcggccgaatccagttttatttgcatgttatatgtattatatacagaagccttattaaacagttgattaacagattgtttgcatgctatatgtattatataccgtattcttacaataaagtaagccaaataaaagaaaatgttaagaaaaccataaggaagagaaaatacatttactattcattgaatggaagtgagtcatgataaaggccttcatccttgtcgtctggttggtgtgtagactgataaggaggaa

SEQ ID NO: 505878 - DNA, 110 bp, Homo sapiens
cactggcgaaacttaggataatagtgagctgatccttaaaggcatgcggctcctcacttagtgcaggtccatcgaccaaagccctgtctgactcatactcatgtacgcca

SEQ ID NO: 505879 - DNA, 470 bp, Homo sapiens
  misc_feature (73)..(73): n is a, c, g, or t
cgcctggcctaccaagggcagcagcggctgctcggcggccatctggcctcggccagcgaggccgagagccatncatgctgatcgcagccgccagtcgcgcatctacttcggtggcaactcttcgactacccgctcaagcccggcatggacctggtccagaagatggggccgctgcgctgcctgcagttcgccggcagctacatggcatccgctgcgcggcccatccagcccgagcagacgctggaagactttttcatcaaccgcttcggccgccagctctacctgcagttcttcaaggactacaccgagaaggtctggggggtaccctgccgcgacatcaacgccgactggggtgcgcagcgcatcaaaagcctatccatcggcagcgccgccaagcaggcactgaagaagatcgtcaccggcaagaccgacacccagcacacctcgctgatcgagagctttctttatcc

SEQ ID NO: 505880 - DNA, 419 bp, Homo sapiens
gttccttgtcctcttggtggctaacgttgtgtggtgtgttttgcactcctactgttgtctttcagtcagtcttctacatgttacctcattcacgatagtcaacgtattgtgtattcttggcctcatatgaagtccttacggacaaatcatttgttccagcagtgatgatacttctgtcttggttgtctttacgccccacaaattattcaagtttctagtttaactcgagtgcaaatggtgaggaagcattgtattgatatgtgcattatcagtttttctcctgatggtaagcactttacggcaagttttgtttaacttcctatgtttgcatgttcctactgttttcacacccccgcatgagattatatcattgtagtcgcagaatgttttcatttggcttggaaacggccaagggcata

SEQ ID NO: 505881 - DNA, 152 bp, Homo sapiens
gagacttttctgcagggtttaaaaactaacatcttgtcttacacctcttttacgatttgtctcttagaatctccagtcctcacaggaaaacccacccaattaaacaaaataaaagaataaagaataaaaagaataccactactactataaca

SEQ ID NO: 505882 - DNA, 291 bp, Homo sapiens
gctctgtggatcccggccgctcgtgactgcgccgcgacgggtgggcgggcgctgcggtgtgccttgtagccgtagcggcgcggtgctggggtggcgccgctgcgtgttcttatctgtgtgggtcgtatctactattcagacgtgtactttgcgatgctgaaggtggggaactggttccatgtgaacagcaagataacttgggtcagccggacctgatgagataggcgagcgccgatccgaagggccgggcgatgggctccgttgccctcgtcggatcgaaaatggaagtcg

SEQ ID NO: 505883 - DNA, 129 bp, Homo sapiens
tgacctgatttacatagccactattaagctgctaatagtacctatagggcgtgacagatactagaatgtatacgtatagtggcctgagcgtcaccagcaaacagaaagcatacaagcccacgaggtaca

SEQ ID NO: 505884 - DNA, 706 bp, Homo sapiens
  misc_feature (149)..(149): n is a, c, g, or t
atctccatatatgttaaaaatactaaatatataacttctggtgatcggtgtgtctgcctctgacctagttcatcacacgatgctcacatcatgtacacctgatggtaaatgtgagatactgatatagagatcctacaaatactagaggnttgtcacgctattgtacttatggacactagttgtcagctgccacgtgcctggcgtttgccacagtggaagcaactctagttacgacttcagactttacagataaattgttaatcattagagaattaatgccacgctgcacatgtattcttattagtacatactgggttcaagtctggagtaatatcactgattctgctatcgtgcatattactcaaagtataggacattgtttcagcggaaatatattaatacattatttaaagcttgcgagttgcgggctcgcgtcaataaaacacttaattttgtccatgtgttaataaagagtaggttttgacaggttgattttctagatagctatagtcattgtaggagtattattctgtaactggagagatcatattgtgagaatatcttacgtgtttgtaagaaagatagacgttcgtgtaataatttgggcctgaagattaacttagatatcaacacatccaagatgtgtgtgcgcagattagagtgcgaaagagtagaatggataactttctcacgatagttgaactac

SEQ ID NO: 505885 - DNA, 117 bp, Homo sapiens
agacctgcttgaaaactgaaacaaaacagcagcaataataaaagaataagcccctactttgaggcccttccaaaataaagcccaaatagcctccccagactccatttggcaatctga

SEQ ID NO: 505886 - DNA, 146 bp, Homo sapiens
tgagtgaagcagatgaaaggtgaagcttggatagaaagagtgattgaggagaagaggaaaattgaagaaaagtattaaaattgcatggactaaaagaaaaaaataacaacccactgcgtcaaataataaggcatgttgcatccagg

SEQ ID NO: 505887 - DNA, 430 bp, Homo sapiens
  misc_feature (97)..(97): n is a, c, g, or t
  misc_feature (115)..(115): n is a, c, g, or t
  misc_feature (132)..(132): n is a, c, g, or t
  misc_feature (140)..(140): n is a, c, g, or t
  misc_feature (194)..(194): n is a, c, g, or t
  misc_feature (237)..(237): n is a, c, g, or t
  misc_feature (288)..(288): n is a, c, g, or t
  misc_feature (311)..(311): n is a, c, g, or t
  misc_feature (348)..(348): n is a, c, g, or t
  misc_feature (379)..(379): n is a, c, g, or t
  misc_feature (412)..(412): n is a, c, g, or t
gcctcatgcttatacttcctcaacgcttatacttctcaacgtttatacttcctcaacgcttatacttctcaacgctttatacttctcaacgctcaangctttatacttcctcaangctttatacttctcaangttttatncttcctcaacgctttatacttctcaacgctttatacttctcaacgctttatacntcctcaacgctttatacttcctcaacgctttatacttctcaangttttatacttcctcaacgctttatacttctcaacgctttatacttctcancgctttatacttcctcaacgctntatacttcctcaacgctttatacttcctcaacgcgtnatacttcctcaacgcttcatacttcctcgangtataaagcgttaaggaagtataaagcattgangaagtggggatcctctag

SEQ ID NO: 505888 - DNA, 1425 bp, Homo sapiens
  misc_feature (1352)..(1352): n is a, c, g, or t
tttggagacagagttatcactctagggtaggcccaggcgggaattcaggggctcgatctgggctcaccacaacctcgggattctccggccttcagccttcccgagttagcttaggatgtgtaggcaccgtgccaccagtgcccggcttaatttggttgggtaatttaagatagagagtggggtttctccagtgttgggccaggcgtggtttcgaactccgtgacctcgagggtgatctacccgcctcagcctcccaaaggtgcgtgaaattacggggcggtgagccacctcaccgtggccagtgtcctttagtggaatactacaagtggtggtggctcaacgaggacttgggtatatccagaagtgctcaactcatctttcaatttctactattatttccgtgggcctaacaacttatatccagagtgggtggtgcagggaggtgccaaaaactagtggaaagccttcacccttaacaatccttctttctcgtggccagcccacacacaatttcaacaccgaaccaaacgggagtcgcactcccgtgttcgctcacagtgccgctgctcatacactcccttctacaacagtgttcaaccgtgtggtcccacgaaacatagaatcttcacaagtctgcgaagaactttcaactcgtcacacgtgcttctcccaaaaccccccgggcgcgtacaccatctggtattacacgtgacgcgaagacacagccacccaaatacctggcgctcccctccacctaactcgggactaccacagacgacctccgcgacctcatcgcaccaccggggccacgccactggcgctccgccagccccggcaccccaccccccctcgcggcacatcccgcgggcaccccccggggccacacgccactccccccccccacccccaccccccaccccaatagaagcccccggaagcaacccccacacgcgcacacggcggcctcaacttccaaccaccccaccgcgccgcccccccccgcccgaccctcccgcacgacccacccgccgaggcgccaaccacaccacccccgcccccccaaccgcgcaccagcggcaaacagcgcacccgcccccgccccgggccacaccacgcaaccccacccgggaccaccgcaacgaacccccccgcctacctacccgccgcactccccgctcagacccctcgtccgcccgccgcgcacacccaccccacaacggccggatacccgcgcacgccgacgccccctaacagacaaacgggcggccaccaaactcccgccgcgcgtacgaccacaccacgatacgcgggcgcatcacggaaccgcccgcagacccacacggcgcgcacgncccttataaaatgttgccacagccccgccacccgccctcacgtcccgcccgccccccccgcgcccctgccacg

SEQ ID NO: 505889 - DNA, 170 bp, Homo sapiens
  misc_feature (8)..(8): n is a, c, g, or t
  misc_feature (110)..(110): n is a, c, g, or t
taggtaanaagatcagagagacaagagcttgaggagtcaaggtaactaattgactgtatgtaatagcttcctctaccccgcgcgtccgcacccccacaagcccgcccgcntccatcgcgcggtgctaatctagcctcccggagagcgggccccggcaggtgtaccagagc

SEQ ID NO: 505890 - DNA, 126 bp, Homo sapiens
ctgacgggcgactctagccggatctctctctaagtgacgatccataaaacaaggaggcacggtgaggtgggacccgcacatattgaaggccttccttacttcctgcggctgacttgattctcagca

SEQ ID NO: 505891 - DNA, 608 bp, Homo sapiens
ggctaaggtacctccggctcctgtatatcctgtaacctggcaatgaggtccacgaagcttgatgaaattcaagtcgaacattaatcagctaattacatcgcagaaggtggcacataaatgtgggctgtctacaatctaagcaatgtagacatattgttactcggtgaagaggtaaatcaacagatattctccattgtgaaagtacatatgtcctttgtaattattatataagctgagatgatcacacaaaaactgagaatgaaacataattatattcattatctcaataaaggaacttggtgaggtaagaattatacttcctcctggttaaaccagatgaggaattcaaggctccaagaactgaagagatatttctgagggcagatggcaaaaacctgaaccacatccaggtcttaaagactttaaagccttaggccccttccagttttcactcttggctacctttcactctaatgaggaaccagcccccaagaaactgtggggttgaattaataacatttatgaataatcacaaaacactttgacattattacaaaacacaatcttcataattcaggtataatacatagtcaagctacagaaacaga

SEQ ID NO: 505892 - DNA, 272 bp, Homo sapiens
tgtggtgttaccgtccctccgtgtttttgtgtccttgggggcatgttgcttcgtggtcgcagtattactgttgtcactagcatcacagcttggtgctctgggaaggtgggcacctccactgcttccaggttgcctgagtcatgagctctaagccgcaagagagcatagaaggtggcaagggagttgacgctctgggtgcctcttccacataagggttttaagcaggggaaaaacacaattatatgtatacagattacgctctttttctcttt

SEQ ID NO: 505893 - DNA, 910 bp, Homo sapiens
  misc_feature (910)..(910): n is a, c, g, or t
gtttgagacagcctgggcaacatgatgacatcccgtctctacaaaaaatacaaaaattagccaggcatggtggtgtgcgcctgtagtcccagctactcaggctgaggcaggaggatcgcttgagcccaggaggtggaggttgcagtaagccgagatggcaccactgcactccagcctgggcaatagagccagcccttgtctcaaaaaaaaaaaaaaaaaaaaagcgccaaattttttttgggggggcccccaaaatttttttattccaccccagggattgtcccaattgtcccaaagggcggggcaaattttttaaccgtgtgtgggacaaactaaatattactcctttaaattttctcttttttttttctaagttggagaaatctcagggtaagagaaattttatatttaaacttcttggggactatgggaaaacactcttccttgtggggggtttcaccagagaatattactattaaaaataggagaggagcattgggcgaggggactttagtggggggtaaactactattaattcttcaacgaggacgggagattggtttattaccaaaacaggggtaattgggacttctttaaaaattcctctctcccagtgtcccaaagtgtgttttatttttccaagaatggccaccatttgctcgggaaaaaaatccgcgggaaaaatttttcaacacacgcgttgaactgaggccaaatgtttaggaaggaaacggcgggccctacaagggagagtggagcccaaatgcgccaccctttttctttgaaacacttcccatcttacccccacctgtgtggctctggcgcagggaaaccacttttgtggtgccggaaactggggagatgacaagcccggggttaggtcctgttccgccacgaagtgcgtgaagtn

SEQ ID NO: 505894 - DNA, 173 bp, Homo sapiens
tgctatccgggacgtgaggaggtatggccaggtacaggagcatttcacatcactaacctatcttgggaagctggtagggaccatcttcaactggccttaagaggatgaaccatgacggctgtatgggagaatccacagcgagggagaggacggaaagggaacgtaggctggga

SEQ ID NO: 505895 - DNA, 111 bp, Homo sapiens
gcgacactcttggtttgaggcccccgcccaacttaatcaggcgagcgctgagcgctgcagaggtggcaccggccaatcaccccaggcaagggctctgcgatccttcattaa

SEQ ID NO: 505896 - DNA, 191 bp, Homo sapiens
aagatccgagtgtcttcagacgctgtaaaaccatatcctgccctcttgtgagacctgttcatagatggatgggctgggtctgtataactgtgcccagagatctgtgacagcttggaagctctgcagtgaggaaggaatgatcacaagtcccaagccttcatgctgaggcatctgtctgcgtgagaaacact

SEQ ID NO: 505897 - DNA, 152 bp, Homo sapiens
tctcccgggagctgcagcagcgcctcggcgacctgggcgagctggtggtcctgggtcgtgagcaactggacctgagccacccggaacagatccgccagcaggtgcgcgccattcgcccggacctgatcatcaatgccgccgcccacaccgcc

SEQ ID NO: 505898 - DNA, 412 bp, Homo sapiens
atgtgtcccgcagtaacatggttaataagaaagccttgtagactgcatttaacaagcaatagctcccacgcaatcaacgtaactcatgagtattaaatcttgctgcacacaagactgccctcgggatacagttgcatgcagaagcactgctgttcgtatcatgatcacgacagccaagtgtgatagtgctgaagctagagagcggatagtcaggacgtagttggggatatgaagttgaaggcatggacagttgaaggcgtctagagctcctctatgggggtcggcagctcatgatcacgagacccggactcaagcgccaccgtaggtgcaaatgcaacttccacatgtcactcctcggcgtgcaaagcccggagtgccaacagcgcaatgaccgacacagtcacaatatatt

SEQ ID NO: 505899 - DNA, 380 bp, Homo sapiens
ctgctggctcaggtagggaccatgctagagaccaagagaaagaagacgacgagacgacgaagagacagagaagaggagagacacgaggagacggagaaaagggagactgtgggttgggagtcaacttccaacctcattctccagactactctcttaagatctagcctctatgctcagccacgctcactcttatcctctgattttccactttcctatgatgcttctccttggcccattttattcttccccgggcctgcctcttctcctttctacccctcagtcttggtccgctccctaagcccctttacctcttctgcttttgtcgatcacgttctttgcgtgaagaggaacccaggtgctgacccttctccaattcttcc

SEQ ID NO: 505900 - DNA, 153 bp, Homo sapiens
ctcttctcttttagctgttactcatttcaaaacaccatttcacttgtaagctacttacttgggccttggttttcccttttcctctttattgttgaactgtttctatctagctcctgttgtaatttataatacaaagttagtagaatatagtat

SEQ ID NO: 505901 - DNA, 1381 bp, Homo sapiens
  misc_feature (741)..(741): n is a, c, g, or t
  misc_feature (992)..(992): n is a, c, g, or t
  misc_feature (1069)..(1069): n is a, c, g, or t
gacaacaccagaaagttgacatataagagaagccttagaaaaagctgattgacgattgccacacaggacttaaactgttagaaagtatctgatcccctgatgactggaatctctagcctctactattacttgcctattgggacatgtcctaacttaactgtgcaagggcgtgatgcgacggctggttctctgccacgttcttcagaagatatgatgatatctggcatacttattctagtctgtgaacttatgttacatactcctatcttccttgagaggctggccaagtatgcataaagtgctcagaactatgagatgagttttcaacaatgttcgataattacgagttatggatttaattgcccctttcaatactggctttcatatgtagcgctctgtagtaccatggtgttagtatcgagaaccttgagcccaccacctcaacatgtgtaactcatatgggtgtgccaacttcaggagattctggaggggcttgcagactgtgattcgcagaactcaccagagtgtttcccagacgcaggagtacgaatgtcaattttaccaagaaaagtaccccaccttctattatgagaaagtaagttgctgagcactattttccattggatatatttgtatccagaatttgcggctctctcacttggtttgaactatacattgcacaccattccatttggacaagtagacccctaatggggaatagcgcatgtgggtgactaccgngggccatctgttgagaatttttccgacatttcgccacaacaaaagagttcttctgccgacacctctgtgggcgacacgatggttaattttacgagcaatggaggtccaattttttcaaaacaccgtagtcgtgttagactaaatcgcaaacacgtcgggcgcataaccggtggccagtcgccttagtatagataaggtggacggccaccgccattaatcctttgtgttggcggccatttatatctgagganaagagttgttgtcttaccctcgacacgatagtgtgtggtccacccaaattggctccctgagggaggcattaacaganatcgtgaaacgtctgaaaccttttgggtagacctgtcgttgatacgtgtcttttgatccaaacatcttagttcaaaagatgctgagtggctaaagggccacagagagggggcagagaaagtgagcaataggattcgggtacccattgacgctatgtatgaggtcacatgtttttagccgccacacaaccccagttgtttcacatcagcacatgagaaacgggtcccaccctgtctcattagcgtactcaggacgcggatcgaaacatacctactgggtaatcggccgtactatggggtaggcaggggaaccg

SEQ ID NO: 505902 - DNA, 130 bp, Homo sapiens
  misc_feature (48)..(48): n is a, c, g, or t
accgtaaacttttcaatctctctaaagaagatgatgtcgcagtatgtngtaagaaagcccttctttattgaagggctttcttacaacatactggcggacatcatcttctttgcggggcactcctctagag

SEQ ID NO: 505903 - DNA, 166 bp, Homo sapiens
  misc_feature (158)..(158): n is a, c, g, or t
atagctggcccagagagactctcacgtacagtaacaggccagctctggcccaatcgccagctctcccgctctgatctgcactcttcactcgactctctgctcatgggaagacagaattgctcctgatgcactaaattcaataaaacttgtcttgttgngagcttgc

SEQ ID NO: 505904 - DNA, 122 bp, Homo sapiens
ctcggtggatgtgtgtcttgccttcccaggccaggtcgtcggcggcagttcatccaggaaccggctgggggcacaatcgatgacttcaccgtattgcttgcgcttggcggcaaaggtgaagg

SEQ ID NO: 505905 - DNA, 422 bp, Homo sapiens
cttcggtcagatagagaactcgatggtggcgatatagctgatgggcttaggcgggttaggtacaccctttacatttcgcctgtagtgaacctgcgctgcaccgcgccccatacgcaccacgcctgtaatctcgatatccacaatacccctgggatagagcgccatcgggcccagcttgtttgactccgggtcaatccattgacggtactcggccattaccggcccgctagacatgagctccacttgctcgtagttaaagagagcctgggcatcgctgtattcttcgcgtgcccggacatactggccgaggtagctggcgtccatcgcctgaccgtgcgaccactcttcggattcaaccttgacgagctccttcgctgtaccggtagactcgtcaatcatcatcacatacggctgcacctcgc

SEQ ID NO: 505906 - DNA, 1802 bp, Homo sapiens
cgagttttttttgtattttttttcttggtacaaaattttataaaagggtctttagaagagcaacgatccaaactccaaaatacagtctgccagggaaacccggtttagtgcgtggggggactgtggcgtggggcatgtggcagggggctctcgtggctttcccaccctttcgtgagtccgtgaaagtgggggtgtgggtggcgcagtatattcttcattcttgtgggagtttccaacacatgtgctctccacgtgtggtctcagaggcagagggtgcttctcttatagagggcgcaaatcttttcacgcgagtgtggtggctcccagaggggcgagcatagtgagactctattcacacctgtgtgagagttgccccagagcaacacacacctctgtgtgtctgtgagagccaaacacagtgtgtggcgccgccacacgagagccagtgtgtctccacagcgttgtaagatgatagtatataaagcggagggggtgctcactcgcgcgcgtgtgtggggaatctctaactccgaaggggcctatctcccagacaaagacgcttctacgagtgggagatcttatacgccctctctctgtgtggctccactgcgagagagattttttcccccaaatagaacacacctcaaaacaaaactctcctcgtgcctagcgaccctttttggtgtggcccccccacgtctctcctcacaatagtagatctagaacactgcggggactagtagaccatactaccacaatataaccgtcgagggggcgcctcgtcgcgtgcagaacatagcgtggaaaggggcgcccctatctctataggggagagtcgtttggtgtgatacacgcggcgccaagagaagaaacactccgatgggcaccgtgtggggcccaagaaggtgggggccaccccagacgaggacaacccactccataagaggtggggcgccccaaccctattattccaccacgggcgccaccattaaaagagggcccctccataaaccagggggggcctccccccttcgtgtggtacaaaaagaggccccaacaaagacacagtagcgttatccggtggcaaacccctacaagccaggccacaagaatcaacgagatgatcaccccccgagaaacaaatcaccgcggccgcaggggcccccgcttactttcataccaccgccaagaaggaaaaaccccacttccgcggcgggggaccatcaccggcgagagggggggcaccaaaaacagacaactcaaacgtggaacactgatccccggagggtccccccgagggagctcacatgagcgatggcaaaacaccaccatgctgacgcaactcacgcttacaagaattgtcccaccaagaagaatgtaatgtaagcgccccaactatgttataccaaggagcccacatgggtgtctgcccgggaggagggtagtataagagaaacaatactctcacactatttactgaggagctaccagagcatatatttaggacagtcaatgacccaccattaaaggcggggcaggacagacaacgttcagcccctacttcttcgtgggagggcaaattatatatgggcccgcggaggccatctttttccaacgagtaatactattcgtgcgccgaacagttttggcgcatcatcccctagtgcgtgataaacttgcatcggtcaaacagccgccccggagaataataattggtgtatccctaaggcccgttttgtacagaaacacctcgtggacgtcaggtgtccccaatggtaggacccgatatatagtgtcgaaca

SEQ ID NO: 505907 - DNA, 164 bp, Homo sapiens
  misc_feature (110)..(110): n is a, c, g, or t
tgagcctttccagggtgacatgaaccgtggcactttcttagcgatccagaataaatttctagctcgaaggtttaagctcttagaacaagctctggtgattgaggaacagntgcgccgggctgcttacttgaacatgtcagaagacccttctctctcacactccc

SEQ ID NO: 505908 - DNA, 882 bp, Homo sapiens
gggtgaaagagcaagacacagagaggagagagagagagagagagagagagagagagagagagagagagagacatcaacagccctcaggaactctagccccctcacctacctaagtgtgagtgcagattctttcgtggcgttctgctatcgagttatcagggcaccgcgtcagatgtgatctaagcggtgcgtgctcacgtgctcgtgtggggagtgtatcatccagatgtcttccctggtgacatacacgagaattcagcgctagagtatcgtggtcaccattacaagtgtgcaaacgccaatgtagcatatgaatatagtacagggctctggtttttaccctatgtgtgcctatcttatcaggcgtagggagaggatggtcaaagcaccccgaggagaagctatatatatatttcgtgtttcgtcgttgtggtgatttattatatactagtgctctttttgtgcgtagttgtcgtctccacgaagagggctctcctcttggaaaaaaagaatgaattgataccacattctcctccgtttgttgagtgcacttgttgtgatcatcgttttgttcatttatcatatattaacgctgtaaaccacatttgggggtcatcttttgtggaagggggttttgtttacaagagccatacggttaagaaagggtaaggatatctttacgcattcagtggtgttccacaactctcttattttaacattatgcgtggtcaaacggtgttgtgtgatactggttcatggtgaaggggtcaaggggtgttaacatcctaaataggggtcaatcaggtgggtgggcggggccattggtaagaaatccggacaggatggggcacccggagaacccaaaggccttttcattgaacg

SEQ ID NO: 505909 - DNA, 161 bp, Homo sapiens
ggccggtaccggtcgtatgagatggttaaaaggcaagataaaaggttctttttttttcctttttggtctatgaagtggcgtttatttttttgggccggttcgatgtatgtgtgaaacaatgtggtccaacaataaacaggaattttatttggcgagcgata

SEQ ID NO: 505910 - DNA, 161 bp, Homo sapiens
gatggacaatagcaggcgaggtgtaatcagggctcttgcatattttcaactctaaatattacgtactcagtagtgccctgcttctagggctctgaatacgggcttaaagtcatactagtgctgctggaattaagctgtgcagaagccataacgcctcccat

SEQ ID NO: 505911 - DNA, 475 bp, Homo sapiens
  misc_feature (41)..(41): n is a, c, g, or t
  misc_feature (209)..(209): n is a, c, g, or t
  misc_feature (219)..(219): n is a, c, g, or t
tcatggctaggcggagtgagtggtgtgatctgggctcactngaaacttggcctcccaggttcacgccattctccggcctcagcctcctgagtagctaggactacaggtgccgccaccacgcccagctaatttttggtatttggtttagtagagacggggtttcactgtgttagccaggatggtctcgatctcctgacctcgtgatctgnccacctcggnctcccaaagtgcgggaattacaggcgtgagccaccgcacctggcctggaacccctacattcttatcttttcaggccttaagtgatttgtcattctccctcactacatcgtggactggcagctccattcattctaccatcacctcaatttaaaagcctagtgggggcaggcatggtctgagctccccattgctgtacttccacttgcaggtaaaacacccttctgtcctactcaatagccctcttcctctcccaaga

SEQ ID NO: 505912 - DNA, 950 bp, Homo sapiens
  misc_feature (83)..(83): n is a, c, g, or t
  misc_feature (87)..(87): n is a, c, g, or t
  misc_feature (199)..(199): n is a, c, g, or t
  misc_feature (206)..(206): n is a, c, g, or t
  misc_feature (219)..(219): n is a, c, g, or t
  misc_feature (227)..(227): n is a, c, g, or t
  misc_feature (246)..(246): n is a, c, g, or t
  misc_feature (265)..(265): n is a, c, g, or t
  misc_feature (282)..(283): n is a, c, g, or t
  misc_feature (285)..(285): n is a, c, g, or t
  misc_feature (301)..(302): n is a, c, g, or t
  misc_feature (306)..(306): n is a, c, g, or t
  misc_feature (309)..(309): n is a, c, g, or t
  misc_feature (312)..(312): n is a, c, g, or t
  misc_feature (314)..(315): n is a, c, g, or t
  misc_feature (319)..(319): n is a, c, g, or t
  misc_feature (327)..(327): n is a, c, g, or t
  misc_feature (331)..(331): n is a, c, g, or t
  misc_feature (338)..(338): n is a, c, g, or t
  misc_feature (342)..(342): n is a, c, g, or t
  misc_feature (346)..(346): n is a, c, g, or t
  misc_feature (351)..(351): n is a, c, g, or t
  misc_feature (361)..(361): n is a, c, g, or t
  misc_feature (368)..(368): n is a, c, g, or t
  misc_feature (370)..(372): n is a, c, g, or t
  misc_feature (398)..(398): n is a, c, g, or t
  misc_feature (413)..(413): n is a, c, g, or t
  misc_feature (442)..(442): n is a, c, g, or t
  misc_feature (467)..(467): n is a, c, g, or t
  misc_feature (471)..(471): n is a, c, g, or t
  misc_feature (486)..(486): n is a, c, g, or t
  misc_feature (513)..(513): n is a, c, g, or t
  misc_feature (518)..(518): n is a, c, g, or t
  misc_feature (693)..(693): n is a, c, g, or t
  misc_feature (695)..(695): n is a, c, g, or t
  misc_feature (697)..(700): n is a, c, g, or t
  misc_feature (702)..(702): n is a, c, g, or t
  misc_feature (704)..(705): n is a, c, g, or t
  misc_feature (708)..(709): n is a, c, g, or t
  misc_feature (711)..(711): n is a, c, g, or t
  misc_feature (716)..(717): n is a, c, g, or t
  misc_feature (720)..(720): n is a, c, g, or t
  misc_feature (722)..(722): n is a, c, g, or t
  misc_feature (730)..(730): n is a, c, g, or t
  misc_feature (944)..(944): n is a, c, g, or t
tatacatataatctagataaggtgtaatgtttcctaatattaattactgtacttaaaaatttacaggacatgaacataaatanagcnctttaaaactggcaaacgtagtaatagtctgtcattcagtacaaggcatatttatgttatttccaaagccatcaccctaaaatcctaagttgccactcttaaaacctaaaantaatgtngaaaactaaagtnataaatanatgtatacatacatttgcntatttacacttatgcaganatcatcaatatactagnncncagctttaagactgtnnttgngtntgngnntgtnggaccatntgtnacatttnaganaggntcttntgttattttnagttaanannncaaaacagaacaactttggtcaagtnccagatgcatttgcnttatattacattctgtgttgctgcaagantctagtctacagagatccatatatnagtnctcatttggtttganaatgcattttaccatgaactgcaaaanttaanagagaccacaatcttttagattattttttatgatgacatctgttacagcatcaaaaacaaactgcacattcttagtatctgtggcacatgtgaagtgggtgtatatttcctttgtgtcctttcttttattgaggtcttcaaactgacattgaatatatgcagctgcctcttcatncncnnnngntnntgnntnttttnnttngnatatagtnagggggctctttttgattttttcttcaaagagatccttcttgtttagaaaaagtataatggatgtatctgtaaaccacttgttgttacatatgctgtcaaacaatttcatgctttcatgcattcggttcatttcttcatcttcagctagaaccaggtcgtagtcactcagtgctacacagaagatgatcgccgtcactccttcggagcaatgantcactt

SEQ ID NO: 505913 - DNA, 843 bp, Homo sapiens
gactgcgtgttacgggagagtgaagctgcgaggctcctcccgctgcgggcgggctcgccctcgctctcctcgtctccgccggcccggccggcccggcccgccatggagaagatgagctgatccagaaggccaagctgccgagcaggccgaggctagagaatggcacctgcatgaaggcagtgaccgagcaggcgcgagtgtccacgaggagcgcaactgtctccgtgcctacaagaacgtggtcgggggccgcagtccgctggaggggtcatctctagcatcgagcagaagacgaacctccgacaagaagttgcagctgattagggactatcgggagaaagtggagtccgagctgagatccatctgcaccacggtgcttggaattgttggataactatttcaatagccaatgcaattaatccagagagtaggggtcttctatctgaaaatgaggggtgatcacttccggtaaccttgctgaagttgcgtgtggtgatgatcgaaaacaaaacggatagataattcccaggagcttaccaagaggcatttgatataagcaagaaaggagatgaacccagaaaccaattccgcctggggcttgctcttaacttttctgtatttactaatgaaggattcttaataaacccagagttggctgcacgctggttaaaaagggtttttgatgaggccattggtgacttgatacactgaatgagacccatacaagaaagagcctctatgcggttgtaagagactaaattttggctcgaagtcggggagaatttttggggagggtcaaagcacacaggggcctcttctcgaacctttagtcccctttaccgt

SEQ ID NO: 505914 - DNA, 818 bp, Homo sapiens
  misc_feature (203)..(203): n is a, c, g, or t
  misc_feature (429)..(429): n is a, c, g, or t
  misc_feature (569)..(569): n is a, c, g, or t
ctggaactagacaggactcccaactagatacaactgacacgaagataaggtcactgggacccgtggctttatcactgatcatcactgctggtgcatgggtttgcctgtccaggtttggaatactgacgatgggtgtgagtcaagtgtccgagcctcacacaggggcatagattttcaggtccctggtgtccatagtgctatantcgcgttagaagaatggcataccacatccgtgtgctcgagcgggcacgtcaactctgggcagctatttgcaatcgagtctggaccgatccgttccacggcgcacttcattagttgatgctccatgcatttctactttgggatacatgtgaagagtatatgagtaccgtctgtgagtcgagactatactgactcctgtaggcaaccaatgccatgctctctggggcntaagtggtggcgttagtaggctgacgacgcaagtggcgcgtgtcgaagatcgtgcattgccatgactcctttgttccttctttgatgccaagaaataggcctcccaggtagtaccttattaagcattcggaaggttatanggacctcggatagagcatgggtggtcgaaagaaggctgtgaatagacaaaaaaaggctttcttgggaaaaaaagggcaccttctggaggagagggagactaagtggagactggccaacttggttgggacccggaaaaaagggagttatttttaagatggcgaacacaattggggaggcaacacaagaagggaagaggaagcgaagcagagggaaaagggcaaatcgggaagggtggggaagccgaggga

SEQ ID NO: 505915 - DNA, 225 bp, Homo sapiens
gggaggcgggccgagggcgttttagcttaggcccgcgttgattcttgggttgaggaggttgcgcgccccttaggcttcgcgcgttaagacgcgccggcattgttgggcgggagaaaaaactctctataaactttttttccccggagctttcggcttgtggaggaggaagttaacatccctaatatgaggggtctcgttacttgtggcaacctggggtttttttgc

SEQ ID NO: 505916 - DNA, 188 bp, Homo sapiens
tagtcgatgcactgggggcatgggaaggggatagggaaggaggctaaagagcagccgttgtgggtgtctaaacaggaaaggcaggagtcctccaccctttcacagataaggactagagaagctatgtgattctcacagtgaggaaatagcacagccaccttgagaactcaaggtggcatcgataaaca

SEQ ID NO: 505917 - DNA, 579 bp, Homo sapiens
tgccagaggtcccattgatagcggatacggtggtgtgcagcactgttcgatataaatctgatctaaatcttcctgattattcatacgttctcccaagagtggataaatggtttgcggtctctcccactgtgaagccacagcgaaacagcaaagcagcacagactgatcctctccatggctgtggctgcaggaggcctgtggatgaggtacacgtgctccatgtactccgtgatcctgtgcaagaagctcagaggctcgttgaaggcgattgggatcgtgatcttggacagctccaggccaacactcttcttcaggatggtccacacgctgaagtcgcttctgctgaacatgggagtcggcagcgatgtcctgtgtttctgaattccgttctcttgagagggcctctccccagttttcccaatcctaatatttttgctggtgtctaagtcaatcattcccgtgactttctgatttgcctctgaaaatatcccagatgagttatcagaatcaaaggctgtgacgggatcaaagaattcttcctctccgttcatccttcagcaggcagcctccactgtcctc

SEQ ID NO: 505918 - DNA, 886 bp, Homo sapiens
gggtacggagggtgtaggaaaggtctttgcatcatttgtaaattatgtcgtttgcaaatgacataatttttttcttaagaaaaaaattatgtcatatatgcaaaccacctaattatcttcttacgacaaacgagcacatctaatttgcaaagttctcgcaactatctagaaatatctagtgattggttatcgcatatctacaattaactctaggtgaaatgcagtgcgagagcacgactgatcgtcacgttgttactaccccattggtgacaaaccacatgtgtgcgatgttactggtttcgactgctgatagttcctagctataaggatacgaccaaattttggtggcaaccccattacgtggtagacacttcaacatacacaacaccggaaacaaagttaattcaaaaccccccaccttttcgggtactacacaatatcacattaggcagctctagggacttcgtccaccgccatgctggcccgccacacacacaccccattacccacaaacaggaggcataaacaccgtagctcgaagtaacccggatccggccaaccacagtcccataggtgacagatactacaaaaaaggaaaatagtgaccaacgataatcggcacaaatgagtcatccacgaaggacaacgctcccactgcttacgaactacgagcccatcctaaacactgccaacaccattatagagaacccacaggcaggcctactgccgcagcctacagaccggcccaaaggagacttaacatgaataccttaaccaagagtttcacatttaacctttaaagtatcaaacactattagccgcacatcacaggcaaaggtcacaacgatcatcatccaaaccatatgtacactttacacatctttac

SEQ ID NO: 505919 - DNA, 864 bp, Homo sapiens
gattatgggttacacttcaatttacagggcataaacaatgattatctattactctgaactttatgattacatgtcttcagattacatgggatggtagtgggagttaccatgtaacccaaacataattaacatgtaattagtttacagatggtagggcatcacttcaattcaccaagcatgtagttctagcgcactagcatggcgccagccaggtacttacaatgtagttacagagtattacattggtgatttggcacaggtacaaataaggtgtctggatatatttcctatgtaaaggaacccctctcctttccctttctgttccctgcgctgtggtataaatatatatatttctccatacaagatctctgagagtgaaaaataaacttgtgcggtgaatgatttaggcattttatgagagtgctgtgggaaaggactggataattcaccctttgggtctgggaagagtggaattcttctgtacagggtgattcaaaattggatgtgatgactgtgtggcaagttaactttccagttcatgtggcattactttatttcaaactttgtgaaaggatctgtggaggtaaattctgggtttgaaagttgcgacctttacacactgtccttttctaagtggtaagaagtaatcctctttgtggggggttctaaagaaaaggattcagaatcatttttacctaatggaatttgggattttttcaaatgggaaacaaggtgtgggcatgggattataattaacgcgggtggtagcttgagagaatcggccatagttacgggggtttatttacaaaacagaataggtttcccaccggtttttgggaaaagggggggggaacaccgggataa

SEQ ID NO: 505920 - DNA, 141 bp, Homo sapiens
gcgtcactctgaggatccctagagaccgtgttgcattggtccagggtatccatgcatcctcagcacattttatcaacacttgatgtggtgacacaccacagaacacaggaagtgtaggagaataagaatgacctgggcttt

SEQ ID NO: 505921 - DNA, 124 bp, Homo sapiens
  misc_feature (16)..(16): n is a, c, g, or t
agcggcggcctttttnttcacaccactttatacaaaagtaaacatggacagaacacactgcatttctgggacgagtcgagctgatacacaatactattaatcggggctcactgtgtggaatatc

SEQ ID NO: 505922 - DNA, 758 bp, Homo sapiens
agcgggtttcactgcaaggccggtggcacggagaggttgtggtgctagtgtctctacgccatccagtgccatcctcgctcgctgcagcgagacacgctctcgcacgaccagcacactgaacctgagcatgatgacccttatcggtgtgcacccgtcaatggggcctactaatcgtgtcttggagataagcccagtgatcgccgtatctaactcccgcagctgtcctcgggagactggatccgtcttccggccgtcgtcgatgattaaaggagcgcagtcaagttccattgttgtgaacacatcgttggacgcaggcggagtagatgatcgcatagcgtagtggcaagttccgacaagactgtgcctcatgtgagagggtcgcatctcacacttatgtgctagtgatgctgcgttatctcctcaagagtgcgtcacgcttatgcgcctctcagggctcctcgggagtaaggtaacccgtgcgctctctggtgatcgtcacatacgggtcatcgcaaccacgagtgcgatgttgtggggccgatatcgcacatggactgttgctgtagttgtggccttgctccatcgtggaccaactcggactgacttggtcatcttggaatcttgcgagcatgaagactatcaaagctgatggaataccctggcgtgtgtgctggaatacgacgtgtctcaggatgaggagccacttcagagtggggtgtcttgatgtccggttctcggcctaactagcagctaatccg

SEQ ID NO: 505923 - DNA, 362 bp, Homo sapiens
tactcgcataatttttgtaattttttagtagagacgggggtttcaccatgttggtcaggctggtctcaaattcccgaccgcaggtgatccacctgcctcagcctcccaaagtgctgggattacaggcgtgagccactgcgtctggcctgtatttccattttcagttttctttcttctttcttcctcctttcattccctctcctttctttcacctcttctattttctttccccgtcttgccatattttgtaatgtaattctcatatgttcatcaaaatctcttaaattggaagacaggaaagtctctggccagtatcaaccttaaacaagtttaattaatttggaaagtttcttatctcgtgc

SEQ ID NO: 505924 - DNA, 1139 bp, Homo sapiens
tcccttcctcacatacaaaatcttctccacataccaaatttcttgcagctataaagtcacttgatgtgttgtggccgggttcccatttatatctcccttaaaacctcgtgtttgacattcaaaattatgacaggtgtgttattatctccattaaaatatttacattagccagcggcattatttagcgctttagaacatcttgggcaatttaaacccactataaaagagagaggacacaagaacccccattccttacagtgtttgtggaaattcagggtgttctcagccgggtctcccttatctgtgggcgaactgtgatacacgtggttctcaagagggccaagcagagaggcacaagaggcgaggtatacttctcagaaggcaccacgtgcaccccttattgaatctgtggaacccccgttttgtgcatgtttacccccaaagtgttcattgttaccaacacacacctttctcctccagagggtggctcctccataatctctttaaaatgtgagaaggctcccagctttgttataccaaatatgtgaaagcacgaagaaaaacacgaaccatttatactctccgtgtgtgggaagaatattctcctataactttcatatactattatgtgcccacgtgtgtctgtggtggatcttgtgagcaccatattaagcgtgcgtctccccccaaaaaaagatcttttgtttccaacgagatttctatctccccggagaaaacatttttataaagggggttgggggagtagaactcacaactacaaatttctgttgtgccccccctacacaacttgggttatacccttttccttttctcccccacagttgtgttgtgcttataacggaacacccaaacagggttttggaccctttgaaaccaggcataccccacaagtgcgctggataaggattacccccaaaagtgtggccagcatttttttccccccaataatttagtggggccaacacatacttttcacagggccctacaacaatagtcccattatagtggaggcgaattaacactgtggcgcacactttgggggaatatatcgtcacaccatctctttgtgtcaacccacagaaactataatccctgggaacacccacccttcacagagt

SEQ ID NO: 505925 - DNA, 236 bp, Homo sapiens
aagcttttaccgctccaattaagattataaaaaagtaatggagcttaatagtcaacaaacattttctaaaggtaattttggcacctgtaatcccacaactttgggaggccgagatgggagaatcatttggagccaggagttcgagatcagcctgaccaatatggcaaaaccccatctctactaaaaatacaaaaattagctgggcgcaatgtcacacgcatgtgcggtaaaagctt

SEQ ID NO: 505926 - DNA, 231 bp, Homo sapiens
aggagctttgtaggcaggtaggcgctcacagcttatgaaggtggcgcagggcagggcaggagagggctagcggaggaggggacacggtgcacagtgccgtggggactgccatgcactctggctggtgtaacatgcccacagcaaggctcggtgacgagagcaccggagcccaatgaggtggggttgtcgtggctctgccccaggactctgagctccattggtcaaagcccg

SEQ ID NO: 505927 - DNA, 115 bp, Homo sapiens
tggaggtgcacacgcatgtggtcagatgaatggacattttagtattgccccgctcttcagtttatataatccatatgcaacaagggctgcaaaacccgctattccaacgggtacg

SEQ ID NO: 505928 - DNA, 233 bp, Homo sapiens
gaagaaacattgcaactgctctgtgctttcaaaacaaagtgttcccccccaccccaaatttgtctaagcactggcccgtctgttgtgggccttgttttctacaaccaaattctgggtttttatcttctttctttaaacatagaggtacaccacaagggatagctactctctcgcagctcttgaaagcatctgtttgagggaaaggctctgggcaagccagtggttatatggat

SEQ ID NO: 505929 - DNA, 390 bp, Homo sapiens
tcgagctcgctacctgtaacattcgtgtccaatgccccgcctaaatataacgtatggccagccataattacccccatactccttacactatttcctcatcacccatctgaataatattatacagaatgtaccacctacctccctcaccaaagcccataaaaataataaattatcacaaagcctgagaaccagaatgagcgagaatctgttcgcttcattcattgcccccacaatcctaggcctacccgccgcagttctgatcattctatttccccctctatggatccccacctccaaatacctcatcagcaaccgactaatcaccaaccaacaatgactaatcaaactaagctcaaaacagatgataaccatacacaacactaaaggacg

SEQ ID NO: 505930 - DNA, 358 bp, Homo sapiens
  misc_feature (194)..(194): n is a, c, g, or t
  misc_feature (201)..(201): n is a, c, g, or t
  misc_feature (238)..(238): n is a, c, g, or t
  misc_feature (297)..(297): n is a, c, g, or t
gaagtcaagcgcgcagtattcacaatagcaaagaataaataacccagatgccatcaatggtgtcagggataaggaaaatgtggcacatatacaccatgaaccatgaaatactacacagccataaaaaagaatgaaatcatgtccgtttgcagacaacagtggtctcacatcgtaagtagggagctaaacattgnaagacanaatatacataacagatgagaacacacagacactgggngactactatgagggggagagtaacaggaggaggttatgtgctgaaaaactacctattgngtactatgctcactatctgggtgatgggaccatctatgctattgaaacttctaaaactagg

SEQ ID NO: 505931 - DNA, 420 bp, Homo sapiens
ttcatagaagctaagctacttatccaaggccacacaggtccgacagaacataaacccagtccctgtatctttacatgaggttacatccccagtggagagagacatctgtcatatattaaaatgggggtcatctggagtatgagcacaatgatgaaggaacacagagaagttagtggggcaacaaacgagaagtctaagaaaagctcacagacgaactgacatgtaacagggctttaaagtatttgcccagccagagaagataaaagaagcattccagatcaggggaaagaagggagagtaatttttttccaggtaataccataaggcaaagaggttttgcagtacagatgactcactttatagaatgatggggaagaagttacctctagaagtcaataaattgatgcctccctcgaccct

SEQ ID NO: 505932 - DNA, 129 bp, Homo sapiens
  misc_feature (10)..(10): n is a, c, g, or t
agagtggctnctgctctgcacacgctgatgctcaggcgctgcactgctcacttctcttctgccctgaaagcctctgtctttttcatttggggtcagctaggcgagtctgatactgaagagggagcagca

SEQ ID NO: 505933 - DNA, 714 bp, Homo sapiens
  misc_feature (322)..(322): n is a, c, g, or t
ctattatttcgccaatgctttccagtttgggtaaaagattaaaccttatctctcaaataaaaatatgtagtcgggccttggtgattacatctgtattccaagcactttggaagtacaagggtgtagaattgcttgagctcagaagtcagattccagcttggttaacatggtaaagccccctctctccaaaagaaatgtaaaagttatcaaggagtgttggcatgtgcttgtagtgccagcacttggagcctggcctagacgtctgcttagcctgggagatagaggctgcagtgagctatgactgtgccgctacacccgagcntggtcaagagtgtacgactccgtctcaataaaatgaatgaatgaatgaatgaatgtgcgaatgaatgaatagacataaaagataggagcattagagagaatgatcatagtgtagactgggcgggcgcggtggctcacgcctgtaatcccagcactttgggaggccgagataggtggatcacttgaggtcaggagttcaagaccagcctggccaacatggtggatccccatctccactataaatacaaaaattggccaggcttggtggcgcatgcttgtaatctcagccactggggaggctgaggcatgagaatcatttgaacccaggaagtggaggttgcagtgagctgagatcccgccactgcactttagcctgggtgacagagcaagact

SEQ ID NO: 505934 - DNA, 151 bp, Homo sapiens
gtggtttgggcttgcattcccactgcctgagaggctcaaggatacatcttgcgccctactcggttccagtggacggacggcaaagcagctttttcggggttttgaatggtgtagcatcggattcatacatattagggctggactgtgtgca

SEQ ID NO: 505935 - DNA, 207 bp, Homo sapiens
cccccgttatggtcttgtgctgggtggcgtagcacttagggggaacctgctctatgctgttctccccgggactgatggcagatggagtctgtggcagcggcagatgtctcagtgtgatggcccagtgcccactcatggggtttttgggtggaactatatcatatgtggtacatattgctgctcgagtaggctatgtcctggcactca

SEQ ID NO: 505936 - DNA, 114 bp, Homo sapiens
  misc_feature (3)..(3): n is a, c, g, or t
  misc_feature (67)..(67): n is a, c, g, or t
  misc_feature (98)..(98): n is a, c, g, or t
cgncctggcctgccgttgccctgggctgcagcctcggccccagggtcctgctcccagtcaccgccgnccaggaaggacgccgccctggggggctgggngctgcttttgtttctt

SEQ ID NO: 505937 - DNA, 597 bp, Homo sapiens
tgggcaagatcagaatagccacgacaatatggaaagaaagaacaaagtcagaagactgacacacccaacttcaacacttactataaagctacagtaagtcaagaagtgtggtgttgatgaaagaatagaacaataggactatttagttctattgttcaaaatagacccataaaaatatagtcaactgatcttcgacaaaggagcagaggcaatacaattaggaaagatagtctccaacaaagagtgcaggaataatgaatatccacatgccaaaaaaatgaatctagacccaaaccatatacccttcacaaaaattaagtcaaaatggattacagacctaaacataaaatgcaaaactagaaaactcctagaaaataacacaggagaaaatctaggtgaccttggggatgttgatggctttttagatacagcagcacaaaaggcatggtcaatgaaagaaagaactgataagcgaaacttaaaaaaactgctgctatgtgaaagatactgtcaagagaacgagaagacaagccacagatgggaaaaactattagcaaaagcaggatctgaaaaaggactattatccaaaatatgcta

SEQ ID NO: 505938 - DNA, 1399 bp, Homo sapiens
tgggctataaaataatttattacagaatagcctataatctccggtaacaagggcccttattaataattctaacaccagcaaagaagtgctgggttccgtgggtagcagggtaagggccagtacatcgggggacaaggtcgagctcctcaggaagctccaggaggcgtgcatacagaggaaactccaaaaaccagtgttcacaatcttcttcaaacaaagctctggggaaagttccaatcgtgacctcctctgaacacagattgggtcctgtgaaccctcccgaggaaaggtggtgggaggggccccatatccattccaagccgtggtaccaggaggggcatccagaagataccgaggcttcccttctaatgagcgggtggcaatacatcccgacagggggaaatacagcaaagatgaaccccgcgagagtgagagaacaaggagagaggagaacccaaagcggtctacaaaatctcatatccgctgagcaaagcgcggagaggcgcagcgtgtctcagaccagagggccacgtggggacccacccgagaattgcaaacccgcggcaactttaaccatacagacacggggggtcttcccaccaacccactataacacaggggcgctaagggggaccacacggggccgcccacccgaccaaagcaaagcacacatcacctcccggtagagaattccataacccaaacacacaagagcccccctcaccagcgataagcaccacactaggtcaaaacaaaacgagctcttggtcaacaccgtcgcgcaagacaaagcactcaccatctaccccccgtgcctccaaacagagaacgtctgcaggcgagtgagcaacacctccccagaggccaagggtagagcccccccataggggcccccgtggcgggaccccacacagggaaagaaacaatccatcacacacgggggccttctggacacacaccccgcgttagcacccggcgacgtgctaccaccttccagacagcaaacaaccgccgggggcaaaaaccgggactcacgacaaccagcaccaagtcaccccagaacagacaacaagtagaagacgactccacaacacgcgccgatgaaccaagcgagaacccccacagcaccaaccgaagggcaaaactacaccagaggagacaggcccactaactcccaccacgggaaaccaccacccaccggccaaacctcacccccacagaccccggaccaccaccacgggcgacaaaacacacccactacacaggccaacaacacaacgtcaacacagtagcaaaacaagcaacaacatgctaaccaaccacccgcgacaaacaccagagcgagaccagaaaagacacacagagacacacaacagccactaacaccccacgcacacac

SEQ ID NO: 505939 - DNA, 295 bp, Homo sapiens
  misc_feature (247)..(247): n is a, c, g, or t
tacaggtgctgacagcccagaagtcacaagagaagagtggaagggcaagaattcaacagaatgttcatacaatgtggcaactcttttgcatagttgcgtaggatcctgttttgtatgctatcataaatatctgtagtttctatttttttctctcccaactgaggctattacacttttaatgggattcagtcttgtctctgtgtcctagaaagaccttaatctggtatgacgcatgagcctgttgtanaatattatcctattaaatgctgggtaaataagttgtcgcagttattcc

SEQ ID NO: 505940 - DNA, 393 bp, Homo sapiens
atccccgctattgagcagtgcacacgtattattcaacaaagcaagaactattttacagtgtctgttaactaaaagttctctatcagatagaggaaactacatgtatcctgaagctatttcctccaacgagctagttgagtagatggacctttgggcccatcttatttttccttctttttgttctccagtaaggttcctgtgcccttatgcacatcctatcccatcatctttccttggtttgcgatgatcttgaaacgctagcgtctgtatttttccgtgagatcactggtggcaagggatctctggatcgtgctggctgttcatggttaattcatttctggtgggaagtttccatttgcttccagagttccagtcccaaatccgcactttttc

SEQ ID NO: 505941 - DNA, 1024 bp, Homo sapiens
cagaggcgcttgtttatctgctgaccttccctccactattgtcccatgaccctgccaaatccccctctgtgagaaacacccaagaattatcaataaaaaaataaaaaaaaaataaaaaaatgcagttctctaaattttgggggagactgaatttcaggtaataaaactctagtcttccaaaaaaaaaaaaaacaaccttcttttcaaaccttttctaatctatttaagggttttttttttatactccctcctcgccagaacctctccaacagtgtgttcgggcgtggtccgcggaaaactccgggccccattatttgtgccggctcttccggtgatttgcgcggggccccgtggcccaaaagcgaacggtgggttgttgtgctccctcgttcccagggtgtgtaggcgcgttctcccagagacgggcgccaccggcagcagactttagggcccagtttgtggagggtcctttcatgttaccgtgggctccctgggtgttgcccccgagggtgtcccgggacccttgagcgtcagaacccgcagtcttttttttcccgaatgggctcaatcctcccgctttctctacctctcgtgaagccggcagacatctccttctccggtgggtgagccccccaattgcgacttcatgcggccatcaccctcggacattcgggcccagaggccccgttcaactcctgccccccaatttctcactgaactcccagcaaaaaccggcgcatctcaacgacgggtcgctcgatttacacatgttccatccctattaagtttggttattaacccggtcctcaacctttcccgatctttttgtgccccttaatgcccgacgttaccgtgaccttttctccacctcgtccctctcgagttcacttatccgtgcaacacccggcataacgacgcgctgcaccgcaaatcccgccgcagacgagagggacccctctccttggacagcgtcgcatggccgccaaccagagcgctgcctctacacgtcacgcgtcaaccgaac

SEQ ID NO: 505942 - DNA, 511 bp, Homo sapiens
  misc_feature (176)..(176): n is a, c, g, or t
  misc_feature (239)..(239): n is a, c, g, or t
  misc_feature (273)..(273): n is a, c, g, or t
  misc_feature (302)..(302): n is a, c, g, or t
  misc_feature (334)..(334): n is a, c, g, or t
  misc_feature (362)..(362): n is a, c, g, or t
  misc_feature (381)..(381): n is a, c, g, or t
  misc_feature (388)..(388): n is a, c, g, or t
  misc_feature (443)..(443): n is a, c, g, or t
  misc_feature (469)..(469): n is a, c, g, or t
acccagtccacagggttcaagcaattctcctgcctcagccttcggagtagctgggattacaggtgtgcgccaccatgcccggctaatttttgtatttttagtagagacggggtttcaccatgttggccaggctggtctcgaactcctgacctcaggtgatctgccactttggcctnccaaagtgctgggattacaggcatgagccatcgccagcccagaagctaattttttaatattgnatatgggcttatttatcttgaagttttgtgaacngcgcttaacaggataggactaaaatttcnattctcctacactctgcagaagcctagaactnactaaactgggctgcctttccaaatggnggtgctgacagagttgganaagaatngctcaattttcccaatattggtatgtagcattggacagccctttgggcagctttnaggatacatctatcctgtagattaantgtttctacctggcttaggccaaccagtcccgcatggcacgg

SEQ ID NO: 505943 - DNA, 141 bp, Homo sapiens
gtgggtctgcgaccgggacaatgactgtgtgtatggcagtgatgagcccgccaactgcacccagatgacctgtggtgtgtacaagctccgctacaaggattcgatccgctgcgtcccacgccgttgaaagtgcgactgaca

SEQ ID NO: 505944 - DNA, 1144 bp, Homo sapiens
ctcttcccaacatcgtatatactggctgtgcaaacatgtggattggacactagaaacagatgagaacaggatctacaaacaatgttgtgtagctggcttgccagtttactagtgaagaagaactatattataggccagcgttaatgactgccattgatggcaagacagtgactgtttgtatccggtgtagcaatcaaagcctgactagagaagattcttctcaacatgttctgcagactgccgtcaaccagagtgatcagttccttccatcagagcatccacctagtgggcatggttcgtggccagaccctagttccactaccttgcttgagcagatcagcgcatgaacctaagtgtattacacagattcagatgccgttctagggtgctcacgactgaaacacatgctatccatatactaacaacgatttcgtcacctcctggaatcttattatcgctgacacttgctagaagcatggcagccacatgcccggtcatctgcaggaccagaggaagaaattcgcaggcatattcaacgggcaacgacagtacctgaacactgactttcgtctttccgaacataaactgaccctgaccacgcggaatatcccaggctccggacttccctgactcgacacgtactacttccaacaacagaagcaataggcacctcacgcatactcatccaactctacagccaccatcttagcaacctaagcaaaaattccctgcttgaaggctcttacacgacagcatccgtcatcacgtccaccaccgagcttaccatatcccattatcgtcctgggacccacattgaatctaaccagtccaacggcaactaaggataaacgcaaactccccgtggccaaatcaaaacgggccaagcgcccaagtcggtacaacctgaccaacaagaccccccggccatacacacttcccacaggcgaataggatccataaacacaacatgcgcgcgaaccccccaaccgacaaaagaccaatgcccccacaccaaacactgaccgccaagacaacaagcagatatccacataactcaaaacaaacccgtcaaacataagaaccacagccatgagaaaaagtaaactacacaactaacagaagaaccgagagcaccacacgcacg

SEQ ID NO: 505945 - DNA, 1802 bp, Homo sapiens
  misc_feature (568)..(568): n is a, c, g, or t
  misc_feature (626)..(626): n is a, c, g, or t
  misc_feature (654)..(654): n is a, c, g, or t
  misc_feature (721)..(721): n is a, c, g, or t
  misc_feature (1324)..(1324): n is a, c, g, or t
cggtacgctctgtctccgttgcaacgccggtcggaatcgctggtcgcggccgaagctgggtcttgctaagtgacggaacgcatgtgcggaggtaagccttgagcgcggcactgagagtaccgatgcgaaatgaagactgagtctatggtgagggcttggcacaatctgattgtgaaggagtgtactctatcgcccacactaatattgcataggaggataggtctcaatgagtgaactgcatatgactatggtcgcatatagtcacaccgcgaatgctatacattgtaccgcaatagccgcgcgatatcgtacatctggaattcgtaccttcgtcctttccatgcgtcgggcgggccgcgagctcgtgcgtgcatcttgaactgtgttcacgcaagtgcgggtcaaccgcacgtccttgcctagcgcaacaaccatgcacacccaggaatttggcggctgcatcaaaggtctctgtatctcccgaagggcagaaacccagtgtgcctcttgtttcgccaaggcactgttccctgtatctctgtggtgcgtcttcgtgcccctatcattncctcctgtatggaatcattctctccgtacctactgccacctgaatccatttctgtcantttcgcatatgttatgccccacctctgnccctctcttgttccaatccctgaaaggctctctttcccaattgggtgccctctggattctgacgacnttgcgagttaccaacggtgtgtagcacgcacccgcgatcacgccacgcgggatgtcgctccctatgtggggagggagggccccgtgcactggcgcgcggtctcggatcaccgaggggggcaacgggagacctggagcaggcggttcacgttcccattatattagggccatatgagtatatccatgcgtgttgtctttccacgctcgggtccattttaacttcttatgtgaggctttagcttgtgtggtgtttgcgccctcggtgcctgggccaccactccttgtcccttgagagaatgtcattggattgcgggcgcgggggggaccattgaatggcaccttttttctcccccaaggggtccttagaagtaaaacgagggttggcccccggttgtctccacgccgggtatgggccatctggtcgaaaagactaagcccacccgtgtttgttaatttcgccaggctggtatacccagcccaatctccccagagtggtagtcccacctgtggatggttgtggcccccccgagggttggcgccaacacacataggagagcgggccaccttgccagcgacactgggataacgggccacactagtgtcnaagagtgttaggggatacatccgcaacagccgagaaatgcgaaccagggggacatcaccaccacagcggcatggaaaacggtgggggagcccaagaggtgtgcaacgcccaacaggagctaaacacatagaggaacagagatacagagagcaaagcgtgggttcagccaaaaaaagggatctagcgcagacccaaccgaggagagggagagtaccccccaaggaagagccacgctgggacagtagagagaaaagcaggcaacaatataagaacaggagggggggaggcagagaagagttagtcgcagcactcgacaacatacaaaagaggacaccacgaagtaagaaccaacgcgagcacacaaagaggaggatacacaacaacgggaatgcacacacacacaacacggagcgcgcagcagaaacacaaccaaagcaaagaacgaccagacaaaaaaaaggcagtgatgcaaaaaaga

SEQ ID NO: 505946 - DNA, 171 bp, Homo sapiens
cccacgcaaccgctgaatcaagccttgagcctgaatcaaagcaaaccaataccattgataagaaggaggataaaaacaaaatattttggagatgtttttccaacttaaagtatgaagacatactcagttcttggagcctagattaaacccttttttatgcctttcataaga

SEQ ID NO: 505947 - DNA, 1100 bp, Homo sapiens
  misc_feature (205)..(205): n is a, c, g, or t
cattgagagttgttgttggaactggatttcttttaaattctctgctatagaccaagatatgttatgattacattgattgacagttgttgttgggatggattttttaaattctctgccatagacccagatgtgtagacatttgggcatgttctgtccaaccctactttctgtaacctctcttcgttccgttgcctgtagatgtggnatagagtagaatggactgtgtgtttctgatccactgggaagaaatcagttgtccttttcttgcactggtggagaggctttgggaggcgggagcagtttgcagaggagagagctcactgtgacttctgccgtgttcaccgtgggagacaacgtggtttcaggcagcgatgaccgcacggtgaaagtctgggacttgaaaaatatgagatcccccattgcaactattcgcacggactctgccattaacaggatcaatgtatgtgtcggccaaaaaatcatagccctcccccatgacaaccgacaagtgagactgtttgatatgtcaggagtgcgcctggcgcggcttccccggagcagccgacagggccacaggagaatggtatgctgctcggcatggagtgaagaccaccccgtgtgcaatctgttcacctgtgggtttgaccggcaagccattggttggaacatcaacatccctgcattgctacaagaaaaataaggacaccggcagcccttagtttcactgtttgccagcacagacctttgatgggtgcaggcttttctgcgtattaatcagccatttttgtgagagtttgaccctggaaagggtgctttgtatatgttcttttcacatagtgcccagcttgcatgaaatgtacagagaaatgtgtggtcgtattttttacttttgtcttgtatatgtatgtatattgggtcctctgggcagtagaggcaaagctcacctcccatgtagcacatgaaatgcttgtgagttgttgacattggacaggtgaacagtagggcattacatttgtgtgaattaaatgtgaacttctgtattacgttgcgcgtcgcagtcctgcgtttcctgtagtgcttggatagctgctgtatgttgg

SEQ ID NO: 505948 - DNA, 174 bp, Homo sapiens
gtgcctctcacacagaagttaggcatgcacttgtctcagataggttgggaggagactggacagatcaggcgcaggggcaggggcaggaggctgggctagtgctgtggcccagatattgggcagaggtacagtgcggatctcagacagggagagatgactgagttagataagact

SEQ ID NO: 505949 - DNA, 349 bp, Homo sapiens
cacgaggccagccgctgcctgaccggcccgccagggcgcttctggcataatcgcaaccaccgtttctcccccgacgccgcgcgcccgcgcggcgttcgcctgcctggaaatcccgcaatgacccacaccatcaccgtgatccgcggcgacggcatcggcccggaaatcatggacgccaccctgcacgtgctcgatgcgatgcagctcggcctgtcctacgaattcgtcgatgccggcctggtcgcgctcgagaaacacggcgagctgctgccggcggccacgctggaatcgatccgccgcaaccggatcgcgctcaagagcccgctcaccacgccggtcggcgaaggct

SEQ ID NO: 505950 - DNA, 245 bp, Homo sapiens
ccaagaaggagttttgctctgtcacccaggctggagtgcagtggggtgatcccagctatattggaaaagacagcattataaaacaaggccataattttatgaaaaaggaggcatttgcaaacgaaaacaatttttacgaggttatatgtgattgttaacatttttaaaaaaaggtgcacacaaaaatccaaataaaatgtgattacctttgtgcatttgtataaaaaaatatgtgtgtaattata

SEQ ID NO: 505951 - DNA, 297 bp, Homo sapiens
ttttggggggggggggaacccccccccccttggggccctggggcccccggttcccaaagaaaggggggttcccccccccccttttttttttgtcccaaaggggggggggggggggttcccccttttttttccccttttgggggggggggggggcccttttttttccccccccggaaaaaaaaatttggaattaatttttttttttcccattttttttttggggggggggggggttttttttttaggccccttcccggggttttgggggggcaataaagcccccggccccccccccca

SEQ ID NO: 505952 - DNA, 176 bp, Homo sapiens
ggaaggactgagcccagccagaggcgggcaggtcagactgactggacggacgacggacaggcggatgtgtcccccccagcctgctccccataagttggggcctgtgcacaatccaatggaggttccgcatccctggatcgtggctgaaagcgagctgcatacagaggacagaataa

SEQ ID NO: 505953 - DNA, 418 bp, Homo sapiens
  misc_feature (233)..(233): n is a, c, g, or t
  misc_feature (240)..(240): n is a, c, g, or t
  misc_feature (255)..(255): n is a, c, g, or t
  misc_feature (265)..(265): n is a, c, g, or t
  misc_feature (308)..(308): n is a, c, g, or t
  misc_feature (322)..(322): n is a, c, g, or t
  misc_feature (398)..(398): n is a, c, g, or t
tttaacctgcagcagaaagatgtaagctgcagagaagctagaaactcctaaccttctactgaaaccttaacactccacgtggctgtattggaaacagagctcttgaaatggtcaagattaaaccatcatagggctagcctaataccagaggacttggtgtcttataagggagagacaataaagatgcaaaaccaccggggaaagccatgcaaaagaagacagttatccgaaancaagganaaagagtgcaggagnaacccgaatntctctaacacccctcatcttggacttctaatcctctaaggacntgtgagggaatatnactttcctggttggttggaaagccattccagggatgtccttgggtctttccccataccttccttattcattaaatncctcaatattattaatggca

SEQ ID NO: 505954 - DNA, 132 bp, Homo sapiens
tgttatagcgtttagtcctctcggatgacctgattcccgtaccgtgtcacatggtatgcacgggatacatcgaagtgataggcagagtcgaatggtcgtcgcgcacgggggcgtgcgatcggccattcgaag

SEQ ID NO: 505955 - DNA, 549 bp, Homo sapiens
ggaagtcccgacccgtgtcaatggatgccagaattcaggtagcccaggagaatcgcttgaacccaggaggcagaggttgcagtaagccaaggtcacaccactgcactccagcctaggtgacagggcgagactctgtctctcaaaaaaaaaaaaaaaaaaatttctttgaaacggggtctctaattttgtggcccaagctgatctcaaactcggggctcaacggattctcccgtttcaaccttgattagctgggacgacagatacattgctattggcggcccagctagggttaagggttctggtatactctggtctttctaaaggcaattccctgggaaattttctcaacggtgggttataactggaatggctgggaaagggaggggcagccctttcaacgggaaagggggactggcccaaatcttaaatggcacagtcgagattctctgggagctagcaaggggtcctcaggttagtgagcatttagctggcctggtggcagaatttggacccagatggggggtggttccaggtctctcacaattgagc

SEQ ID NO: 505956 - DNA, 132 bp, Homo sapiens
gatgatctacgcgcttaccgggtctgggtaatgccgggtagtagctatcttgtataatcttgaactacaggttgttttgtatttagtgatatggcaaaaaagagattttgtgacacataaagtgatatgaaa

SEQ ID NO: 505957 - DNA, 172 bp, Homo sapiens
tagtcagctcggacccggtatgagcggtctggtatgttgatactaaattaaaggaggatttattggatgtattggacaattggatgaaaagaattcttaccagcaatcttctcatggccaccattctcatcaggttcctgagtaaatatccactgctcaggcttgatttggg

SEQ ID NO: 505958 - DNA, 165 bp, Homo sapiens
atggaatcggagttgtcagtgccgtcgattaccaggtcataagcgccgaccagctccaacgcattgtcggcgttgagagcggtgtcgtgggcattgatctggatattgctgttgaggtcttgcagccgccgcttggccgactcgaccttgggcatgcccaaggtg

SEQ ID NO: 505959 - DNA, 1634 bp, Homo sapiens
aacgtttcattctcgttaataaaggcattatcctaattaaaaaaaaaaaaaaaaaaaaaaaaaaaaaaaaaaaaaaaaaaaaaaaaaaaaaaaaaaaaaaaaaaaaaaaaaagataaaaaaaaaaaaaaaataataataaaaaaaaaaaaaaaataaaaaaaaaaaaaaaaaaaaaaagaaaaaagaagagagcaagtaggctatataatagttaaattggagaatgtggtatttttggaatgatataagagaaaatcagagagacggagcgaacacacaaagctgggaacagccagaccaacactaaagacgaaagtaaggaagacaacgacataagggcgacaaacgtacacacaaacccccaagccactaagaaacaaaaaaggaatgagaagaaaacacagaagactacacaacagctatgcgcccaagcagaatgcactaaaccagacacactaacgcaacacatcaaccgaaaacaaaagagagaaatagcggacagaaagagagagatcaatatcagaacagcccaacgcaaagagctagatgatgcaaccaaacctagacacgaacaatcagtgagtgatgaaaaacatcacaacaacacgagcactgaaaccgacataatcaaaaacaaacgaaacaacacgactaatacaggacggaacacctagacgcacgacgacaacaaacactcaacacgaaacaccagcacccaacagatgcacagaaatgacaacaaaccagaccggagacaagaaatcataatactagaaaaagaaaaacacataaacttatcacacaaatcacctacacataaaacataacgacaaatacaaaatactaaataaaaaaataatctacaacacacaataaaaccaataaaacaacaatcacacacacatctagaccatatacacattatacaaacacaatatatatctatatcaaatcaagacaaaaacacatacaaattacaaaatacaacactaaagaagactataacatcaatataatatatcaataacgaaatcaacagtaacaccagttaaacaatacatatcacaagaaacacaactacgaaagcagagaagacgataggagagagagaagagagagatgaacgagagcgacgagaaacaggacgagaggccgaaattagatggcagaggcgcgaacgctgcagaagcggaagggagagcagagaaaatagagtgggcgggatgacagaggtaggcaacagaggaggatgagcgaggaagaagcgaagtcgagacggcacgaaacgcaggatgcagtaacgactgacacacgaggaggcagaccagacagatgagcagcgcgagagcgaacgaccagcactcagatgcgacccagacggagaaagcgacgaagggcagagcgagacgagcgagcgagagcgcgatcgcaaacctacagatcatctcgtcgagcacaacacgacgaaggcgcgatcgagatgcatagacgcgactgcgagcacaacggcccggagaaccggagcgcacaagcgaggtcggatgagagcaacagaattgagcttggaggatagagtgagaaaaagaaagaacgaacaaaccgacatcccagcacaacaacacaccaaaaaaca

SEQ ID NO: 505960 - DNA, 177 bp, Homo sapiens
tggaaaatgtttgaattagaagttattcaagggccccctcttttttaaaaaaaagcccatggctataaggccaaaaaagtttggcggcatgggggattttttgctcttggaaaagctttttgacccagctttttgataaagcctgaatggaaaaaataaagctgtttttttttgcca

SEQ ID NO: 505961 - DNA, 362 bp, Homo sapiens
aaaaaaaaaaaaacccccttttttttcgtggggttgggctggtttttttggggccccaaaaacaacccgttttacccccgggaccccaggggttggtttttcccccccaagggggccctttattttgccgggggttcccccgatttgggtggccccccagggaaacttaaccccccaaaagggttttggtttttttaaagccggccctttttaagggcccccttccccaccaaaggatttttacctttttccgggggttacccttgtttccgggacccggccgggtggtttcccggcccaaggtttttttttttttttggggttttttaaattgcctgttttaattaattcccccaaaggga

SEQ ID NO: 505962 - DNA, 297 bp, Homo sapiens
  misc_feature (207)..(207): n is a, c, g, or t
acagcacgcgctaacaatactgaaggccaggtctcaaggtgtcacttttgtattcttggatgactgttgaatgtgtggtctcgacgaatggctttgtggagcagctttctccagagacttgcatgtgcttggattaacaaacttgcgatccagggatgctaagcaggtgccttctgtgaccaagctcagtattgagggcgctgctgnccttgaggcagccaagtgttcttgtatacagctgtgttgtgtagcaggttaagtgctgcctctctcctgttgcttgttagcgcgtgctgt

SEQ ID NO: 505963 - DNA, 226 bp, Homo sapiens
gctgaatagtgtcctacggcatagatagggcagtgcccatgtcttcagcaaagaaaggcaaaatagacataccatacgatccagtaatcccacttcttggtatataccgaattgaaagctaggactcaaacagacatttgtatacctatgttcacagccacaatactcacaagacacaagccaaaggtgggagcgatctatctcatttgatagagttgtatacaca

SEQ ID NO: 505964 - DNA, 406 bp, Homo sapiens
tgatagctacagaatagtcctggtgatattgtagaaatggcggtggtgacaaagtcggtgtgatataaggttaacttccatcaaatctaccacactaagagttgaccagtcaattctcacaggtgaatctgtctctgtcatcaagcacactgatcccgtccctgacccacgagctgtcaagcaagatcagaagaacatgcggtattcttggtacagacatagctgttgggaaagctatgggagtggtggtagcaactggagttgacaccgaacgtggtaagatccgggatgaaatggtggcaagagaacaggatagaacaccccttcagcaaaaagtagatgaatttggggaacagctttccaaagtcatctcccttagttgcacatactggtcgagattcgggtc

SEQ ID NO: 505965 - DNA, 1095 bp, Homo sapiens
  misc_feature (855)..(855): n is a, c, g, or t
actctatctttcatcctgggtctctttttttctttcttgcctccaacatattaacacactgtgtacctactatcctacttttccccacccgttttgacacacttgagttttcccttttttacagtttttcaacattttttgtgacctctttttgacacctccgacttggtgcctgcccccccgggttgctacacatatgggtcacacgccggctttcccagccatttatatctgacctcggaaccggctgtgaccatggcacggtttcccgcggcacttgcgttcatgcccgccttgcccccctgaccaacccgggcaaccaacagtaccgggcgcttgacccgtgcccgagctcacccagcagatgtttgatgcccaggacatggatggctgcctgcgacccccgccacatggcccgctacctgtaccggttgccccccgtgttcaggggcccgcatgtcccatgaaggaggttggatgacgccaatagctttaatagtccccaaaccaaattaccgccagcttatttttgttgagatggattcccccgcacacaatagttggaaaccggctgttctgtggacaatacgcccacctccgggggctataaaaatgtcccgccacccctgtcaattggcacatcaagcaccggccacatccacaggagagcctggttcacaagcggcaatctccgaggcacgtgtcaccggccacatgttcccggcgcacaaggcccttctcctgcaactggtaacaccgggcgaagggcacatggaacgaagatggagttcacaccgaagggccgagagcacaacactgagatgacctcggtgtccgaggtaaccacgcacgtancccggaatgccaccacagccgaaggaaggaagggcgagttcgaggaggaggctcgaggaaggaaggtggcctagaggccctcacgtcacctggggaaaagcacgggaaagcacgtgtgaactctttaattcaactcccacgcctgtcctgtggcctgtccccctgtgtgcacacttgctgttttccctgtccacatccatgctgtacagacaccacccatttaagcattttcatagtgga

SEQ ID NO: 505966 - DNA, 342 bp, Homo sapiens
aaatgcttttcctttatcttgttagcttccttctctttgattcaaagaatgtcttttttgtgtactggtgtctctgtaaaattatgattttctttatggtttaaaaaggcaagagagcccttgctttcttacctaatccaagtttgtgtagtgaatttaaaaagaaaaaaaattgttataagtttggagcaagggagtatgtgtttcaaaggattccttcctttttgtgtgtttttccttttgtccaatggggaacctaaatctgttttaattgccaacacatggcaaaaagtcattttgtattgccaagtgtggaccttcctttgttttttgcataaagtt

SEQ ID NO: 505967 - DNA, 1564 bp, Homo sapiens
  misc_feature (848)..(849): n is a, c, g, or t
  misc_feature (871)..(871): n is a, c, g, or t
  misc_feature (873)..(873): n is a, c, g, or t
  misc_feature (899)..(899): n is a, c, g, or t
  misc_feature (924)..(924): n is a, c, g, or t
  misc_feature (949)..(949): n is a, c, g, or t
  misc_feature (1065)..(1065): n is a, c, g, or t
  misc_feature (1490)..(1490): n is a, c, g, or t
gattttgaataagtattatctgttgttcgttttgttgcttgtttattttttgagttgttgtggtggtgatatgtgtttgttgtgtttgtgtgttgctttgttgtttttgtgatagtgtttgttgctgtgatttttgttattgatttgtgtattggtgctgttgtagtgtattttgttattgtttatggtgtttgagggttgtgattgattgatgttttgtggttgattatggtgtgacttgtattttggaagtatttgtgttggtattttattggttttgtgagttttagttgtgtagttatgtggtattgtgatatagatttgtgtatgagtatgttattgttgacttaggtttatttgtggttgtgttgtctgttttctgcttggtgtttttttggtggtgctggctatgtggtgtgtggttgcggtgcttccgttgttgtttctgctttttgttgttccgtttttgttctctctgtttttgtgttttgttggtgttgtgttcttgtttgtttgtggtggtgttctgttgtggtttttgtgctgttgtgttgtgggtgttggtggttatttgttttgtttttttcccgccgcgcccgcgatggtgttagaaacggcgtacaccaggttgaatagcacagtagaccgtttatttggtatttcgaaacgccgcaaataccgagattttataggtgcaccacgctatttaggaaccctctgaaaaggagtccccccacaaaggtgtgtgggcaccacaaaaaagccccgcgtctttgtataaaaaacggaccgcgcccaccgtaaactatttataccgggtgtcctaaaggttattacccgagaggccnnttgggtgtgccgaaaattttcngngcaccgagagggcgccccacaaccantggggccggccgtttctcgcacccncacaacccccggtgagaagagaagnggcgcgcccccgcgggttcacatcacatatgagaaaaagtgatcttatacacagcgcgcgccctctggggcacacacagagactttccaacacacacggaccacacaggcgcgctntgtgtgcgcgagaggagagagttccccactctatgtccccccgccccacaaaaagctctctccgccaacacacacagagatatccaccagggttaatgtcaccgcgcacatcttgagatgagaagcgcgagaattctacagagagagaggcgccaccgtataagagagggtgatatctttcccctcacacagctcgcacaggagaggagaggagagaagagagagaaagagagagaagaccacacattaatgttcctcgagaggttctcacgcccctggaatacacaggagagaattatattgaaagtatagagtcccgaccacactaaaggagaaatgctgaaagcttttggagacttcggccagtctgtccacaaccttcacaggtcacactcagcctaccggttgggatgaatttccaaacncctcggggacctgtttgaatatttttctgtagtgctgtattattttccaataaattctgggaccaccacgccca

SEQ ID NO: 505968 - DNA, 331 bp, Homo sapiens
  misc_feature (74)..(74): n is a, c, g, or t
  misc_feature (112)..(112): n is a, c, g, or t
  misc_feature (115)..(115): n is a, c, g, or t
  misc_feature (120)..(120): n is a, c, g, or t
  misc_feature (138)..(138): n is a, c, g, or t
  misc_feature (145)..(145): n is a, c, g, or t
  misc_feature (147)..(147): n is a, c, g, or t
  misc_feature (157)..(157): n is a, c, g, or t
  misc_feature (168)..(168): n is a, c, g, or t
  misc_feature (171)..(171): n is a, c, g, or t
  misc_feature (185)..(185): n is a, c, g, or t
  misc_feature (190)..(190): n is a, c, g, or t
  misc_feature (219)..(219): n is a, c, g, or t
  misc_feature (222)..(223): n is a, c, g, or t
  misc_feature (238)..(238): n is a, c, g, or t
  misc_feature (253)..(253): n is a, c, g, or t
  misc_feature (261)..(261): n is a, c, g, or t
  misc_feature (267)..(267): n is a, c, g, or t
  misc_feature (269)..(270): n is a, c, g, or t
  misc_feature (279)..(279): n is a, c, g, or t
  misc_feature (281)..(281): n is a, c, g, or t
  misc_feature (288)..(288): n is a, c, g, or t
  misc_feature (296)..(296): n is a, c, g, or t
  misc_feature (317)..(319): n is a, c, g, or t
  misc_feature (326)..(326): n is a, c, g, or t
gtcgcgcggaggcggaggcttggggtgcgttcaagattcaacttcacccggtaacccaccgccatggccgatgnaggcattgctgctggaggtgtaatggacgataatactnctntacanagaggctctgaagactcnccctcantncacgatggcnctagcacgtgnganttcgcgaagtcgcncaaangctcttagacagagcgtcaagccatgctntgnngtgctgtgcatccanctgtggatgagcctnattgtatntcaagntnngtgggaggncnttttttnttgaacancaaatcagcctgaattaaggnnngatgganaacaa

SEQ ID NO: 505969 - DNA, 802 bp, Homo sapiens
ggcatctgcaggatgtgactctgaaagaaggccagatttgtaccatgacatgccaactttactgtaccaaatgtaaaatctgaatggttcagaaatggctagaatccttaaatcccagagggttgagacataacagactagaatgtggagacacatagagtgccatcaaatatgactcatatgctagactgttcgatgacagaatgagccaggatcagtacatctgcgattatgaagaccttgaaacttcaatgcagaacttcgagaattcgaacgctgagactcaattcatgtttacaaaggcgcatactgaacatcgtggtgagtgagcagtcagtcctgccactctttgagtgtgaagtgtctctttgatgattgccatttgtaactctggtacaataggaccaagcaagatactgacagaagagtcctagaaagatagaaacttcagggaaatgagtggccgctgtcattagtatgatccatccataaatgtgaccccagaccgatgaaggtggtctactcggtcatcgctcggtggatactcactgaggtgaaagccggaagcacggagagcctgtaagctatacggagaacagacctcatactttgagcttgaagacctctctgaatattcctgatccaggagttcaagtccaatcatgtctatctagagctggtgcgacagaagaaaattccttccgtggatggtccatctaatcccctttggttccataaccgaagaaaaaaaccccacaaagttttggcgtccaaaagggtggacaaaaagcccagtgtgcaa

SEQ ID NO: 505970 - DNA, 305 bp, Homo sapiens
tttcccccccggggggaaaaaaaaaatgcaagtttgggccaaaggcggggtcccctccagggggggctcccccttttttcccccccgggtccgcccttaattttttggggccaccccccttaaattggggggggggccctttttttttccccggggccggtttttgcccaaaaactttaaccccggggggggattttttccccttttggggggcccctttgggggggggggccctttttccccttttcccaggggggttttttttttttttttttttttttttaaatggttgggcccttgcccca

SEQ ID NO: 505971 - DNA, 740 bp, Homo sapiens
  misc_feature (740)..(740): n is a, c, g, or t
cgcggtggctcacgcctgtaatcagagcactttgggacggctggatgcgggtggatcactgaagtcaggacatgtataccagtcggctggctagaccagcggtgaaaaccccgcgctgtctagctaaaacaatatgaacactaacaattaatagattaagccagcggacgtggatggctatggtgcctagtaagtcccagactacttcggggagagcttgagtgccaggagatatgggcactgaatcctgtggaggactggacggttgcatgtgagattgaggatcacagccattacatccctccagcacttgtggcagacaaagtgatgatcgtccaatctcaaaggaagaagaacgaatggtttgaagaatagtttcttgggagaagtatccaataagtcacggcactccaagacaagtgtctatattattaagcctcactttcagaggacacgcgcgcgggggactcacacctttgtttaacaagtattttgacctgggggctgcacaggtagcgatatggccaaaagagaggacaaccgcacagttggcgaaaagatacctggagcgtgggggagagttatccacggaatctttaaggaccagacagtagtggctaaggcaaggaaaggaaataggtaatattctacgtggataagtaaaagcgaagtggcagaagacggttggacaaaggctgggggaaaatctggcagactttgtataaaggattgactggagn

SEQ ID NO: 505972 - DNA, 718 bp, Homo sapiens
aggatctccactgagcgtacagtcaccaagcgcctatcactaccagctgacatccggccgtgcctgagggctacctggagaagctgaccctcaatagccccatctttgacgaagcccctcagccgccgtcgtccgctcgtgtcaggcctatctggatgattggctttgtggaacagctggagcacctacattcatagctggacacaacactggtgccgaggcgctacctatgccacccgtctacaagagtgcaagaacgctacagctcacagacaaccttgtggcactcatggagcatccgactggagacattgtacacgagggggcacccgtgcactcgccagtgcccggcgcaaggtgtccctgctcacgggacctccatatcacgccaacattcgttaacgctacattgacctacttatccatcactggcaggaagtccctcacccttgctctgttgacctacctggcacgaggacctgaagcagtaccgtggatgactgtgggaacatcatcaacatgcactaacgtgaaactgttccctgttccagctgcctccggtggcctgcgcctactgccaccggctggcaaggctgctacaccgatgtaccctcaagcccccagaatctgctctatccaggcccaggggcagagctcaaagctggctgactttggcctgtcccgagtcacgtatcccactgggacatgctccatgggg

SEQ ID NO: 505973 - DNA, 299 bp, Homo sapiens
tagcttgtagttaatgccggtaagaatacattgactacatactctcccttactactttttattagcattcatatacaatcttatttcaaatcaaggttacagcttcatgtcatttgtagagtcagataatcctagaaaggcttgtaagaaagaagtgccaacatccttcccctaatcatgtttcctcccctgcagagtatctacttcagccttagtagatttccttgatctttgcctccaactctaaagagcatatttgcttgacgtctgtatttgcgtcccctacccctgtgtcatgt

SEQ ID NO: 505974 - DNA, 468 bp, Homo sapiens
  misc_feature (28)..(28): n is a, c, g, or t
  misc_feature (70)..(70): n is a, c, g, or t
  misc_feature (150)..(150): n is a, c, g, or t
  misc_feature (174)..(174): n is a, c, g, or t
  misc_feature (181)..(181): n is a, c, g, or t
  misc_feature (244)..(244): n is a, c, g, or t
aagctctacctgctgggagatggagccncctgaagtgtctagtccctagttcctgccgggaaatggaacngccatcttgaactgtctatcctagttcctgccgggaagatggagccgccatctgaacgtgtctagtcctagttcctgccngaagatggagccgccatcttgaantgtctantcgttagttcctcccggaagatggagcgcccatcttgaacgtgtctagtccctaggtcctccngacattcaccctacaagctcccagctggcttgtgtatgtctgcagctcgacttgacaggctgttcattgttagaaaatgacttggggctgcttttcgttaaggagaaaagctgccgggcgcagtggctcacacctgtcatcccagcacttttggaggctgaggcgggtggatcattaggtcaggggttcgagacgagcctgaccagtgaaaccgcgtctctact

SEQ ID NO: 505975 - DNA, 247 bp, Homo sapiens
  misc_feature (175)..(175): n is a, c, g, or t
  misc_feature (236)..(236): n is a, c, g, or t
  misc_feature (243)..(243): n is a, c, g, or t
tttaatattaaaaatactgatttttaatattgaaaataaaaggcatttaatatgctcttaaagggcatccacatgctgctttatccctagtcggaagagtgagggggcttcacacgtgtcactcacactgtggtagtagagttggatttcccagtacccctgtagggtcacctgntcagggttcatccccattggtgtctgcttgaggctactggggactgtggtcacttgacgtngcttgancaag

SEQ ID NO: 505976 - DNA, 291 bp, Homo sapiens
  misc_feature (30)..(30): n is a, c, g, or t
  misc_feature (74)..(74): n is a, c, g, or t
  misc_feature (107)..(107): n is a, c, g, or t
ctgcagacagtctggcaaggacagcgcgtnacgacacagctctcgctggccacttaaatcttccagtgtctctntctttataaacaaccctctggtgacctcctttntgctattttttttccttctttgggtaaattctcagcagggggattttggagtgagagtataatcttttttggaactttcaagggacctggctggcttgtcctctctgcgtggcaaacacatatgcccaggttagcccggcagccaccctggtctacccagggagcccctccgtgggctttcagg

SEQ ID NO: 505977 - DNA, 449 bp, Homo sapiens
tgcactcatagcacccacagggctaatcatactggccttacaaccttatacctcttcatttggtctcctcacttacctgcagaaacccagtttattttggtcctcccttaaccacaccagccttgtaactgtaacgaatgaccctcaatctcactggaatctgaatcactcaggaatccaagcaaactggatgtcttaaccactgtacagctttcttatggaatgacagcacacttgtaaagatacacacaccagttggcaggaagaaaggaagagaatggacacatcggctactggaaaatactagttacacaatatgtttggttggtctagctctctgaaataacactttatcctataaacatttctgcaagaactcagccattaggactgttaagttctcaattctaagaggcacataaaatgtctaaggaggatattatttgccc

SEQ ID NO: 505978 - DNA, 233 bp, Homo sapiens
ctctagagtatccccgcacagcttctatgtggggtaaggcgaggttagcgaggcttgctagaagtcatcacgaacgctattagctgggagtacagtttgaacgtccttgtacgagaggattatcgatgcgaactgtgagttgcgttcgctacttcgcagtttgctacggcagaactagtatttgagcgatgtaatgtccgtgggcgacttattcacaactgactgggtaccga

SEQ ID NO: 505979 - DNA, 234 bp, Homo sapiens
ggggaaaaagaaaaaaaaggggggggggggggggggggttttttttttttaccccccgtagggggggggggggggtttttttttgaccccccaaaaagagggggggggggtttttttttgaccccctaaataaaaagggggggggggggggggtttttttttgacccccctttcagggcccggggctgatttttttgggtttgaaataaaagaggcggggccttctttttttta

SEQ ID NO: 505980 - DNA, 1302 bp, Homo sapiens
ggctgaatcgcctgagcccggaacccgggcgcggtcacggcggtgcctgcccatcctggtgccgggtcactgaactgcttcgtgccatgcagctagcacactcgctgctctggtcgctctcgcgtgcgcgcagcatgctcctgcctctctcgttatgtcctgttcggctgtcctggaatcccgccgtgtcgcctaggtcccttggagtctcgcgcttgccaggccactcgagtacttgttggtctgctccacgtaggcggacctgagccatcctgtggtcgatgctcgttgcctgccggttggacgcgagctgagggcacgtctgtgtagtgctggccacgtcctagagggacggagagtcaatccgtcgcgtctctgtcctgtgctgctctcggtggctccgtgtcctgtacagctctgttccggatgcgttttgcctgggggcccggcccgaggcgtgatccggcgtgatcgggttctggggctgatgagcctgcggggtcttgggtatgcatgcatgtgtacgtggtgtcaagatcagagtcccaaggaaccgttgcagctgatcagcagtcgttgcttcgtcgcttgcaacccatgctagcgggccaactcgggcggcccccttcgcatcacgccgaaagctttaacggcacacggacgcccggcctgtgaactttgcacgatttgcgaattgaagcacgcaaggggcaaatcacgggatagcccttcatccaggaaacccatgagagtggttgaatggtcggtgcccccccttaaacgactcaaacgcgaagaggtgcctccaggccccgttgggccttgtccaaccattccagctagtaaggggggcttcccatagaactaccccccaattagagacttcccgtatccagttgcgcattcgttttttgttgcttggttcttcccggccgatccaagcacccagagttggcccttcaaacccgttcagattttcccagaagcgcggggaaaccaaccagcccgggcccttggagagggtcggggtccccaaggtacagtggagcccatggttccccccccagattgggcaaagccccccttgagaatcctttgaaggtgaaggcccaggaactcgagattggacaggggggggggcccagggtcccattggcgcctttcaacacaaaagaattcggccaaaagccaatgggtgtctcaacttgcgcatcttatccccaggggagaggggaaatttagggcaaaaccaggttcccgggccccttcttttcggggttgtcttcctttaattgagagccc

SEQ ID NO: 505981 - DNA, 223 bp, Homo sapiens
atacacgggagggggcagaggactgctcggatcgcttcgtcaaacactgtatagagagcctcgctgtgtgagcgccgagcactccaggtattatacagcaccaatctccttagccatggactagaccctgcggactaggtgatgagagagtcagcattcttctccttacagtttcatcgcatcgtgtctattatcatacccataagactcaacgtttacgttc

SEQ ID NO: 505982 - DNA, 1018 bp, Homo sapiens
gtccttacacgaagatcatttagctcagtctaaagtataggtcgatagacctagaaaacaggagcctaatagatcatagtatcgcagtcagggactacatgatcatttatcatctactgatatctcatagtcacatggtactgacacctcctatcaccttctgcataatgaatttaaataaataataaactattgtcaaggagagccaagagctaagaaacccgcgatagaacataattcgatgctacgctaatgaatcacgtatatcaccatgcagtcagacccgctcataatgcttagcacaatatcagttgaggatagatatgaatagagggtatccaaggcagacaatcctattcgaatcatgagtgaatagggtgcattcgtcctgaggatagaatcttagaagctaaactctgaaattttggccgcgacatgaaatcctcttcctaatacttctcacccttggtatacactccctcaatctagtttcacgttccaaaaacgaggagacacgtgtctattggcaattagcatagtgagaaaacaatccgtatggtaggaagatgagttaaaagaatttcacaaccatagtaggacctaaaaatcagacaacaatttaggaaagcgtacaaaagctcacaccacatcactgactctaaaaaaaatgcaccaaacatactaagatgatctacctcaaaaccaattggaccgatctatcaaccctataggatgaactaggtgctttgctcctgacacatctgtggagcaaaccacagctttcatgccccggtcggcgctagaattagattaccctagaagagcgtcgaaaatagggcacgcatttaccctatagacacccggtctaccccctgttagaggcaaaaaaaaagaggagaggggccggagaaacaacgcctggcacgggcaacacgggacggggggcctctgagaaagaacccaacacaccgacggggagaacacaaaccgggcatacaaggggttcaaggcgggacaa

SEQ ID NO: 505983 - DNA, 241 bp, Homo sapiens
  misc_feature (13)..(13): n is a, c, g, or t
  misc_feature (60)..(60): n is a, c, g, or t
  misc_feature (159)..(159): n is a, c, g, or t
  misc_feature (168)..(168): n is a, c, g, or t
  misc_feature (197)..(197): n is a, c, g, or t
  misc_feature (235)..(235): n is a, c, g, or t
tggcagaaaatcnaaaagggcttaagaagtaacatgttcttatgtgactggaccctgganactgttggccttgtttgtaagcatcccgagtcataaaaatgacctgaaaatggccaatcataaaatcacagcgatttctttgttactcaggaagttatnttgaggtantaagttttaattcatccatcagaatgaanttcaactgtaagttagtttttattactcctacctcccngaaatc

SEQ ID NO: 505984 - DNA, 289 bp, Homo sapiens
tctcatctctacagctgctggggcctacctcccatgccgagaccagcaggggaaacgctccaggacgcattgcaggctctgttctgcgcggctgctggattgctctcctggtggctcttcagcggacagcttcctcacccacccggcactctgctttgctctgtctcctgaggtggtgctgagcaacctccccttctctgcctcagtccctgggctccagggttcagctccacagtcctctgcctagcacgctggttttccctgtccagccccagctgcggggggatcc

SEQ ID NO: 505985 - DNA, 219 bp, Homo sapiens
atgacctcataacgatctcaaaccaactgtgggggtcctcgctcaacctcttcttccctaggtcacagcactatcatctgattgcgttagggatcggtctgattggcaggaaaataatcagctcccaatggagctcaacgtaactaagtagggtccccaagaaataaaacgggagctatttcacagagctgaggttctgccaaatttcattcctcaaac

SEQ ID NO: 505986 - DNA, 373 bp, Homo sapiens
cccccccccccccccaaaaaaaaaaggaaaaaggaaaaccgttctcttgcttttaacgggaaatggctgccaataagagtaatatttctatccccctttttcaaaaaaaatttggacacaaacttccccggccacctgggggaagagtgaaaaaaaccccgttccctgtgcgcttgtgcccagccgggtgccccgcccccagtgccatccagaagaaactcccctggcggaaagtccagcctcgtcttgggttagctctgactgtcctgaacgctgtcgttctgtctgtttcccccatgcttgtgaactgcacaacttgagcctgactgtacatctcttggatttgtttcattaaaaagaagcactttatgta

SEQ ID NO: 505987 - DNA, 609 bp, Homo sapiens
tctcttacatatcttgtagtagggggctccggaaaccaggcgctgcgtgaagtggctgcggggccctctatatttccctcagccacaattccccataaccctgtgtgttcagtggacctgtgcagggcgggtgctgccgcgcgaagactctatacccagttcgagttttaaaaaccgtggctgtgaaggtggtatgtgtcttagagggagtttacaagagaacccccagccgtggctcacgaggagagccccccccgaggccgtggatatataagagtctctctatatacagcgtgagttatgtgccgagagactatgtgtgtgtgtttactacaagagcgtggagcacaatatatcagtaatctccccgccatgatgttgagacacaagccgatgtaaagatggagcgactatactacctctcctccgagaagaagtggagaagaagagctgtggtgcaaagaagtagttgtggagtattcctcagaaaaaaactactccgcggtgtggaccaaaagtacccaaatatctataaactatgctgtgatgtttccacacaaaaccaccgtagttgggcacacacaacccctttttaaaaagttctcccaa

SEQ ID NO: 505988 - DNA, 186 bp, Homo sapiens
tctagagttatccccagtaaatctggatatcggagttgtcccgtgagcagaagcagcagcagcagcagcagccctcgccgtacgcggaggcgcagcgcagagccggccatggtcgttgtcgatgccgctgacatgggctagaaggaggaggacaaatgagcccctacatcgaggctcttcgtacac

SEQ ID NO: 505989 - DNA, 563 bp, Homo sapiens
  misc_feature (3)..(3): n is a, c, g, or t
  misc_feature (25)..(25): n is a, c, g, or t
  misc_feature (94)..(94): n is a, c, g, or t
  misc_feature (186)..(186): n is a, c, g, or t
  misc_feature (259)..(259): n is a, c, g, or t
  misc_feature (262)..(262): n is a, c, g, or t
agnagctctgactaggctttggaangggaactttgcactgtcctctttctgaagcgttgctttgtgggagtcctgtcacggggagcagtcatgnaaagaggaccggcccctcttcccaggtacaagcacagctcctgtgcactccgactcgctgttcccctcatctggcctccccagagcccaagnactgcctgctaaccccagaccttctgtggtccacttaggactcttgcccacccattggtccttccggccggcnccnccaggctgggctttctcagggggactccagctgcccttctgccccatgaggagacactagctcccttggcctcattcccttactggcaactgagggtctggttcttagagtcccttatgtgtaaacatgtaaagcttgtggctgtgaggtgtgtttggtaagaacagtccacagctttcaccagattctcaggagtgtcagtggccccttcccggtcaataagttgaagagccggggtcagtctggctgccactgagggccaggctgcctccttgtgtgcttgggtggcctgactgcaagg

SEQ ID NO: 505990 - DNA, 264 bp, Homo sapiens
agaccccccggtctattattgttacacaccaccctcacccttgcctttttaaaggggctcgggacttggctggagctttatttcattaatgcaaagacaaatattagttatgcctttaaatacaccctacaagggctaaggacaatgctccagcactaacaataacaatgcattccttttcattccctgcagagctccaaaggtgacttgattaacgtggatgagatcacaatgctctttgccaccataacttcacttttggag

SEQ ID NO: 505991 - DNA, 198 bp, Homo sapiens
cttatggcgactgcaggaggatgtgtatgttattttgtgtctgtgtctttctgtgtgtgtctgtgtatgtaatggtgtgtctctgtggcagggaggggctgtgtgtgtctttctgtgtatgtgtgtgtaacggtgtgtctctatggccgggagggggtatctgtgattgtgtgtctgtgtgtgtctgtgatatgtaat

SEQ ID NO: 505992 - DNA, 358 bp, Homo sapiens
ccactgcactccagcctgagccacagagggagactgtctccaaagaaaaaaaataaaaacctggaaattttattgaaaaatgaaaccttcaaaatgtgccttgactacttctttagctcctcttccttagtgccttaggtctaaatcaaatgttacgctcaaccagtcctggtgcatgcgcctgtaatcccatctactggggaggctgaggcaggaggatcatttgagctcgggagttggaggttgcagtgaactgagactgcccacggcactccagcctgggcgacagagcaagactctgtctcaataaataaataattaattaaaataaaaaacagcttaaagagaaaaaaaaaaa

SEQ ID NO: 505993 - DNA, 906 bp, Homo sapiens
ataatcatggaggaaggtgaaaggcacgtctcacacagcagcaggcaagagaagagagcttgtgtaggaaaactcccgtttttaaaaccatcagatcttgtgatggcctatcatacacctaatcatcactatcatgagaacagcgtaggaaagaccctgaccctccaatggctctcaactcaccgtgtccacaacggattgctcccatgtgaatgtggtgggaaattgatgggaacttacaaagttcatgggtgaagttggtgctgggcgatacaagtctaaccatatcatattactatagtatgctttgcttgaatttactgttataattagtgtaggcaaactttggtgtttcttcgtgatatctttgagaaatatgaacttagatgttgggaaatattacctagtatatctgtataatttgtttaatatgttttaaaattattgtaattagtgtatcaattatttcaggctcaatatatcttatagataagttgatatgtagcatcagttgggtatttgcacttaataagcattaggtagaattggatatcactggctgagtgactgtgatcgtttaaaggcgtataatgggttagttgccgagtttaactgttagaaggtggttaacgagttaagagtcccattatgccagatttggaaattatgggatcacggattaggtgtgcacctcattcacttaattgtcctcacaggatacccaggttcacggtggacaagctgataatcaccttacattggaattcgggtgaggcgtaggattcttccacacatccatttagccgtttgtcctaaacaacaagcctgaggagaagaaagtcaatagggagagagaaggggcaaacgaaactgatcgggggacatagaaaacgggcagaagaaggg

SEQ ID NO: 505994 - DNA, 110 bp, Homo sapiens
tacgattacggtctcgcaaggtgtaaacaacggatatttcaggtcttgggcagaaacaaaagaagaccctgaaggcagccccctgagtgggtgcacagaggggtgtgtat

SEQ ID NO: 505995 - DNA, 470 bp, Homo sapiens
atcatctcgcatcggtaatccctagccgtcaatatatccagacgaacacatgagtcatccaatatagcacatacaccacaagaactagtgcataccacaatatattaagtgaaaagatgctcaacctcaataatagttttataacaaggtaccaacatgcacacttccacacacagtaaaaatgagttacccatttacggactaccagatttgaaaaaaaaaaaagacgacccgatgatatcaagttatggcaagagtagtaggcaaatgccttcatatactagtagtaaagaatgtaaactggggaccagatgtggtgactcatgcctgtaatcccagcaatatgggaggctgagagcgggcggatgacgagatcaggagatcacgaccatcttggccaacatggtgaaaccccaactctaataaagatacaaaaaaattagctgggcatgtaggaacatgcttaggct

SEQ ID NO: 505996 - DNA, 134 bp, Homo sapiens
cacgagggttatcaatgtttcgaacaagttgagaaatagagttgagctcactcggttcctgttgagtcaaaaataataactacatgaaaacatgattccatgttgattgaatgttgtacgaattactgggttac

SEQ ID NO: 505997 - DNA, 193 bp, Homo sapiens
  misc_feature (82)..(82): n is a, c, g, or t
ggggggtttttttccccccgcccccttaaaaaaattttttttttttgggggggggtgtggggggggccccctgtgtgtgggnacaaaaagggggccccttttttttttgttttggggggggccgtgggggggggggggggggtttttccccccccccttttttttttttttttttttttttttttgcccccca

SEQ ID NO: 505998 - DNA, 227 bp, Homo sapiens
aaaaatttttgccccccccggggggggggggggccttttttttccccccccccccccggggtgggggggggaattttttttgcccccgggtttttggtttttgggggcctagcggggcccttttataacccccccccctttttttgggggggatttttggccccccccccttcccaaaaaaaaaaattttccttttttttttgggcccccggattttttatttttta

SEQ ID NO: 505999 - DNA, 208 bp, Homo sapiens
gcgccaggtggatgagtggcacatcatggtcactgcagctcctggatcaagccatccccttaccacctatgcctccccggcagtaggaccacagacacgcagcagcacatccagctaatttttttaatttttttatttttggtagagaccagagtttcagtatgtagcctaagctggccttgaactcctgagctcaaaggatccacac

SEQ ID NO: 506000 - DNA, 100 bp, Homo sapiens
gctctgaggatccccgcatttcctaattaccatactaatcttagttacctgctaacaacctattccaactgttcatcggctgatgtggagcaagactgcg

SEQ ID NO: 506001 - DNA, 907 bp, Homo sapiens
  misc_feature (610)..(610): n is a, c, g, or t
  misc_feature (685)..(685): n is a, c, g, or t
acatggcagaaccccgtctctactaaaaatacaaaaaattagctaggcatggtggcaggagcctgtaatctcagctatttgggaggctgaggcaggagaatcacttgaacccgggaggctgaggttgcagtgagctgagatcgccccattgcactctagcctgggcaacaagagcgaaactccctctcaagaaaaaaaaaaaccatcctggccgacatggtgaaaccccgtctctactaagaatacaaaaattagctgggcgtggtggcaggctcgggaggttgaggcaggagaatcacttgggcccgggaggcggaggttgcagtgagccgagattgtgccactgcactccagccttgagacagagggagactccatctcagaaaaaaaaaaaaaaaggggtcaatcttagaatgcaaagttaggtaagcaatacagtttgagaaaggtgtatttaaaaataacttttctatgtagtcatggtgatattatggttttcaacctggtccacagtgggatttaagttatgggatatagtaggtatgggtactatgctgggaatttagaaaatccttagcaaatgctatgtgtctctttcgtctgtaaattnggtgggctgtggtgggtaacacctgttatttcttagcaagtggggaaagccgagacaaaggctttgctttgggcncccgagttggcacatcaaagtggcgcaccatagttgaaatcctgtctctaacctccagctggtccgtggtgggtttgctctgtgtcccgactactcagaaggtggggcgaatggtccactgaggcgacaattgaactgctggctgtcatgcctgtttcactggaagacatctgtccaaaaaaggggcggcaaatactcgggcttcgacccttgtaaggccaa

SEQ ID NO: 506002 - DNA, 266 bp, Homo sapiens
tgctcgtgcttgaccttaattccagcacttctgacttttgcccacggcttcaggaacggtcgctccgtgaagggtcactcatgtagatgatgccaacaaagcacatcattatctgatagggaacacttcaaatcgtcacgtcgtcaaactggaacccttcaggacactgttcatctggcagatagaggtgtcagaaacctaggactcgttctccgaggcgcgccagttccaaataggcgttatgaaaggcgtctcccagtctccgt

SEQ ID NO: 506003 - DNA, 81 bp, Homo sapiens
cttccttaagaggtgtttcctgaacctaattctcataattaaagtaatgtttttgcaggatcaaaatgaaacaaattttcc

SEQ ID NO: 506004 - DNA, 101 bp, Homo sapiens
acaggatcccccggaggcgttgtatggccggggttggtgtaaaactaggtcagttagtgtgtgaatagctggttagtgtgtgaactgggtcatgttgctgt

SEQ ID NO: 506005 - DNA, 405 bp, Homo sapiens
actaaataaaaagtatatattcacagtaaaaaaaaaatttaaaaaaaaaaaaaaaaaaaaaaaaaaaaaaaaaaaaaaaaaaaaaaaaaaaaaaaaaaaaaaaaaaaaaaaaaaaaaaaaaaaaaaaaaaaaaaaaaaaaaaaaaaaaaaaaaaaaaaaaaaaaactattgtccccggttcggccaaagtctttttaaccccgaaaattttttttttgggggccttatttaggtttttttgggcaaattcccctttggggggctcttttaaaaatttttggcggcgtttttaaacagttccagcaggggaaaacccgggggttcccccttttttagccttttggaagaaatcccctttcacaccggtggggttaaagggaaaggccccgcaacggtccggttttt

SEQ ID NO: 506006 - DNA, 337 bp, Homo sapiens
aggatcccccgacaattatcgttggtggccgcagaatctccaatctgtataagcagagcttgcttgtgttaattgtcgtgagggatatatcactacgttgctgggtgcgtcagccttccagtcctctctacgcacgtgcgatatgcattatattttcggtggtggccatcagtcaagcggctactggcggaacggaagagaccatcatagtttcgtctccgacacctctcactgactcatgccccgtcacagcgtacttcaattttagttcggggtttgtcgaacttcaaacgattacgcatcttttcgctgtctggcctcttcctacgctctctct

SEQ ID NO: 506007 - DNA, 249 bp, Homo sapiens
gggattttgaatagtgctgcaatgaacatgggagtgtagacatctctttgacatactgttttcgaatcttttgggtaaatacctagaagtgggattgctgggtatttatttattagtttaaaaaaaaaatcctaggctgggcgtggtggctcatacctgtaatcccagcactttgggaagccaaggcaagtggattgtctgagttcaggagtttgagaccagcctgggcaatgtggcaaaacctcctct

SEQ ID NO: 506008 - DNA, 699 bp, Homo sapiens
  misc_feature (204)..(204): n is a, c, g, or t
  misc_feature (264)..(264): n is a, c, g, or t
  misc_feature (276)..(276): n is a, c, g, or t
  misc_feature (278)..(278): n is a, c, g, or t
aaatgaaaacattataatttatgaacttacttaagagtttcatttattcaagtaagctttgctgaaccagtgtgtcttgaggaaatctgttaatccataataaaatatagcagcccttgaggaattagtgaaattatatctaaagcatgaataataaagccaagaagccttttgttttatttatgctattcccctgctttcagncttttctgttttgaaagcgtacagctaagttgagattcccaacttttaatgtccatgatnccttatttaggncngcatattattactttgactgtaaactgaaattactggatgaggaataatttgtcatgttgtcattacttaaggagaagatagtatttaaatattgactttttcatacaggaacatgtgttctcattctctaggcatgtgactactcccccccacttcctcccttttttcttttctttttttctcttatcacatggaacttttgggctcaggagtgattctgtctcatgcagcttagggatctgaaatttacataaggactttaatagaagcttatgacacatgatatgaccaggcttttcactatgttttgccatttatttggcttaaaatcaatggaacaaactgaacttggcattactatttctgttcaaaaagaagaacaatatatattttactgttttatgtttggtcttggcactg

SEQ ID NO: 506009 - DNA, 538 bp, Homo sapiens
tcagtactgtttaagtagccttggctggggtccgatctcctcatgaggtggatatgtcccagggctgggtcttgcgatatctctatctacattctttcctaggatgagggatccagtcctttgaactgaaatatgatttatacaaagtgggtaattctcaactttctctctctggctctctctctccctcagattccaaactctttggtacaattacctgcccggatgtcagatgggtctatccaacataataaatctaaaatagagctctgaattgtgctgtgccgaacccctcaagctctactctacaaactggctatgctccagtttaccccatctggactcatgatcccgattaccaatcccaattattcagataaacaccagggtctcctccatggtatctgtcccttaatccttttattcaatcatcggcaaggcagttgatcggatcagtcccaaatttcatcacttcagctatcttcagtgctacgagcctaagctacgacatctccttagatgggtgtagtatttcata

SEQ ID NO: 506010 - DNA, 1120 bp, Homo sapiens
aggcagaaagtggtccgatgtcccttttattcagatgtgttactccattgcactccttcttttaccttgctattatattgtctattcctccattgctggatggtctcctcttgtagtcgatcttgtatgtcagcatcttcttggggtgtatcccaagtcgtgtggccggaattctgtcctgccatgactctctgtggtcttttccttcactgtctccccttgtttgcatcatttcctgtgttcgcatcaaagtgtcatcttccttctggctttgattgtctctacttagactccataatttagcacgcctttgtaatttcaatggtgcaacaggtatgaccatgtggaaccgaattatccctcaagtaccggtcataactcttgttggaatataaagtcctttctatcacaggttctcatgtgtcggatccattagattcattttacatccgctagctactaccaggtatacctggcttgatttcacagttgcagaattcacatgaattttacctggggataatgtccaagaattccacaagctactcatttaggtgcaaaacatacagtatcgaccatgtctcatgatatgtcgataatcaaaaaatctggcttgtcttatctcgccaaagaactgtatgtagtgatcactttagatagccgatattatagcatccatctgtggtggttaattatttcatatagggaagagttctgatctgtacctatggttcgtttacttgagaaacaacatttcggactgtgcatcttctgtgatgttctatgaatacactttctactttatatttgaaacatgtatgccagacctcggaaatactgtatacacttgtattacattctctaaagatgtataacagaactgcgtctagtattgagacagcagagtcatcttcccgaagattctaagagcagcagcagtatgttgttgcttgtataacagcctagcgataattttttagactgactctccatggtgccctgttggcactagcactaccattgtacctgctgtagaataaactatcttagacatttatcaacttgttgatacaaatgttagtccctaaccacttttttttacatcttttaaatgtatctt

SEQ ID NO: 506011 - DNA, 312 bp, Homo sapiens
actggcatagaatataatctgtctaacatgtatctgcacaaaatttgatatgtggttatctcatcgttaagcattctcatttcctgtgatgcgtcttgatccatgagtattaaaagtgaatatttcatttccaaatatctagagatttccagatatctttctaatattaatcgtcatattcactcagcctccattcagttgtagttagatagcatactctgaattattttaatcactttaaatctatttaaactcattttatggttcagcatatgatcattttggtgaatgtttcctgtgaaaatgaaaata

SEQ ID NO: 506012 - DNA, 601 bp, Homo sapiens
aattagcaaaggcaaaaaagcaacatggggtgaagtcagggaaactaagtgcaatgcttccaagaatcctctgcgagtggaatcacagaggatgagcttaattctcccagcaaccagttgtaacagcacttgtgaaacactgtcaatcagaaaagcttgttagagactgagtgcctggggtttttactgggagctggtcacaaaggtcagtctctgcctggcacataccaaaattccagactcctagaaggaaagcaggtgttcagtcgaaactatattgttttacagtttagctatagtaagctcactttgatcagttctgggaatggtggaagccccctgaactccaagttcccagatgccaatcaagggccaaccttgtcccgcaggtctctaaggttcagtagtcaggtcgggttcattaccacttttttctgcacagcaattatatctcaaccgttatttcttcaatgccccataaatactcagtttcttgaatcgtactttgaaccaggtttactatctggtggttcctcattaatgagtcgcaatacgtcttcgacacatggcatctcataccatgtattatatgagtcatgtg

SEQ ID NO: 506013 - DNA, 1421 bp, Homo sapiens
ggtagccgccgaacaacgtggagtccagcgtcgcttcgatgaacagtgagtggtcggagatagaagccattactgttctgcctttaaggatcgaacatagcgcaggagccccagggctccacatgtagactgtcattagatccagccaactaagaggaatatgtagatcgagtggatccttgacgacttctcacaatcgcaacgaggcatcatgggctatcgcggtgtaccttgcttggcatgcaagcctcacatctactttgcatcgctcatcggttgccagtgttggtgctccgaccatcacttcctgttagcggtacaagcacttgagctgcattgcccacgtccaattccctaggagactagtgggcaacggtccactagctgactcgagggcccaaaggatacgcattgggataggcccaaggacaagggagatactccacgtatctagcgagcatcctcttgaatacggctatgtataagaagtctcatggtacaagagccgagaacgaagagatagtagcacggaaccctaggatactatgttgacccacatcacaggtggtagcatgggcctttctcccagggagtcccagccctcatggcatgataaatggaccctgccttctcttaccaaaaggatcaccaactggtgcctaagctgatcgagagtgactgtgtcctggctgttgtctctgtctctggcatggggtcctctgtcccgactctgacagtgaaagggcatgccatggacaggtgctcctggacaaggcaaagagaaaacgatgtcttaccccgcactggtttcaggtgtgctatgggggtggaacctcccccgggggcccccaggcaaaattcgctgttggcctggccctccgagtgacctgggcccctccaagggaacgccttgtacaaagagggccatgacagaacgcaataggtggtcgccaaaaagccaagccttctaggtagacgtggggtacccagaagagtgggctgtacaccagaggcactgagcaaggagacacccacgtggtttgtgccaccaaatagccggcgaattcgttgcgatcgtaaggcaaagcgggcacccatcatccggtattcgcgggcacactttccaattaaacccacacaaggttaaaataaagaaggccgtgtcccgtcagatgaaggagggctttcgagtttagcacaaaccccacttggaaggccagaaggaacccctctcgcgggggcccttttttgtttgcccggcggaatggctccaacagaccacaggggaggctcccagttagagaaaggggaggtattggcgcggcacaacgaaaaccggtataactccaagagacccccccagcccttttccccttggacccaagagaccgggagacacactaccggcccggacttccaca

SEQ ID NO: 506014 - DNA, 113 bp, Homo sapiens
ggaaggatgagcaacggagagaaagagaagtgtccaggaggagagatcctcgacggcggcgttcgcggaagtccgccggaagattacacggtttacgcaagattggcacttag

SEQ ID NO: 506015 - DNA, 406 bp, Homo sapiens
gtgatcctcccatctcagccttcatttggcaagacgtcttatattcacggatcactggtatatcttcttaacatacatttaaggtgttataatgctactccaaaccatgtccatctcctttccaaaaaatacttcaacttgaaaagctcccacttaccttaacatactgtactgataaccatatattgccacatccatatatctgataaaaccccgaattgacgtgtttctgttcacctctccaagctgacaggtcacatccaacgctgctgtacttgcaggcccatctgtatcgccaaattctacccagtttatttccgaggctcttcgtccgtcaaaagcacgccataagcttttagctatacctcatgaacacttaacctcatccacctccttgatggggatc

SEQ ID NO: 506016 - DNA, 347 bp, Homo sapiens
ggaccaatcgacagaccgccggtgctgggcctcgcgccggctcggcgagctctcccgacacccgagccggggaggaatagcagcgactcctcgctcgcatacacgatagccgcactccagactggaccggtagtgaggggctcacgagcagatcccgaggcaggctttgctgaacctccgacgagggctgggcctttggaaggcgccttcaacagccggaccagacaggccaacatgaccgagaatttcacgttcgaccctgcggacaagcccaagcgggccaaggcctccaagaagtgcacagacgcaccccgcattcagacatgatcgtggctgtcatcccgccg

SEQ ID NO: 506017 - DNA, 123 bp, Homo sapiens
ccgtaggcttaagctcagtctggtgcctccaagaaggctttcctatttcagcccgcttctccttcctgtattgttatttttctgtcactacctccccgggtcgggagttggataatgtgatag

SEQ ID NO: 506018 - DNA, 265 bp, Homo sapiens
gactagaggatccgcggcggagtgcatggctgggcgcgggggctcaagctgtaatcccagcgctttgggaggcgaggcgggtggatcacctgaggtcaggagttcgaaaccagcctgggcaacatggtgaaaccctgtctctactaaaattacaaaaattagccgggcatggtggcaggtgcctgtaatcccagctacttgggaggctgaggcaggagaatcgcttgagcccgggaggcaaatggtacactgatctgagatcgag

SEQ ID NO: 506019 - DNA, 607 bp, Homo sapiens
gggcttgaagagcaggcatctgagagcagcccagacaccacagccatggacactggcaccaaggaagctggaaaggatggccgggagaataccacactcctgcacagccctgggaccttgcatgccgcagccaagaccttctctccccgggtccgaagagccacaacctcaaggacagagaggatatggcctggaggagtcatcccctacgtcattggagggaacttcactgggagccagagggccatttttaagcaggccatgagacactgggagaagcacacctgtgtgaccttcataaaaaggacggatgaggaaagctttattgtattcaatttacagaaccctgtggggaaagtaaacgaaagccgggccacctttgcagaatacagtcggatggctcatgattgttgaatttctttctgtatacctagatatttcccaagaagctgtttattaaagggagccagggattgctagaaacattctggccttggggatattacaacccagtgggcatgctgatgggcatagaggaaatttccgggaaccccatgaaacccgtgggtctggcactagataacaacataaggaccggtggtggttc

SEQ ID NO: 506020 - DNA, 392 bp, Homo sapiens
cgtgtgcgatttccctcctcccccgcccttatattcacggccaccatggcgtattaggggcagcagtgcctgcggaagaattggcctttgcagcggcggcagcagcaccaggctctggagcgggaaaccccaagcggcttaaagcatggggctttttacgggattcaagaagcaggcgttgctgtaaccgacaaagacaccttttgaattaagcacaattccttgattccaggcaaagaccggaacatgaccgaaatgagcttcctgagcagcgaggtgttgggtgggggacttggatgtcccccttcgaaccgtcgggtttggggggctggaagaaaagcctaggtctcttagaaggataacctgggggggggcaaagcacttcaaaacct

SEQ ID NO: 506021 - DNA, 196 bp, Homo sapiens
tgttcatatgggttatcccgcgcctgccggcgttgggtatggcgctcgctgtgcctgtctgtgttgcgcgcgtgctgccccggacatcttagggcatctctgacctgttattgctcaatctcgggtggctgtacgcctcttgtccctctaagatgttgggggacgccgaccgctcgggggtcgcgttacttgtttg

SEQ ID NO: 506022 - DNA, 896 bp, Homo sapiens
  misc_feature (1)..(1): n is a, c, g, or t
ncctttcctcttgcgactccaccacgtcctcttgtagagatgtctgtttttttgtctgtgtggtagagggatgctcccctcccttccgccgtgggccccccgtcttgtgctgttggtgacatactcctcccgcgcccacgtctttctcggtcctatatatttgtttgaactcgcccccctactcctctcgtctgctgtggtgtgccccacatcacagtcggtcgtggtgtgagcgtgtctctcgtcggagtcctctcttctcaccacgcaccggccgcgcgtgtgtcttctcgcagatgtccacacccctctctctgtgtggttgtttgtctcatacacacacacgccagcttttggagtaagtaactctctcgctgcgtgtgggggtctcacacccgcgctgatgtgttttctccgcccctgcgcgcgcgtggttgctagtttatgttatctctcgcctcccccccctcctcgcgcgcgggggcgggagttgtggtttctccctcactgtgattagaagagagacgctcatagtactcccactcctcgcgggggacccaccccagcgtgctgtcccccgcgcttgtagtatgagggtgttctttttcctcctcgcgagctgccaccccctgtgaggaggcgtcttgtatgtgacccccctcgaactaagagtggtggcacgaccagcctcctcctggcgggaataagtcagcacccccacttctccgcgcagctcctcgttcttttaggtagtaatagataggaccgcgggagcttttttttgttaccatcctaactcatcttccctctacaccccccccccccctcccccccctttcccaaataaagggcaaaggtttttagagggggttccccaaagagttttggggacccca

SEQ ID NO: 506023 - DNA, 308 bp, Homo sapiens
agttaaatacaggcttttttttataatatgcaattgattcacattagattttaagatgacactgtttacatgatgtcaccacaaagccgatttacatacaacctttaattgcggaaaaacaaagtttctttttgatccaaacacaccgaaaaacttctttgggtttttttttaatgatcttttccttgttcataaaaaaaagtcaaaaatgcactattttaaaagggtaaagcttgtgagtttacagaagagcaaatgacctaaacactctactcaaaaacgtccttgttttttttaaaaaaaaggta

SEQ ID NO: 506024 - DNA, 193 bp, Homo sapiens
gtgctcaacgccattaaactcttctgggccccataaacatctccattttaattcaataattgcccagaggaaagaagaaatatttgtgtaagacatgtagtttccctttagagacattttttaatccagcaaattgcaaagccaggccaggcgcggtggctgacacctgtaatcccagcacgttgagaagctt

SEQ ID NO: 506025 - DNA, 81 bp, Homo sapiens
tatctctgtgccagcagcttagtgggacaggggcggaatgagcagttcttcgggccagggacacggctcaccgtgctagag

SEQ ID NO: 506026 - DNA, 775 bp, Homo sapiens
actatcgtgacggaggttgaatagagtcttaaatggcctgcttgccccaatgagtcatatatgacaagagtacattggcctagacagaggtcctagtgatcctaactatgataggatgtacaaaaagattctgtgtaagctctaacattgtcaatagtatactagaaaagaaggatatcaatatgtgatactcaaataatagatagcatgattagaaaatgattcggtttgaggagcgaaaatacgagaagtcatgtaaggcataaggttctagtagtctgtataatgtataggagcttaagccaatgagagattcgaagagaagatattactctagtgcggaggttagttagatgagtagtgggaagaaacataagtatgatctggtactggcataaaaagaagacgagtaattacattcttagaagacttttcattggccaatcaccggtgtaaggaatctacggaattgtaggttatataccgaagtcacaagcatgagtaggtgctcgtaacttatcaagaaaaggtcgcgctaggtacaatatctcgcatataggaaagtacttgatcacttgaatctgagtagctgaacggacttctcggcatggttattcgaatgcgtcgcgcgatctctaatagctacttccattctatcattatcgctgcccccattgtttgcggaaaaacggagtcgttatgacccatcaataagcggtaccctttattttaccaccggtaccagcgaaaactaacgtcagaaagcccattattg

SEQ ID NO: 506027 - DNA, 1027 bp, Homo sapiens
tgctgcaaactggcgcgcggccgtaatgtgcatggagtagcagcctgatcacatcatcaaaggcatagtcttccaagatggttatcagacatcacttgctctgcctgtaaacatccgaggtgcccaaagacaaattgctgctgctacacaagtctgcaacggacaccttaaaccacaaggtgctaacagaccaacgacaccagatgacgaaacaaagagaatgcacgctagacacacactaatcaggcaatagcccctcatatggacaggcgaaacccttgacggactggcatgtcccactcaaaaacagcggcttattcccgagtacagacattctgcacggccgggagaaacaagcttggtcacgtttacgttaaggataattttctacaacttcttcgacttttgatagttccaaacagccaaaaggagctcaggtctccttggattgtgacactgcgatctgcgctcatggcaccagtgacaatcttcaactgtgggtcccactgtcacccagttgctaccttacctttgtcaatacacctattcgggttacctgaaatccattcccgttcgcatgacattccccgcatcacatgcctccggcagggtccacacaacttcgtcgccacgtacctttggctcgtgcatctcgtttcacagtccttagacctccactcgggacaacgacgtcgggccgaccgacgcaaacccagccgcaaaccacgacacgcaagcagacacacaagtacaataaatggccagcaggtacacaaccgaggcgcagacaaccgccttagcacacatcccaaggcttcttggacatgccattgggtcggcaaactcgaaagcgacgcacatatcgagcacgggcataccgctccgacgccaagcacaggagcgacggtgcacagttgccacatgagcatgcacggaaggaggggacaggtacagaacagtcgcgcgacccgccagagcacacggcagcggtccaccacgctaccaccacaggcgtcacacccgaaga

SEQ ID NO: 506028 - DNA, 629 bp, Homo sapiens
  misc_feature (573)..(573): n is a, c, g, or t
gcctggtgtgattccgtcctgcgcggttgttctctggagcagcgttcttttgatctcctggtccgccattctctcctacctaggtgcgtgccgccagcctgatggaagatttgatggacatggacatgagccccctgaggccccagaactatcttttcggttagtgaactataacggccgagctagaagtattgatcgactcttatacggtgggcactaagtcgagtgacaacactgacgcaccagatgatcttcaagaacggtcagtttaggggctggtgcccacggatgagtgcacattgttgcagcagaggcaatgatttacctgaaggcagtccaattactagtaacactggcaactttgtatagacatgtctgtacaggcactagacggtttgtcccttggtgggcctttgaaataacagctcaccgagtggtcttaaggttgaagtgtggttcagggccagtgcatattagtggacaggacttagtagctgtggaggaagatgcagagtcagaacgatgaagaggaggaggatgtgaaactcttaagtatatctggaaagcggtctngccctggaggtggtagcaaggttccacagagacaaagtaaacttgctgctgatgaa

SEQ ID NO: 506029 - DNA, 188 bp, Homo sapiens
  misc_feature (9)..(9): n is a, c, g, or t
cttggggcnggctcatgcctgtaatctcagcatcttgggagccgaggcgggcagataccaggtcaagagattgagaccatcctggtcaacacggcgaaaccccatctccaccaaaaatacaaaaaaaaaaaacaaagtattttttttaaccctggaaaattttttggttaacaacacaaacaaacacc

SEQ ID NO: 506030 - DNA, 539 bp, Homo sapiens
  misc_feature (520)..(520): n is a, c, g, or t
ttagaggacccccgcgcttgtttcctgcacttccatgctgttatataataggcaaaaagaggtttcctcactatgcaagggtccgccatcattaatgcctctttaataaaaactcttctcaaggccactttacttccaaaggaagctggagtcattcactgcaaaggccatcaaaaggtgtcagatcccatcgctcaaggcaacgctcatgctgataaggtagctaaagaagcagctagcattccaatttctgtccctcactgccagtttttctccttctcatcggtcacttccacctactcccccactgactaacttctacctatcaatctcttcccacacaagacaaatggttcttagaccaaggaaaattatctgcttccagcctcacaggcccattctattctgtcatcatttcataacctcttccatataggttataagccgctagcccatctcttagaacctctcgtttcctttccaccgtggaaatctatcctcaaggaaatcacttctcagngttccatctgctattctac

SEQ ID NO: 506031 - DNA, 112 bp, Homo sapiens
ggcaaccagccagaacgcctgaccgaggcacatacttcctattctcacaccctagtaggctcccttcccctcctaatcgacactaatttcacactcacaacaccatgggctc

SEQ ID NO: 506032 - DNA, 355 bp, Homo sapiens
tggttgggatgaatgaacagaaccctgtaaggaatcgtagggagtaatgcgtagggggtaactcagagtatatgtggtagaatgtaaatgggaccccagaaatatgcatcccagaccatggtttttcactttggtaccccaccgcccttagaatggagcccaaatggggctccatacagggtaggggctgcgtacagggtgtaggaggggtcctggccaaccatgggctagtgtggggtaagtgggtagaggctagatctgggctgggtcaagggtagatcctgatgccctttggccttgtggaatggggggtaagagggggaaattggtaaccctagaattgggggggggggat

SEQ ID NO: 506033 - DNA, 547 bp, Homo sapiens
  misc_feature (79)..(79): n is a, c, g, or t
  misc_feature (93)..(93): n is a, c, g, or t
  misc_feature (100)..(101): n is a, c, g, or t
  misc_feature (113)..(113): n is a, c, g, or t
  misc_feature (132)..(132): n is a, c, g, or t
  misc_feature (140)..(140): n is a, c, g, or t
  misc_feature (148)..(148): n is a, c, g, or t
  misc_feature (151)..(151): n is a, c, g, or t
  misc_feature (198)..(198): n is a, c, g, or t
cagtgatgacgtttcaacaggacttcttctggaccgaccccatgccctccgactcacgggcatgctctccacccacctnacgtccatgttcgngtacttnncaccaccgcgcnggaagggcagccagatcanccagcagnccaccaancanagatcgcaatcccgccaccaccaaccagacggagatagagcgcgtcntctgagggccggcgcttgccagtagggctcttgtgttttttttcttctgctatgtgacttgcatcgtgaagacagggcatttgagtttatatctctcatgcatatttaatttaatccccagcctgggctctgggagcagcccgctgagtggactggagtgaagcattggctgaaagaccaggagggcactggagctgtcttgtccttgctggttatctggatggttcccagagggtttccgtgaggtaggagcactcctacccccgttcatactattatactcatctccacaaaagtctgaacctcatctcatcttctatgcttcccctaatttcctaacttatctact

SEQ ID NO: 506034 - DNA, 173 bp, Homo sapiens
agcgcctcgatcatatcgcctgctcgaggagcacgactttcgcgagtataggtcgcagtgaaggccagcgacgtgttccttgccgtcgccgcttaccaggaactggcgagccaggtggattgtccgctgcatctcggaattaccgaggcgggcggtctcatcggcggcacggt

SEQ ID NO: 506035 - DNA, 175 bp, Homo sapiens
gcgcactgaagggatatggagaatgaggcatcagtggccccgacaagtagctttgttttgcttattaaatgtgtgcacactcagtacacctatcaaaacattccaagcaatcaaagtgactgccacatctccagctgagcctggctcaagtaaacagatgtcggctgccattggg

SEQ ID NO: 506036 - DNA, 131 bp, Homo sapiens
ttatgtcaccacgtactcttctccttcctgtcagttatgtcaccagtatctcttctccttcctgtcagttatgtcaccagtactcttctccttcccgtcagtgatgtcaccagtactctcctccttcctgc

SEQ ID NO: 506037 - DNA, 445 bp, Homo sapiens
  misc_feature (110)..(110): n is a, c, g, or t
acaggagagcttgtagtttctaaagccattggtgtcaagctgctaagatgtgcagtctgaaggttctgggagccggagaacagatttgtcttagagggtggcaggccgcnccgctcagtcaccaagccccctcgtgtcatggcagtcaggggtcactggggggcttccagccaggagctgcctgacgtgggctcaggagggaacccagagaagggggcccacctgcaagtccactctagggttccagcagctccaatgaaagccccctctgacctccccgcaagccccttcccctcaccagcaccccactgtcattgcagacatgacaatgtcacattgtccctaacagggtttgattctactttgagtgcctgtatcctgactgcaaatgaaaaggctcctatttcttatttatttatttttcccataaatagaaggaaacagt

SEQ ID NO: 506038 - DNA, 1420 bp, Homo sapiens
agcggtaactaccccggctgcgcacagctcggagctctcttcgcctgcatcccatcatcacatcctggcctctagccctgcagccggcagttagaagatgtgtgaaagaaaccagactatacgtacgagtgtaattgaggggtcaacacccaattgctacctcaggagcgacattgaaaaatggcttatcacgtgacaacttgtggccttgacaagtaaccatcgctgattaaggagacccacatgatgcaaggacgcagcacatgtttcaacacaggattgtcctccacagccttaccgaaatggttcgtcttcttgaattgccatatcaggccaaacgagcgggtcgcaatctcaatcattgaacgaacaggcgcagcgcaagaacctcaagaggccgacatttacacacacgcagcggttgcgcaaccccaagtggttggagccgagggttattgtggggttttcaccgccctattgggcacctattctttttgcggcatcactgcgtatctctcttgcgcggcagcgcgactggtggcacgctgcacacgggcgattgccgagcggatggcgtggcaaaagggcgaacgcacgggctaccagcacacattggtcgggtaccacttccaagggcctccctccaacggtgaaaaccccctttatgcacaacgaaccgtttcactcagtacacttggggttggccacattaacacgaaacgaaacccttgagccctttcctggcccaactacacgaacacttggtcccactgtcgcggttgaccccaaaagtttgtttgacaacgtcgttacgaacgccgtacgcgtctaacgcataacctgcgcacggcagacccttacgaacggcttgccctttggttcccccaaaataatggccctgaagggctaacctttagggacaagttcgctgaaccatttacaccgacatcttccactatcactgcaattcacgacgacacgccttggggaaacactcgggggtattccaaacgcgcgaacagttccgcacggtcccttggctaggttgaccgcttgttgcactggttcgcccacattcgtcctcattgggcgagagcgaatgccgggcaatccacagggtccccttaataacggcaacttcgccctctcgttccaccaagccttggtccaaccggtacaaagggcacacggacatacggtctccggaagatggcaaggcgaaaacactcgtacggcacagcctgcccaccctcgggacacaacagggcgctgaacaagaccctcgggccccgcagccattacccccccccccgaggcgcgcaggaaagaacccacgaacaccagcgcaaccaagagccccgcgggcacatccaacccagacggcgctacaaccacacagagacccgagcggcgatacaac

SEQ ID NO: 506039 - DNA, 233 bp, Homo sapiens
cgtgtgagcatcgcacgtcgtactatggttcagcgtttataccaggagccgttctttacatgggcatattagacaaatacattagaccatgggtcattgaactcaaccttcagcccctctcttcccagaggttggtaggtatgggtggggctgaaattcccaactgtctaattcggtcttggtatttctagtgaccaacccctcttcctgaagctacgcaggggcccatcaca

SEQ ID NO: 506040 - DNA, 582 bp, Homo sapiens
ttggaagggcctgctagctgacccggcaccaacgtctagtgcatcggctggagcggcgccataaagtgcagcactttgtggcaagatgttcaagaagaagtctcacgtgcgtaaccacctgcgcacacatcacaggggagcggcccttcccctgccctgactgctccaagcccttcaactcacctgccaacctggcccggcaccggttcacagcacactaggagagcggccctacctggtgtggggactgtggcaaggctttcacgcaaagctccacagctgaggcagcgaccgcttggtgcatgcccagcagcttccccgtaccgctgccaggaactgtggggtgcggtttcaccgtccttaccgtcgctgctcatgcaccggataccatcatcacaggtgaatacccctacaaagtgtcgcgagtgccccgcgcgtccgttcgtttggcttgcctctcagggcttggctgggagggttgcagccagcctccgtgggtccatgccggtgcgccagcctccaccgctggccatcctgtggggcgtgcttcccctccgtcactgcggctccgggagcaccgct

SEQ ID NO: 506041 - DNA, 419 bp, Homo sapiens
gggtatgtcttacaaatgcgaaattggccgtgcatatgccggcgccgttctcaacgccgtgggtgtgtccacttcgctcgttcctactctgcttggcatggtcttcacagttccgtcagctgctcagtgactacggggcaccgtccctatgctacacccaagggaactggaaacatgccaggtgccccaaagtgaaatacgcttaaactgttggatatcatagcaacatgcttggggatggaaatcaaagccacgtacgcttcaagcactattgccatgtagaggctgaagcgcgaaatccttcatgtctcataagactggttcggtagtgcttggcccaaacggaacgaaatgtcagatcctatgtgtctagtaggtcttgaagtattgccttcttaaaactagatgacaagttaccg

SEQ ID NO: 506042 - DNA, 206 bp, Homo sapiens
gatccccacgctctcctcgtgcacatccgcattctccagccgggtgctagtgtacgcgtgtgtgtgctgtgtgtgcctatgtgtgctgtgtctttgtgtgtgtgctgtgtgctagtgtgtgtgctgtgtgtgcatatgtgtgcgtgtgcgtgtgcgtatgagtgctgtgtgctcgtgtgtatactgtgtgttctttgggtaccgag

SEQ ID NO: 506043 - DNA, 986 bp, Homo sapiens
  misc_feature (152)..(152): n is a, c, g, or t
  misc_feature (172)..(172): n is a, c, g, or t
  misc_feature (193)..(193): n is a, c, g, or t
  misc_feature (279)..(279): n is a, c, g, or t
  misc_feature (298)..(299): n is a, c, g, or t
  misc_feature (349)..(349): n is a, c, g, or t
  misc_feature (403)..(403): n is a, c, g, or t
  misc_feature (509)..(509): n is a, c, g, or t
  misc_feature (545)..(545): n is a, c, g, or t
  misc_feature (553)..(553): n is a, c, g, or t
  misc_feature (592)..(592): n is a, c, g, or t
  misc_feature (604)..(604): n is a, c, g, or t
  misc_feature (612)..(612): n is a, c, g, or t
  misc_feature (649)..(649): n is a, c, g, or t
  misc_feature (659)..(659): n is a, c, g, or t
  misc_feature (689)..(689): n is a, c, g, or t
  misc_feature (704)..(704): n is a, c, g, or t
  misc_feature (757)..(757): n is a, c, g, or t
  misc_feature (783)..(783): n is a, c, g, or t
  misc_feature (787)..(787): n is a, c, g, or t
  misc_feature (809)..(809): n is a, c, g, or t
  misc_feature (889)..(889): n is a, c, g, or t
  misc_feature (911)..(911): n is a, c, g, or t
  misc_feature (947)..(947): n is a, c, g, or t
cagtgtgggggatgggggtatgccgcttggcactggtactgggagggatgagggtgaagaaggggagagggttggttagagatacagtgtgggtggtgggggtggtaggaaatgccggttgaagggaattctctggggctttggggaatttngtgcgtgggtgagccaaganaaatactaattcataatagtnagttgttagtgttggttaagttgttgcttggcagtgagaagttgcttagcccctttcccaagtgcttagccctttaagtgccaacngacaaactaacaaacaacnnttgttttgctttgctacccggtggggaagactgacgacgtgttaactganacccggtgccacagagtcacccgttttccgggacccccaggggggggtgtgtgntgccctctcacaggccggggacctgtctttccccgcttcctcctggtggcccagcccgcctgtttcagggggttgttttgtttggggtgtgggtgttatcccgtgncttcgtcacttgacagctgggcgtccggcttgcctncgcgccgntccgcctccttcgctgcccctttgccctttggtggttgntttgccctgtgntggtgtgnttttttctggcgctgggagtcttagaaaagccttgtnaatgcctatnttgtgggctttttacgtattttagggaccnctttagacgagattngatgggctcttctggttttgttcctcatttgtcacaggtgtcttgtgattganaatcatgagcgaagtgaaaaaaaaanaaanttcaaggggattttgtttgttnatcgtgcctttggaacccatctgttgtcttttctgtgtttggtcgatatttattatggcaaattttttgcctatctcgtntcttccaattgtagtctttgtnacaacccaatcaccttttgtggtccctgttaaattnatttttggtagaccgaatccctgttcctttgctcaggtt

SEQ ID NO: 506044 - DNA, 400 bp, Homo sapiens
ccgagagcacttgaatgaacttgaggggatcattcacgtgtgcgaatgacgctggctccagtgcgtaggttgtgcgtggcatagccggtcacctcccacagaatgtgtgtccggtggaatgtgttaagccatttccgggcagctcagggcaacaggccaagtgcccgaaagttcaggtgagagttcaggaccaggggctggccctggctctctcacggggtccatgcaatctcgtccacagacagtcagctcttccttcagacagtacatgggctcagcaggctcaataggactctcagtgtactgtgtgggagagagccagttcccggtgcaatgtcgtcacagttacttacggagcattaggccgcgccttatatcagcacatggggttgaatcagct

SEQ ID NO: 506045 - DNA, 240 bp, Homo sapiens
gccatttcgtagaaggcatttcgttgattctgattctggcaattatgcagaacgctgatctagaacattcatgtacaggcttctgggtgaaaatgaattttcaaataaataagccaaatgcctcggacttctgattgatggaatctatgatctgactatgtttggcttgctgtagaattgtcaaactgccttccaaacttgctgtactggttggtattttcagcattagtgaaagttcct

SEQ ID NO: 506046 - DNA, 131 bp, Homo sapiens
ccacccgctatctagctgcagcactccggggctctggaaattctcaaagctgctccctgaggccactctgtatcaggctctttgcttatgccaggcatgaagcctcatctaaagacccaaatcacagcaca

SEQ ID NO: 506047 - DNA, 321 bp, Homo sapiens
cacgaggtggttgctctgccagtggaaattgactcccgctaccgcgtggacgtgcgcacggtgcagaggacagaggcactgcagggctactcggcccgttttcggatccatgccgcccgtccctccggaaagtgatcaatcgcctggttgctgcgctactggtcgctcgccaagataggtacttcatggcaggacgccgaagggtcttcatcatgctgggtatccaccgctggctgcgcgccggcctgatcttcacgctggcgggcgcactcggcgcctgtagcagccgcgtaccggatgcgccggagccgctggatctgg

SEQ ID NO: 506048 - DNA, 344 bp, Homo sapiens
ctccctgatgaggggtgtctgacccaggagttcccatctctaggaggaaaagacatagagaccaaatctgcattcgagccagagaaacacctgcagcagccttcttgcctttcttctgaggtatgacgacctcttctccactgctatcatcttctatcatcttctgacattacctcatcttcactatcttcttctagctcctttggaggaggagccaatattcttggggtcacccttgcttaatacctgccttcgcgagcttcaccatgatggccggcggactgtgacaagcggacaagtgagcgcagatgagtccagaagaagcccagcgccggcgatgggcg

SEQ ID NO: 506049 - DNA, 349 bp, Homo sapiens
gctctccgtgaactcaggtaaaccacctcaccgatgcgcgtaaagtaaacccggtacccggggccatagtggatgcgcatttccgatacgccatttcctacggtctcgcggtctgatgcaaaaccgcgagagaggaggttagggcgagggcttttggctgtgccagccagatggttcggaagtatttgtaggtagattcgactttgggcggagaagctgaatagttggccgtccggctggttattcgtgcaaacagaaacgtcttacaagtctttgaggttgtccctaggaaggtggaactctagtctgtatacgccgctgcaaactcagcggtcgggagtctcacgga

SEQ ID NO: 506050 - DNA, 118 bp, Homo sapiens
tcagcggtaccggcactctagtccagttatgttggtagtttttgtagagacggagtttcaccatgtcgcccaggctggtaagttcacttttagtaccagtgggtgttttctatttctt

SEQ ID NO: 506051 - DNA, 912 bp, Homo sapiens
  misc_feature (662)..(662): n is a, c, g, or t
  misc_feature (667)..(667): n is a, c, g, or t
  misc_feature (911)..(912): n is a, c, g, or t
ggctaccaccgctggcgtcgccgccgcattagatggcaggaagagtccggtctctgggacagcctggagacagttggtggtgactgaaataactttaccaaaggaaagctattgcgaagctatcttctccagcggagatggccacatgtgcattgtaacagagccagagtggttgccctatgctccgcaggatttgctctttagtttaaaagggttgtgcaagtcccgaaagtcgctttcagactgctgggatcatcgaggttcggatgagtctcatgtggctgctgcacctgccagatatagtgctctcgaacagtgtggcctgatgaaactatgggacccttggacctcaagatcagaggttcagcgttcctgggaacataggttgggattgtcagctctagatgggacatgcttcacagaagagaagcctggttcataaatattttgcctgatgtactagcagaatgtttatcaaggtgaaagacgatgagtttatgatggcccagagtatgtgaatgagtttcagggtaatgatgcacctgttgagcaagaaattaacagtgcagaaagttacttggaaaaggggcagagtagaggtgggcatacaacatgtgccgaaattggtgcgaaagagttgaatccatggttcaggacgttgnctaangggaacgaatggaattcggcggtacaagaaaacaaaggaagtcttgacggtgggggcaacattaaacgccgcgaaagggttgaaaagcaaagacgaaaacgatgggtgcgagagatggcgggatgcaccgggggaaagggcgcaacagtgtggagcaacacgccaatgggagggatgaaaacgacggacatggtgacattgaagaaaggaacagcgagcgaggagttctgtctcgcgcgtcccnn

SEQ ID NO: 506052 - DNA, 336 bp, Homo sapiens
ggtggctaacacctgtaatcccaacactttgggaggctgaggtgggcagatcttgaggtcaggagttcgaaaccagactgaccaacatggtgaaaccctgtctctaatacaaaaatcagtctggcatggtggcgcatctgttaattcccagctacttgggaggctgaggcaggagaattgtgtgaacccaggaggcggaggttgcagtgagccaagatttggcccctccattccagcctgagagacacagcaacactcttgtcttgataaataaataaataaataaataaataactgtccaggtgtggtggtccagccctgtagtcgggctaatca

SEQ ID NO: 506053 - DNA, 400 bp, Homo sapiens
cagatagccttgtgcttctctccagtgcccagcctcctttgctgttaggctggagtcatataattaggtaaggtgaaacagatatatacagaagtgatataagctgcttccatgcttgttctcttaaacactctgcacagtctgctaactctccctccccttgccccttgtgaatgtggaggccacctgctccagatgatagctgtactttgcaagcagcttggatctctgagtcaccccgtggaagagagcatcttcagcaagctacatgactaacgtcagcctgtgacataagcaaaaaatgaatacctgttgtattttttttaattgagagaaacaagtagaggaaaatgatagacctatgaatgtctgcattaaacaataaaggtttaactcttta

SEQ ID NO: 506054 - DNA, 314 bp, Homo sapiens
tgtagcacaacctaggtcagttttgcaggtggtaagccatttaccaagatagttgtaggtaagaagggcagatttattagagaaattgtgaaaatatgttgcagtgggcagctcagcagagaaggggctacctgcaaagaggcaagggctggaggaaagttttatagggtcctgctgaagggtgctacgtgtggaatgaggtcattgtgcccgcaggttgtttgtgattagctgtctctaacaattgttcatacaataattgttcattattgttctcaacttggggctctccccaacctggggacccttcctta

SEQ ID NO: 506055 - DNA, 1064 bp, Homo sapiens
gaaaatatgttaatctccttatataactttctgtgacgcatgcatctgaacaacgtcagaagcaaactgtgtcatgttttccagccgcccattctgcttcagagtttagcatggtgtctagccttttcagctctatgacaattctaacattcattatgtaatagtcctgcgtttatgggtcgttggtgcgtatatggcgtcactagatcagacctcaaaatctcttaaaattgtctcatccgtcatgaatttcctcgtgtagaggattatcaacgatgagttgattctgtagaagcagaaatagaactcctagagacatattcttactcattttccctgttcggtatatattcgttgcaataaaacgactatactcggtatatagttcgttccacataaataccactatgatgggtatactattgttcaattaacaataattatgtattaacgaagttaaatttgcaagcaaaaaaaaaggagtgacaaagacagaaactagtttggttgagccaggacatcgtcacactggtagagaactcattgtagactcgcccttcgcatggagcgtggctggagtgcccccagggaaagtggggaagccaacgcacagttcgcgctcacaacggcggttgtactcgcacatgagatggcaggagtgaaaactgaataccctcgtgtgccctgtaatccctacaccacgtttttggaaaacagcgtcgcgaggggaataaataccgctggcagtctttttgaacaggaaacattttcccagccattgaggtcccttaccaggggacaaacaccaaggggagatctaagataaccgggggaaatctacgcgaaacgtggaaccgttgcgaggacatacaaagcacggcccccgcgacgctgcggcggaaacaccgggccgtgtataagaagtcagcaacaacagcacaaacgcaacgcacaacaaaaaacagacaaaaacaagactgggcagacggcgcggacggcagcagaaccactatgaacagaacgacacgtggcacgaagggaacgcacaagcggcggcacccacg

SEQ ID NO: 506056 - DNA, 968 bp, Homo sapiens
  misc_feature (968)..(968): n is a, c, g, or t
atgatcccggatgatcaggactgatgcgcgtcttatgaaaggcagaacgcaccatcttccaagaacagatgaagaggcatactgtgtgtgatatgacgtggtacgagaaaatctcccgcgtgactatatgtgcatcggtctggacttgaacgagaccgaaggaggctacttgcagggcacccgtacattgactacactaaatgtcccgcatccagctgggtacactgtgatctccatctctgaaggggcgggatccctactgtggctgtgtctgacgcgaatcgcattgaagaatgcacgaggagccagttagctccgatcctgtcgagacatagtctgcaggtaacaatccggcaaagtccaaaaccgcattcgataaatcgcgcatcaagaagcactgttctgtacagcctgtccccactgcttcgagggacgtccagatcgttgacatcgtcaaccctggatgcattgccggtctttgagccagaacagtgctggttcaacgtgctcaaggtcaccaaggctgccggcaccaagaagcagttccagaagttctgaggctggacatcggcccgtcccccacaatgaaataaagttattcttctcatttcccaaaaaaaaaaaaatacccatgtgccgcgggaccacccaaaaaatttttggagcggcttatgcctgaaaaggtttcaagcccaactgtgtggcggggcgcccactagtaatagaaccgcgcaagagtcgtcctggaacccggcaagcgagggtcgcgacccagaaaaaaacgcgggaagcgcgcgttaaacccacgacgggcgtaggggggcagcggctaacacggccgggcatatcacccgcgggggggtgacgccaacgcacaatattgaccacccgcagcacaccagcagcgtccgacgacccaagcgccgacacccacagcgcgagactacaaggcagtcgtggacacacgn

SEQ ID NO: 506057 - DNA, 665 bp, Homo sapiens
  misc_feature (1)..(1): n is a, c, g, or t
nctggtctcctcctgacctcaggtgatccacctgccacggcctcccaagtgctgggattacaggtgtgagctaccatgctcggcctttgggttttatatttcttggggcctacgtttgttctccgtgggttttgatgtttgtgagtttttttttgcgtgtgtgttgtttgttcgattcttcttctctttttgttggtgtgtttttgctgggtcttctgtgtttggtctcgttgtctctttttccacatacgtctgctgtgcacgacctctcacatcctggagtgttttgtatatattttttatattttttttttttttgtttacctctttttgcgctcttttcttgtttttttttgtttttttgggttgtttgttgtgttggtttttttttcggttttttttttcggctccttgctttcttgttttttctttgtttttttgtgtttctttttttttttttttttttttttctctttttctttgtttttgcgtctttttttcttcttcttttcttcatgtttttgtacttattctgcctctttcgtttttttttttttgattgttttggtctttttttcatttttctctctttggtcgtttcttttttgtctgctctcttagcatcttcctcttcttttcgtctttctcttgtctttctccccctg

SEQ ID NO: 506058 - DNA, 171 bp, Homo sapiens
gggagcagcactggtggtgcctcaggccataggcctcgaccgttcttcctcctcggctctctctcactcacaaaggttctgtaaccctccaatgtcctaattaagcaacccctcgggtgtacactgggcccccagggaaaagagggcccacgatataccctttggggggaa

SEQ ID NO: 506059 - DNA, 489 bp, Homo sapiens
attcggcactgaggtggagccaaacataccacagaagagcatcacatactaagcaggtctaactctgcttacaacagcagtataaaatccaggatacatgagactctatcctgctttcctattcaacagcaaaacgaagacagcactacaattcaaagactttctgagatcagacaagatagcgcatgttcagagttcccgtatggccttagccatcagcccacatctacattcacatcaaccccagtgagtgcaactagagggggctgcatcctgggattgaacctcaacctcccacaactacatcaacaaccacacaatcaagaaaataccattcgcttgaacctgggaggcggagattgcagtgagccgatatcacaccactgcaccccagcctgggtgacagagcgagactctgtctcaaaaaaacaaacggccgggcgcggtggcttacgcctgtaaccccagcactttgggaggctgagacag

SEQ ID NO: 506060 - DNA, 107 bp, Homo sapiens
gaacctctgtagtaggcggcggggagagatgaatttggcctggagtagggtgggaggggtcaaggcagaaaaggtgggttgattctacaaacatttaggtgacaaat

SEQ ID NO: 506061 - DNA, 248 bp, Homo sapiens
ggagccccgtgaggaagcgtctccgttgggtccggccgttttgggactctgaggaaagctcgcaccaggtggacgcggatctttcaacatggtaaaggagaccccacaagccgcgggcaaaatttcctcgtacgctttttcgtgcagactgccgggagagcacagaggaacacccgattttccgtcatttgcggattttcagagtttcgagatgagccattctcaaggagagcgatttagtttgcaaa

SEQ ID NO: 506062 - DNA, 338 bp, Homo sapiens
gtgcaatctaatgaccaaatttgaatggatgaggagttgccttcttgtgaatgagcaaagaaattggtttcttgagatggaatctattcctgctggagatgctgtgaacattgttgaaatgacacaaagaatttagagtattccataaactttgttgataaatcagtggcagggcttgagaggcttcacaccagttttgaaagaaattctactgtgagcaaaatgctatcaaacagcattgcatgttacagagtctttcatgaaaggaggagtcaccagtgggcaaccttcattgttgtttagaatgcacacaacccatcttcagcaaccacatccaa

SEQ ID NO: 506063 - DNA, 520 bp, Homo sapiens
taaatcagctcgtacccctcacggattactcaaacaacaggcacttaaaatacacttaaaaccaaaatcataagcctcccacagaaaaccaccttttccatttaaattaatgaaaccttgacccaatcaactacctaagagaaacccgggagtcatcttagacttgctaccccatctagcactttaacttatcaagtttacttttttttttttttttgagatggagtcttgctctgttgcccaggctggggtgcaatggcgtgatctcggctcactgcaacctccaccctcccgggttcaagcgatgctcctgcctcagcctcccaaatagctggaactacaggcgcatgccaccatgcccggctaattttggtatttttggtagagacaggtttccagcttgttggctaggctggtctcaaactcctgagctcaagcagtctgcccgctttggcctcccaaagtgctggctttacagggtagtcacttgtcttttaatggtggaggtaacccgagaggg

SEQ ID NO: 506064 - DNA, 495 bp, Homo sapiens
taaattagaccaatacattttaaactgacatgaccaaaacaatcttctttaaaagtttttcagaaggtcatacattgttctgatgtgggttataagacaataaggtcagcagaggatcaaaactgtgttttgtgccaaagttacttatgcatcatttatttaagggggttgaactcttgactgagttgatgtgtaataatcaatattgttaaaaaatgcccctcatttctcattcaaaaacactaaaacccctaaaagttgtttgctaattcataagactattattgtttagtgtgtgttaattttttattgttttaggtataccttcatattatgatagacattttgctttttaaaaacacatttttttctctctttttgttctttcttgctttctttctttcactgtaccagaactacattgggtattaattttattaggatttctggagtaagcgtgaccaatgaatgcattttttgtgtataaatttgcca

SEQ ID NO: 506065 - DNA, 350 bp, Homo sapiens
tgggggttttttggaacccgcagtcaattagtactcaatggttttaaaccccttacttttgacagagcggggggtatgctacgactacaacttttatagctgttttggtaatttaaactaattttttcaaataaaattgtggcatccccacttcctcaggcaggtttttttgggctcacaatttgtgaaaactgggaaaaactgcttaaaaaaacacccaaatggagggtgaatttttttttcagcaaaagtagttttgattagaactttgtttcagccccaaagaatcatgtaaacgtaataggatcatgtagcagaaacttaaatttaaccctttagccttttattta

SEQ ID NO: 506066 - DNA, 1188 bp, Homo sapiens
cttcctccgggcgctgagaagatggggagccaggccgagccccggccctaccgccgccgccgccatgtggtcccgcagatcccgaccctgacccggactcccgtagcctgccggtgttcacgtcccgggcctcgtggtccccgggctcctgcgcccatgtctgtacggacgcggtgcatttacatcgtgactctcatcaaagcgccgacatcctgctggccgattcggtgtctctcattcatcgacttctatctgactatgctggcgatcctccagccatctgaccttcactcaacagcaccaatcatgaatgcaaaatacactgaatgagaacacagaacaacaaatcacatacataaagacaagaaatacacaaaatgacaaacaatacaaacagcaacaacagaataagcaaaagaaatcagcaagcacaatcaacacaccaccacacaaaacaaaaaacacacgacacccacacaccaacacaacacaaaacaaaacaccccatcaaaactacatccaacaaacgcacatcatcacaaccaacatccaacacaaaacaacaaatcacaacaaaaaacatcacactctccaccactcaaacaacaacaacatcaacaaaaaaaacacaacacataaccacacaaagcaacaacaccaacctacaacatcaccagcacaaaaaccaaaaataaaaatcaaaacacaatcaaacaacaacaaactacaccatcatacaccatcaaacacacattcaaaatacaacaacaatacaaccaagaaaaacacacaatgaaagcaacaacaacaaaacaaacaccatcaaaaacacacaacaaaacaccgatcatccacacaccttcaatgtaaacacaccaactcaaaaaacacaaccaacaacattacaatctacactacacatacatcaaacacaacaacaaaaaaacacacaaccacaacacacaattcaccacaccacaaccacaaacacacaacacataaccataaaaaaaacataccaaaaaaccaacacacccataacaaaacacacaaacacaaaaccactccaacaaaacacaccaacaaaaagcaagaacaccacacaccacacacaaaaaaacaataatctacaacaacaacaacaaataacaggcccacaattccaaaaaacaacacaatcacaaaaat

SEQ ID NO: 506067 - DNA, 289 bp, Homo sapiens
acttgggctcctgaacttttactgtcgttgcagctgaggaacatgatgtgtggcgaggtttaggcaccgtgatgccactgggaaagctggttcatgctacaggatttctccaaaatgccattgtacacctttgcttgcgggactcggagatcatactccttagtttcttgtcagaccctacacaagtcggggaggaaccccaagtacacataccacaggttacacggcggaatccctctcgtggaggacatcctactaggggacaacctcaatctacttgatattcttt

SEQ ID NO: 506068 - DNA, 716 bp, Homo sapiens
  misc_feature (299)..(299): n is a, c, g, or t
gttccccttaggccccaaatgcgccgcggcgttatggctcccaggggccggttttgttgttcttccccctgtccaactcaaccccccctttgcccgggatggggtttttttttttggccccccggcgggttgtgttgggtctcccttgtgccggggggggttcccccccgtgtgtttttttgcccccccatttcttttcccctttttcccgggggtggcggtggtgggtttctcccgccccccttttgttttcttgcccttccccggggggtttcccctttttaacggggccgcgttcnccccccccgccccccccgggaccttttttttggcccaaaacccgggggtttttttttttgtgggaaccccagggtgggggggcccccccccaaaaacttttttttttttttgccccgggggttgggggggccccccccctttttttggggttttcccccttttttggaccccccttggtttttggccccttttttttaaaccttttaatttttggctggggggggccttttttgaggggttgcctttttttttaagataggggcccgggtttttggttttttggggggggtccctttttttttttccccctttttttttcccttgggggggggcccttaatttcccggggggggggtgggggggtggcggttttccttttttggggttttggttttatttttttttccccccccgga

SEQ ID NO: 506069 - DNA, 817 bp, Homo sapiens
  misc_feature (63)..(63): n is a, c, g, or t
  misc_feature (381)..(381): n is a, c, g, or t
  misc_feature (467)..(467): n is a, c, g, or t
  misc_feature (470)..(470): n is a, c, g, or t
  misc_feature (484)..(484): n is a, c, g, or t
  misc_feature (536)..(536): n is a, c, g, or t
  misc_feature (562)..(562): n is a, c, g, or t
  misc_feature (589)..(589): n is a, c, g, or t
  misc_feature (645)..(645): n is a, c, g, or t
  misc_feature (666)..(666): n is a, c, g, or t
  misc_feature (668)..(668): n is a, c, g, or t
  misc_feature (670)..(670): n is a, c, g, or t
  misc_feature (797)..(797): n is a, c, g, or t
gagagagccccggagccgcgggggagaggaacgcgcagccagccttgggaagcccaggcccgncagccatggcggtggaaggaggaatgaaatgtgtgaagttcttgctctacgtcctcctgctggccttttgcgcctgtgcagtgggactgattgccgtgggtgtcggggcacagcttgtcctgagtcagaccataatccaggggctacccctggctctctgttgccagtggtcatcatcgcagtgggtgtcttcctcttcctggtggcttttgtgggctgctgcgggggcctggcaaggagaactatgtgtcttatgatcacgttgtgccatctttctgtctcttatcatgttggtggaggtggccgcagccatgtgcntggctatgtgttagagataaggtgatgtcagagtttaataacaacttccggcagcagatggagaattacccgaaaaaaaaccacantgnttcgatcctggacnaggatgcaggcagattttaagtgctgtggggctgtaactacacagattgggnagaaaatcccttccatgtcgaagaanccgagtccccgactcctgcgcattaantgttactggtgggctgtgggattaatttcaacgagaaggcgatccataaggagggntgtgtggagaagattgggggntngntgaggaaaatgtgctggtggtaagctgcagcagcccttggaattgcttttgtcgaggttttgggaattgtctttgcctgctgcctcgtgaagagtatcagaagtgggcacgaggtgatgtaggggtncggtccgcctcagcctcctc

SEQ ID NO: 506070 - DNA, 263 bp, Homo sapiens
tcagcattccgggcggctttgtcagatcttggccaggtaaatttgaccctccagacctcacgttatgttgccggagcccatactcgccgatcagcttcagactcttgtctcgagacgagatttctcgtaagggtctccgcgtgggtcacactaaattttagcgacaatacccagactcctgggccactcggcatgttaggctccgcttaccccgtctagcgcctaagcaagaccacccgtgtcactagagaaagagcaggtgg

SEQ ID NO: 506071 - DNA, 831 bp, Homo sapiens
  misc_feature (395)..(395): n is a, c, g, or t
  misc_feature (481)..(481): n is a, c, g, or t
  misc_feature (484)..(484): n is a, c, g, or t
  misc_feature (498)..(498): n is a, c, g, or t
  misc_feature (550)..(550): n is a, c, g, or t
  misc_feature (576)..(576): n is a, c, g, or t
  misc_feature (603)..(603): n is a, c, g, or t
  misc_feature (659)..(659): n is a, c, g, or t
  misc_feature (680)..(680): n is a, c, g, or t
  misc_feature (682)..(682): n is a, c, g, or t
  misc_feature (684)..(684): n is a, c, g, or t
  misc_feature (811)..(811): n is a, c, g, or t
gagggccggccgggagccggaaaccgaggtcccccttcggccagttttaatccccccgcctcccctctgccaggcccggagcatggcggtggaaggaggaatgaaatgtgtgaagttcttgctctacgtcctcctgctggccttttgcgcctgtgcagtgggactgattgccgtgggtgtcggggcacagcttgtcctgagtcagaccataatccaggggctacccctggctctctgttgccagtggtcatcatcgcagtgggtgtcttcctcttcctggtggcttttgtgggctgctgcgggggcctggcaaggagaactatgtgtcttatgatcacgttgtgccatctttctgtctcttatcatgttggtggaggtggccgcagccatgtgcntggctatgtgttagagataaggtgatgtcagagtttaataacaacttccggcagcagatggagaattacccgaaaaaaaaccacantgnttcgatcctggacnaggatgcaggcagattttaagtgctgtggggctgtaactacacagattgggnagaaaatcccttccatgtcgaagaanccgagtccccgactcctgcgcattaantgttactggtgggctgtgggattaatttcaacgagaaggcgatccataaggagggntgtgtggagaagattgggggntngntgaggaaaatgtgctggtggtaagctgcagcagcccttggaattgcttttgtcgaggttttgggaattgtctttgcctgctgcctcgtgaagagtatcagaagtgggcacgaggtgatgtaggggtncggtccgcctcagcctcctc

SEQ ID NO: 506072 - DNA, 184 bp, Homo sapiens
  misc_feature (26)..(26): n is a, c, g, or t
  misc_feature (40)..(40): n is a, c, g, or t
  misc_feature (75)..(75): n is a, c, g, or t
tatagcaactgggtacttataaactnagaccgggtaattnatgaagaaaagaggtttaattggctggtggttctncaggctgtacaggaagcatggtgccaccgtctgcttggcttttgggaaggtctcagggagcttttactcatggtggaaggcatagcggggcagccatttcacatggggg

SEQ ID NO: 506073 - DNA, 696 bp, Homo sapiens
tgggttcttaaaaaatctgaaacttgtgaggccaaaaaaagaaaggccggggctgggggaatggggtggggttcaggggggcccggttctgccaatctcagttcttttgtgtgcaaaagcggggtgtgctttgttgggggccattttcctgtggcaagtggcaagttgagttcgtggagcagagaggggagaggggcgtggggtgggtccccagccgtcaggtgtgggtgggtggcgccctcttgtgtggccccttcgcagtggcccaggcagttcctgtggacaagggcaacatgtggggctttgggcctgtgagattgtgggagaggcctttagaaggggacctctcagacgcaaagagaaagaagacctgtgggtgtggtggtgtgaggcattccccagggccatgtggaaaggagaccgggttgtggtgcgtggtggagaaatatccattggggccctctctcgttggtgtaaacaagacggcaacaacactattctatcactattattatcacccagaaaccagaaagctgtctgcgtgccccagatgttctcccacaacctggtgttctgtggaggccgccaggtcctcttggcggggcggggggagagaaactcgcttgggactctcgggggcgggcctcaggagcggcaatggccttttaccctgtactcactggtggaggcagcctg

SEQ ID NO: 506074 - DNA, 618 bp, Homo sapiens
taaggtgttcttgcgggactaaatattactacaaagagtacctatgcccagagataggctcgctgtctattcattggcaaaggtgtcagtggctaaaacaaattcgtgatgaagtgataaggatacgcatcatgcatagaatgagccttttaggacacggtattccgtcgagtccggatccatcacccatttacaggagactctaggagacagtatacctgaaatgcaatgagataagtcctgcgagcaagatactagaagtaaagcgagcattcctggacgatattccccctagagaatctaggtgaagacctttgaaagcgagtccatggaattccaatattaacgccacatacgccgaagatcgttcgcgaaaaaagaagggccaacgaattggccctttgggtgacaaacgagctgtctctgacattttcgatgcgtttcgccttgacaccctctggccgtgtaccccaactacctagtacgtaagacagttggatacccagtaaaccaaaagaggctaagcaacgagcgaaccgtagcattggaagaactcaagccactgcaagctggggcatgaatagaaatacgagacggtgagcatctcctatgatgaga

SEQ ID NO: 506075 - DNA, 880 bp, Homo sapiens
agtgggcgggcccacacataatacacaccattggggggggcacacacgaggagacgtttcacaccgcaggaggacggtatctcgccgagcgcggtgttgcccccccccgcactgttgttgccgtgggcgcacaaaaggcaaaagcccgtgttgccccgcgtcgtgagctgcggacacgcactgtgtgttaggacccccctgtggcagcgactctccaacagtaagagcccgccgtgaaacaatctcctgggccccccaacaaccccctctttgtggtacaaccgctcccccagcacctctgatgatttcgctgccgctgggtcccagctatgggcagcacgcccctctctttgttcgggaggatttggataattccgcctgccgagagagtttccccaccaatagcccgccgccagctcttgggtcctacgggcgcttcccgacaacagaggacttcccgcgagccacctgccgccctttagagcggcgagaagagctggtggcacctcccactcacccgcgggctccccctaacagcggtccccccgccctctctctttatggggtgtggcatctagatgcttgggtgacccgcgctatgggggttgatccttccgcccgtgtatcatttcaccccctccaccctcacgtcgttgtggtcccgacccctgttccgcgaagtgaggcgtctcacgaaccctttccagaattatacccgggttcttgccactaccggctcccccttttcccggggcccccccgtcgtggtcgacttcttgggtgcgacgcgccaccccgtctttccccgccgcgcgttcccccctccaccggcccgctccaccgctgcacccccatttttctctcgggcaaacaaaacaca

SEQ ID NO: 506076 - DNA, 107 bp, Homo sapiens
gtaatgacagtgtaattataaccttccacctgaacctcacacatgaatttctgcctgttttttgttccccacatgctctaatttcatagtgatgggccctaccttgt

SEQ ID NO: 506077 - DNA, 205 bp, Homo sapiens
ctccggtctatctagagactccctacgagaccgtgttgcatgtgtgtttaacggcaacgacgccagacagatccgtgtccacccatgtaccattaagacaatgggcaacgttaccaaatttgcatgagaaaaatgggcctatttaatgcttttggaaaagggccttaataagttaagtaacagttaagaaatgtcatgttcttgg

SEQ ID NO: 506078 - DNA, 211 bp, Homo sapiens
tactcacgtgaaccaggtatgaagctattgggaaaacttttggcctttttagctaaaaagaccaatcagaacagggctatttgaagaattattttatacacagattctgccttgatatcatagtatgagggttgaagacggaacacaatctaagggtctctcattaatttaattttgttttgttcagtataggtttatttttttttggccc

SEQ ID NO: 506079 - DNA, 331 bp, Homo sapiens
tcagccggtaccgcggtggagcatcatgttctcccacctctcagtgggggagcaaactggacagactagaaatgccagggctagctgagaaccttacagaatgagcaactgcggaagccacaggtaacaccgagatgtagatcagctgacagggacaagacaaagaatgttttctaaagtaaatcctcttaccagtatgttattgaaatcagtccttattggcatcgaagagggtgaaagtgctatttgcctgttgcctacagagactggaggaatgacaaatgtttaaattattttaattcaacaagtagaggaatacctgctatgtgaa

SEQ ID NO: 506080 - DNA, 629 bp, Homo sapiens
gtctcgtttgcatagcctaagtagaaattagacttttatgataggttagaataattagttggcctacacataaaaatatataaatatcagatgtaatatttgtttaaataaacaaatcaatatttcgacaaatatcgttaatttaattagcctaaatcattcattctcagttgctacaaataccaactgttcaaatgacatgttctaacaaaacatggatgaggttacatcgagatgatccaaaatatcgagatggtgtggaagctttcctcaattttgcggaattttcaatcaaaagagacaaaatgtcaggcccttgtatgaagtgtgaaaatctatatatcgaggatagaacaatcatgcaaacacatttcattgtgttcggtataagacccgattatgatttatggtactttcatggggagaagagacctagaagtaatgacattaatgatgatactgatgatgctgataatgatactgataatgatgatatcgcgaaacatgatgatgttctacaacaagatgatgaaatcgagaaccactaattgtccacaaccagattatgtaccacaacatgatgacaaagtaatggtggagaccagtaaggctcagtatattgacgacat

SEQ ID NO: 506081 - DNA, 278 bp, Homo sapiens
gtcgactgtttccactttgtggctagggactgattgcttatagcaagttacagaactggagcagaaaaagtaccaaactcagaatcagatggccagtagtcgaatccacttgcaccagttagtgaccgtatgactgagcacagtaggcacagaataactccttgttgcattagtaaatgaactgaccctcacaacaaccttgggaggtgggcacaaaaagcatcatcaataccctttacaggtgaagaaactgggacccagagaggttaggtcgacgc

SEQ ID NO: 506082 - DNA, 754 bp, Homo sapiens
tggtaatttcgatgacggggcggggttttagacctaggtagttacttggtccggtcgctcttacaactgaccatgcagcacatgcgggctcgcccatacccgtgacaggggctgacaagggactagtgagtcagcaccttggcccaggagctctgcgccaggcagagctgagggccctgtggagtccagctctactacctacgtttgcaccgcctgccctcccgcaccttcctcctccccggctctcgtcatcatggtccatcgaatattatctgtggagttcctgcatccgatggactgcagtcggcatgccaggacccagaccagcacccgactcccacctagatgccccagactagagctactccaggccaggtagggaacggcctgatagtggactagtctattattccatttcattctttctctctaggaagacccctaccatcccccggctagggcctacctatacttaccacttctccaagaaataggcaagcctgaactcgaggccttgtgtgtcacggccctcatgccatagcactcccatggccattgcaccgatacgatagtgctagaagacatgtttcaagaaccgcattatcgcgcgaagggcatgcacggggcatgcacacggatggtcactctgccctctgctgctgccccggggtggggtgcactcgcccatttcctcacgtgcaggacagctcttgacttcgggtggaaaacacggttgctaaaagccaccagccta

SEQ ID NO: 506083 - DNA, 268 bp, Homo sapiens
ggcaagagaaggaagaaaatgttaggccaggcacagctgacacgcatataatttcaacactttgagaggctgagatggacggatcacttgagcccaggagttaaagaccagactgggcaacatggtgaaatgctgcctctaagataaaatttaaaaagtaagctggacatggtggcatgcacctgttattcagtaggataaggtggaaggatagatatgacctgaaggctgcagtaagccataattgtgccactatacaccagcctga

SEQ ID NO: 506084 - DNA, 412 bp, Homo sapiens
atagcgacaccgtacacagtgctgcatcaacctcaagatcagctcaaccctgctctaccggctgatcaaggacgtacgaaatcgactatcccaagcttaagcctgcgttccgatgaagaaaagagttcagcaacgcaaacgtcaaacctggctcgcactgccggccagcggaatagaagaggtaggccatggccgaggaagagcagcagccgacggcggaagccttgaagcagcgccgcaaacgcgagaaggcagcagcgaaggacgctgcattgggcgtggagaagtttacggttgaagtggccggcattttcaagggcgatcttcgcaaggtgatgaaggcccacggcatcaacaaccagcaggacattcaccagcggctgatcattaatctgatcgccgcagacttcga

SEQ ID NO: 506085 - DNA, 973 bp, Homo sapiens
cggtatagcggggactggctgagaagccgtcgcgtcctgatatgtggactggtgtgaaatacgcatcttgtcccgacgctgagcctagcaaacctcaatgctaacggaagaactgctatagcaatcgagagtcctaacatatttatcagaatccaggaaggctactcatgatctccgctctcagaaactgttataaggtacaaaaaggaaggcttactaagaaatgctagcgctggttcttacagacaagatgataccagtcaaagagtaagtgtctatgcatagccagcggtctcctgattagagatgggatggacctctgtgcactgtctgtatgaagactgctatagtgatgttgcctatgcttgtcctgcacatggggtcctaccatgtgtggagctaaatgccgatgtgaccgtaagtggctgtatgagctacattcgccagtcgtaaggcgtgcgacataattcatacatatgacactgctggataatctgcggttccctactatggagccttagatcggtctttatctctaatgtatctgttactctaagcatacatttaggcttggttatcatatgacaaagatctcaaaccatcttagcggtgccctaatacatcattctttgagctgctataaagaatcccttattagagtattacgctcgcaaggacatatgtcagataggtcagcgtacaccctggccgtggcatacgtttcacacacgtatggtgtcaagcggcctgtattggtgtcttcccagggacacgagtttcagagaccagacattgatgaaccgcggtcccatcctggcatggaaactggatgaacgttgcgcaaaactttcactattagcctgcgcagggaacaaagcaaaccttgtgtgccacgaacactcaagactagagcgacacattataaccagagacctagataacacacacgacgcatacacttaaccgaaggtcc

SEQ ID NO: 506086 - DNA, 801 bp, Homo sapiens
gggcgccatggctcggggtcgcaatgaagcatctgaagcgggtggcagctccaaagcatggatgctggataaattgaccggtgtgttggctcctcggtccatccaccggtccccacacgtggacagagtgtctccccctcatcattttgcctgaggaagagacttaagtatgccctgacgcacggacgacggaacggaagacgaagacttggcagtgtcgcgcgggtgtgcacttaaagattgctgaccgtggcaaacggtcctcggatacctggactagtaagcgctacgcctgcgtggacttcatgggattcgtcactcacgccattggagctaggagagcgggagacgacatttccggtctgagtctatgatagccaggggggtcggtgttgctgtacagtcgtgattaacgacgctgagagaggccaacgtagcaagttgtgcaaaatggtgacgaaagatctttgtggtgcacaaaaatggaatcccgtcactctggtgactcagtgatgcccgcaccatccgcgtagcccgatccccgtcatcaaggtgaatgactagccattcagacttgactttaggagactggccaagattactgcatttcattccacaggttccgaacctcgtggttaaccctgtgttatggtgaacgggtagggtgcgtgaccgtaggaagaagtggtgtgaatcgggcaacagagagagggaccctggattcttttgacgggggttccacgtgagcagacggcaatggcatgcgcttggccactcggatttgcaacatttgttgatcgc

SEQ ID NO: 506087 - DNA, 397 bp, Homo sapiens
tatttgggctgtgagaagtacctaacagagcaatctggtggcagggctcaggaaaggttggcatggcccctaggaatgggggctctgcaagatcctggactttagaggctgtgagagggaacaggtgtccatccccaagtaagtggacacggtctttgaggaaatcccagtgccagggcctgaagggcactgtcaggaacacaggctgtttccagtctgttgaggattcaccgggggcgcttgttcactgtgagcacggactcctcagggccaatgtggcagaagagcccaccttttgaaagcgagcgggtggggggtggcgggctggtgctggtgctgtgcttctgcacaagcccacctggttaggattgctgtcggggttaccggagctcgaatt

SEQ ID NO: 506088 - DNA, 145 bp, Homo sapiens
ctcccaagcatgagaactgcaaagctaagaataaagaactattaatattcactgagtaactggttctgaactccagggtatcggaggataacaccacagtactatttataaaatgggaggttctaatcaattcctcatccttggg

SEQ ID NO: 506089 - DNA, 688 bp, Homo sapiens
tatctttaaaaggggattaattaatgtttacatcagggtagcaaatgttacataagtggtttccttaaaaacatttatttggtgacaatcacattggttatcaagcaagacttatgggaaaatctccggggtccacaacactgaacttggaaactaactggtgagcatcctctttcccaagtttacaacatgacttgggggcactgaagaagtatggttcgcatggcccacgtggtcactatgtgacaacctggacaccaagcgagaacgcctttggatgaacgaaattgtgtttactctttaggtaggagttacaaaagggtacttccatggtcgtgtagatatatcaaacccatcatttttttacagtatcatttctggctacaactaacccataacaccagttaaaactaacgcagtatagcaactgtaatcgaccaactatctagtcacggtcatatcccttatattaccagaggttgctaacgctcgactaatgggacctggcttcatatacttacccaccactctggatacttaaatatatacacttgggggcaactacccaacctgtcacagaaccactcgctccgggtacaactacaacgaacgccaacaagaatttcccctcgaaacaatggattgccttgtttcaaaaattaccacaaacttaggttacttcttaagg

SEQ ID NO: 506090 - DNA, 398 bp, Homo sapiens
agcacgtgggtcttccctattaggcacattcggtcctctcgcgcattctttcttcccaccttgtgtgctcacaaaaatgctcccaacttccctagccctttgtgcttcaagtcttccttggcccccattggttctcccacaccaggtctctcagctgccagcctaccaaccaaatgttccaccacccagccttaaaggaaggacttgggaaacaagagaaaggaagcttgccaattataacctttgaatgtgggtatgcctcttgtgtccatcactccatctgatgccacacgctctccttaggctcacactctgtggctagcttgagagggagccatatgctcgaggcacatgtctcctcttctctgtctctgggtatgagatttccccgcgtgccg

SEQ ID NO: 506091 - DNA, 320 bp, Homo sapiens
gaacccaattattggaaaacgcggctcacagagctaaaaaccattccgggcagtccggaattgatctcctgacttggtacggggggcccacctcagccttgcaaagtgctgtgattacagacatgagccaccatgctgcaactatatttacgtgaataacagtggttgacacggggctagcacgggcagaaataccagtcaggaaatgtaacaaaataattattctctctacagcccttacatcagcaaactctgaatatcctgggatactgtgattaagttgaatatggagataaaaacaaatattgggagaagttatg

SEQ ID NO: 506092 - DNA, 258 bp, Homo sapiens
gatgatctacgagctatattagtcgggtgggttagagagatggtatatgaggaacgttgggaaatttggaagagtcttttaactggattctgatggggtcatggtgagcagctacggaagggttaatgagagaggcaggaagtgggtactggggcaaaggggtcaggggccggactagcggagaggagcaggaggggactctggttgaagggggcaagaaaaggtgatagaagctccgactttggctacacaggtctc

SEQ ID NO: 506093 - DNA, 448 bp, Homo sapiens
  misc_feature (9)..(9): n is a, c, g, or t
  misc_feature (73)..(73): n is a, c, g, or t
  misc_feature (105)..(105): n is a, c, g, or t
  misc_feature (176)..(176): n is a, c, g, or t
aaaaatggntgtggtggggcctactggaaaaccgggcaatgggggccatctgaaaacaccactttgccagtgnatgcaaaactgcctcccttaacttgcctgtgnccctatccaggcaaagttactttgccctctctgagccctcagtttctttattcattaaattcaaatatgancccaggtatggtggcccacgcctgtaatcccaccgctttgggagggtgaggcagtaggatcgcttgagcttgggagtttgagaccagcaacataggaagaccccatctctacaaaaaataaaaaaattagctgggcatggtggtgcatgcctgtggtcccaggtactcaggaggccgaggtgggagatttgcttgagcccagaaggttgagactacggtgtgctgtgatcgtgcactccatcctgggggacagagtcaggccctgtctcaga

SEQ ID NO: 506094 - DNA, 452 bp, Homo sapiens
  misc_feature (26)..(26): n is a, c, g, or t
  misc_feature (57)..(57): n is a, c, g, or t
  misc_feature (74)..(74): n is a, c, g, or t
tgcagataattccaagaatgcatatntgggctgggtatggaggttcactggtaatcncagcactttgggaggcncaggcagaaggatcgctgcagcccaggagttcgagactagcctgggcaacatagcgagacctcgtctctacaaaaaaaaattaaaaagggggctttgggaggccaaggcgggcagatcatgagggcaggagattgagaccctcctggccaacatggtgaaaccccgtctctactaaaatacaaaaaattagctgggcatggtggcgcacacctgtagtcccagctactctggaggctgaggcaggggaatcgcttaaacccaggaggcggagattgcagtgagccaaggttccaccactgcactccagcctggcgacagagcaaggctccactcaaaaaaaagatttaaaggggaaaaaatgtgaaattttcctcgtg

SEQ ID NO: 506095 - DNA, 273 bp, Homo sapiens
aggcactgaatgcctgacaacaaagcaatgactctgtctcaaagcaaaaaaaaaaaaaaaaaaggtgcccaatgtggttggaattggccaaagatttggttgtaaagggaggtaaaagggctctggattaaaaaaactttccccacagaggagattcagtgatttgcaaaattcctaggatcttctgagaccttaaactgcaggcttcagtgcctgaccaggcttcagtgcctgaccagtgctcagtgcctgaccagggctcagtgcctgacc

SEQ ID NO: 506096 - DNA, 419 bp, Homo sapiens
gctgtgcgagaacggcacgcgggggtgtctcccaacgcgtgtcacactctgtgctgtgcgcgtcacacagtggctctggacactctgcacgctgtgcgcgcgcgcgagacacagcgacagggcccggctctgcaaagaatagtgagagtgtggcactctggggccggagccacttaacttgggtgagagagggccaagggaggtttcctttcttaagagccctttgtggccctataggacacctggctgtgggtggcttccttattccagagcgcaagtcaaggtgggcccagagacactagaatcacaggccgtggctgtctctggctttggcctttctctaagggccagacacgggtctggtgtggcttttaccctcttctgagctctgtcgcctgggccggtgtgtgttccggccc

SEQ ID NO: 506097 - DNA, 181 bp, Homo sapiens
ccccaaatatagcataaatgaaattgttaaattatttcattgtagttaattccccctataggaatgttttatcaaagtgaagttttttttgaaaaaaaacggaactccttgaggcttttttttgggatgtatatgaggggggacatattattttatgtgtttataatataatattttccca

SEQ ID NO: 506098 - DNA, 324 bp, Homo sapiens
ccggactgtggttagcacaataaggaagggtccccaggttggggagagccccaagagaacaataatgaacaattatagtatgaacaactgttagaaacagctaatcacaaacaacctgcgggcacaatgacctcattccacacgtagcacccttcagcaggaccctataaaactttcctccagcccttgcctctttgcaggtagccccttctctgctgagctgcccactgcaacatattttcacaatttctctaataaatctgcccttctttacctacaactatcttggtaaatggctttaccacctgcaaaactgaccctagg

SEQ ID NO: 506099 - DNA, 413 bp, Homo sapiens
cgtacctggcatttccctgaattaggacaaattatttcagatcattataacatactcgctacagtgtttaccgtaaacgttggcgattggaagaactatgcctctgccaagctttctgagttgctgtcagaagaagcttgaagcagaagtgaaagcagctgcagagatatcaatgggaacaggggtttcagaagaagatgtttgcaatattctgcatctttgctccctggtcattgcacaatctctgaatatcgaaccccagctctatgaatatctactagatcgaatgatggccattgcacccaatgttacagtcatggatggggaatccgtgagagctcggtttattgctcatgccggttctcttttaaatttggccacgcatgccgcttctaccgttcagattcttggag

SEQ ID NO: 506100 - DNA, 478 bp, Homo sapiens
cttttcgtataccctgcacagtgagcagtcctttatgctcagccgggctctttcacaggtcttcttggacagcccctagccctctgatagtgaaacaggtttatgtttcaacattattcctgacaggtaggatattcgtcataatatggctacacggggagggattagtaatcatcacattctacttatgatgtgtcaagtactttcatgtctattattattattatttttattttaattcactgtacaattcattttcttcctccagtgtcaaacatgtctgttatgttaccttacatctcccaataaccctgtactgaggtcgctattattcgcacccgtattatcagacaaagggcacacagaccggtgtttcccttagtctatgaaaatacatccagagactgggatatgtaaccataaagtctcacaaaagaccatcacacgatcctacccatgacatgtaagcaatcagtaa

SEQ ID NO: 506101 - DNA, 318 bp, Homo sapiens
aatttaatttttttggattataagggaggttctgttgaaattcatatatccctgagaggagaaacccagctttaaccccctttattccccggtttgaatttatccatttgatttgatttttttgtggaataaacctgctggttgattggcagtttgggccttctaaagtccctttattttacggttggtttttatctccctaacttttgatacttcaaaaaaattccttttttggatttattaagccgctcttttcttttttcttgaaataatggttgggtttttaaaactcccccataaatttttcttcctgtccca

SEQ ID NO: 506102 - DNA, 343 bp, Homo sapiens
ctatgtgggaatgagcaggaacccggaaaagatgtctgttgcgcaccctccatgcccaatagtgagttcttgtctggtggcctgcacgaaccgacgtgctctccctgctccagcttgaggaccatgccaccgcgtcgtgacctggaaagtgctgtcggcatagtcacagaaggtgaccaccttctgtgcacgctcccggccacgcatgaggttcacgcacaggttccctcgagagctggcgtggtaggtgaagtagtagagaccgggcaccttgcaggtgaacttgccactgcggggctcataattgttgttcatgttggtgatcacatagttcagcgtctga

SEQ ID NO: 506103 - DNA, 157 bp, Homo sapiens
agatcatatcttattgcaaagaacaaagactaatagtccatatatatttaagtatctctaatctactctctccatgatataaaatacccaagaattctttactagtccctatctgatccccaacaactaggatctcattccttgataacatgatact

SEQ ID NO: 506104 - DNA, 1105 bp, Homo sapiens
tgtttgaagccattgattgatattcttgtttcagtgtctggttccctataagtaatatatatttcctctttaagctctgtgcctcaatatgcaatcactttgataataagtataaatatgaagacataccaaactgcaaataggattatttttcaaaactatatggtgaaacatatggtgatatgatagacttatggtttttctgtttgctgggattgggtctgctttttgcctatgtgtaaggcattttaatcattgtgaatataatagattccttaaaataagaaaattaaaaatcagaaacttcccttggagtagagacatttcagttgcaagcataaagatttttaaatatataacactaggttatataattcatatatgtgtggttttgtattaataatcaaattaataaaaacatttcattttctaccattgtatgaacgtaattttattttttaataaccacactcatagatggttttgattgttccagttgagtgattgtgtatgtacgcataggaatgttttgttcagttgtactttgtatttccaataatcagaaatcttacctttatgtataaaaacccattatgtaatgtaaaatgtataatattgtacataatattcagaatacaattattttggtaaattagcttgtatttttaatgtcccagttgcagtatttaattatttgaaccatactgaaagttggtaatagtcaataaagctaaaaaaaaaaagtggcaaatcttaaaaaaaaaaaaaaaaaaaaaaaaaaaaaaaaaaaaaaaaaaaaaaaaaaaagaaaaagaaaaaaaaaaaaaaagggggggggaaattctggggggggaaacgtggaccacccaataggtgtttagacacgtactaatatgtctacacaagtagaatctaattaataaatttatgatagtacgcggacacaacattaaaacgagatgattgtgttatacaacgataaaaatatctagagggacaacatctcaatgcgtgtctagaatatttgaaggacaagacataaaacacatgcgaaaatttaacaacagtatagtgagaacaaacttattggattagatcaatatag

SEQ ID NO: 506105 - DNA, 239 bp, Homo sapiens
ggttccccccccaaaaaaggggggggttttcgtttgggggccctaaaggggggcttaaggaagggccccctcccccctgggtttttaggttccctatccgtggtttaccacaggcccctttccttccccccgaaattttggttggggcccctatattgggtttttttttttttttttggggggggtttgaaccggggccgggcccaagtggggggccccttaaatcttttttttttgta

SEQ ID NO: 506106 - DNA, 581 bp, Homo sapiens
  misc_feature (280)..(280): n is a, c, g, or t
taaattaaagtgaaagcttttaaaaaaaggggcaggtattccttggaaattaggtaaaaaaagcctccccatttgtgttcccctccctttttggaggggagcagccccttatgtggagaactgcgtattgtggtacccgcagaaaacatttcaggcaagagcacaccattatagccttccgcgtgaaccccttcttcccccggatttttcccacagagacaggctataggagattagaagcggcaaacatatattctcgctctcacacaggggctcatgnttgagactcttagagagggctccctttcaaggggggtagagctctcacaaggggctctctttttcaacattccacaagatatactctcaatgtcgcgcgcgcacatctccacatgtgcgccaggtgtgtgtgtgcgagagaaacctcgtggcgagaaagcaacctttgtgcgccctttgtgcgcgcgcccggcgtgtgagggccacccgggaagagatctctgtgggcgtgtgaacgcgcggtgttctccttgtgggtgccaacggcgggaggtctttataggggcgcccgtggcgccact

SEQ ID NO: 506107 - DNA, 135 bp, Homo sapiens
cttgcggatcctgcgcgatggggacagctatgagtgtaatgtaggacatgtgctctgaaaaggatctgagtgcagcgcttgtggctgggagtggtggtcagaggaggggtcacatctgcgtgactggttatgatg

SEQ ID NO: 506108 - DNA, 991 bp, Homo sapiens
attaatcccctggcccaacccgtcatctactctaccatctttgcaggcacactcatcacagcgcatgatgctcgcactgattttttacctgaggtaggccgtagaaataacacatgcggagcttgtgtattcccagttctgaaccgaagagaaacataagacccttcgttccaccaagaagctgggcatcaaagtattttccctccacgccaagcaaacggtatccataaatcctttctaataagctaatccttcttcaaacaaatattatctctccgagacaaattgaacccaataaacaaatatttaacaaattcaatactcattcattcaatacatcattaagtggcttataagcaagtaaaaacttaggacatagccccccctttcactttcctgaggtccccagaggttatcccaaggcaccccttctgaggatccgggacgtgcttctttctcagcatgacgaaaaactaagccccacatcgtcaatcattataccaaatctctccactcaagttaaacgtaaggcttctcctcactctctcaatcttatccatcatagcaggcagttgaggtggattaaaccaaagccaggtagcaaaatcttagcatactcctcaattacccacataggatgaataatagcagttctaacgtacaaccctaacataacattcttaatttaactatttatgattatctaatactaccggatttcttatattcaaattaaaactccagcaaccaagaccttaatatatctcgcactgaaacaagttacatgactaaaacccttaattccattcaacctccttttccctaaggagggactggccacgcgttagcggggttttggccaaaatggggcctatatcgaaggaattcccaaaaacacataagcgtcaataattcccacaataatagcacaataaactatgttaaacataattttaaacaaggctataataatcaacataattacataatc

SEQ ID NO: 506109 - DNA, 259 bp, Homo sapiens
tctagacggatccctatatttttttttttaagaacagagtctgcctcgtattgcccaggtggagtgcagtggtgccatctcggctcactagaacccttctgccttctgggtacaggcagttctcctgtataagcctcccaagtagcaggaagtacaggctcataacaccacgcctggctaaattttggtattttaagtaaagacggggtttctcaaatattggtcaggctggttttgaccgttttgacctcaggttgag

SEQ ID NO: 506110 - DNA, 904 bp, Homo sapiens
  misc_feature (301)..(301): n is a, c, g, or t
ggcggactccttggctagtctgtctagtgggagatccttttatgccgtcccttcgcctccttcagcgccgtgagaccccttcaagttctactcttgcgtgagtgccatctccatccacgttggtcaggctggtgtccagattgggaatcgcctgctgggagctctagtgcctggaacacggctatccatgccctgattggccagactgcctaagatgacgagactcattggtgggaggaccattgatctccggtacatagcattgcttttcttcatgatgaaactgggttgctggcaacangacatgatgcccccagggccgtggataactgctagcacttgtgaatcccactagtctattctgaatgaaacttcgctgcttggcgacttttaccgaacagtgtcttccatccactgaagcaactcatcgcaggcaaggaaccctattgctggccacattaacctatgtcctcgaagtgtgccagctatctaccattttgcgtgataggcagtatcattgaagcctcgctgatatgcctagccggacatatcggacgaagcctggcatgaacctagttggccctccgcgtcgttccacccgggctgtcctttgggttttgaccattagggcgtttctcgagtggcgggcgcgaaacctggtgttctcatcggagtattcacgcctcaggcgttaagtctcgattcgcgggacaacggtcttcctacgaagttatgcaatttgcaatgggccttacacgatacgttcccacacggcctggcaggttacctccccattttgtaacccccggggcgcccccccgaagggttttgtcccaaccaagccgtggtcacgtttttgaaggccccttaaccaacttcccaattcccttcaacccaacccacg

SEQ ID NO: 506111 - DNA, 218 bp, Homo sapiens
tcgtgaaaactacagacctgctagacagactagcgacaaaagctggggcttaagaatcccagagaggttctcctgagagagtagccagtaggattttgtatgcagagatttggttggggaggaggtgacgacgtaaggagcagaggggcaaacctgtcgggaatcctgccttgagggcacgggatgtgtgatcgtggggttgtaagggtaccgagctc

SEQ ID NO: 506112 - DNA, 375 bp, Homo sapiens
caggacaataacatatatgtttgctttcccagcagcacgtattgtcactggtaaagatttgcccagttagtcttgagtcatgagtcgaaatagaatacaggaaagcccatctaaaggtgtcatacgctgtgtctccgttgtaggggtttcgaccagccttcacacagatgtatccttctggacactggcctgcatctgagccatttccacagagtaaagggtctttttgcccatccaaaacataaaagtgactgtcatctccaatgtaatccttccagttaaatgtgctcattgttacattaacaaatgtcccatttgaatccattgtgccattaaagtaggaagtggtgttggtttcaagaagcaggaactggg

SEQ ID NO: 506113 - DNA, 81 bp, Homo sapiens
acataataaccagtgttttttaaagacttttttgtcagggtgcagtaaaattctccaattacttttattcaaaaaaaaaaa

SEQ ID NO: 506114 - DNA, 508 bp, Homo sapiens
  misc_feature (10)..(10): n is a, c, g, or t
ccgcttgctngctttacgaaaattaaaaaataaaaaattagccaggtgtggtggtgggtgctgtaatctcagctactcaggaggctaaggcatgagaattgcttaaacccaggaggtggaggctgtagtgaggccagatggcgccaccgcactccagcctggggcgatggagtgagactccatctcaaaaagaaaaaaaaaaaaaggtaggcagagtagaggcaggcacctttccccagcagaagaaatatgtgtgaaatgtggagaatgtcggggagagtcctgtaggatggtatggatcagaaggcctaaactgagaccttgagatacaaagtatggcgaagaaggggagatacctgggactctgtcactcaaggccccctctgtatttcaaaccccattctcaacaaccttcccaagggcgacaggcactccctgatcaaaaatctgtggactcctgagtccaagtccctgtccaatgaatgaaccccttaagcatgaagtgtcc

SEQ ID NO: 506115 - DNA, 627 bp, Homo sapiens
tactggcctgtacattactcccgtttggaccacagcctctgttctaagatcttgtataggctgttattgtgatgaataaacgttcaaccctcggctgcagccagagtagccaggccgcgcaccccaaaaaaaaaaaaaaaaaaattaaaaacaaacaaaaacaacaacaaacaaaaacaaacaacgtggtgtgcgggccgcccgcgcggccccctgagaaagaagtttttataacacaacacttgtgcgtgggggcggcgcgcggggccacagagtggggaaagcgagagaagcggggggccaaaacacgggtggttccacaagagggggagagcaccgcgggggacacaaagagaaaacaagggggggggaggaggttcctttcacaccacatatataaaaaaaacagacgccggggggggggagcaacacccagagaggcgttgcttgcagagagaaaaaacctccccgagacgagggggagagggcacaccgaagaggggggaacaatataacagagggggggagacttatatacacaaagacggggagagcgcgcaaaagcacaggagcgcggagaataaccacaaaattaagccccccaggcggcggggggggggggggcga

SEQ ID NO: 506116 - DNA, 1703 bp, Homo sapiens
ggggagtggcgtgctgggcgtgcgcggtgcggtacggcgtgttggtcccagcggttcagctgaggtagggacgtgctgtaggccggaatgttaccggctgttggatctgtggatgaggaagaggatcctgcggaggaggattgtcctgaattggttcccattgagacgacgcaaagcgaggaggaggaaaagtctggcctcggcgccaagatcccagtcacaattatcaccgggtatttaggtgctgggaagacaacacttctgaactatattttgacagagcaacatagtaaaagagtagcggtcattttaaatgaatttggggaaggaagtgcgctggagaaatccttagctgtcagccaaggtggagagctctatgaagagtggctggaacttagaaacggttgcctctgctgttcagtgaaggacaatggccttagagctattgagaatttgatgcaaaagaaggggaaatttgattacatactgttagagaccactggattagcagaccctggtgcagtggcttctatgttttgggttgatgctgaattagggagtgatatttaccttgatggtatcataactattgtggattcaaaatatggattaaaacatttaacagaagagaaacctgatggccttatcaatgaagctactaggcaagttgctttggcagatgccattctcattaataaaacagacctggttccagaagaagatgtaaagaaattaagaacgacaattagatccataaatggactaggacaaatcttagaaacacaaagatcaagagttgatctctctaatgtattagatcttcatgcctttgatagtctctctggaataagtttgcagaaaaaacttcagcatgtgccaggaacacaacctcaccttgatcagagtattgttacaatcacatttgaagtaccaggaaatgcaaaggaagaacatcttaatatgtttattcagaatctcctgtgggaaaagaatgtgagaaacaaggacaatcactgcatggaggtcataaggctgaagggattggtgtcaatcaaagacaaatcacaacaagtgattgtccagggtgtccatgagctctatgatctggaggagactccagtgagctggaaggatgacactgagagaacaaatcgattggtcctccttggcagaaatttagataaggatatccttaaacagctgtttatagctactgtgacagaaacagaaaagcagtggacaacacgtttccaagaagatcaagtttgtacataacactagaggcatttcttatcaaaaggattggataataaaaataagtttctactgggtatatttcaagcatttatttattactttagttacgaattccaatatactttaaaatggtatttgttttacagcatacataaaatgtagcaaatcagtactgtaaaacatttaacattcatacagttatatataatatccttttttttaaagaatggtatttcacaaaaatatcttttgaaattggctttggagtttacatatactgaacatgaaagtttataataatgatgatacaactttcaacattgtcattttttcttagaacttcagctgattgcagagatataatgattacattgttattaaatttttttaacacaagtaagtgtcaccattttatgacatgaaataaaaggttatgactgttatcg

SEQ ID NO: 506117 - DNA, 264 bp, Homo sapiens
  misc_feature (2)..(2): n is a, c, g, or t
cnggaggatcatgacggatgctcccatggttttgctagagagattactgctgtggaaaacatgcttgtggatggggcttcatgataggatgatgcatattcctttgaatatatacccgatgcaatagctgagccgaacagtaatactgtttaaaggtctatcagaaactgccaagctgcttctcacaatggctgaactaatttacattcccatcagcagtggatatgcattcctttttattacaacatcgccagcataagttat

SEQ ID NO: 506118 - DNA, 1807 bp, Homo sapiens
  misc_feature (256)..(256): n is a, c, g, or t
  misc_feature (290)..(290): n is a, c, g, or t
  misc_feature (306)..(306): n is a, c, g, or t
  misc_feature (318)..(318): n is a, c, g, or t
ggggagtggcgtgctgggcgtgcgcggtgcggtacggcgtgttggtcccagcggttcagctgaggtagggacgtgctgtaggccggaatgttaccggctgttggatctgtggatgaggaagaggatcctgcggaggaggattgtcctgaattggttcccattgagacgacgcaaagcgaggaggaggaaaagtctggcctcggcgccaagatcccagtcacaattatcaccgggtatttagttattcagaggctgntctgctgagaaagatgaacaaatttcttggtccnaaaacaatgtatttcnaaacgtgcccgntcgggcctttcccgtattgctcacttggtgctgggaagacaacacttctgaactatattttgacagagcaacatagtaaaagagtagcggtcattttaaatgaatttggggaaggaagtgcgctggagaaatccttagctgtcagccaaggtggagagctctatgaagagtggctggaacttagaaacggttgcctctgctgttcagtgaaggacaatggccttagagctattgagaatttgatgcaaaagaaggggaaatttgattacatactgttagagaccactggattagcagaccctggtgcagtggcttctatgttttgggttgatgctgaattagggagtgatatttaccttgatggtatcataactattgtggattcaaaatatggattaaaacatttaacagaagagaaacctgatggccttatcaatgaagctactaggcaagttgctttggcagatgccattctcattaataaaacagacctggttccagaagaagatgtaaagaaattaagaacgacaattagatccataaatggactaggacaaatcttagaaacacaaagatcaagagttgatctctctaatgtattagatcttcatgcctttgatagtctctctggaataagtttgcagaaaaaacttcagcatgtgccaggaacacaacctcaccttgatcagagtattgttacaatcacatttgaagtaccaggaaatgcaaaggaagaacatcttaatatgtttattcagaatctcctgtgggaaaagaatgtgagaaacaaggacaatcactgcatggaggtcataaggctgaagggattggtgtcaatcaaagacaaatcacaacaagtgattgtccagggtgtccatgagctctatgatctggaggagactccagtgagctggaaggatgacactgagagaacaaatcgattggtcctccttggcagaaatttagataaggatatccttaaacagctgtttatagctactgtgacagaaacagaaaagcagtggacaacacgtttccaagaagatcaagtttgtacataacactagaggcatttcttatcaaaaggattggataataaaaataagtttctactgggtatatttcaagcatttatttattactttagttacgaattccaatatactttaaaatggtatttgttttacagcatacataaaatgtagcaaatcagtactgtaaaacatttaacattcatacagttatatataatatccttttttttaaagaatggtatttcacaaaaatatcttttgaaattggctttggagtttacatatactgaacatgaaagtttataataatgatgatacaactttcaacattgtcattttttcttagaacttcagctgattgcagagatataatgattacattgttattaaatttttttaacacaagtaagtgtcaccattttatgacatgaaataaaaggttatgactgttatcg

SEQ ID NO: 506119 - DNA, 597 bp, Homo sapiens
  misc_feature (468)..(468): n is a, c, g, or t
  misc_feature (479)..(479): n is a, c, g, or t
  misc_feature (484)..(485): n is a, c, g, or t
  misc_feature (571)..(571): n is a, c, g, or t
ggggagtggcgtgctgggcgtgcgcggtgcggtacggcgtgttggtcccagcggttcagctgaggtagggacgtgctgtaggccggaatgttaccggctgttggatctgtggatgaggaagaggatcctgcggaggaggattgtcctgaattggttcccattgagacgacgcaaagcgaggaggaggaaaagtctggcctcggcgccaagatcccagtcacaattatcaccgggtatttaggtgctgggaagacaacacttctgaactatattttgacagagcaacatagttccttagctgtcagccaaggtggagagctctatgaagagtggctggaacttagaaacggttgcctctgctgttcagtgaagtgaggaatgtgtttactgtgtacatggtttactagaaatgtttattgattatatttccagctttaattttcttgagtaatttaacctgaatttacncagtttgcttnattgnnttttcaaacaaatgaaaaaaaaacttatttaggaaggattttttttaaaaaaccacactaatatatccctcctccaacatcccggnccccctcccgcccacacccttatccc

SEQ ID NO: 506120 - DNA, 992 bp, Homo sapiens
gggagatggacgaccacggggggaaacatgggccaacaaggagttaacaaccggcagtgctagcccgaaagtataaccatgggagcctccgaaaccacgtcccgggggcagaacgcctacaacgtgggaaggagcctggcatacgcccagggcagaccgcgtcacacagggagaagcacccggcggaacacccactttgggggcgggaccaccccagattttcctcctaagattcccctgaggaaatgagtgtgtgggaaacactctgtggccacgtcaaattccacggggagccccccatccaaaatgagctttctttttgagaattgtgcccggaaccccaaaccgcgagtgtttcccagaaaacttcggggattattctcgggcccccgtaatgcccttgtggagacaccaccctttcccccgtgggggcctcacaaagaaactgtgtgtgttgtgtttgctccgccgaccacaccacgcaactgcgcaacacaggggcttgtgtcaaacagttggccacagaagaggttgacctgggatttattttagccctgctattttattggtagaattcaacagctctttccccactcaggtcttttcctggatggtctggcttccccctccacgattggccactcgaggagtttgccgacaacgctgctcccccccccggggaacactgattacactgagccccacgggttcccagtgtgttggaacctgtggtgcccccacgttccccaagcccacttccttcgcactttgattatgttcttgagttttctccctcgtctacgttgtggaccaccacccgactgaattttaaaatgggttttttggaaaaaccaatttggccaaagttatttttttgggaggaaggaggacccagcttttgtgggactgggtagggtatagatatcactcctgagttccactgtttttgaattttacccagacaattgaaccttgtttttaaggtgccacca

SEQ ID NO: 506121 - DNA, 301 bp, Homo sapiens
  misc_feature (53)..(53): n is a, c, g, or t
  misc_feature (273)..(273): n is a, c, g, or t
  misc_feature (279)..(279): n is a, c, g, or t
tagagacagggtttcaccatattggccaggctggtctcgaactctggcctcanagtcctgacctcaagtgatccacccgcctcggccgtcccaaagtgctgggattacaggcataagcaccccgcccggcccaggcctatgttcttaaacacagagtttgccttaatgaagaaatggttatgaaggatctttattaggtaataaagaaatgacctaaacatcctattcagtatcttcctgcgctggttgcttttttctcacccatttttaaantatggnaaaataccatgtaaccatgaaa

SEQ ID NO: 506122 - DNA, 108 bp, Homo sapiens
tcctccaggaaacagactatactactctgattaaagccaccaactttattggtggtttgcaatatctctacattgagactatacgtctgctgccatatcattgtattt

SEQ ID NO: 506123 - DNA, 651 bp, Homo sapiens
  misc_feature (522)..(522): n is a, c, g, or t
  misc_feature (533)..(533): n is a, c, g, or t
  misc_feature (538)..(539): n is a, c, g, or t
  misc_feature (625)..(625): n is a, c, g, or t
ggggagtggcgtgctgggcgtgcgcggtgcggtacggcgtgttggtcccagcggttcagctgaggtagggacgtgctgtaggccggaatgttaccggctgttggatctgtggatgaggaagaggatcctgcggaggaggattgtcctgaattggttcccattgagacgacgcaaagcgaggaggaggaaaagtctggcctcggcgccaagatcccagtcacaattatcaccgggtatttaggtgctgggaagacaacacttctgaactatattttgacagagcaacatagtaaaagagtagcggtcattttaaatgaatttggggaaggaagtgcgctggagaaatccttagctgtcagccaaggtggagagctctatgaagagtggctggaacttagaaacggttgcctctgctgttcagtgaagtgaggaatgtgtttactgtgtacatggtttactagaaatgtttattgattatatttccagctttaattttcttgagtaatttaacctgaatttacncagtttgcttnattgnnttttcaaacaaatgaaaaaaaaacttatttaggaaggattttttttaaaaaaccacactaatatatccctcctccaacatcccggnccccctcccgcccacacccttatccc

SEQ ID NO: 506124 - DNA, 315 bp, Homo sapiens
  misc_feature (254)..(254): n is a, c, g, or t
gtggtgtctagaggactagtatgtatacagctcgcatagtatcagtggcacagatctgaacatgtacagatccctggatctgatggctgagcagctgtgagcagtactgctgacatcatgtgatgaggcagcttctggtacaggatctaagctctatgtttctatacattatcatctgtactttgcactcactttacacaagaggaaactatgcaaagttagctggatcgctcaaggtcactttaggtaagttnggcaagtccatgcttcccactcagctcctcaggtcagcaagtctacttctctgcctatttt

SEQ ID NO: 506125 - DNA, 682 bp, Homo sapiens
  misc_feature (1)..(1): n is a, c, g, or t
  misc_feature (553)..(553): n is a, c, g, or t
  misc_feature (564)..(564): n is a, c, g, or t
  misc_feature (569)..(570): n is a, c, g, or t
  misc_feature (656)..(656): n is a, c, g, or t
ntctttttgggcatcagcgccccctgggtgggccaacgaattcggccttatggccgggggctgttctgcttgttggtggcagaggcccagctgaggtagggacgtgctgtaggccggaatgttaccggctgttggatctgtggatgaggaagaggatcctgcggaggaggattgtcctgaattggttcccattgagacgacgcaaagcgaggaggaggaaaagtctggcctcggcgccaagatcccagtcacaattatcaccgggtatttaggtgctgggaagacaacacttctgaactatattttgacagagcaacatagtaaaagagtagcggtcattttaaatgaatttggggaaggaagtgcgctggagaaatccttagctgtcagccaaggtggagagctctatgaagagtggctggaacttagaaacggttgcctctgctgttcagtgaagtgaggaatgtgtttactgtgtacatggtttactagaaatgtttattgattatatttccagctttaattttcttgagtaatttaacctgaatttacncagtttgcttnattgnnttttcaaacaaatgaaaaaaaaacttatttaggaaggattttttttaaaaaaccacactaatatatccctcctccaacatcccggnccccctcccgcccacacccttatccc

SEQ ID NO: 506126 - DNA, 322 bp, Homo sapiens
ttgaggatcccgatcacgtgcattgtgcacattcaaagctgacagtgtctcagagaacgaaggaactttatcttggagcctttcaagccgccagatggtccttgtcattcagggccccacacacacacttggttcttatcgtagctgctgatttcagcccagcaggcttctttctactgaggcttccgctgtaagctttctcatacctactcctcttcattatccgaaagctaagaaaggaactggaggccaaatttttctcttcttgggccggggatatccgtccagccgggtgagaccctggctttttaccaatcggatt

SEQ ID NO: 506127 - DNA, 850 bp, Homo sapiens
gacgggatctgagcgttgagaggcctcatgatggggcacccatggtatgcattatgccccaaatgggaatgcaccctatgggtcagagagcgaatatgcctcctgatagctcatgtgaattgatgccgtcagaatgatgcctcccttatggtgaagggctcaaacaatgggatcaacattgtccatggcaatgattgtcgctcaagttagatgctctgtgaatgtatgactcgtcctctgatatagtctacaggcgttcccatgccagcctagctcagttcatcagcccagcgcagtcaacattagtcatgcgatgtcagccagctaggtacaagctatcatggtgctcaaaatcgcaatgtggacattgcaactcatcaaatcaaccttgattggccataggcacttgactattgacaacactagaagaccaaattatgtctagctcgggcagaaaccagcatgatctttaaaacgacctagcttgcagccacactcttacatctaaaatattgcccctggctacagggaatcaccaacatcaagattgcttggtaaaagccttactaattattaatttctcaagatcaacaagaacactcggctgggtccaaaacctacagaacttgaggactctttgaaggattaccagaattaccagttgttgctggaagtccttacttcagcaacaacttcaaagccctggctatgcagatgacttcaaaagtctgtacgaacactgcagtaacgcaagaaaagaagtgcaccaaaacagtcaacgaggtcccagatcccttaaaaacagaacattcccgagcaacaatgaagcacatggctggtgccggaagca

SEQ ID NO: 506128 - DNA, 350 bp, Homo sapiens
cgactgctcttgtgagttgaaagcaaccattggcagcttgcaggtgtgtgtgtgtttgtatgtttgtgtgtgtgtgtgtgtgactatgtttccacagtcctctcctgtaagtcattcccctgcttattctcctttgccacactagtcgacacatgttaccattccagcagttgagtgctgcacaatctagagtctgcatcacattaaggcagggtcactgaagtggccctcacaatcatctcagagatttgcagcaacaggaagtgtaattgacctaggttcccagctgctgttctgaaatccaaaacccatttcttcaggctgcctcaaaccagagactatgtcgacgc

SEQ ID NO: 506129 - DNA, 1753 bp, Homo sapiens
  misc_feature (256)..(256): n is a, c, g, or t
  misc_feature (290)..(290): n is a, c, g, or t
  misc_feature (306)..(306): n is a, c, g, or t
  misc_feature (318)..(318): n is a, c, g, or t
ggggagtggcgtgctgggcgtgcgcggtgcggtacggcgtgttggtcccagcggttcagctgaggtagggacgtgctgtaggccggaatgttaccggctgttggatctgtggatgaggaagaggatcctgcggaggaggattgtcctgaattggttcccattgagacgacgcaaagcgaggaggaggaaaagtctggcctcggcgccaagatcccagtcacaattatcaccgggtatttagttattcagaggctgntctgctgagaaagatgaacaaatttcttggtccnaaaacaatgtatttcnaaacgtgcccgntcgggcctttcccgtattgctcacttggtgctgggaagacaacacttctgaactatattttgacagagcaacatagttccttagctgtcagccaaggtggagagctctatgaagagtggctggaacttagaaacggttgcctctgctgttcagtgaaggacaatggccttagagctattgagaatttgatgcaaaagaaggggaaatttgattacatactgttagagaccactggattagcagaccctggtgcagtggcttctatgttttgggttgatgctgaattagggagtgatatttaccttgatggtatcataactattgtggattcaaaatatggattaaaacatttaacagaagagaaacctgatggccttatcaatgaagctactaggcaagttgctttggcagatgccattctcattaataaaacagacctggttccagaagaagatgtaaagaaattaagaacgacaattagatccataaatggactaggacaaatcttagaaacacaaagatcaagagttgatctctctaatgtattagatcttcatgcctttgatagtctctctggaataagtttgcagaaaaaacttcagcatgtgccaggaacacaacctcaccttgatcagagtattgttacaatcacatttgaagtaccaggaaatgcaaaggaagaacatcttaatatgtttattcagaatctcctgtgggaaaagaatgtgagaaacaaggacaatcactgcatggaggtcataaggctgaagggattggtgtcaatcaaagacaaatcacaacaagtgattgtccagggtgtccatgagctctatgatctggaggagactccagtgagctggaaggatgacactgagagaacaaatcgattggtcctccttggcagaaatttagataaggatatccttaaacagctgtttatagctactgtgacagaaacagaaaagcagtggacaacacgtttccaagaagatcaagtttgtacataacactagaggcatttcttatcaaaaggattggataataaaaataagtttctactgggtatatttcaagcatttatttattactttagttacgaattccaatatactttaaaatggtatttgttttacagcatacataaaatgtagcaaatcagtactgtaaaacatttaacattcatacagttatatataatatccttttttttaaagaatggtatttcacaaaaatatcttttgaaattggctttggagtttacatatactgaacatgaaagtttataataatgatgatacaactttcaacattgtcattttttcttagaacttcagctgattgcagagatataatgattacattgttattaaatttttttaacacaagtaagtgtcaccattttatgacatgaaataaaaggttatgactgttatcg

SEQ ID NO: 506130 - DNA, 441 bp, Homo sapiens
aatagcagtggtgagagagcgcatacctggtcttgtgcccattttcatagggaatgcttccagttatagcccattcagtgtgatactggctgtcgtgttcgtcatctgcttgctcctgtgataaagagatacgtcccatcgatacctaatatattgagagtccgagcgtgaagtgttgtcgtatgtcgtcctagctcctgtctgaatctaatgagataatcatgtggttttggtctttggttctgtttatacgctggattacatttactgattagcgtatattgaaccacccttgcatcccagggatgaagcccacttgatcatggtgggtaagcttttcgatgtgctgctggattcggtttggcagtattttattgaggatttttgcatcaatgttcatcaaggatattggtctaaaattctctttaaaggtagtgtctc

SEQ ID NO: 506131 - DNA, 210 bp, Homo sapiens
ctttttttaaaagttaaaaggtttgggtaaagaaatttttaaggtaaagatgatgattttgaaaaattttatatattcctaaaaggcaggggctttttcttatcccaaatatttaaacttccagatggaaattgcccaatgggcaaattgttaaggccccccctttacccagcctttcaaaaagcaataaaattgcccctgtttttccca

SEQ ID NO: 506132 - DNA, 114 bp, Homo sapiens
ctgggatagctgtttctgcggaaggccaaaatcaagagtgagatcgtagaaagttgtataatagaagacgtggagttgctgaatcgacttgttcttgtcctcacatttggatta

SEQ ID NO: 506133 - DNA, 773 bp, Homo sapiens
cctgctcccggggcgagcgcgcagccccgagcccgccccgcgcctcccggtacgctcccccccgtctgctcccatgcgcgcgggtgggtcatgagcacagcgccctcgctttctgccctaagaagctgtaaggcacagctggcgtgcggtggcggcggctggctgagatggcggctggtgctagacccatgtcctggaccagcgctgctctctggaattagctccgggccccggcccagggctcgtccccggccgagaagcaccaagccgttttgtgcacgccgtgccccccctctctgacgcaccgcgtgcgccaggccaacctgggctgaccaaatcaatggtgctgaatgatgcttgactggcacagaactgggcgcactagttttgcaccaccggaagtaaccatgcaagccccgttgcacttccaacgcggggtcagggccaccaatcggaggctcggatgccaaggaaagagtcccgttgtggcgcttgattgccgtcaaatgatgttccgtcagatcggggaaggcccgtatcgccctcgcccttccttccaagaactctccgtcggttggcactccaaccgtgggtgcggacagacggaaagggttgcccggacgagaggatgctagcgtgcggaacaagagacaccaaattcgggccccctgaagactaacgaagatcgggtgaaaagaaaggtcagtacaaaccgtaactccaaccggtcgataaaagaaccgagaagagaagagaacaaacccggaagagac

SEQ ID NO: 506134 - DNA, 496 bp, Homo sapiens
taattgtacgggtgcacaaagcataccatataggatggcacacttaatcaattaatgttgaatagtagtactgactaatccaacaaccagccgtttccctgtctctctccctctcctagggcttccctattccaagacacagtaatactgcaatgaggccaattaataaacctacagtgcacaataagtgtacaagtaaaaggaaaagatgcatgtctctcactttaaatcataagctagaaatgattaagcttagtgaagaaggcacaggaaaagccaagataggtcgaaagctaagtctctcatactgagcagccaaggtacgaatgcaaaggaaaagttcttgacggatattaacaatgccattccagggaaccacaaatgaacagaaaggtacacacccttattgctgatatccaagttatggtggtctgggtagatcaaactagccacaacatacccatgggtgaaagcccaatccagagcaagggcccta

SEQ ID NO: 506135 - DNA, 434 bp, Homo sapiens
cgtaggacgcatgaaggtccctcgtggtgagggtacatgcctcccccatttccccagtagagagggaaaatcctaagaccggggaactccaaaaatgagtgtttggagcgcttcagttcacctttaaaggccagggcgggccccccgtgggtgggggcctcgttccagtggcggcacgtccttgggggtttttaatgtttccagcccaagggggggcccttttttaaaaataaaaagggggggtatttttatttttttttggaaagggatttttggtcttctgttgaccttcgggggggtcctgttttgccctgtggccaatgtgagatcggggggttttcctgatgttttcccggggcttgggggttggacccggggcccgcccccgtaatgccttgcctggaccaatgtaataaaaagccccttttttttta

SEQ ID NO: 506136 - DNA, 435 bp, Homo sapiens
gcgcgtgcacgctgatgctgctggtcgtctctagagttccccggtaccctatcgaccgcattgcttaccacagtgtcattgtcattcattatcattttcagcacagaataacctacagaaatgtcttctgtgtactttcccctgcttattttgtgattctgttgcgtctggtgactgcacatctcttttccatggcctctcttgaatcaattttatctccaatctgccttatcatgggtactctaacaagaaagcaaaccaggaaagttcagctggtctagcatcttctgagacagcgaattatctcactgttgatgtggaccaagagcctcttgcagaatgactatactctactctgagaatctgggtcccagctttttttttttaaatccaaagagacgtatatacttaaaaaaccggagtcccagcctagct

SEQ ID NO: 506137 - DNA, 94 bp, Homo sapiens
tcctttgaacattacaatggctatatctagctgggattagaggcgtgagccactgtgctctgggatcagcactgatttgcgtgcctaaactcac

SEQ ID NO: 506138 - DNA, 772 bp, Homo sapiens
ggatctcagactgctgtgctagcaatcagcgagactccctgtgagtaggaccctccgagccaggtgcggcttataatctcgtggtgcgccgtattttaagccggtcggaaaagcgcagtattcgagtgggagtgacccgattttccaggttgatttttcgagtagtgaaccagctttgcattcctgggcaatgcttacacacaggacatagttcacggacaggcattagaaggcatacgagtcacaaacgtgaataacgaactggtcttcttacactaatgcagggactggaagaagatacttggcaaacaatcacgggacagacgtgcacgaccgactacttcaaaaaatcggggacagcttttcatcataaggtccacgcaaagattcctgagcctgagtctactgacaaatataccaaatccccagagtaagttggagtctcttaaaacttgtcttgctggcatctacgcggagattgtccccacaagcatgttccttcatgacggatgcctgggtcagaccacctaattacattccttttaataagcacaaagattctgaagaagcactgaccctcccacgtgtcacactctggggagagatcattggaatgctcttgagatcaggctctctccaggagaatcatttccactaagtctagatgtccgctggtgatagcctatagcgctgctccaggctaatgtaaccagatttcccaggattgtgcattaccaggctacaaatcactcaacaatctggacacggtccc

SEQ ID NO: 506139 - DNA, 315 bp, Homo sapiens
  misc_feature (162)..(163): n is a, c, g, or t
tttttttttttgggggaattttttcccccccccttttccccccccgggggtttttaaaaaggggttccggaaaaaccccccctttgggggtggggggtttttttgggggttcccccaacccctcccgggatttttccaaatttttgggggggcccctggttnncgggcaaaggggggggggcccaaaatcccccggttttttgggggattccccaattattaaaactttggggtttcccccccttttttttttttggggggccccccgggggggccccccccaaaaagggggttttgggggggggtttcctggga

SEQ ID NO: 506140 - DNA, 866 bp, Homo sapiens
cgtacatagtcaagtactcttggccgggcatggtggctcatgcctgtaatcccagcacttgcggggaggccaaggcagtgcggatcacatgaggccaggaattcgagaccaacctggtcagcatgtgctaaaacccgtctctactaaaagtacaaaaattagccaggcgtgatggcacgtgtctgtaatcccagctactctggagactgacgtgggagaatcgcttgagactgggaggcagaggttgcagtgaaccgagatcatgccaccgcacttcagtctgggtgacagagaaggactccgtctcaaaaaaaaaagaaaaaagaatagtcatttttaaactacctatctcatgccatgacagcattttcttccacaaagagcttactcctcatgataggattgcctagtgtctcccatatagcaggttactgggcttgatagtcttaatgcactaatactgccaattgacaatcagctgtgctgtgatgcttcgcaaataggtctgctcctcacagcctttgggactctgactggcccgacgaccagagagcaagttaacaaccctccactggggccaacctctgctgaacacgtaggcccttaagtactaggacacatatactgtgccggtactagcctggcgtacgaacagtacactcgcccgaaacctcagctcaggtaaatcttacacgctactaacaacttcgggccagggcctatatatagaggtaatatccacattcaccatactacaaacccgtctaaactctggtacactctatcgccatcaaagcgaaatcggaaattctataacccgttaccccacagatttcatctcgcactatccctatcctaacctcctg

SEQ ID NO: 506141 - DNA, 131 bp, Homo sapiens
gctgtacagtctgtagggtcctgtctctctttatgtggtttctttttttcccatttacattaccagagtcttcttcagcctggacaggggccaccaggcaaacttggtgttgtaaatgggaaaaaaagaaa

SEQ ID NO: 506142 - DNA, 920 bp, Homo sapiens
  misc_feature (920)..(920): n is a, c, g, or t
atgacccaccatattcacttgccttatcatatagtaaaacccatcccatgacctactaactagggagctccttcttcgagtcactcctaatgatcctccgcgtcactaatcgcactgatgaattgtcacatatcacatcatccataatcgcatccatcatacatatcgtcatactaactcaaaaaactaatcactataccgaatgattggtcgtcgatgttaaggacgtagaaaagtcctctattgaccgaaggtgccacacaacacacgcagcgtgtctcagaaaaaggctcattcgtatactgggcataaatccttattgtgatttacgctactagacaatattcatatatcttacgaccgtgacatcttatactggtaaaccctattttaatcaacttccagaccatagtacctcttaactaccccacagtgtatcggtaaaaggtctatcatgagacacaccaacaatggtttatttgcaacctccaggcattaaaaattcaaccataaaaagcttaccaatttctctttatacattacaattcgcggtctaatcaacattcggtctattaaaggcgaagatattccaacttcacacacttgcagatttctaggaccattgtattgtcccctcaaaatacgcatagatatcaatatccgggaaacaccccaataattaaatttccaccacgcctccttgatgttagtttaaccacattactctttagatgtgtcgcgttatccctttagtttatgaacacccgtctcgtgacaaaaggcccattcaagcacaggtactattccgaaggttgtaccccctttcaaatcaatttgtagccagagacagcggtattatacaccgggctcataacagtatatattgttccggtatagccaaaaaatgtgcttttccaatn

SEQ ID NO: 506143 - DNA, 212 bp, Homo sapiens
ttggccccttaccccttaaaaaggttttttattttttaatgttttgaaaaatcaagcttgggggagaaagcagggcaagagggttattaaaagcaggttgggtttttttgcccctttcaccccccccaggaaaaaaaagttcggggttaacagtgacaggggtatcacatcatttgaaaaaattttttccttttaaaattaaaaaaaaaaaa

SEQ ID NO: 506144 - DNA, 402 bp, Homo sapiens
cccctgttgtaagtggcacatgtcacagtgtccatagacactgattttgggcacggagatgcgtctctgtgtagtggtaccggcctttctcatacaggacgtagagctggtgggcctgctcctctccatccatgctgccctccagggttgccaggaatgaatagccactgggggctggtcatagctggactgtctcttcccgccatgaggtaccattgctgaagctccatcgcagggtcaggttcactcggaactctggattgtgctgggtcggagaataacactatgccggagctggtgactacagctccctgcagctaccacagggtccacgacgctcagggtcggaacgtgtcacatcactgggcgccttgctacgtgggtacctcagcgtcgcatttc

SEQ ID NO: 506145 - DNA, 337 bp, Homo sapiens
  misc_feature (312)..(312): n is a, c, g, or t
  misc_feature (315)..(316): n is a, c, g, or t
  misc_feature (319)..(319): n is a, c, g, or t
  misc_feature (321)..(321): n is a, c, g, or t
gctatagagaccctctctgggtgaacatttttgaacatctcagaaagggctgggaaaggttgacttagtcccttctgccttccgctgcccccgcaatgctctttcattttatgaagaaggaaacagcaaggactctgacttctctgttatctcagaaaagagctgaaattatccctcaacctcaacctcaggttgcagacacggcaggtcagagaggagtttttctgcagagggtggtcagggaggagaggggttagcttagaggacagggccagacctactcataaggtatttctaatgtagcgaaacacntcnnccngncgcgaatttagtagta

SEQ ID NO: 506146 - DNA, 139 bp, Homo sapiens
atctagaggatcccttaaatgggcacagaaatgaaaaataatagcttccagttcagatatagaacagcaattacagaaaaattggaagagggtcaatgaaccagtgggatggcacccagcatggcgttgagctaaagac

SEQ ID NO: 506147 - DNA, 482 bp, Homo sapiens
ggaacaaagaatatataaaacaaccagaaaataatcaataaaataacaggagtatgccctcacctattcataataaccttgcatgtaaacagattaaattccatatttaaaagatataaactggctaaatggattaaaaaaaaaaaaacaagacctaactatatgcggcctataagaaactcacctcacctataaagacacaaatagggctaaaaggtgaagagatgggaaaaagggtattccatggcaaattaggaaaccaaaaggtggagcagggaatagctatatggtatttttggagcaaaacaaattttagggtcaaaagctggtaagaacaggacaaagaagaactttatttaataataaggggataaattagggaagaaaatataacaatggtaagtatttttgcacccaacatgggaacactcagatttataaagccaatattattagatctaaagagagagataaagggaaat

SEQ ID NO: 506148 - DNA, 223 bp, Homo sapiens
ctttgcgaggcagtctcgctctgtcatccaggcctgagtgccgtggcgccatcttggctcattgcacctccgcctcctgggttcaaaagattcttctgcctcaagctcctcagtagctgggactatttgcgcgttgcaccatggccaggtaatttttttggcattttaagtacagacagggtttccattattgttagcccaaagatgggtctccatcttccct

SEQ ID NO: 506149 - DNA, 1727 bp, Homo sapiens
ctcgccaaactgcaggcacaagtgcagcattggtgaggaaaggaactgctcgcacaaagaagacggtggttcatagaacagcccacagcagcatgcacacaaaaacattcagcttctccattaacagcacagctctcagctgctggtcacaacaatcatcatctaggtcattgcacagcaggctgacatcatgttataccaacacccaaggcacaccagttgatccacctatataagcaacaccctaccacgctacacaggccaatcatcatgcgccagaccgacacacatctaacagcacagtataacacgagtcacaccttggctatgaagaccacaaagcacggcgtgaccacgaacacctgacagtcaaccacaatggcgagtacatatgtaccacacacaccaaggaccttctgagcgtggcagcgaagctcagactcacctagacagcaataaagaatatagaacagagtatactgtcacattgaagagcaacagacacaagcacaactcatgacaccacaacaagacccacaactaccactgatgacgcacatgtagacaacaccacaggcagaagcccaaccatctgaccataaacactggagacacgcaagcaggcacactggcactatgacacatgcaaacttcagagcacacaggacacatccccaacacgacactccgactgatgacacatgagcacggacacaacaaatacacatgcacatcagcgacatgacggaccaacattcacaccacaacacaatagcaataaaaaatgtttgacacagactgtgaacccatcacacaaaccactattgaacacgcaattatacgcaaaccaccactacccacaaacacaactatatacacaataaaaacacccaacagcatacaaccagcacacaccacactagcaacacactgtagaacaaaaaagattatcacaacacatatgtaccaagctaacaacacatcatggaaacaatacacaaatgaacattactaactattcaactatcaacagccttggcacacccacaagtagtgaccaatatcatatacacaggacatcaaaactgacatacacacttaccacgatctagatcataatgaattgggatacacttagcaataaactatgggaggagaagacttaaccgagtatcgagcgaagttcagcaaaacaacagaagttctcgaattcagaggaaaaacagttgcaaacttaacaattcaacaagacctgcatacagaattcaaaccataaagacaagacaggagacgaacagcgacatcgacaagcactaccacacacacaattatgagaagagactacgccgaacacagatgaagaatacacagccacactcaagcatattaatgaataagccaaagaaagcaaacaaaacacgacagataggcacacatagtaaagataacacagatacgaaaaatgctagtacaaaaaagatataacatagtatagatgacgaacaagagagaacgcatcgaagactacgtagcaaaatacagagaaccacataacaaactgcaaacaagacaacaactagatgaggaagagcaacactcttacaaacactaagtcagtaaataaagtggaaaataacacacaaagaaacacaagagacgactacatagactacacgtcacaacagacagagatgacacacaacagaacatacgggacaccacataaa

SEQ ID NO: 506150 - DNA, 322 bp, Homo sapiens
ctaattggttcttcgatgacgtggctccagaacaaggcaaaaaaaaaaaaaaaaaaaaaaaaaaaaaaaaaaacccccccccctttaaaagcctttttttgggggggctcttccctttggggggggaaacccttgccaaaaactgggggggagctcgggggtccaaaggggtcctattacctcccccaaggggggactcaagtttttcccccttttttgagggggcccccccctcgaccccccaaaggggggggtcttataaaaaaaacatgtgggggtgctttttaaaaaccccccgggggcatacaacgttgggactggg

SEQ ID NO: 506151 - DNA, 323 bp, Homo sapiens
gtggattgaccactgggagtctcgttcactcagtgctcaatggtgcccaggctggagtgcagtggcatgatctcggctcgctacaacctccacctcccagccgcctgccttggcctcccaaagtgccgagactgcaacctctgcccggccgccaccccgtctgggaagtgaggagcgtctctgcctggccgcccatcatctgggatgtgaggagcccctctgcctggctgcccagtctgtaaagtgaggagcgtctccgcccatccgccatcccacttaggaagtgaggagcacctcttcccgggcgccatcacttctaggga

SEQ ID NO: 506152 - DNA, 148 bp, Homo sapiens
gacgagactataaggattaggagtctctctaccttacggtcttctccatactttagtcagtgaacatgctcggcagtccatttttagaaatacttggaactggatgtgatgcaaattgacgacagggcctgcaacatcacatttttct

SEQ ID NO: 506153 - DNA, 459 bp, Homo sapiens
  misc_feature (6)..(6): n is a, c, g, or t
  misc_feature (12)..(12): n is a, c, g, or t
  misc_feature (42)..(42): n is a, c, g, or t
  misc_feature (52)..(52): n is a, c, g, or t
  misc_feature (55)..(55): n is a, c, g, or t
  misc_feature (73)..(73): n is a, c, g, or t
  misc_feature (95)..(95): n is a, c, g, or t
aggggncggganttcttcacccccggccagctgccggcttgnatttgaaaanggntatgtggcccctctgganctgacttccaacccaaaatggncatgggtctttgaaaaatgtactttagcacacccctgtggaacgtgtttacttaaggattttaccccttgctttagaagtgagaatgtgactacagatggactgcccctcactgaaggcatttgctgcgaatgtgtcttctgctaatatgtttaaggatctataatgaaaacagagtcattctgaaataaaaggacattgacataaaaagcagtaatggttgacgctatctgtttttgaagataagggttttgtcacaaaggcacgatttatggtgggaatactgaatagcgggagtgtggcaggtgataaatcactgttctcaccactggatatggagaaaaaagggatacaaagacctttta

SEQ ID NO: 506154 - DNA, 193 bp, Homo sapiens
ggcagctgggtgctcgcaggacgctggcaccccgggcctggtccagaggccgctgcccaccagcataggcagaagctgctctggagtcccagtggagaatctcagcagcgtagccctgcgcttgaggcattggctttccccgccaacccccggcacacagagaagctgcttccatgccctcttgaggccaggc

SEQ ID NO: 506155 - DNA, 314 bp, Homo sapiens
ccgtatattcggtgagcctagggtgtcgtgagtgtaaactagatgcgatagagtaagggaagggagcctactagagtgtacaatagagaagtatgtgcctgcgttcaggcgttctggctggttgcctcatcgggtgatgatagccaaggtgaggataagtgtggtttcgaagaatatatcacacaatatgattcagttctgtggctgtgaatgttataattaaggagatttgtagggagattagtcatagagaggtagcagtttttttcgtgatagtggttcactgaataagtggcgttggctcacgaatatac

SEQ ID NO: 506156 - DNA, 441 bp, Homo sapiens
agtctaaaggatccctcagcgcttatacttcccagttcatacttaatattatacttgaattcaatacggaagtataaagcgttgaggaagtataaagcgttgagaaagtataaagcgttgagctcaacgctttatacttcactgcagcctttttttccttcttttttttttttttttggcataggccaaattttggcttaaaataccaccatttggtccacactagaaatttcttggacccaacttacattttttcaaatgtaagtttcaaaaatagggtttaaattggctcaaacggtgggtctagggatccgtgaataagtgcaagtatttaactttataaaggggggactggtcttgggggctgggtttggcacactttttttttttaaatatcctcaaacaggtgacttcacaaattttccttaaaatgggggtgag

SEQ ID NO: 506157 - DNA, 908 bp, Homo sapiens
gatttctgttcggggccactctcatccgtggacacggatgatgtacgtccgcgatgattgcaaggtgtgcagatttgcgcaaatcctaaatgtcataaaaactttaaaaagaagcgctaagtcctcgcatagagttatggtgggacctataagcatttcgggaagagcatgctgtgtagagagcttcaaagtggatatattcatttgaagtttgataataaggtaggaaatgaacctgatggcaaataccatgacgagagatatggatctagaagtaatgatgcggatgaagagatgttgaatgaaaattcaaaatagaaagctgccaagtgtaaatgttaataatggaccgagattgaaagaagaagtaagagagctagagaaagttcaggataatcataagaaggtcgagagcaaaaaatgcatcgtataatctgagtccttctctttgcacggcaaatagtggaagctagtgtggaaagagaaaatggtacagcacgttacaagaggatgtggagttgggaaagatgctccgtaaaaaatctctgtaacctattactcttagtgtaccagttttgaaaatgctcttggaatagtggggaaactggtaaattattatgaattttttaacattgaggtcatttaccttgacatcggttgaaatgactctttcttggttgcatttacgtatatgagatataacgggatgaggctggcatctcagtgtactttcagggtggggttacgtaaacttggaatttacttgactatggaggactggggagaaaggggggcatggagggctggggttgttgatcttggcaaccggggtggtcaaaaatttgggaaaccttgagagaagggacacaacaactttgggagtttaaacgggggtaaacaatggagtg

SEQ ID NO: 506158 - DNA, 421 bp, Homo sapiens
aactgccataatagcctatatctgtgcaccagaccctccattcctgcttcctgagacccgggaatggcgaattaccctgtggactccttgtgccctccctgttcaggatatcagcacagagggacgaaggcaactgcctaccctgcttgagagatgcacaggcctggtgcgaagttagcagaattatgagattggatcagcctggatcactgaatcactgcatgtacgacacactatgcagagtttattgtgccaagatcagacatggtatatgcaagaatgaatgtttgcgagaatcataacaaactataatcgggcacataccactgacatcatagaccataaagcaatacccactcggtgacttgggcaacgatcgaggctatacttacctacagacttttagactgtccccctgtgg

SEQ ID NO: 506159 - DNA, 143 bp, Homo sapiens
tacatcttcagtataaaccttcacttgttgaactacgaaggaaagcacgtaccacaaagggacctggagaacggggatgagaatcaactttgatttttataccgcaataccacctcatgagcaaataaagcaggtcctcactt

SEQ ID NO: 506160 - DNA, 986 bp, Homo sapiens
  misc_feature (61)..(61): n is a, c, g, or t
  misc_feature (95)..(95): n is a, c, g, or t
  misc_feature (182)..(182): n is a, c, g, or t
  misc_feature (613)..(613): n is a, c, g, or t
  misc_feature (635)..(636): n is a, c, g, or t
cagctgaaaaatgagactgctagaagggctggatggttgatgcttaaagagcaccctcttntgagggtagagggagatagatggagatgtaggcnatttagagggtcagcaaatgatttttaggggaaatgaaagagcccaaggaacaaacagttggcctgagacaaagttcctctgaggtnatagggacgaggtgacaaactgccggaaggtgaagggcagaactgcactgcgtctcatgatgcagagaaagccccagagaatctcttagaactgccctccaagagaatcaatgaaaagtgtgtctgggcagggtaattttgaatgacatcattcaaagtgcatgttcccacttgcaactggagagagatcagtatgtcaaaagtctgtacttggtaagaatttggctgctaagttgtgccataatttgtcttttgagccttttttcctttgggtaagttgagctctacattttgtcttgccattcatgacagtaaaaatgtggttgtctgggggctgaacctccttctgaacaatgatccaagataaaagtactaataccacaatgcttttttatattcaagggaagaggaagtatgtttcagttttaccncctagataattacacgtcattnngcactgcctttcaagatatgtagaaaacagaaaatatatgagttatgaagatatctaggcacatttaacattctctatgccacttagtcctgaacagagagattttcggtataatggaggaagcttttttttggtctttttctcaccccccaaggaggagtctccctctgttgcccaggctggggtataatggtggtgatctcgggtcgtggaagctcaacctcctgggttcaggtgattccctgctcggctctcaaggtggcgggattggggtgccacacagcccagtaattgggttttacggccggggttccagttggcgggtttcaacggctgggtcccgcggggca

SEQ ID NO: 506161 - DNA, 298 bp, Homo sapiens
caatccacacttaggaaaggacttcggattggagttcagggccttaggttccaattcccagttttccggacagttcccagtgtattcttggccaggtcattgaccctttttggttcttgtttccctaccttttaggggattgttattcttaggcccttttccattgttttaagaatcaggttattgcttttgaaatttttcattttcctttaaagtttgattaatatattttctttttcttggattccctttttccctttgagccttgtaaattaacccttgttttgattggttgtta

SEQ ID NO: 506162 - DNA, 296 bp, Homo sapiens
gcatgtacagatccaacatcagaggtcgaaaaccctatagtcgatatggactacaagaaataggatcgcagcgtactccctagggtcacttgatccgttggacacgttattggcatcaattgagtatcagtcaacgctttgcactggtgaagtcttcacatgtactgctcggaggttgggttctgctccgaggtcgccccaaccgaaatttttaatgcaggtttggtagtttaggcacctgtgggttcgttaggtcctgttggcattaataaattaaagctccatagggtctcctc

SEQ ID NO: 506163 - DNA, 284 bp, Homo sapiens
cacgagggcggtcttcactgcggtcatgaaagacctgaactctgagctgtgcgcgcggctccagctccagaaatcccattatttgtttctgggccccacccgaggccactactatggcgggtccctgcccaacgtgaagcatatcgtgagtggcaccatggtgctgcccttccagacccccttctaatcctcgggtctggagaccaacctgcccacccgggaccatgggctggtggacatggtgtatctggagcgtggtcggatcgacttcacaaaccgacggg

SEQ ID NO: 506164 - DNA, 1290 bp, Homo sapiens
cgtctttgttactcttgctttatgctggcgcgtactgcgccttgctggcagcgttgcgtaattgttcgtttctcccggggttgatctcgcggtttgttccccgtgcctctcggtctcgtttcccgcccctgtgtgtcggtgtatgtctccttgtcggactcttttggaagagatatttcgcgcccgtatccatttttggggctttcacaaggttctcgtgccccatttgggcctttttgggatgggtaacccccccaaagtgctctcccgaaaccggtgcccacgtaagccattaggcacacttcctggggagccacgaactgtggtttgaagacccctgtgagaaatactgggagttaaacgttctttggatgggcgacctttaccacaaagggatcccgcgtcgttacacggtcccacgaaagatggttaacccgcggagaggttagttatacttgacctgattaaacacgtgtgttccccggtggcaccgggaaaccctgtatgggatttcacgccttttatctaatatggtaaaaattttgtttggtcaccctcccccccgagggttgatgacaccacgcccaatcccacaccctgggggggaatcaagagcctttttaaaattgaatgggagaactattatgtttgataaaaagtatacctggcgacgatagaattccccgtccacctcacgtgtaaaaccccctgggttaacctcgagaaatcactgaaataaattaaataaggttttctgaatttatcccaaatgggcccacctcggagacacttcacttcctggcacacctgccccttacccgaggcgcgctccccttgaatgtggcacaggagcctgtgaataaggagtctccacggggaaacccacgagagggcacaggataaataaaaggtttggaaaagaatcttttaaatctctgacacgctgaaagtgggctggttaaactccgcgccaagtgggtgaacttccactcacggtaattatattcgaaggtggagggagcaatatttttatccctattgagccacgccttctgaagaagcttttgagacacatgaattaatcgagttcacatttattgggaaaaggagtgggagtcccttatatgttggagttaactatcccttccccacaagaggaacacatcacagagggttttcacttgcctggaaaagaaaaatcgtataaacacgaaaaatgtcacatagggataaaaaaattatcttttcatatctgccagatttttttcatccataaaaattatcccttga

SEQ ID NO: 506165 - DNA, 183 bp, Homo sapiens
cccaaaaaaaaaaaaaaaaaaggggggaaaggattttttcctttgttgggcctttcccttcagaactccaaaggggtcatgccctttttccaaaaaagttcccctgttaaggtttgtttttgtccccccccttaataaagggtctcgttggccttttttttcctgaaatttttttgtccccca

SEQ ID NO: 506166 - DNA, 430 bp, Homo sapiens
ggatccctgtgtatcgatgcgctggtggatgctgattgcgttgtacagaacaacctccgccttgagggcacattcttgagcgtcgaccagcaggtcaacggagcctggacgcgcgtcgctccgactcgcaccgtccacgctctaccagtggaaccgcacgaacaccgtatgtcgaactcctcccacattacacccagcaatgcacttatttaccatcgttcctcttcgcagattctgggatacagcgtggtcaacatctcgtggaccattgagcccaacactcccggtgagcatcctttccgttaccttacactgcaacgaatatatattgacgatttctcttgcagccggctcataccgcctcgcttacttcggggacgcgaaggctcccttcacgggcacgatcagccccttcgagggcacctcatcg

SEQ ID NO: 506167 - DNA, 186 bp, Homo sapiens
gggctcacagcttcccaaactgagtgtattttaaagagacagtgaaggtggggcatggtggctcatgcctgtaatcccaagactttgggaggcagaggagggcggatcacctgaggtcaggagttcaagaccagcctgaccaacatggagaaaccccgtctctactaaaaatacaaaaaaattagc

SEQ ID NO: 506168 - DNA, 821 bp, Homo sapiens
catagtcaccattcagctcacctgcattatggaaaccagcaaggtgagtgctttggtgaggaaggtgaaggtgattatctgtatgactggacaggtgctcagttatggaccatatctgggtaagagatgagtgaggtgcggttcaaacactcttccactgagatactgctgtctgtcacaggagaacaatatggtcgacctatcagtgggcaaaaagaggtgcatggcatggcccagacaagtcagaacaactactggaaagccatggaaggcatcttcatgaagcccagtgagttgttgaaggcagaagcccaccatgcagagctgtgaatctagaggctctgagccactgttaacgcacaatgttcacagacatctgttgctgcctcaccttgggatccctgccacaagttccttgggcagtggccagtgtcaccattgcgtatgaagataatacaacaggaaataagtgggctgtgttgtgaaagccttcaagccctgacacatattgaactaggtcactgctcccagagcttgcggtgggtacaggttcttatcttgaagtacgagagacttgcatggtaaaggggcaggatgcttatttattaagtacatgataaaacagaatctgagaggaaacaatcacctcttaagcgtgggagaacttgttacttcttcagagagtcttgcgcatcaatggacgtgttaaatgtatagtgatctttccgccactatttttcttcttcttccaagaaatgaatataaacacacataaattcttaacaaagaaagaaaaaagaaaagtgtcggcgcgggccgcg

SEQ ID NO: 506169 - DNA, 284 bp, Homo sapiens
aatcagagcgaggccgggtctcacaccctgcagtggactgcagtggctgcgagcctggggcccgaccaggcgcttcctacccgcgggtatgaacatgttcgcctactacggcgaggattatctacaccctgaactgaggacctgctgctcctggtaccgcggttggacacgtgcggactcagattctccgacgcaagaagtcaacaatgaatgcctcctgacggcggaggcacctagagaggcctaccgtggaagacacattgacgtggagttggcttccacaa

SEQ ID NO: 506170 - DNA, 996 bp, Homo sapiens
attcttcccctggtcccccccgtcgtctaatctagcagtgtttgcgtgcacactcctcatagtgctgagatcaaacttgaatttccagctgggatgagtgcctgagatgagataaggtagtgactaggggttatatctccagattcttaaccaacccaagaatggggcctcgctcaccagaggaacggtgcccacttgaagcttatttccgtacgggctaggcaaggcgatttcccgtaatctctgctctactgatattagcctagtacctgcgttcatgctaactatgaagtgcatcgcggatcaagtgagactcaatattcccaaaggtatctaccaagtcaaataatcgtcatggattctctcataatgggcttataagacacaatatgagtgagtggaaatagcacaccgcgtgttcactccgtgacgtcccagaaggttgtacccaaggcatcaccacttcttgatcactcacggactgactttgttcttcacatgagatagagctaggccccatctcaactccctatcccaacagtcgtcctccctcagtaaacgataaggtcatccctcccgtcaatcatctctgatctttttccaatcagtagcggcgcagttgacggtggagttaggaccaaacccgcagctagcgcggaatatctgtagtcaatacatcctgagattagccacttatggatgacatattgggatgccctacgtagaaccctacaataaaccagttcttagtctaactattcatattatccttaactactagcgaattctaatactctatttaaattcctgatcaggacactaatagtgttcgcacccgaacaggtagtgaattcccctttgttcatcgacctcgtttcctaggggcgggccggtaccaggttgtgcgcacgggccacgaaaactaacaacggtttccacatttggcgcaccgttacttcaggggcattccccaaaccgtagagaaaaaatggcccc

SEQ ID NO: 506171 - DNA, 653 bp, Homo sapiens
cgagtatatgtcagattgatagttatttatacttaagtatattgcatggctgaaatcatctggatcaggtattctctgtgtatgattcagtttcttacattatgcatattatctttttcttgtgtgtgtcagtttaggttcgttgtatgtaccaatcatctgtcagttttatttagattttcaaatttattagcacaaaattgtgtaaaacaccttatcttttaatatctataatacatgtatagtgatttcttcttcagttttgatattatttatgccttccctctttcttctttcatctcaccaagagtttatcaattttgtaggtctttttactgccctaaaagtcttctgtactctgcctgtgtttaactctggctacccctgcttagttgttactggttatcttttctacttttaaatgttggagtgcccagggctcttctagtcttaagatttctgatgccatttaaatgccatttttgtatgctgatgacattcaaactttgtattttttgcctgtacctcttccctgatctctacttccctaacccctcaatctactccctgatggctcaacttaagaatatatccacaatctgcttacttctttaccacctccactcttataatctggtttgacgcaccattat

SEQ ID NO: 506172 - DNA, 244 bp, Homo sapiens
ggaatcacaatgcttatgtccatgtgcatagtaccttctattatacctctcagcattacttaagtctgcatatcactacacagaaacttaaaggctaaactcgctgggtgccccagcttcctttcaaatcaggcacacaaatgtgtggaggatgctactacggtcaaaaaggaaagaaagacaaaatataagggaaaagtttgcatacgaaagattatctacccttttctttttttacctactt

SEQ ID NO: 506173 - DNA, 147 bp, Homo sapiens
atgtgcatgtgaagctaggtaggtgagaatcacactccgtagcaacaggtctatcatcacagtgtactgcagacacagcaggctagtgagattacacgttaagagagccaggtatgaaaaagtgtcctcgcagacaaaaccagtcgt

SEQ ID NO: 506174 - DNA, 142 bp, Homo sapiens
  misc_feature (105)..(105): n is a, c, g, or t
aaaactccacctgtgaaaatgacaaactggaaacttgcacgtggtctctccctgatttctgctctattcaccttttccctttgctgattttaatctccattcttnttgttgtaataaaccataatggtgaataaaaaaaaaa

SEQ ID NO: 506175 - DNA, 841 bp, Homo sapiens
gctgcggcgcgagccgcgggggcgggtctaagcgcgcttcgcagaagacccccgatcgatgggcgatgccgagatgctcctaaggctccccggggctgacgatgaccggccgaggaggcagcaggcgcttacctccgtcgcaaggcctattcggtgcaccgagaatggccaacgtgtaaagagcgagtggagatttattcctcgcgatggtgtgaagagggagtcgcctcccctgtagatactggtagacaggatgaggcagccgggggcactggcgactgccaatcgaggccagcagcgctcgcgtagccaggtgtgcatgatggcgcatgggttggaggtctcccgcaacggaagacccccacatgaagagtaacgaaatctctcgtttcatcgaagggactttcaacattgagcggcgactgtccattcgaagagagaagtcaggaagggaggggatgggggtgtggagttcggtcgtgctgtctcttcattcgcacaagagagagaagatgcaggagcatgggggaagatacggtgacacttgggggttgacagatgggacagttgtttgggaccggggaaagggggggtagtactaacgcctggatacgtacgaagggacatcccctagggcgcacagggggggtatgacggacatatagtgcaaggcggtcaggataggagacgaagggtagggggttcacccaagggctaccaagatgcccagtcgcgatgtcctttcggggggacggtgagaaagtgggtcgttacgaacgaatggacgcaggttgatgcatgaattggaggaggctggggtagggggcaaggtggaggtgag

SEQ ID NO: 506176 - DNA, 207 bp, Homo sapiens
ttgtatgatgcaaggtgggtctcagaggtgatcggcgatcagtagggcgatgaagttctagatccattgggacaatgctctagactggtagcatgcagtcccactagctggtaccaggcagtccccagcgtctggtattccatgtttctgctccctgtggttctcctggttgccccaaactagcggtttacttggccccttatcgag

SEQ ID NO: 506177 - DNA, 599 bp, Homo sapiens
gacatcgcttttgtgctggcgtgtggtctgtgctggatggaagtctttaacttattcttcttcatgctgctgagagcatctgtgcccctgtctgggggagccatgcatcctctagggctgccgggctggtctcattcacaggtcatggccttcagcaccacttctggctctgtagcgcctgctctgtctccctgcagcttgcgagcaaacttgactttttgccatgctcagacccctgaatcagggcctctgacttttgggatctggtccctttcaatgtcatcacagcggcgctgccagtccaggcccagctgcacctgatcacgctccaggctccgctccctttccactgccagggacagctgttgcttgtacctttcaatgtcctgctgggatcgggccacctgtgccttgagcttcacctcttcttcctgcagcgtctgaatctgaaggtctctggagaccatctccttagatagttgagcaatttgagcatcccaggcagattttacagttgatgcatcttcacgaagttggtcaatggcagcgtccttctccttggcggtgtcagcctgtctccgctctgccctggggagctg

SEQ ID NO: 506178 - DNA, 135 bp, Homo sapiens
aatgcaccggcccgcaggggttgactcccagtgtcacagaggattacagcagttctcatacattgctggtgggaatgtaaaatggtagccgctgtatttcggaaagcagtccagacagtttctcaacaattgcta

SEQ ID NO: 506179 - DNA, 1628 bp, Homo sapiens
  misc_feature (1545)..(1545): n is a, c, g, or t
  misc_feature (1616)..(1616): n is a, c, g, or t
  misc_feature (1618)..(1618): n is a, c, g, or t
  misc_feature (1625)..(1625): n is a, c, g, or t
gaataagccttcgataattatgaagggtgtttcggtatcttccctccaaaatgctaagaaataatttaggcaacagttcagactctaaaaatgaagatggctcggtcttttcacagactgaacacaatattgttgcaacttacttgattatggcaggtatgataagtattatcagcaacataatagttctgggcatcttcattaagtacaaggaacttcggacacccacaaatgcaattattattaacctggctgttactgatataggggtcagtagcattggctatcccatgtctgctgcctcagatctgtatggaagttggaaatttggatacgcaggctgtcaggtttatgctggattgaatattttttttggaatggcaagcattggattactcacggtcgtggctgtggaccgatacctgaccatctgccttcctgacgtagggagaagaatgaccaccaacacttacatcggcttgattctgggagcctggatcaatggcctgttttgggctttgatgcctatcatagggtgggctagttatgccccagatcctactggtgctacgtgtaccataaactggaggaaaaatgatagatcttttgtgtcttacaccatgacagttattgcgataaattttattgtgcccttgacagtgatgttttactgctattaccatgtcacgctatccattaaacatcacactaccagtgactgcactgagtccctcaacagagactggtcagatcagatagatgtaacaaagatgtctgtgatcatgatctgcatgtttctggtggcatggtccccttattccatcgtgtgcttatgggcttcttttggtgacccaaagaagattcctccccccatggccatcatagctccactgtttgcaaaatcttctacattctataacccctgcatttatgtggttgctaataaaaagtttcggagggcaatgcttgccatgttcaaatgtcagactcaccaaacaatgcctgtgacaagtattttacccatggatgtatctcaaaacccattggcttctggaagaatctgaaataagagaaaaggacacgctatcaaaacactttagttttttgacaatgcttttcttttaaatatgagcccatttagatcaagtgcagacatggatcattgtcctatgagagtgtaagctcctcaagcacagctcgtgcttccgtttgtgcactctggctgctgtagtgtatgcttctctgtgtcctgatatatcaacttattgctcatctcctttgatgaattaggcatcagaggttaaggtcccctttctttctccctattatggcatgcattacactgtactgatgacctttaacttgcctggctcctccattagaataaaagcagtcactaatttaatgttagaataaatgaataattctagataattactgaaatgagttgttggatgttcccagttagaatagaaagcattttttgaatttcaacattttaacatttaaatcaattaacttatgttattaaacaaaaataaatgnacattaaacatgattgtttctaaataaaatgttaagtcaatgcatatatattatatagcattatgaccccngntgcatanttt

SEQ ID NO: 506180 - DNA, 240 bp, Homo sapiens
caacaacaacaacaacaacagcaacaacaacaaagacctttccccttttccttaagccctttggtggggagaaagggacttttaaggagttccccccaagggcctttttatttgggaaataggtaaacaagggtgagcccccccctgttgctttaaaaaaaaattaaaaaaagggtgggtttggaggttggatcccctgggccctttgggaaggtcattaaaacctttcccctcctttga

SEQ ID NO: 506181 - DNA, 404 bp, Homo sapiens
gggccggggggcccccccccttcaaggggcaaaaggaaattagtggtttgtgggtttccccccacgcccccccccgggttttaaggaaaacaaaacccattgggggcccctgggccctttaatgcatcccaccttggggttagggttaggccccggggaggaaagggggctccccttttccccccctctaattccccaaaactttaagggggggggttccccccggggggttttttttttttaaaaaccaacccttttaaaaaagggcccggttgggggttttccaaatttttagggaaatgctttgttttggttatttccaagatccccccccgaaaaaattttttttccaaaagtttggggggggggttttttgttttttaaccaaaaattttaatggggga

SEQ ID NO: 506182 - DNA, 320 bp, Homo sapiens
  misc_feature (106)..(106): n is a, c, g, or t
ttttttcttcctcgggtcggtctagccgtggcaacctgaataccacgataaatctgcaccgaatcgaagttgacaacttcgccgccgacagcaagcgcaacacggntcgccagagccgttttccgagatgccgtaggtcccgcaatggctattatcggctttgaatcgctgccgttgtgcataaaaaaccgttctctactacggaaaattatacgcagagcgacaatattacggcacaaagcattcgcctcattatttttttgaagaatttatcgaaatctttccgaggggcctgcgtgtcaccctacctgtagtattat

SEQ ID NO: 506183 - DNA, 597 bp, Homo sapiens
tcgcgaacgtgttactgacattttgtaaagccaaactctaatactatcaaagccatccttggattggagttaaattctccagctttacatccttcacctttcctttgctttaagtcatcatataatgactttgattggactcaaatcatattagagtctatacgtgtgcctttctaatagcaatcctgcactaatataaaagctgcattttcaatgtgagataaacaggtatttcacaaaagagtgcaagatttttgcacctgctggtgtagctgtagcaacagcttcacagatatcttttaaaaacaaaacaaaaacatagacaaaaaaatggtctttatcctggattcatttctcttgaaatggcaagcaaccaaagctgcagacctcaatcaatggtacatatcaagccattcaactttttcttgtaatgttgtgacatttctctcctgggggagcacttccagcatcactagctgcatttcatatgggttccatggtgtaattcaaggttcatgatttgcactatacatgatgaaacatatttgaaaaatactcaagaaccacaaaagatcactttttattgtgacagctaca

SEQ ID NO: 506184 - DNA, 163 bp, Homo sapiens
  misc_feature (118)..(118): n is a, c, g, or t
tagaagagcatccgtgtcgagaagcgccgctctgagggcgaaagatccgaaagaagtacccggaccgggtgccggtgatagtagaaaaggctcccaatagctcggataggagaccggngacataaaagaagtacctggctgcgcttctgagtctcacagcttg

SEQ ID NO: 506185 - DNA, 344 bp, Homo sapiens
  misc_feature (272)..(272): n is a, c, g, or t
gcacgagtcacgtttgaaaattgccttggccacctgaaaaagagcaggcttggctgggcacgatggctcagacctgtaatcccagcactttgggaggccgcggcgggtggatcacttgaggtcaggagctgaagaccagcccagccaacatggtgaaaccccgactctactaagaaaacaaaaattagccgggcatggtggcatgcacctgtaatcccagctactcgggaggctgaggcaggagaattgcttgaacccgggagggggaggtnttcttttacaccacttgtttaacattttgcttctccttagccaatgtatattgctgggttttgcatctttta

SEQ ID NO: 506186 - DNA, 175 bp, Homo sapiens
tacgccccaaactctgtcatcaccgtaccttcatacatcatcaacacctccaagaggaccgtcatcgactgcagcatattcaacgacaagtaagagaccagagactctggaatacacacacaagttactctagctcctgtttctactcctgtgatgttctatatacatgtcccaa

SEQ ID NO: 506187 - DNA, 930 bp, Homo sapiens
tggacattcacatgggctgcagagcactgtcaggtgacctgtaaatgcaacaagaagttggagaagaggcagttaaagcagcatgcggagacagagtgtcccctgcggctcgccgtctgccagcactgtgatctggagctttctgttgtcaagttgaaggagcatgaggattactgtggagcccggacagagctgtgtggcagctgtgggcgcaacgtgcttgtgaaggagctgaagactcaccccgaagtctgtgggagagtggaggaggaaaagagaacggaggctgccatccctccggaggcttacgacgagccctggagtcaggacagaatctggatcgcatcccagctcctcagacaaatcgaggctctggacccgcccatgaggctccctggaaggcccctgcaagcctttgaggcagaccccttctacagtaggactaccagccagaggagcatggcagcccagtttccagttcaaaataatctttttgaagaacaagaaaggcaggaaaggaacagaagccggcagtccccaaaggacagcgctgagaataacgcacacttggacttcatgttggccttgagtctgcagaatgagggacaggccaccagcatggtagagcagggcttctgggagtctgtgcctgaggctgatccggctcgtgctgggcccacatctctaggtgacattacaggtgctgctgacgaagattctggctgccgtgtgagttctgggaaggagctgttcccgagggaactggtccttgaccattcagacaaggtggacccttttatgccttagtcctcactccggcgcctccctcagggggtgggcaacccggtcccttccactttttcggcgcagtaacctgtcctggcgcggaacttctgggaactcccggtcttggtggagagggcccccgtc

SEQ ID NO: 506188 - DNA, 244 bp, Homo sapiens
tttctagctgaacccctttctcctccagcatcagctctaccatgtccaaggagagtcccaggtctgcacacagcgacacgtaccaagctttccacgtgcgccgtatagcctctcatcttcttgcttagaatcaccaacctcaccgcggctcgagatggaccccaactgctcctgcgccactggtggctcctgcacctgcactggcttctggaaatgcaaacagcgcaaatgcaccttctgcaag

SEQ ID NO: 506189 - DNA, 973 bp, Homo sapiens
  misc_feature (37)..(37): n is a, c, g, or t
  misc_feature (83)..(83): n is a, c, g, or t
  misc_feature (89)..(89): n is a, c, g, or t
  misc_feature (132)..(132): n is a, c, g, or t
  misc_feature (139)..(139): n is a, c, g, or t
  misc_feature (143)..(143): n is a, c, g, or t
  misc_feature (167)..(167): n is a, c, g, or t
  misc_feature (176)..(176): n is a, c, g, or t
  misc_feature (187)..(187): n is a, c, g, or t
  misc_feature (204)..(204): n is a, c, g, or t
  misc_feature (213)..(213): n is a, c, g, or t
  misc_feature (215)..(215): n is a, c, g, or t
  misc_feature (218)..(218): n is a, c, g, or t
  misc_feature (222)..(222): n is a, c, g, or t
  misc_feature (244)..(244): n is a, c, g, or t
  misc_feature (261)..(261): n is a, c, g, or t
  misc_feature (288)..(288): n is a, c, g, or t
  misc_feature (314)..(314): n is a, c, g, or t
  misc_feature (441)..(441): n is a, c, g, or t
  misc_feature (495)..(495): n is a, c, g, or t
  misc_feature (521)..(521): n is a, c, g, or t
  misc_feature (576)..(576): n is a, c, g, or t
  misc_feature (582)..(582): n is a, c, g, or t
  misc_feature (635)..(635): n is a, c, g, or t
  misc_feature (655)..(655): n is a, c, g, or t
  misc_feature (660)..(660): n is a, c, g, or t
  misc_feature (710)..(710): n is a, c, g, or t
  misc_feature (722)..(722): n is a, c, g, or t
  misc_feature (808)..(808): n is a, c, g, or t
  misc_feature (810)..(810): n is a, c, g, or t
  misc_feature (854)..(854): n is a, c, g, or t
  misc_feature (885)..(885): n is a, c, g, or t
  misc_feature (907)..(907): n is a, c, g, or t
  misc_feature (953)..(953): n is a, c, g, or t
ttaatacaaaaatcaatacaacgaaggagataatacngtacaaaaaccttatcagctcccccaacctttatacaacaaagacnggagtnaccatatctacaaaaccataaggtctttccacttcgggcttcngtctgtnaacnctcattaaacactttttaaaagcnctgtgtagnacttcggaccnagagcgtttaaaaatanatcttttcncnatnaacnccattatttccaagcgggaacnccgcggggaagtgcggnaagcgtttgcccccccgcggggaagcnaaggaccgggaagacgcccccggccnagagggagcacaggagagaaacggggcggcagggggagagagagggggggagggacagaggggatccaagggggggcgcggggcgaaagcccccgcggcggaggaaagccggggcgggaacgccacnccgggcccggaagcggggggagcgggccggggagggggaggggggaagtccctncccccccggagaacgaagggggaacnccccggcccaaaccggggagccgcggccggcgccacgcagccggcagaggaaagnccccgnccgcgcccaagccccgaaacccgggggagaggaggggggcagccagatgagcnaaatagttttaatgccacangatanacttacatacacagacatacacaaacacaaaagttaacgatcgttctctnccaatgagcctnaagctcccaggtctccagataagccagatgcgcccgggggcagtttgcgatgcccagaggcaaccagtttgcccaacgcgctcagncnccgcggtctctgggcgttctcgcagccgggaagggcctggcccncacttcggggacgcccgccgcaccacccccnccccgcagggggcccaagggcncagaaggccacgatggctgttccccaggggtacatgtttttaagcnccggcttatcgcagcagaac

SEQ ID NO: 506190 - DNA, 86 bp, Homo sapiens
cccagaaacaacaacaggagaaaacacacgctgttctctaccggcccgtgtgaaaccgcccccgtcgcggaataccgacctgcccc

SEQ ID NO: 506191 - DNA, 150 bp, Homo sapiens
tagccttaccctcagtgccctggtctcgcttcccccgtgctgtagccacccgaggcagtcggggcaggtggcattccggacacctgggcttaccaggcatacgggaccccaggaaatgttatttttggttaagtcaaatcatatgtggca

SEQ ID NO: 506192 - DNA, 119 bp, Homo sapiens
gggtggggggggggggggttttttttttttcccaaaacttggggaattcccttttgggtttcaaatttttggtcccctttttccctttaaaaggaccctttaaaaaatttaaacctgga

SEQ ID NO: 506193 - DNA, 577 bp, Homo sapiens
aattcgcggccgcgtcgacacggctgcgagaagagacagaaggggacacactcgcttctggaacgtctgaggttatcaataagctcctagtccagacgccatgggtcatttcacagaggaggacaaggctactatcacaagcctgtggggcaaggtgaatgtggaagatgctggaggagaaaccctgggaaggctcctggttgtctacccatggacccagaggttctttgacagctttggcaacctgtcctctgcctctgccatcatgggcaaccccaaagtcaaggcacatggcaagagggtgctgacttccttgggagatgccataaagcacctggatgatctcaagggcacctttgcccagctgagtgaactgcactgtgacaagctgcatgtggatcctgagacttcaagctcctggaaatgtgctggtgaccgttttggcaatccatttcggcaaagaattcacccctgaggttgcaggcttcctggcagaagatggtgactggagatgccagtgtctctgtcctccagataacactgagctcactgcttatgactgcaggctttcaagatt

SEQ ID NO: 506194 - DNA, 539 bp, Homo sapiens
tacctcggctctacttgtctctggactgtgtcttggttatcatggagctagactgggcctggtgacagcgccctgatggggttgtcctgtgtggtcacggaggtgatcagaaaagatgcagaatggaattgctgcgaggatgaatgagatgactgtcagcacataacaggcagctggtgagtgttcagggattaccctcagtagctgcccagaggccaaaaccatccacctgatagtgacttttcccaaaccaggaggaagagaaaagagcaggtcccactcacctgaatctgatcagtgagctgtgttgagatgtgcctctcatctagaaaatggtccttcacgcagagctactcacagacactgctgtgtgtctctaactgctccacaacacagaggcgatggggactcagcaacagtgacattgtggggtgacacaacccacaaccatgggagtctgcttgggtcaacagggcccagagtcagtgtcctctatcccctgaactgacatgtgtgtatgcagacaaggtagagccgag

SEQ ID NO: 506195 - DNA, 1043 bp, Homo sapiens
  misc_feature (815)..(815): n is a, c, g, or t
aattcgcggccgcgtcgacacggctgcgagaagagacagaaggggacacactcgcttctggaacgtctgaggttatcaataagctcctagtccagacgccatgggtcatttcacagaggaggacaaggctactatcacaagcctgtggggcaaggtgaatgtggaagatgctggaggagaaaccctggtgacatggctccatgagcttcgtctacccaatggaccctagacggattctttgacaagcttatgggaatccggatgtcctcctgcctctgcacatcactgggcaactcccaaatgtcaaaggctacactggcaacgaatggtgctgactttccttgggacgatgccataagatgcaggctggattgatctcacagtggcaccttagacctatgcctgagtgaatctgcactgatgacgatagccttggcaatggtgggaatccctagacgtaacttgcaatgcctcctggaggaaaatgtgcttggctgaaccggttctttgggccaaatgcacatttcgggcgaatacgcacattcaaccccttgacgtgtcgcaaggctatcctggggaagcaatggatgggtgacgtgagatgtagcgctcagttgcccctgtcacttcccaagactaacctactagatggctcattgtcgcaatgatcgcattgacgctttcagaggggatagggctttctattcttggccaaagtcatacgtacacaaactaagataaaactcttcctttgctgcgttaatgcaggattccagcgacaaacacataccagaggctaaattaccaattggganaaccccttgcgcgaaaaaggtcggcttgaccaaatcccttaccaggtgattcatctccaagactgggagggtggcgccagacattcttaattggttcggtgtagaccctcaagtggccactttggtcgaccaacaaagttgctgccccaccctattgtggtgttaagcctccacaccttttccaaatggacggcatcccattcggactccgacttcttgtcaaagcag

SEQ ID NO: 506196 - DNA, 123 bp, Homo sapiens
tttttttttttgggggggggggttttaggtttttggttttttaaaccgggcctttttttggggaccccctggccccaaattttttcccggattttttggcccccttcaaaaggtttattggga

SEQ ID NO: 506197 - DNA, 374 bp, Homo sapiens
  misc_feature (186)..(186): n is a, c, g, or t
  misc_feature (198)..(198): n is a, c, g, or t
  misc_feature (206)..(206): n is a, c, g, or t
  misc_feature (212)..(213): n is a, c, g, or t
  misc_feature (217)..(217): n is a, c, g, or t
aattcgcggccgcgtcgacacggctgcgagaagagacagaaggggacacactcgcttctggaacgtctgaggttatcaataagctcctagtccagacgccatgggtcatttcacagaggaggacaaggctactatcacaagcctgtggggcaaggtgaatgtggaagatgctggaggagaaactcnggaaggttcctngttgttanccttgnncccnaggtttcttttacacatcttgcgcaccctgctctgtccctgtctcatcaggcaaccccaagtcagagacacagcagaggtggtgtatacttctgagtagcctacatgcacacgtgatctcagagcactcttccatcgtgatcactcttacagcagct

SEQ ID NO: 506198 - DNA, 992 bp, Homo sapiens
ggtgcttcccgcagagggctggtggtgggagcggagtgggtctgggcggtgcgagcctgggccgtgggctgtgtgggggccgggcggggcggtgacggtgtgatggcgggatgggtgcaccgtgagcgcgcgatggacaaggatgggtgccgagcgctctaagatgatcgataagtaactgcgggagtggaacggatagaagggggcgggaggtgaagttgctgcctgttgggtgctggggagtcatgggaagagcaccatctgtcaagcagatgacgatcatccacgaggagtggctactccgagcgagagaagtgccggcagtacccgtgccggttgtctacaggaacaccattccagtcctaatcaatggccacttgtcgaaagccatgggcaacgtgcagatcgactttgcccgaagccctccatgaagctggtacgacgcctacggcatgctattttgcactgttctggctaccgctgaggagcaaggcgtgctccctgatgagctgtccgtggtcgtccggaggctctgggtgacatggtgtgcaggcctgctttgggcgtcaatggaataccagctcaacgactcagtgctactacctgaactgacctgtagcgtattggcagagtgatagatccccacaaaggaagatgtgtacggaccgcgtaggacacggggatcgtggagacgcggcttcagcttcaaggaacgtaacttcagatgttggtggggtgccagcggctggcgaagaagtggaaccatggtatgggggtcgcggcatcaggttgtgggtagctgagcgggtatactgggaacgtgagggagaagtagaccggtctgaagataatgtttaaggtggactaatgtctcgagaggccattcacaagaggggtggggaacacagcctgatgtcgtagtgggacatttgggcccagagagggataagaagatacctgcgaaagtgtgctaaaaggtgggtggaccagtg

SEQ ID NO: 506199 - DNA, 745 bp, Homo sapiens
agcggagttccgggcgcgcgcccgcaaccgccgacgtcagccatggcagacgtgtcaagccgagccagggacccactgttgggatgctggctgcatggggcgccccaagcccagtcccctctgtcttctctttcgactagcactgtacttgtgtgctcctctacccgaggacctgacatggacccaatcctcgggccgccctggagcgccagcagctccgcctccgggagcggcaaaaattcttcgaggacattttacagccagagacagagttgtctttcctctgtcccatctgcatctcaagtcgcagagaccccccataggtagtatctcatccatggaagtgaatgtggacacactggagcgaagtagaactgatcgaccttggggacccggatgcagcagatgtgttctcgccctagcgaagatcctccaaacgaaccccccagatcgtctggggtggacaagcatttggaggagctgagcctgccggttgcctacatcagacaggacccacatctaggacctcctcctccttcctcctccgaattcctccagagcaacctgcataagcccaacatccaagtgatgatggaagcaaatacgcccttggcacagctcggatgacagaaggaggacaagcggctaatgcgcagagggcagagcctggacgacctgcaacatacacatggggccctggactaacagaactgaacccgcttggctatacccccacatggaacac

SEQ ID NO: 506200 - DNA, 325 bp, Homo sapiens
  misc_feature (23)..(23): n is a, c, g, or t
  misc_feature (32)..(32): n is a, c, g, or t
  misc_feature (263)..(263): n is a, c, g, or t
atggagtagtactggaattctgngtacggcanagcctggcacatagccggtattccatcaagtgctgagcacattggccgttggtatgaatgctataattaccttgaaaataatcagactctgccattgcaaaagagaaagacaacagtctttaattttaaacttcctgatactatattcagtcactctttcatgccatcttcaaactgcattggcatgacaatttacatttacaattttggatgagaaataccgcaagattnactcacaccttccacctcccaggacacacttaaaaccatgagcttaggcagcgcaaggtacg

SEQ ID NO: 506201 - DNA, 377 bp, Homo sapiens
aaatttctagaaccaaattgtgtctcacagtttacctctactaacacagttgtgtttccttcttgcaacagcccatctcaggccttctttggtcttcctcccttgagagcttgacagctttgctccagccctccttgtgggcctccttgtgaagccagttctctgcctgtttaaggtccccgccacaagtctccaaagctttcttgcattttacaaagaagtagctgtgttttccgccgcagcttcatagagaagctccttgttgagagcccaagccagcacagacggggcacgagcataaatatgtgtgccgtgtctggggcgtctcacacaaaagagacacagccgtatagctcgcggtgcgcgcgcacaggccc

SEQ ID NO: 506202 - DNA, 103 bp, Homo sapiens
gaaggtgagagcatgctgtctccttccttgctgtggaatttgctgacacaatatcttccgcctggtgctgggcatatcctaagaacttacaactttcctgtac

SEQ ID NO: 506203 - DNA, 864 bp, Homo sapiens
gaggcagcagcagccactcaagtggcagtatctgtgccaaagaggagacggataaattaaggagctaaataagaaggaggctgttggagaccttctggatgccttcaatggaggcgaaccctggcagtacgcagaggtggaaagatcgagcatcctgcaggtcagcaatccaggcccagagtctgagggcagtggtgtgcccccacgtcctgaggaacgcagatgagagctgggactcaaaggaagactaaaatgcacaatgctgagaacatccagtcccggggacacagaagtatgaatataacgtcatgatcagtggaagcctctaaagcctatgaggagacataacacgttacgaaccgtgagttcctgcgttggatctgcagattcatcattgtgccagatatgcagaagaccagagggattagccacgatatcaagtgacgtggatgcatggaccaggccagataaaacaccaactgcggagcactgtgatcccagtagacgtacacaggcataaagttggtggaccaagacttctagctccatacttatgtcaaccttggtcggacaagccttagcagacggtgggcgcccaagggagtgcggacaaggtggtggaagctagacccgatggtacacacatgagatgcacactggggaacccggcagctcctgcaaaaagggaagcccgcgaaaaaaggaagccaacggccaagaatccatttggccaccacgaggtgaaatagaacctgacaggagttctaaccagcgcggaacacatagggccacaaacaggcctggaaaaacccagcacagacaaagcgggccgaggggctgagtaaaggaacgaacgggcaacaa

SEQ ID NO: 506204 - DNA, 158 bp, Homo sapiens
tagttgaaatagtgctggttatcttataagctatatcagttatttgtccaattaaacacttaacaccagtatatagtccgagtagtacagacgatgtatatggatatagtcatggttcatctacagactcaaaacataatcaataactcatccttgga

SEQ ID NO: 506205 - DNA, 1607 bp, Homo sapiens
  misc_feature (267)..(267): n is a, c, g, or t
  misc_feature (460)..(460): n is a, c, g, or t
  misc_feature (698)..(698): n is a, c, g, or t
  misc_feature (768)..(768): n is a, c, g, or t
  misc_feature (858)..(858): n is a, c, g, or t
  misc_feature (973)..(973): n is a, c, g, or t
  misc_feature (1087)..(1087): n is a, c, g, or t
aggggagcagcaccaccaagatatggggggctccccacaagaccaagaatgtctcctgcagatgtttcccccgatgttgtctccttctctccgcgggggaaaggcctttgtggtgtcgccattatgtctggggcccccagaaacgaccacacgccgcgttgttaatgcggccccacaaaagaccatccttccccggaggggcccacaccttcttggggggagaacaccgacacccccgccgcgggttttgtcttgggtgagaagaanaactcttgtgctgtcgcctcctttcataattaatatctacccggcggcggaaagaaaattatttgggtccccttttttgtggtggtgtttctcccagcaccagaacggcgtggggcgccccctctctcctcctcctttgtggaggaattttcctacggggggaagccaatatgtgtttgttcgttgtgctccnccacgaatataaaaaaggggtgtttcaccacactatctgtgttctcttgtgtgccgccccctctgtggactgggggggggcgacaccactgtgggccgccccccacctcgtggtggagagagatttcccacacctgcggtggggccacacgatcccccacgggaacaccaccctgtggggttttctttcccgggggggtctccccgcagtggagtacgtagcccccttcccctctgtntgtgtcccgcacgcggctttttaatggggtaattcccacccgcgcctctatagagtgtctccccacgggngggacacccccacctttgaagattctccctcgagaggtagtgagatgtggctcacagctctcgagatctcacacgactctcggagagacncacacatggtggtggagagctccactgtcgagatatgccccacccgccttgtcttggggacacactgggctttcacagacagtgtgtgtccgcgccctgttgctgaccctcttanggggactctgtgtgtcactccccacgcccacaggtgtgtttttcagacgcacactgtgggcacggcatctttctatcacacacgccctgctgagagagtgggctctggagaganttcaccacagagagggcaaatctctctgcgcacttgtctccgcgtctccctctgggagaggggtgtgtgcccgcacacattgtgtcgccacagtgtgtgctctgtgctccgcacagagtttggcgtataccccacacttgtgttgcactccacaggaaccccactttctatcactccacaccgggtacccaaacgaggtcctcggcctctgttctcgtggaagaccggagttacaccctttcccacacttgctgagaaaaggttcaaggcctcttcttggctagaatccacttctgcctcttgtggctgctgcccccgtggctgctgccacccaccaagctgctcctgctgctgctgcacgccccacgctaaaggttgaagccacaaggaaagaagtcgcgaaggaagtccgaccgaaggaataatgggaatttggtctctttgactaatccccccaaagccacccacttagccccttttatttccccaacaccaggaaataaaggcttacttcctttta

SEQ ID NO: 506206 - DNA, 645 bp, Homo sapiens
tggaaatgggatctcgctctgtcacccaggctggattgcagtggcacaatcttggttcgctgaaccttcgcctcttgggttcacgcaattctcgtgcttagcctccctagtagctgggactacggtgtgcccaccagcctggtatttggtatttagcaagatggggttctcaccatgttggccaggcgggtcttgaactccgtggcctcaggtgatccacccacctcggtctcccaaagtgctaggattcacagacgtgaaccattgcacccagccaaataattcaaacttaacagctgtgggaacttaaatggtgctgagtcttgagaggaatgtgactatgcagcctgagtcacatggcatgcagctgcaacttctgcctttttttcacacctataacataacttgagacctaggctggtgccagagataaagaccccctcaaatcactgcccctttctacagagtaactaatggtcatcctcctgggggatgccggcattctgtaccccatccaaatcactgtgacattatggcccgtcttgtgttgcacactgttcaaatccttgccaaaatttcgtggtcggccccgcataagtaaaccttaattctccattggaaagtcgaacccatcgcggagtgagc

SEQ ID NO: 506207 - DNA, 85 bp, Homo sapiens
catggatttgctggtgcagtacaactaggcttaatagggacatgtccctattaagcctgttagaagcttgaattcgagcagtagt

SEQ ID NO: 506208 - DNA, 175 bp, Homo sapiens
catcgccgacagacgcgtggttgccccggcgtgatcgtgcgcagctcggctaacgcccaggccggggcaaccacgcgtctgtcggcgatgttccatggcctatggctgctggatttcgtgctctggctgtcgagcgtgctgcagagcattccggtcgcgagcctggcggttgtgc

SEQ ID NO: 506209 - DNA, 229 bp, Homo sapiens
gtgatttagtccttcaggtaatacagcttacccccaagaaggactgagaggaatatagagtacggacagttggcagatagacaatttcctttgcctaggctcacgggagaagtctggttgggccaggtatagtgggtgtttaggtgcctccatactggatagtagccagcagggtaacaaccaccctagcctatatacctagaataggcgcagcataacataatccata

SEQ ID NO: 506210 - DNA, 272 bp, Homo sapiens
tttcaccatatggtcaggatctcctcacatcgtgatccacccgcctcggcctcccaaagtgctgggattacaggcatgagccaccgcacccggcctaagcctgaaataatttttttttttttttttttgggaacagagtctcactctgtcccccaggttaaagtgcaggggcgcaatcggggctcacaggcaacctcgggcctcccagggttcaaggtaatttctccgggcgctctatggtcaggtttccggggtaccgacgctcagaatcc

SEQ ID NO: 506211 - DNA, 330 bp, Homo sapiens
cgaggtgactctagcaggatcttatccccggttctgggtacagtggctcatgtatgtaatcccaacactttgggaggccgaggctagagaatcacttgaggccaggggttggagagcaccctgggaaacatacaaggattccatctctacaaaaaaatttagcccaagtgtggtggctcacacctgtaatcccagcactttggaatgccgaggagggcggatcacgaggtcaggagatcgagaccatcctggctgacacagtgaaaccacatctccactaaaaatagaaaaaattagccaggcatggtggcgggcatctgtaatcccagc

SEQ ID NO: 506212 - DNA, 210 bp, Homo sapiens
caatctggactgggtgatgtgtacatggttcatctgtactgttatggggttttcatatttattaataacagccatactgaaatgtaattcacagtaccaaaaaatacatcttttaagatgtacacctcagtgatactttattatatttacagacttgtgtaactatcaccactatttttagagcatttttatcaccccccctcaaaaaag

SEQ ID NO: 506213 - DNA, 1063 bp, Homo sapiens
  misc_feature (751)..(751): n is a, c, g, or t
tggtcggatcctaggccccgtggtcccgctttggcgtgcgttgcgtctggctctgcccgcgtatgtgtgacgccctgggcgcctgtgggggtccagttgcgaggtgtcgggtaatcttggtgccaacgcgtatcccgtcggcgcctatccgcggtggaggactgaccagagacgtgggtgcgcgtccgttgggcgtggcgtctccacgtagctactctcacatctgagtggagcccacgtgcgttactccgatagtacgcacgaagttttagcgtctcgtacagccagagagtgactggatccctcctaactagcatggaaggtacaggtgagatcactaagactgcctcatggggcgaacttggagtagcggaaccagctatgttgtacaatggctggtctagaatagaacgtggttgggtgcacaaaatactcattgcagtaaagacttctagtgggcaattccctgttaagaagcaagaggtggtgaacacacttattaacacttgttcccctaggggtggggtatgggttgcgaggccacttgagacttgttggtgacacgccaagagagagaactttgatcccactgaaccaagttgaaggtgagctgttttccacaagggacttaccgtagaacagccgccgtaacgaaacttcacttggaggaacagaacatggtcgtacgcaaaagctcaggttggaattataagacttcgctagtgtttcaacacacgaaatcgtaaaagancaaataggagagaagattaacattatggcagtttatgggtgacatctgtgaccgttgttagtgacggaaaaaggagtgtcatcgtggtggaaccccagtgcacgctggatgggaagagaattacgtttgggaagattgtacaaagttggaaaagaggaacacgatatctatcgtagttacacgcgctagggcaaatggtgggaaggagtcgtacaagctgtacaacatgtaaacgatgggcacaaaacgaaagatgcaaaacggaaaactagtggataaagaagagaaaaccagttattgtcaacaaaagga

SEQ ID NO: 506214 - DNA, 1210 bp, Homo sapiens
  misc_feature (380)..(380): n is a, c, g, or t
gcatcatcactctgttcttccgccggtccgtcgacgcgtgactctgccggtcgcaacggatagaagagatcgccgcgctggtcatgtgacgatggctccggacagtgtgcaaatccgtggtcttggcgtggggactgacgctcccctgagccgttgcttatcctatccactcgtctgagagcgccccttagactatccagtggcgtacatggtgtgagcatggggccacaatggacatcctacgtaagcgacgatcgaggcccacgaagcaagcgtggtcatcctgaccctggagagtacgccactagtttgacgcatcggcatccgtcaccgaagcgtcgggaccgacatcttggagaacagatcttggcggccgaacnacgcttcggtactaacgacgcgtcgctcaggtaggcacccaggaaggcagcactccgagtggcctcgtttgacgcgagtgcccccccctgaaacgcccctagatgggccatacagaaaagagatgaggacttctactaattagtgtcttgaagaccattcaagagcatcgcgcctgggcacaattgatccagtgggcccctagtcccaagtgccccggctggcgttgatcgccttcatacggcactcgtaggagcagcaccacatggccattgtccatggactctggaagaccggtggttcgcccaacaacgagtagccccagtcgtaacgaaaggggcgtacgacaccatcacactccgacgccaattccctgcgatcgttggcaccctggacttggccgaggaccttgaccggaagtacctcatggaaagattcctcatctgcatgcgaggcttacaagcttcaccaccaccggccgagcggcgacaatcgtgcgcggacatccaaggagaagctagtgcttaccgtcgcccttggactttcgagcaaggagattggcccacctggccgcatacctcctctttctctgggaagaagaagcttacgaagcctgcccgatgtgccaggctcatcacccattgggcaatgagacgagtcccgggtgatccagaagggccctggttcccaagccttcctttcctggggtatgggaatctttggcggcattccacgcaagaccccttcacttcccttcatgacatgtgacgtggacattccgcaaagacctgttgggccaaacaggtctgtctgggggacccccatgtatccg

SEQ ID NO: 506215 - DNA, 406 bp, Homo sapiens
  misc_feature (46)..(46): n is a, c, g, or t
  misc_feature (66)..(66): n is a, c, g, or t
ggttaataaatgaaaaatagtttaatgtgtaaactggcctctgaantctcctgccttaaggacccnagaggaaaaatggttgttggaccctgaccttgttaaatggcctactgctttacctaaggagatgtgcaaatgcctgaaagttaagaaacaaggttaaatagcccaggcatggtgcctcatgcctgtaatccccagcactttgggaggctgaggcgggcggatcacctgaggttgggagttcgagaccagcctgaccaacacggagaaaccctatctctactaaaaatacaaaagtagccgggcgtggtgatgcgtgcctgtaatcccagctacccaggaaggctgaggcggcagaatcacttgaacccggaggcggaggttgcggtaagccgagatcacc

SEQ ID NO: 506216 - DNA, 195 bp, Homo sapiens
cacgagtgtgcagctggaagcctctcccgccttcctagctgtcccagtgaagaagaaacaagcccctcactgcatctatgcgaacgaagcggcaaactgtgggtctgggcagcagtcttaaagtcattacgaaatgtgaatctcaccgtaagcacaaaaatgttagagtgttaagaaccgtgtttggctaagcag

SEQ ID NO: 506217 - DNA, 228 bp, Homo sapiens
  misc_feature (75)..(75): n is a, c, g, or t
gcccccccccccccccccccccccccagggggaaccccggggggggttcccccccccaaaggggggttttaaaanggtgtttgggccccccccccccaaatcccccggggggtccccaggggggaaaatttttttttttggggggggttttgccctttttttttttttttttttttgggggtttggggggttcccctttcccccccccaaaaaccgtttttttgggga

SEQ ID NO: 506218 - DNA, 200 bp, Homo sapiens
taaaggatattggatctattccaatagacaatactcttgcatttgatccagttcataacgtagataactaccatcaatcaacgtcatcagaatcacgatttgtattaagccctactgtgcataggcaaaacggtaatgcctaggctccagatgctaagtgccaatgggtacaccattcgtcgactcttgtcggaacgatc

SEQ ID NO: 506219 - DNA, 604 bp, Homo sapiens
caccggggcccaaacacaagggaccagttcggcaacagagaaacaacacggcggcgagccagacccagggttaggagcgaggcaccccaagaggcctaaatccgtcggcccagcagggccccggcctccaaggtcggagccccacagaacgaaagggagccatcccccacttggggggatacaacgtcgatgcgggcgcacaaattatcttggtccccccgccgtctgtggtgccccggcagaatcccgggaaggagccgcttccccccccctcatcaggggcacacacccaaggtgtgaccccgtattgaacacgaaccggacactgtcggagaaattccgccctcccccttaggatatctgtggggcacacattccctctgccaaggacccagtcggactattccccacggcacacaagagcctgggccccgcggcaccagcgccgaggatgcccgcacaacccgctgagggactgggcctgggacgggaaagccccgcgggcttgtagaaaccacacagtacgtgcaggggcctctcccgggagacaaccacgggggggcccgactgtttttttcaaaaaaaaccccctttcctcaaaaac

SEQ ID NO: 506220 - DNA, 880 bp, Homo sapiens
  misc_feature (1)..(2): n is a, c, g, or t
nncgcgagagagatgtagacagaagagagggcggaagcggcgcaccgtgaagcgcgagccgcaacacaggggagagagagcccacaggggtgagaaagcaaacacacgggacgccaactaatggacaagcgggaaacacgtaacgaccggataaaccggccagtacagttggcagctacatgccgcgcatgcggaggcagcaacacagcaacgagagtgaagcatgaggttaacacccagacagtggagtcgttagtcctgtctcgtgagtaggcatcaaccaggtggtgtatctagctaagcgtaacgtgaccagttacattagccgcaaacagtgcagaggacgaagtaagtgtattaaacgacggaaagtgaataacgagacgcaatgggctgagccagagggcagcacacaacagagcatctacgttaggagtcgacaatataccagcgcgcgagagcggtggtctcatgcgcaagtaaacggcgcggcatcttccgaaaggtcgaggtgggtggattactcgagcccacagagttcaagacccaccctggcccacacaggtgaaaccgccgtctctgatcataggaaaagcacctgcgcgttggtcacatagagtgcaccaccgccctgcctcaggctacaataggaaagactgagccacaaagagtcgcgtggaccccgggttgcaaaagaagcactgggagccaagagcgggggggacagacaccccaggcccacggagagcagagtgagagccgcgcgaccggggaaaagcccatgccacccccccccgggagtataaaaaaggaaattctttccaaaaaaacttccttttaactttaaaattttccccttccccctcccccccacaaaaca

SEQ ID NO: 506221 - DNA, 110 bp, Homo sapiens
aggcccatcagtgtgattctcagggtttttcttggaactttaggataaaagtattttctcttcctttggaaagagaaatattatgaaataaaatcatttttgctaccatg

SEQ ID NO: 506222 - DNA, 130 bp, Homo sapiens
actgttcgctgcacccctcgtccccgcctctctttgctatcacttagactgaccctgacacccatcaggctcagcaaattacctgggctgtcctgccgcaagggttcacagacagcccccattacctcag

SEQ ID NO: 506223 - DNA, 145 bp, Homo sapiens
tgatggactgaggcttcaggtggtactggagcacatgcctgtagccctgatgcattctcagatacgttcgcagggttgtgatccacccagcacttctgagagcaatgaagtcaggagcagaagagcttcctgagctaagcggaat

SEQ ID NO: 506224 - DNA, 332 bp, Homo sapiens
ttcattcctctacctcgcttttctaattttctagcttttgattttgagggagggatgtgtgattcttcctttcaccttaacactttatagagcattgtgggattactaattatcctactttcagtattcttgtttcttacggaatagggaggcccgataagcacgggttctagacaggctacaatctcgaaggtggagcattcagaacacgcacaatggctatctaattccacgtttgccattctatattgttactggtcattatttagtgacatttgtatttgctatagtgacatccaagatctctgatcacgcgttaccattggctgact

SEQ ID NO: 506225 - DNA, 774 bp, Homo sapiens
gattatggactgtgcttctggcaatgtgactcgctagttagttctgagattccaagattacagaatcctgtgactgcttttcagctcataattcgtggcctgtggaagcgtgcacatgcactggtacacatcttgattaagcgagcgtcaggtactcgcaaaaccgtgcaatgtgcaaaatgctttgaacaaacgataaaagcacagatgccaaatgcttcgacttcgtccagtatgaactccggcaatgagttcgagaaggaagcaacttttacgagcattcttaatactgtcatcttgctttggtctttagtggcttatttgcctttactggttgtatctgacggaataccgtatttgagcagcagtgtaggtaaaacaaaatcatatgggtgcatttacttcagccaggttgtgtgtattgaatactaagtcaccttcttcaagagagaacttgtgggatttttgtggtaattattataaacttagacttgctatttcaaaaatgctgaggttctacccatttttttaccttgctatcggttccaacctgtttgtgttgagacttcgcaatttcttgcaattggcattcaagcactcagtaggaaaagcccaaacacttatgaccttcacttccattttccttaggaggagtccgattattcccgtgaattttccagcaacgagcgaatccattacctggggaaagcaaaccggtatgtacaaatcattaagtccctggttgcttttaaaccatgtgttgacgaaattaag

SEQ ID NO: 506226 - DNA, 121 bp, Homo sapiens
cagctaagtttcctaaatggaaaattcctcacatgaaaacattctcaaccttagccatacctccctacagggtttctttctggggtgatgaagatgttctaaaactgctgtggttgcatag

SEQ ID NO: 506227 - DNA, 403 bp, Homo sapiens
ctagaggatccccagaggacatggtgctctctcgacctgatggtctgaggcaggtcaactcctctctgtctctgtccttgagccttctctacggtggggagaggggtgggggcaccagggttattgctgtcctctcctcctaaggaaagggagtagcagattgtctgaggggaagcacaggctgtgcttgtcgagggggctagtcgcttactcgccttgccatgaggccgggctctcagtttgggggtgtctgtgcaaccttcatctgcactgtgtcctgtgccccctcctccccattccatggtccccagcaggtgctggttctgagcaaactcccagggaagaaaacgtgcctgtttccatggccaggttcttgtggtgtccagtgtgcgtctctcctcca

SEQ ID NO: 506228 - DNA, 359 bp, Homo sapiens
cctcttatcagtttcatgttatataagagcttgggatatccatatttaaatgtgctgtagaaatgaaggaaactttaaatattagcttataaataaacaaataaccctcttgttctggaattttaccatctctaaaatggaattagactgagtgtttttattttctgtttgtagattcgttattttactcgagtgttgattttctttctgtcgatcagtggcgagcgtgctgtggtgttcttgctatccgagtctggttatctccacctctctgctcttgcgtctggtgcctgcctctacgtgcgtcgcctccgtggaggcgcggttttcgttgctgcgcctcatgcggccacagctgg

SEQ ID NO: 506229 - DNA, 425 bp, Homo sapiens
ttcacatgcaaggaggagtgcgcagacactcgggaggtgtctatacagattatcatccgctgaaggtgggggggagctcgacacaggcactcggaaggtgtcttgagattatacatccgctgagggtagagcagaaggtggaaggggagtgagccgaaactacgggaggtgtcttgagattatcatccgctgagggtggacgaagatagagcacacactgcgaaaagtgtactagaggctcaaggagtaatcaattatagaatgtagtagagttggaggaggtggctggtggaccatcctgtattataaagtaacagctgtgaggtcaggccagtagggcaatcctgaagaatagacgctgctccactgccgacattctgcactgtaaggccaaaggaggacaatgtattcacacatatacatta

SEQ ID NO: 506230 - DNA, 157 bp, Homo sapiens
tacgatcgagctcggtaccatctctgtcaggtgtgctgcgtacttcccggctcacgcgtcccagcagatagagatgggggccgttagaagcaaaatgtgaaacgtatccgccatggtgctggtatctccggcaataaaaccatcatcgtagaaaata

SEQ ID NO: 506231 - DNA, 438 bp, Homo sapiens
cctacgccgggctgtggtacccgcaaacaggccgagcgggcgggaggacaaggcgccggccgtgccgacaggtcactcgcgccattgccgtgccaacgacccgcatgatgtggccgacgtggcgcctgtcctcggcgcgttgggctgcttgctccgtgttacctgcccctactcggtctaacctacctctatcggaccaccctgacgggaccctgcgaagccgggccatctctgacccagacccatgatccccgatgggacctgaccttgactggagccgaggaccccgaagaaaggcgtagcggaatgaatgacccttatgtgacgaccccagagggcaggggcaagaccgagccagggggttgacgggaccacagagccaagaggaggatacttgcgacgccgcgacactggatattcgctgaaagaacccgacag

SEQ ID NO: 506232 - DNA, 318 bp, Homo sapiens
tacaagcgtgagtcaccatgactgggttttgttttttttttaaataaaggggatttgaaaaatttgggaagcgcaggcgggataagtgtatttatccctgctgggctaactgaagcatgagacgttcccaccccagggtgacaagtcactgaacctgtttataaacccctcactatttgagggttgaaaatccagagggcggtatttttttgtggagcgaaaaaaacctttcattttggacggaaacaatagggggtgcttaaaatggccggggcaagtttcaaaacaaatggggggggccacttttttctaacctga

SEQ ID NO: 506233 - DNA, 780 bp, Homo sapiens
agcggaaaaaagaaaaaaaaaaaaaagaatgactttaagggatggaaacatgtcatatatgtccaaatctatgagtggacaatacttaaaaaaaaaaaaagaaaaaaaaaaatccttttttccccaggggaggatttgggaaaacccaactcattttggaaaaccgggtcaaagaaggggaaagaagcattttattcctttgggggtacaacccattacttttgtgggtagccaaattagctgtgataaattggaatccccttttatagacattattgttccacctaccaaagaacagaaattcatagaatttagtatgccaccagtgttggtaatactctaagtgaaatcaagggggccagggtggtgggggcctcactcccggggtaatctcccaaacactttctcggaggccgagaaggcgggaagaaatggcttggaaggccagaaagattcgagaaccacccggggcaaacaacagaaccgtgttcatagtgcacacaagaaactccgtggtccccctacaaagaaaaaataagagaaaataaaaaaaaaaaactttgagcaccggggtgtgtggggccctgaggtgccccgtggttagtcccccagctgtgttttgggaaagaggctctgcgggtgtggagaaggaataccccttgtgaaagcccccgggggaggttccaagaggcgttagcaccaccccacgcttaagaaagtgggccccccaagtgtgatctcttaaacccttgttgtgtcaacaagagcggggaaacccca

SEQ ID NO: 506234 - DNA, 821 bp, Homo sapiens
gccttcgttgccggcatcagccagtactccaagttgcgtgctggcctctaaggagcaggtgctgcaccgtggtagttctggaggagaaagtagcactatgagcagcaggtggcagaggagaagcatcacgtcgccgagctcctgtctttattcgaggacagcatatccaggatggctctaaagactcgggaaggaggcgtctgctcagtggtattggcactggtaagcagaagggaggtcaccatggttgtggtggctgctctgtgaacaacgtggtgctgatggctcccttgtgcgaatggagtctgtatttcaaaccgaggaagggtgtgcatgggagtatctgtctgcctgtcgatgaagaaaggcacggaatgtttgttgctcgtggagcatctccttctaggaactcttgctctccctcatggctaggaagagcgaggaaggaaggtcgtgtgatatctatgaggctgacggggtctcgacaggaggactgtgatgactttgcgacgtaagggcagactgatgattacttaatagacggggatcagtgtgtgatgtgagtcaagatcacgtccggatgccgcattatggtcggaatactaggctattcaccaactggccattcgagaacagacgtcgtacgccttcgatcttacatgacgtgtgtttagcgcgaagtcgggtagaggaatagggagcagagtccattgatggtgcccctgggaaccccttgttggtgagttgttgccagctggccctgcgggggccgaggcaggttacgggaaaggtcctgggaacgagggacgccgccgaagcag

SEQ ID NO: 506235 - DNA, 188 bp, Homo sapiens
agcttggacttctttgcaacaatgtctcgcccattccagcagcagtatctcagatcacttgtgttcctgtttgcctccaggctcgagaacaaaatcacagtcttcatggaccacgtagggtgggccactttgctagatgggtcataaaggggactggggggactcaaacagagtatggtcgggctaag

SEQ ID NO: 506236 - DNA, 471 bp, Homo sapiens
tcatacaacacttctcttccttctacatctcgccaccacattactaaaagtctatttaccagagttccttctacacagtacatcttgtccacctttcaacagcaccaaaaaaatgcaaggcacactaaaaggcaaaaagcacagtttgagcagtcattgcgagcatcagaacgagacccagatacagcagggatgttggaatcatcagagcataaattttaaaaataattatgattaataagctaagggctgtaatgagaaaagtagacaacatgcacgaacagatgaataatataaatagaaaaatagaacttcttagatagaagcaaaaataaatgctagagataaaaaacactgtaattgaaatgaagagacctttgatgggcttattagtagattggacatggctgagaaaagaatctctgagctcgaggatgtgacgatcgaaacttctaaaactgaaaattaaaa

SEQ ID NO: 506237 - DNA, 466 bp, Homo sapiens
  misc_feature (78)..(78): n is a, c, g, or t
catttttattaaattactaatatatatataatgcccattttacttaatccttctcagggccttttgccagtatgtttnacttttttattttcccacaatagttcacttgtcaaaaactacagaaacaggaagtcattaaaccttggttgggtccatgagtggcggagatgaaagcgcttgtttccctccacagttgatagctgtggagtacattttagctcctgtcaaactgattgctaaaatggagcttattcttttttgtttttacatttatttgtaaaaaataccaacaagactgcttaaagttttaaaaaggaaagacaattgctaaattatttattgcctctaattactaatgtagttttggcagtcttaatggtgatttatttcatctgtggatggaattaaatgttaccaaacaaggacatttaatctatacaacactggcaaaagtagtcatcaatta

SEQ ID NO: 506238 - DNA, 411 bp, Homo sapiens
actctagaggaccccgcacatcctgcactggacaggctgcccctttgacaaaatacaacaacccttcatgctaaaaactctcaataaattaggtattgatgggacgtatttcaaaataataagagctatctatgacaaacccacagccaatatcatactgaatgggcaaaaactgaaagcattccctttgaaaactggcacaagacagggatgccctctctcactgctcctattcaacatagtgttggaagttctggccagggcaatcaggcaggagaaggaaataaaaggtattcaattaggaaaagaggaagtcaaattgtccctgtttgcagacgacatgattgtttatctagaaaaccccatcgtctcagcccaaaatctccttaagctgataagcaacttcagcaa

SEQ ID NO: 506239 - DNA, 139 bp, Homo sapiens
gtctagaggtcccggcagaatcacactcaaactccagaacacggggatagtacaatacgcgtagtgaatagtaatcttcatatctgtacggaaaagcatatcatgagaatagtgactgatacagtgtcacagatactga

SEQ ID NO: 506240 - DNA, 401 bp, Homo sapiens
gcactgtcaaacattttgattttcctgtcaatgtcttgggagctagaccctatcctgtgtctgagtagaggtttccaccaagagtatgattgtcactgacactagggcagaaagaaatcaggcattgacaagaagctgccctttcttttggactgtggcctttacgcttgggggtgagaattgtgccacctgggcagggggacaaaagtactgaggactaagtaagagaacccttggaatggcatgattggtggattctaggaaatgtgataatggatttccaactgaatgcactttttctgcatatatagtctgttatttcaaaccctccgtaatttttatcttaaaagctgtgatgtcatcatcattgtatctggtgaattaagaggaagacctgagct

SEQ ID NO: 506241 - DNA, 138 bp, Homo sapiens
ccagtccagctcaagggtaggtagacaggtattgcacctacatatgagagccagcagcctggtacccatcagacatccaaacttgcagaaggatttgctccactggaaaaagacctagctggagtatttcgtcgacgc

SEQ ID NO: 506242 - DNA, 1673 bp, Homo sapiens
  misc_feature (44)..(44): n is a, c, g, or t
  misc_feature (186)..(186): n is a, c, g, or t
ggacacctcctaagtatgattataattattataattaatgattnctttagcagacatatcagaattttgacatctaattaagtgttgtcccctcaatgtcatctagttttacttaagaagttaatacttattctaatgatgctgccatccttaaagttatttttgaaactcctctccttagaaatnatatcaaggaaggtaataaggtataagaaaatcagctatattatttaattagtatcactttgagaaagcacctggaagtatattctttctttgtctactttttctactactcttggttctgagtaacatttagccatttccagaaagcaaattcaaccctgtaagatgaagagtggttactgttgaagacagtaaaaaggataatccacaaaaaattctcagagaggaccttataatagaaagtgaacatgattaagacttaatttctgtaattttctgaataaggaaacttctgtgattccttagtctttagaatggtttaaaacattgaaagatatgggtattaaaacacctctgaaagaagttgtcactttgttcagtgttatttgatattggacttcgctcttcctgaattagaattacacaacttggtttgctaatacttgtgggaaaaacaaacccaagaaacgaactactttctcaagatgtaatatttgttttattattaatacttttggttgttttgattacttatttcctactctcctgacagataattgatcaaccaatataaccttccccaggttaggaacagttctgccttcagcagtgctgtgggaatgaagggatctttggggctgatagcctatgatgtggagggatctgcactcagctaaataaatacatgctatagataccttgggccaaaataaagtctctcttgataaggtttttctgtgatttcccagagtccttaaccttctctgtctgcaagattatcaggctcccatagccactaactttgagctttgggatgaaaatgacaggattgcccagtgtgccgggttaagcaaattagaggctgcctggcagaacagaaaaactatcacatgaatatttagaatggaagctttcctgaaacactccagatactgcaaagctatctttattcctctctaaaggctataattttatcaacacaaagtcagccttttctttttccacattagtaatgtttctgaagttggatgtgcttagatttcttaaatcagaatgagtgctaggaaatctataacaagaaacctcttttgcttctcccagatttcctttcactaatacgggatagggaggctccttgggtaatgctaacctatgcaaagaagttaccaaatggtggtagttgctagaattaaagacacgttcttggttcacactttgatgtagtgacctgaatttactcttttcctgtgagtattctactctgccctattgcactctcctttgtcatgtggatgtgtgtttatcataggtctttaacgcgtccttcccaagaagacaaagcatacagttgtacatgaagatatcttatgcagtaaaaatgtgaaatttgaacattgctgcacaagtattgtataaaaaaaagtctgtaaagaactttcttatgtaaacatacaggggaataaagacttttatctgttcaaatggga

SEQ ID NO: 506243 - DNA, 259 bp, Homo sapiens
ccccgataccctgacatggtgggttagtaaaaaaaacaaagaaaaaaaaaaaacaaaaaaaaaaaaaaatgataagaaagaaacaaaccaagaaaggaaatcgactggtgtgcgacggcctggatgcatgtagcacctcggaacgggccgatgctcggcctccatcttcatcatccagtgccccctgcctttacactcatctggagctccatgccattcacatgatgctgtcacggcatggtccaagcaaaacctggcc

SEQ ID NO: 506244 - DNA, 183 bp, Homo sapiens
  misc_feature (25)..(25): n is a, c, g, or t
tcccatgatgagacactgatatatngtgtactgttgactctacaaaaaaaaaaaaaaaaaaaaaaaaacccttcagaagaccttgttgttaacgcaaggtcttggagtttcttggaattagggaagaccttccccgggccacggccaattccctcttcgggggggggttccggagctcgaatt

SEQ ID NO: 506245 - DNA, 174 bp, Homo sapiens
agagatggggtttcaccatttggccaggctggttgagaactcctgacctcaagtcatccgcccgtctccgcctcccaaagtgctgggattacaggtgtgagccaccgcgcctggctgattttattttttaaagatgcctgtcactcaggcgggagtgcagtggctcaaacatgg

SEQ ID NO: 506246 - DNA, 551 bp, Homo sapiens
caacgaggatcccgggtacgagcttaaataagtagtcagggtctactgtaccatgccatggaggcttcctgatgcaagagagaacaacaaagcgctcataatcctaaggtcaagagcggttcagcctcacctgatataaataagtaatgagggacttgccccaaatacccctctaactggagtgaagcatccgaaggaatagcttgaagtaccccttggcttctcttaacatttaagcaagctgtttttatagcagctcttaataataaagcccaaatctcaagcggtgccagaaggggagggaaagggggaaatgcgggcaaacacttttccctagcttttaccaaaaacctggttacaaacaaggactaccccaaaaagccatttactctgacaaattcgccaacccgtgccccataagatactaacaaaggaacccttacaaccagtacaaacacggaatgcagacccgtaaaacatgaaatcccaggtaggaccataaaccaataaaacaggttatcaagtgaaacgatagaagtcaggaattatag

SEQ ID NO: 506247 - DNA, 366 bp, Homo sapiens
gcaacacacgtacagagagcgttctgtgtatccagcaggtgcagttactagccactgtaggtatctgagataactagtacaatatccaaatgaagacactgtcatgggtacaatatgtgtgtatagttctatgccattttatcggtcatgtgttcaagaaaccatcatggcactcacacatagagaacgtgtgccatcatcactaaactctccttaaatctacacctctatcacaatcaagcccagaccgggtgtggtggttcatgactgtaatcccagcactttagaatgctgaggcgggcggatcatgaggtcaggagttctagaccagcctaacatggcaaaaccacatctctcataaaaata

SEQ ID NO: 506248 - DNA, 379 bp, Homo sapiens
tgtagtgatctagaggatccctcaaaacgtatcagaacctatttctttatttaaaaaaaaaaaatgatggccaggcacggtggctcatgcttgtaatcccagcactttgggaggccaagacaggcggatcagctgaggtcagttcaagatcagcctggccaacatggtgaaacctcgtctctactgaaattacaaaaattagccgggtgtggtggcacacaccttagtcccagctactcgggaggctgaggcaggagaaacacttgaccctggtaggcagagatagcactgagccaagattgcaccactgcactccagcctgggcaacagagcgagactccttctggaaaataacataaaattcagtagtgtcagggtc

SEQ ID NO: 506249 - DNA, 707 bp, Homo sapiens
ttagtgctgccacactccctgggcatgccaggtgccctggtgcccacccctgtcgagcccctaaggatggggaggtgggggtggcacggaagcttctgtcctcccacattccatgcaccatcccctctgtaatataagcatctcccccctcctacgattgagcagggagcctgcaatggaaatcacatcccagcccctcagccattcatagtgagcaccactcatgccaaagtgtgagcatggtgtgggacactccaagttggagagcaagctctcctgtagcattgcagccgccaccgcccgatgatgccatgttcaagcaccatactagaggagtgctagatgctgagggagcaatcctcacttcctttatgtacaatatgtcgtccattggattagtccccttgaccctagtaacctagccatgcccccgttgcttgctctcctcatttacatagcccatattggcaccccttgtccattaaagagcaacaagagccacacaaaacacttgttgttagctttgagaggtcccacccaaatgacaaagaaaaaacaacatagtgaaaacagtcatcagtaaaaaaaaaaatagaataacatataacatgtacataacaccacaaaccaccattaaaattattagaacacattagtgcgtgagaatacatagatattgccaccgagaaaagtaagcacaagaaata

SEQ ID NO: 506250 - DNA, 287 bp, Homo sapiens
gggtgaacagggagtacaggaggggtctgagcaagcacccttgtggggtcccctgtgttgaggataagcgaggtggaggtgtttcctatcttcaccacctgggggcggcccgtcaggaagtccaggacccagttgcacagggagttcagacccagggtcccgatcttaatgatgagcttggagggtactatggtgttgaatgctgaactatagtcaatgaccagcattcttacataaggtattcatctgtcgacgcggccgcgaatttagtagtagtaggcggccgc

SEQ ID NO: 506251 - DNA, 1096 bp, Homo sapiens
cctgatcatactgaaaacaaatcaaatcatttactgtgtaaattgtattcttaacattttgtatttcagtaggattgatctctacttctctgagacaagggttgtaaaatgtatttgctctcaagcaacttcatccccttcttagtattaggtcattcttcatctgctgtaactcttctacttaactttgagcattcttatcacatgaaaatagttgcaagggtaaggtaattaactattagatcaccttcatttctaacagcaatttattgagctgcttaaaatttaaggctcgtaattagaagtggagtatcgtgagctaaaacgaggagcccagggagacaagacttgcaaagtaagatagagttgcaaatcatcttgtacgcatctcagcctgtgataaataaactcgttctgcacgaccaacacgccaaaacagcgcaatggccaaggggccatacatctcaaattctaagcccaagactacggcaaagactaccgtgctcatcactgggacaaggcaattctcacattcgcgcaaccatttcctatggttaacaacgaataatttccgcattccaattgaaacaagtttaggccccctttttcacaaagcccatctgaggcgcacaacgacccaaacggtgcaacgcaacaccgcaacaacaacctggttctccaattgcactctctctttgggttaaggcggttaggcacaacagtcggacacttcactttaagagcttaccacacttggtcttggaggttacgaattacggaaaagcttcgtccatccaatttttcacagaaacaagctgttccattgatcgggaacaaagtcccttggaacttgattcacctctgccaacctttttcctttcactacacgcggacctttcgcacgtcatctcgtccaacaccttaaccatacatccttcccttgtgttacacacggaactacttgctcctacaccacagtagaagcaaccgccaccacgacaacccaagatcccaacctctccacacaaacacgactgcttgtgcagcacacgcacctcctcgccgcactcactatcgaagaacacctctcttctgc

SEQ ID NO: 506252 - DNA, 628 bp, Homo sapiens
  misc_feature (384)..(385): n is a, c, g, or t
ggaaattgttttattttaaaattaccttcccaacaaaccatgaaacacttggatgttactttatggtttttcattgaaaacatactacattgtagatggaatttctaagtcagacatagaattgatcaaaatctaaggacaatattatgtaaggacaatattaaaaatggatagaaaaagcttcatttggtgaggttaatctaaaggatgcataaccatgtcacggtggacggataaaaaaggtgataaccttgtgcttttattcaactaaggtacttaccaaaaccttaggttttatacaggtgttaagctcccacctggaaagggacagttttctatattacacctaaatttactttaaataactgaagcccaagaaacagnntgtttaaaagaactaacaagccaatagctacataatttaagtaattaaataccactaagacagtgtaatttgatgtctcaaactataaaactgggaaaatacccactggcacaatttggaggtggtaaagcggccatcaagaagttgaccatgcagggatgccttttcagttcaagctcaaattgggggccaaccaaattaagcctttgttaaagttttgggtaggaaagcttgaactcaatt

SEQ ID NO: 506253 - DNA, 551 bp, Homo sapiens
  misc_feature (178)..(178): n is a, c, g, or t
  misc_feature (180)..(180): n is a, c, g, or t
  misc_feature (182)..(182): n is a, c, g, or t
  misc_feature (375)..(375): n is a, c, g, or t
  misc_feature (458)..(458): n is a, c, g, or t
gatagaggagggtgggagaatgctttcaagggtggagaaaagaagttggggagatggcaagaacaaatggagggagacaggaatgtaaaagattgacttggcacagagcaaactaattcagaggagggacatactaggggataatggatggcagatgatatgggtcaaaggatcctangngnctggccttgtgtcatagataaagattatagaccattgattatagttcaaccacctgatcctgaggttggccgtataggagatgcttagtaaatgtgggctgttgaatatagttccacctactgtgtagttgaggaccctcatgaggaaaatgatgcccatggtcctgcagctgccagagaagggattctaatnctgctctttttagttctggtacagttgggattttagattctgtctggtatgcaagagagaccattggccaagtgcagtggctnatgcctgtaatcccagcactttgggaggccaaggtgggaggattgcttgagaccagactgaacaacatagtgagaaccacctctttaccaaaa

SEQ ID NO: 506254 - DNA, 96 bp, Homo sapiens
catcttattttagggctccacattcccttcagttgcagaggagaaacgggaaggtaatgcaaatagccaatgacaccatgctccttgtcccctgcc

SEQ ID NO: 506255 - DNA, 567 bp, Homo sapiens
atgattcttggtcttgctgcatttcgtcgccctttttcaggctgctgtacactgaccgtcgtcaagactggactgcactaatccgtgatctttcacaaggctgcactcaagatagtcattggtaactcgtgtgtatataccagttccacaggtctttgagcactgggaccatgaagttgttagcacaatacatttctggccttgtagcagggttgtataggatgcgaggctccattccaaaaacagggagccgcttcagtgagctgccttttccaactgcaatcaattcattgtttctcgtcaactccacctcggaggcatcgaatcccagctccttgccaaggaggccgtcctggtcctccatggggtccttgatactatcctcgtcacagacccactcctcgcagcaactgcccggtaactttgaccagccgagggttgggacagcccaagttgaggagagatagttcttggggacacagaggaatgcagcccacgccgccatcaatacatgtgcactgatgtttacagttgggctggaactttccccgtattgagtgtgatctg

SEQ ID NO: 506256 - DNA, 597 bp, Homo sapiens
gcttagtgttccctttgtctgtaacagtaatgctggggtgtatatctagtggtgatttttttttttaatcatcatcagtcttaaccttgggtaacggggatgctactgtaaaaaaaaaagctgtgccttctcccctactggttgggttatttatttatgtaggtataacttcatggatatttatttaatcctacaggttaaaatcccttactatcgtcattctggttatctaagtggtcccagattgggccattgagagatcctccaagctaactactgagttctttggcccgcctctttctatcttcttctttttttctttttttggagatggagtcttcgctctgtcaccaggctgggatgtgcaggggctgtgatctcggttcactgcaacctcggcctcctgggtacaagcaattctcgtgcctcagcctcttgagtagctgggattacgggcttgaaccaccaggcccagcctatatatgaaacgggatcatgataatagctttaagggaaaataacagattccacgcagggatgatattcaaacggtttcgtagtgcacacagtttaagcactgaccaataacaaccagat

SEQ ID NO: 506257 - DNA, 395 bp, Homo sapiens
tgcagtgacacaatctcggctcactgcaacctctgcctcccgggtccaagcgattctcctgcctcagcctcccgagtagctgggattacaggtgcccacaaccatgcctggctaattttgtatttttagtggagacggggtttcatcatgttggccaggatggtctcgatctcttgacctcaggatccacctgcctcagcctaccaaagtgctgggattacaggtgtgagagacaacgccccggccgtgattagcgttttttttttttgagacagagtctcgctctgttgctcaggctagagtgcagtggcgtgatcttagctcactacaagctctgcatcccagattcacgccattctcctgcctcagcctcccgcccttctgtcgtcttctcg

SEQ ID NO: 506258 - DNA, 314 bp, Homo sapiens
  misc_feature (199)..(201): n is a, c, g, or t
gagattgtgattatctaggaagactaggagggtaactagaggaaacgtcttcagggcctgtttgctggctatgcttcgagaactggggatccgaaaaattaggggaatttcttcgagaaagacaatatcagcgtgcattatttctgtcttatcttatctagtaagctgcctcagaggggccagtccaacagaggttcannnatttctgcctgtgaagacatcaaaaaggaggcagcccgggcttctaggaagatctgctttgtgtgcagaaaaagggagctgctatcactgccagagatcagtgctcagaactc

SEQ ID NO: 506259 - DNA, 323 bp, Homo sapiens
tgcagtgagccaagatcgtgccggtgtactccagcctggacgacaagagtgacgcttcgtctcaaaaaaggaaaaagaaaaaaataaatctttaaaaataactagttgctgggtgtggtcgtcacgcctataatcccagcactttgggagtccaaggtggaaagatttcttgagctcagaaatttgagaccagcctgggcaacaaagcaagacctcatctctgctaagaataagagaaaattagctaggcatggtggcagatgcctgtagtcccagttagtcaggaggcagaggtgggaggattgattgagcccaggagagct

SEQ ID NO: 506260 - DNA, 286 bp, Homo sapiens
ttatcgcgctaacacaataaaagcctcttcctctgctgttcgtttataatatcccgcacatctttttggttataacaaaaagaagagaggcgactctctctatacaccacttctgtcacaactctgtcgctgccttaataaaaacgatgctaattttgcaaaactatactctgtgttgttgtagatacatctctttgtttgctaacaaataaattgtataaacgggctctttgtaacttgttcaaccacatttaacacaaattcccttagtataaaaaataaaaaa

SEQ ID NO: 506261 - DNA, 124 bp, Homo sapiens
caggcatgacgtactctgaaggtagctgtggccatctgggacacagcctgttccgaatggggctccagggaactgctcagccaggtgattcaccagtgacactgggcaggccagtgtgaaccct

SEQ ID NO: 506262 - DNA, 328 bp, Homo sapiens
ggaaaattaaataatgtgtactaggtttaatatctgggcaatgaagtcatctgtacaacaaacccccatgacagaagtttacctacataacaaacctgcactttcacccttgaacttaaaagttttttaaaaaaatgactttagtgctgtatactaggcattgtgtgacttggcaacattttccacatggagaaatgaagagtctgagactactgttggggggaatgatattcacagcagagtaagggtcatggctggcttacatccagactttgagctggttctgcacatgtgaagtaaggacaggagttctaaataagaagatgta

SEQ ID NO: 506263 - DNA, 454 bp, Homo sapiens
  misc_feature (129)..(129): n is a, c, g, or t
  misc_feature (354)..(354): n is a, c, g, or t
  misc_feature (433)..(433): n is a, c, g, or t
  misc_feature (454)..(454): n is a, c, g, or t
ggaatctattttttgaaactattatgcaagccagtggtactagaaagaatgttttagaaaagaaatatgtacaggtgacccatagctacctcactgtcactaaaatgttttttaataatcttaaagcangattctgcacttcatcggtaaagactattgaattgctttctcgtgcttgtataaagccatgtcacgctgagaaagaagaatccactccgatgaaacgtatgccacgacggtacatgtgcttatgcggttattacttcgcatactgtgattcgaaactttcttgatgtcacgatcataacagttcagcttctaaggtcatcagaaagcgcaatgtgtatttcaccnttgcttttatctcagttaaagaggtgattagcctcttgctagatattaaactatgatacagcaaaggcgtcacttcagntcaacacaatgataaaaaaan

SEQ ID NO: 506264 - DNA, 674 bp, Homo sapiens
  misc_feature (315)..(315): n is a, c, g, or t
  misc_feature (439)..(439): n is a, c, g, or t
  misc_feature (546)..(546): n is a, c, g, or t
atttttaaataaggtaatatcaacctgaattccagcaacctgttagtgaaagtctcgtctgttccatgtatttgcgagaagcacatgtaccgtcccacaagaatattcccattcgatctactgaacttaataagattgagtatttaactacatcgaacactgtagattcagtttagccaatggagttcacgataggatagagtaagaatacatcaagtgtagacaggtagctaacattcttctagcgaaacagtatgcttatatggagtaccctcgaaagtatccattttggctatactcatcacctgcaattanacaggttaccgtgatgagaggagccaaactacagaagacagcaaggtcaaaactacgcgcagacaagtaagctcgactagagtatcttctcaactacgtcctcatagtagtacatttcttcaantatcttctaatagtagtactgagttaaacttttagttacactaagagggagaactaccgattcaattctcatatatgatgtagacttcactctcgtctgtctatatntcctttcactttccttcaagtaggctcacatataaattctcaacttggttaagtgtgattcttgtgcaatttcccgatattttttgagtttcccaagtgtatccttttctcaatttgcgggcagctta

SEQ ID NO: 506265 - DNA, 157 bp, Homo sapiens
ggcacgaggatggcgtgcacttgtaatcctagctactcagaaggctgaatcagataattgcttggaccccagaggtggaaggttcacaagtaaagccggaggttggcaccactgcaactccagcctggggtatactagtagcgagtactctttcctc

SEQ ID NO: 506266 - DNA, 177 bp, Homo sapiens
ggcacgagggagagagagagagagagagagagagagagagagagagagagagagagagagagagagagagagagagagagagagagagagagagagagagaccgcgagctcccgcggcctcgctgggcctggctgggcctgcggaggccccgacctgtgcggccctgctcggccagg

SEQ ID NO: 506267 - DNA, 462 bp, Homo sapiens
  misc_feature (22)..(22): n is a, c, g, or t
  misc_feature (43)..(43): n is a, c, g, or t
  misc_feature (67)..(67): n is a, c, g, or t
  misc_feature (95)..(95): n is a, c, g, or t
  misc_feature (211)..(211): n is a, c, g, or t
  misc_feature (331)..(331): n is a, c, g, or t
  misc_feature (336)..(336): n is a, c, g, or t
  misc_feature (358)..(358): n is a, c, g, or t
  misc_feature (406)..(406): n is a, c, g, or t
cccccccagacctgccgagagncatcatgcatgtgcatgagtntgcccatgggcagacatgtgcctntcccagcacagcgggcagaatgagattntccacactggccccaccctccaagtcgacctctaccccatgtacaactttgaccccacggaggaacaagatgagttggagcaggagctgctggagcatgggcgggacgcgcctctntacaggctgctacttctgtgcaggccatgcagggcaagactactctgccctcccagggcccactgcagagacccagccggctggtgtttaccgatgtggccaatgccatccatgcgtgantgggnctggggacaagcctgggacttnttgattagaggacccattcaagggtggcctacagaggttccccaattnccttgattgtcaagacctaatctgaagatcttccctgccaagacaaaagaggggtt

SEQ ID NO: 506268 - DNA, 124 bp, Homo sapiens
tgcagatatcctgaggaactttttattggtttgcatgatattggacatggaagttttggagcagtttattttgctacaagtgctcacaccaatgaggtggtggcaattaagaagatgtcctata

SEQ ID NO: 506269 - DNA, 168 bp, Homo sapiens
tgacgaccacgtacaggagctgtctataatcgataaaccccgattaacttaccaacccttgtcaattcagcctatataccgccatcttcagcaaacccgtaacaaggaacaatacgtaagcacaatcagtaagcacataaaaacgttacgtctgtctgtgaaacatgt

SEQ ID NO: 506270 - DNA, 137 bp, Homo sapiens
caaagtgccttgtggctaagaagtgggctatggcatttttatatcttagagcggaagcctataatacagtggggcccgctcatacgggatagccattgctaggtttatagatagttaggtggttagcgttaattagt

SEQ ID NO: 506271 - DNA, 222 bp, Homo sapiens
ctgcaaagtattctagaatagaaaaaatctgaagtctgtaaaatttctgggcccgaagcttttcagataagagatactcaccctgataagtagtagtaacagtaatatgtggtgatgagaatattctagaggaaaaccattggaagtgctgcctgctttctggagttctggtctgagggatggagaaagtttgcccatagtttgctttgggaggctgggagg

SEQ ID NO: 506272 - DNA, 319 bp, Homo sapiens
aagaagtcatgcagatcatctagagtcacactgtcatgtaatccttgttaccataaattgcacggttgtcagagtcttcagtctggatctacaggtgggcctagatcaagatctggctcctgtcatccatgggtccgcattccacgcgtgtcctcctccccggccacctctgctcatgcctccgatgatcataactccgccctcttcccctgtgccggttatcagggtcactcatgctccggttctctcctggttcggatgatcctccagactcctccccatatacacccatgctactggggtggtcctgtcggtaatg

SEQ ID NO: 506273 - DNA, 358 bp, Homo sapiens
cgaggtgggcggatcacgaagatcaggagatcgagacaatcctggctaacacagtgaaaccccgtctctactaaaaatacaaaaaaattagccgggcatggtgttggggataacatcacccaacacttcaggaggctaaggcaagaggatcacttgaggtcaggagtttgagaccagcctggccaacatggcaaaaccccgtctctacttaaaagacaaaaattagccaggggttagtagcacgtgcctataggagatcgagaccatcttggctaacacggtgaaacgctgtctctactaaaaatacaaaaaattagccgggcgtggtgttgggcgataacatcaggggctcctctag

SEQ ID NO: 506274 - DNA, 477 bp, Homo sapiens
gtatatttatacccactttaactgcgtgcagatcaggggtggtttatgtggacatttctagggaagcggcagtaactttggggtcatcaggccatgccatggaaaggggcggtaactcccaggtgtgccatggtgatggtaaactggcatgatgcgttggtgggcgtgtcttatggaaggctgcttcctccctgaccctgttttatctagtcctcaatttggtcttgtgtctgagccccacttctggagtcaagttctgcctcttatctccatttctccaactaagatctacaaatggcccatagcacacaaaaagatgctcaacatcattagcctttagggaaatgtaaatcaaaaccacaagaaggcaccacttcacacccacaaagatggctacatccaaaagacagacaggccagcacggtggctcatgcttgtaatcccagcactttcaatacagtcagcaccaccaataca

SEQ ID NO: 506275 - DNA, 383 bp, Homo sapiens
gtctatagacatccgcctacacttggatcgctggtcaataagaccctgccggctgtagagagcagtcgagtcagagaatgtgcggagataatactatcattcgatccgtgtagcattgcctaccgccatcctcgtcgataccgcactcttgactcgtagaaccccctcgcgaccacgactggggtctcgcaagagcgaggggggtaagacatcctccacgatcttaggacattctcactccgtcttcttcctgctcgtggtccctttggtccgcagggtgttcttctcctgcgtctccgttttcttcagccttggccttgcggagaatttggcagtccgattggggcggggtcccttcagagacccacaggccggtgccatcg

SEQ ID NO: 506276 - DNA, 220 bp, Homo sapiens
caggaggatcacttgaggccaggagttcaagaccagcctgggaaacatcacgagaccccaagtctacaaaaaaattaaaaaattcgccaggcagggtggcatgtgcctgtagtctgagctactctggaggctgaggcagattgtttgaacccagaagttaagggtcacagtgagatgtgatcatgccattgcattctagcctgggcatcagggtgagacc

SEQ ID NO: 506277 - DNA, 196 bp, Homo sapiens
aaggatccccgaattcccgctctgtgggatcctattgctggtgactctgtgtgaactggccttctgcaaagatcacagagggcttaagcggcacatgacagtccacgaggtgctgggctggccttcagactggacagggtctctgctgactgccacgggcgggggctctgcatagccaggatgaccgctttcatgt

SEQ ID NO: 506278 - DNA, 510 bp, Homo sapiens
  misc_feature (459)..(459): n is a, c, g, or t
  misc_feature (469)..(469): n is a, c, g, or t
  misc_feature (495)..(495): n is a, c, g, or t
ccgaagcggcgggatgagcggccggcgtgggcggggcgtccgaggagagccaggccatgcaggccacgtgtctattatcctcccagtccacaacgctgaaccatggctggacgaatgtttgaggtctgttttgcaacaggactttgaaggtaccatggagctgtctgttttcaatgatgccagtaaggacaagtctggggctatcattgaaaaatggagagtgaagctggaagattctggtgtccacgtgatcattggggggcacgattctccctctcctagaggcgtcggatacgctaaaaatcaagcagttgcccagagctcagggtcgtacctttgctttttggattcggatgacgtcatgatgccccagcggtggaggctgcaacacgaggctgccgtttcagcacccgtcgagcatcattggtttgcagagtgagggagagatccccttaattncaccgaacgnttacacatttgggttcaaccaggttngacggccggagcagg

SEQ ID NO: 506279 - DNA, 1400 bp, Homo sapiens
aactcaatttttattcttctatttaatacatggatatttggataaattttcctttaaagagtttgcaacccttggaggcaagtgttcctttgggttacgttaacgtattaaagcaacagcaaatgtgaaattctgaatgtgcgggaatgtgacaacgtggactttcgaaacattaatttaatatttcagtgaaattgtgcacacgattatccaattgagttattcatatgtgttcttcgttcttagccttctttaattccaaccttattcttcaacgtgcctttggcagtttgtgcgcttaccagaacaaccgccaagcttcttcttacgattacattctctgtggtcaagtgtgtaaagtgctgtgcacactttctgtggactgtggacagatctataaataaatttacacagagtggcgaaatatctacaatctctcagaggggaattattgtgtggtctgtagggtgagagtgtgccattgtgtccacagataaacgcacatgtgtcccttaagtgtatccctgtggaccacacagagctcttctgtgcgccccacgatatatagaaaactcttgtgggcgccccccaacagaggggggcatgtgtaagatgtggcgatttctgtgaactgtgcggatgttgtaaaccctctccgagagagtgcccctatgtgcagaagggggctcaccctgatggtgggggacaatctcccaccactgcaggagcggagacagcaaagtgttatttattttcacaactctggtgacaactctcttgcgaggcgcgcccgcgactttattttcaagacgggggcgttatattcgcggcccaagacaaaggcggaccagagggggggccacaaagggccccagatattgtcgcctgttggtggtatatcagaggacagggaaggcagttgtcgacacagcagattgtcgacgagcgtctaaactgtgggggtgtaataacgaaggagaaccacaaggggttgcaaaattcttcggaaattggtacctgtgggttttaccagaggcgacacggctatatgggcgcccccaattcccaacgggggaagaaaagaaattgggtggggcggaacaagataacggcgggatctgataaacagccggtttggtgaacactatcagtggtggaataccacccggtggtgtgggccagcacggaacaaatagagggatgaaccagatggattataggagcccctaatacaacgtctgtatcaagggcgcagaaccaccaactatattggacctgggattattatattatccacgcatagcttaacacgtctcacaaaagtagattgtgctccccagacagaaccacctcttttcgatggcggatcaccttcgggtcgcgtaaacacaccaatttcg

SEQ ID NO: 506280 - DNA, 468 bp, Homo sapiens
  misc_feature (337)..(337): n is a, c, g, or t
  misc_feature (453)..(453): n is a, c, g, or t
  misc_feature (458)..(458): n is a, c, g, or t
ccgaagcggcgggatgagcggccggcgtgggcggggcgtccgaggagagccaggccatgcaggccacgtgtctattatcctcccagtccacaacgctgaaccatggctggacgaatgtttgaggtctgttttgcaacaggactttgaaggacaagtctggggctatcattgaaaaatggagagtgaagctggaagattctggtgtccacgtgatcattggggggcacgattctccctctcctagaggcgtcggatacgctaaaaatcaagcagttgcccagagctcagggtcgtacctttgctttttggattcgggttcccagggtgggagagcctntgccaccctcctgtcccccgactcccgtctttcacttggggaaccggccgcattggttgttccacgtgcacaggaagccacatgggctttcccgggaaccgccccgaaggcctttngaaantggggggctt

SEQ ID NO: 506281 - DNA, 235 bp, Homo sapiens
caggatcccctcagggcgcgagctgcagaatgtattgaacgtgacagatagaacaggacaaatgggcacggagcatggaaaggaaaggaaacggaagagtaaggtctgaacttagcaaggtaaattaaggtccacggttcctgagggactgaacgcacagagccgagaacgtcccgtgacattgggtaccacgaagggtgtattctcatgcacaaccgcagctcgcccctgagtt

SEQ ID NO: 506282 - DNA, 807 bp, Homo sapiens
  misc_feature (756)..(756): n is a, c, g, or t
  misc_feature (766)..(766): n is a, c, g, or t
  misc_feature (792)..(792): n is a, c, g, or t
cagcttcccgagtagctgggactacaggagcctgccaccacgcctggctaatttttgtatttttagtagagatggggtttcaccatgttagccaggatggtctcaatctcctgaccttgtaatccacccacctcggactcccaaagtcctttcagtttttttttcactttcaaaaacatgtagaaggcagttcagggaaagctaagacgtaaagaatcttacaagcatgttaagagcctggagaacaggagtggacaccttttgttgtcacggcatatgtgcgggtggtgaaggggaggtaaattagagccatggaaagggaactaagttttcacacttctgttaatccatttctttggaattccagtctattatcctcccagtccacaacgctgaaccatggctggacgaatgtttgaggtctgttttgcaacaggactttgaaggtaccatggagctgtctgttttcaatgatgccagtaaggacaagtctggggctatcattgaaaaatggagagtgaagctggaagattctggtgtccacgtgatcattggggggcacgattctccctctcctagaggcgtcggatacgctaaaaatcaagcagttgcccagagctcagggtcgtacctttgctttttggattcggatgacgtcatgatgccccagcggtggaggctgcaacacgaggctgccgtttcagcacccgtcgagcatcattggtttgcagagtgagggagagatccccttaattncaccgaacgnttacacatttgggttcaaccaggttngacggccggagcagg

SEQ ID NO: 506283 - DNA, 926 bp, Homo sapiens
  misc_feature (926)..(926): n is a, c, g, or t
ccacgcgtccggttttagatagttgatatgaaactgtaaactcactgcaaatgaccacagacctctgaccttctacttttatagactttaatacataagtaatttaaattagggtggtatttatttcactgttttcctatctaaatcttaatttcctggaataataatgttgatattcagcaagaaaactgcttgagtttaagccattttcaaaagaaacttgccttctaactcattgtgttccagaacattaagtgactaataggtactgggtattagtgatggtaagtttgtgttcttctttctggaatgatccatataactgtggggtgcatcagtgcttttcaaaggggctgcatactatagggttaactatgtatattcatgttaagagttaacttgtggtttggctgtttcctggattttaaaacatatacatgtgcagagatgtattcaaatgaaaggaagcatatctttatcaagatgctagtaaaactgaacatcaactataatatttcattggattttttttctttggataatgccgagaaacgcctaatggattccttttaattgggagacgctctcttctgtgtagaacagttgttccaagatagcttagtgttttgtttcctgtttgctgacagaattttgttccagcaggggagtgctgtagagtcagtgtcttaaaaaggggtttaagccaaattactttctaatctggagctattgcgacttgaagtttgtggaagagctaaaatttttgtaaagcctaaattgccgttacttggcccacaggacaattttcaagcggggccgggtcttcacggagacattggtaaagacagtgtgcttaacaacggagggggtgaaaaaaataaaaagggggtggcccaaataaatgattatagatccatcaatatttn

SEQ ID NO: 506284 - DNA, 868 bp, Homo sapiens
  misc_feature (597)..(597): n is a, c, g, or t
  misc_feature (603)..(603): n is a, c, g, or t
  misc_feature (614)..(614): n is a, c, g, or t
  misc_feature (763)..(763): n is a, c, g, or t
agcggctctgcgtgcgccggaggctgccgtggcgggtgggccgcctgacttctcctcccggccagttctcgagcgcctcaccgggcctcgccctgcagcctcgctctcgctggcgctgcgcggcctaggggactgggctgctggcctccgggtgcggggtgggggcaggctccgacctggggcgtcctggccgcgcgagccgcgggatgggggcccgggccgcggaggaggcgccgctgctgtgtcccttggtggagagggcgctgccggccctgcgcggtttccagccaggaagcttcgggaagcctggacgtctgctcactggagatgacacgtgcgtggggtgttggcattcttgttatttaacacgggaaggaggtgacttcgcctgtgatggacttccagtgtgagcactggccagagtgaccaggctgaccagcaccagccctgatccagatgcagaggccaggatgtgggcccagccctgtgccaggaggctggctggaataaaggtacagatagaggcctcaccccctctgggaccactggcactcagggtgtttgcagcctcagagcccacctgcccccagggccacngctgcntctcctgcccngctgtcattacagggatgggcaggctggcatgggggcagccgctgcccctgcctgggtgttgctgtgtattcctgccggccaggggccactgccagggccacgccgtcccctttcatttcccgaatcttaagatctgctattgtggtantctggtggaaaaaaaaaaaaccgcgtggctgtttttgaactgcctggtacctaagaccctgaattcttttccccccccaaggggaaaactctatattggaacaac

SEQ ID NO: 506285 - DNA, 748 bp, Homo sapiens
  misc_feature (643)..(643): n is a, c, g, or t
agcggctctgcgtgcgccggaggctgccgtggcgggtgggccgcctgacttctcctcccggccagttctcgagcgcctcaccgggcctcgccctgcagcctcgctctcgctggcgctgcgcggcctaggggactgggctgctggcctccgggtgcggggtgggggcaggctccgacctggggcgtcctggccgcgcgagccgcgggatgggggcccgggccgcggaggaggcgccgctgctgtgtcccttggtggagagggcgctgccggccctgcgcggtttccagccaggaagcttcgggaagcctggacgtctgctcactggagatgacacgtgcgtggggtgttggcattcttgttatttaacacgggaaggaggtgacttcgcctgtgatggacttccagtgtgagcactggccagagtgaccaggctgaccagcaccagccctgatccagatgcagaggccaggatgtgggcccagccctgtgccaggaggctggctggagggatgggcaggctggcatgggggcagccgctgcccctgcctgggtgttgctgtgtattcctgccggccaggggccactgccagggccacgccgtcccctttcatttcccgaatcttaagatctgctattgtggtantctggtggaaaaaaaaaaaaccgcgtggctgtttttgaactgcctggtacctaagaccctgaattcttttccccccccaaggggaaaactctatattggaacaac

SEQ ID NO: 506286 - DNA, 210 bp, Homo sapiens
cacctgtgacgacgttccatacttcgtgaatagcctgagtcgtaatatgccggtaggagcaggctccaacatttagtctccatcaaccgttgactgggaagtagcaacagatcattctgatttaccagcaggtggagacataggaccaccacctggtgccagcgcaggaacataccagacattggccagcaagcaaacaaaaattcctca

SEQ ID NO: 506287 - DNA, 368 bp, Homo sapiens
cgcggttactgactacgcggctcatgcagcgacatttacaactaactgagcacagccaaatatagatgccttacatggtgtatcgcgaggcagactctgactatgtcacccaggacggaggacagggcatagcctcactgcagccttgacctaccaggctagaccaatcattccacttcaccctcccaagtagctgagaccacagggacacaacaccacaaccagctgattgtcgtactgactgtatagactggatctcactatgatgcccagactggtcttgaattcctgagctcaagcagtcctgccacctcagtctcccaaagtactgggattacaggcgtgaggtacctcgcccagccgcgtag

SEQ ID NO: 506288 - DNA, 722 bp, Homo sapiens
agcggctctgcgtgcgccggaggctgccgtggcgggtgggccgcctgacttctcctcccggccagttctcgagcgcctcaccgggcctcgccctgcagcctcgctctcgctggcgctgcgcggcctaggggactgggctgctggcctccgggtgcggggtgggggcaggctccgacctggggcgtcctggccgcgcgagccgcgggatgggggcgcgagccgcgggatgggggcccgggccgcggaggaggcgccgctgctgtgtcccttggtggagagggcgctgccggccctgcgcggtttccagccaggaagcttcgggaagcctggacgtctgctcactggagatgacacgtgcgtggggtgttgggtaagttggtgcattggagctggaacagggtcaatcctccaatgtaaactaagccctcctgtgcaaaatcttaagtgactggagggaccagtcggtcttgtgttcacattgaggctagaagctgtctccaggggagtaaaaaccggattatttaggtcttcaacaggacaactgcccctagaggcgttgcaacttgttggctgccgtgtcaccatctgtgtcattaagtggcagagattacagaggctatgtctaacgctcagcgtctgcccgtgaacgtttgactgtttgataagttctcaccactcctgtttggtggacaaggcaatctggtttcctccgtggaatacag

SEQ ID NO: 506289 - DNA, 158 bp, Homo sapiens
ccctcgcgacggtgttatcacagaaaatgaatgaaactaaactcctctctctcatcatatacaaaaatcaactcaaacatgcattacagacttaaatgaaagaccccaaactatagaaactactagcaagaaaacctacgaagaaacacttcagatat

SEQ ID NO: 506290 - DNA, 272 bp, Homo sapiens
tttgaaattactgttcttgtacacaggtcattcccaggttctcagtcagaagtccatagttctctgttagcaaagtatgaaaagtgaggctgggtggcgtggttacaccttgcattccctcactttgggagggcggggcggggcgatcatctgaggtcaggagttctaaaacagcctggcccacatggggggaatgccatcttctactaaaatacaaaaattagctgggtatggttgtaggtgcctgtaatcccagctactcgggagagctg

SEQ ID NO: 506291 - DNA, 391 bp, Homo sapiens
cactcaccacaccgacctgcgatgagaaggtcgtctggactgtgttccgggagcccattcagcttcacagagaacagatcctggcattctctcagaagctgtactacgacaaggaacagacagtgagcatgcaaggacaaatgtccagcgcctgcagcagctggggcagcgcacggtgataaacggtcgggccccggggtcgccgctgccactgccctggcctcctgctgggccccaatggcctgcgtcctgctggccggcttcctgcgatgatggctcacttctgcacgcagcctctctgttgcctcagctctccaagttccaggcttccggtccttaggccttcccaggtgggactttaggcatgattaaaatatggacatatttttgg

SEQ ID NO: 506292 - DNA, 888 bp, Homo sapiens
  misc_feature (617)..(617): n is a, c, g, or t
  misc_feature (623)..(623): n is a, c, g, or t
  misc_feature (634)..(634): n is a, c, g, or t
  misc_feature (783)..(783): n is a, c, g, or t
agcggctctgcgtgcgccggaggctgccgtggcgggtgggccgcctgacttctcctcccggccagttctcgagcgcctcaccgggcctcgccctgcagcctcgctctcgctggcgctgcgcggcctaggggactgggctgctggcctccgggtgcggggtgggggcaggctccgacctggggcgtcctggccgcgcgagccgcgggatgggggcgcgagccgcgggatgggggcccgggccgcggaggaggcgccgctgctgtgtcccttggtggagagggcgctgccggccctgcgcggtttccagccaggaagcttcgggaagcctggacgtctgctcactggagatgacacgtgcgtggggtgttggcattcttgttatttaacacgggaaggaggtgacttcgcctgtgatggacttccagtgtgagcactggccagagtgaccaggctgaccagcaccagccctgatccagatgcagaggccaggatgtgggcccagccctgtgccaggaggctggctggaataaaggtacagatagaggcctcaccccctctgggaccactggcactcagggtgtttgcagcctcagagcccacctgcccccagggccacngctgcntctcctgcccngctgtcattacagggatgggcaggctggcatgggggcagccgctgcccctgcctgggtgttgctgtgtattcctgccggccaggggccactgccagggccacgccgtcccctttcatttcccgaatcttaagatctgctattgtggtantctggtggaaaaaaaaaaaaccgcgtggctgtttttgaactgcctggtacctaagaccctgaattcttttccccccccaaggggaaaactctatattggaacaac

SEQ ID NO: 506293 - DNA, 1516 bp, Homo sapiens
gtgcaaaagtatggttgatgctcacttgtgtgggagggcgacaccactacggatggaacacgccagacaacgcccgcgttgacaacttttgcacagacagctgattaacatgtcacctgtgtgttggtggggggataattaattattacactgtctacagggcgctcgacagccccatggtgttcttgctccgcactgttgatggatcactacacagcgaattgtttatgtactaacgcgtctttataggctggtgcgctcgcattaaacgtgttgtgcttctgtcactacgaatgtacgcataaacggctgtgatccctttctgggtcctgttttgtggggggttggagtcgatgagcccgtccttgtcgggcccgtctcttgtggtgagttcacatcacgtcccactgggacttgtgtgacacgtgttgctgttccaacgaccgcagggcctcccatagatatgcttgcgtttgcaacgagagaagtttgtttcgcttagatgaggattgttgtgttggtggagcgaaacaaagttgttctaatgaagtctggtctcggctcccaatagacaacagcccgccccttccatactgtcacgttgtgtgtcctacgacggaaactacggaagaatgtatgttgtcgtcagaagtggccccccccctgtgagtgtcatttcacgacctgggtggagtacacccccggcgtggatgtattgcttcccaccctcgctgagtgtggtgttcttcccctctctaacgcggaattgtctttcgttgcacaacaattgtaggcgcacggtgattcccacacgggatattcgacgacacacacaagcgtgggaaaatatgtagagaccctatgggaaatccctctctgtggtgttagaccggggcctccccctccccgatggggttacacccaccagagttcgcccttgcaacattgtttgtccacagagaactcgtgtggatagtcgtggttgccagaccccttggcatagagcgccttttacagtgccactcgcagaggagacggcgatattatgtcaccacaaagacccccggagaggtgtttctcaccaccacgagcggcttttcccaatgtatctccatctcttaaagatagggtgccccccctgtagagcccatctcttgtcgtggccagatttcacccttggaactgtgccaggaagtgtgtacataacatctcagacgtggcccgtcaccagaatctcatctccaatagggtatcagcttgcgtcctcgtgccagtgtgaaaccaccaacttcttgaacgtgtatgaaagagacgcccagatggtttgctagccatgtctccacccgatctccagccccatcccaaatgcccggcgtttctacccctggtgccagagaaatagtgataccttccacattttgggaaacatgttaccgtgagaccccggggagaattttctggcccttttaggtgtatcacagaccagaatgtaataaaaaatggtgaaggctgttta

SEQ ID NO: 506294 - DNA, 259 bp, Homo sapiens
ctcgaggccaagaattcggtacgaggaggattcattctccagtgcaatgctgaatctgattccacgtcatggacgtgccatgtacaaacagtgctgaagataatatattacagagatgatgtaaagtcgttcagtcgtcgtattaatcatttgttcttccatatcgatcatgattgaggattttccaattttatggcctggagtgaagtgaccgatcctgataaaggatttatagatgatgatcaagttacctttgatg

SEQ ID NO: 506295 - DNA, 369 bp, Homo sapiens
atctacacggttatcattgcactcatctactcagtgcctctcgtagtggtttagagagccctaatagttaggcttgtattcatctgttgtggcttcttggcatgtgccttccgatagcatgtgtacagcagtcacattctaatagcccatgtacatcttgtcattgatgctggtgggcacttttagaatcatgtggtcagagtccttgaacagcaggtcgttcccatgagcagtcttaaatagttggaactcattggacatgtcttgcccatagtgttcctggtattgtttcagaagcttccaaatcaagtccttcgtaccagccctagttgtgagcacggcggtatgaaaatgtagctggggcttggt

SEQ ID NO: 506296 - DNA, 1260 bp, Homo sapiens
  misc_feature (296)..(296): n is a, c, g, or t
  misc_feature (310)..(310): n is a, c, g, or t
  misc_feature (330)..(330): n is a, c, g, or t
  misc_feature (455)..(455): n is a, c, g, or t
  misc_feature (501)..(501): n is a, c, g, or t
gcggtcattgtgcgaagaccatggttgtgggagttggcactactttatgcggggtggcggtgcgagagagctgggaggcgggatctggtgcgcgccaggcgctgcgacgcgcaaacttgggctccgcgcttcccggcccggctgcggagcccggggcgcccggatccccgccatgtctgcgatccaacctggcagaaggagtacaaatgcggggacctgggtgttcgccaagatgaaagggtacctcactatctggccggctccgttataagaacgacgatgcctgaggcttgccngtgaaatcaacagncaacaaataccaagtctttnttttcgggacccacgagacggcattcctgggccccaaagacctcttcccttacgaggaatccaaggagaagtttggcaagcccaacaagaggaaagggttcagcgaggggctgtgggagatcganaacaaccctactgtcaaggcttccggctatcagtcctcccagaaanagagctgtgtggcagcagcctgaacccagagcccagaagcatgccagcagtggtgcacggtgcatcacagcacaggggcaatgccagcagaggcagccagcgcacgcaggacagggcacagctggtcattgatgagccagccaaggagaagaacgagaaaggagcgtagaagaggagagcaggggacattgctggcaggactctcctaaacgtcccaaggaggcagaaaacccgtgaaggagaggagaaggagagcagacaccataggaggatagagaggaccacaacctatggaggtggaaaagaatagaaccccatctgagcccggaatctggccggaggcatcacaacaagaggacgaagaagagagaggatgaaagacaggacaaggaaacaaaagacaaatgaagaaaacaaaggaatcagaagaacatgcaaccctgaagacaacaaaagatacaaaaaggatgcaaacaaaacaagaataccatgctgccgaattagagaagacaaaagaagcaacatggacgttagaaagaaaaaaatgtgaaacaatataccaacacacaaaaaagaaaatacaaataagacaaaataacacagaacaagaacaaacacaagaaaaatgaccaaaaagtaaaaaaggacaaacatggaacagaaagtaagaggacaaaaccagaagaggcaaacaaagaaagaacaaacaagaaaagaaagacaagtgataaaacaaaacaaagaaagcaaaaagaaaaa

SEQ ID NO: 506297 - DNA, 143 bp, Homo sapiens
  misc_feature (46)..(46): n is a, c, g, or t
ggtacctagaggatcccctacgacgttggtcagtcatcacatctancagatgccagagattagagcgcatgacaagtaaggacggtgtcagcgtctaagaggtttacctcccaatgaagaaataacatcacggtaacgctgca

SEQ ID NO: 506298 - DNA, 156 bp, Homo sapiens
ccaggctctctacctggtcaggtaggcagcatctacttccttcttcagcatcacaacctcaggaggcagcgggacagcatcgggggggaacggggccgcctgaggtggtggatgtacggctcgaacaagggctccaggttctgcctcacagtctgg

SEQ ID NO: 506299 - DNA, 299 bp, Homo sapiens
  misc_feature (1)..(2): n is a, c, g, or t
  misc_feature (52)..(52): n is a, c, g, or t
  misc_feature (105)..(105): n is a, c, g, or t
  misc_feature (111)..(111): n is a, c, g, or t
nngaactctccccctgcctccctgtgagccagggagtgtgtgaactgcggcnacaagccactccactgtggcggagggacaggacaggccactacctatgcaacnctgcgnctctatcacaagatgaatgggcagaacaggccctcatccggcccaagaagcgcctgattgtcagtaaacgggcaggtactcagtgcaccaactgccagacgaccaccacgacactgtggcggagaaatgccagtggggatcccgtgtgcaatgcctgcggctctactacaagctacaccaggtgaacc

SEQ ID NO: 506300 - DNA, 466 bp, Homo sapiens
tagagtgtagtataacttgctgtatatcaaactaatttgacaagttttcatcctacagcctcacatcatgtaattaataatttgcctgtttattgatgacctaatagtgattctatattattaataaaagctaatgggaaaaggatccctgattaagctgatgactagacctacaattaattttcctgccaggtcatcatgaagtcatagtaccagagtattaaaagcatcatgtaatcattttcatttcatcaagatctcatcctttaaacaggaatacgttttcaggcatgtcatcattttgcatgtgcaatccatgtaaatgttgcataatcatgctgtttcattcatcatttcagagtttcaagagattcacttaattgccttttagcccacgtctattatgtagtctatttgccactgtacttaaaaaaatgacattaaaagcaatagttcatgtagagaa

SEQ ID NO: 506301 - DNA, 648 bp, Homo sapiens
ccccctctccgaggcttttctagtgtttggggaaatcgggtgaggtcccaggaaaaaggtaaggggaaccctaaggcaggggtgtaactctttggccctggcggccagaaaagcctataataagggtttgggggccccaaaatgggggctgcagtcagaagaatctgggcacctggggtgatgatttccaaaaagggtcctagggtccagggtggcatttctcccgcagccattgaaaaatttgtgggtcctgcaggcaaagcacaagccagaaggtccgtttgaaactcctaggtaatttgtccccgagcttcatccgaatgggccaggggggtggttttccacttcctcggggaaggggccctgccaaagccctccctgggcacattttgaccctttgtaggattggaattagcaggactgggctatttaaagcaccagtttggggtgggtggggcccctgttgaccccctcctccagagcagccagcccagcccggggaaaaagagggatttcttttcccttgggattcacagcctttgaagagtcaagctccacttgaaggtcactcagtaaaatcctttcaaggggttttaaattgttttgacggccttttttggtagaaaaaaaaattgcccttagaattta

SEQ ID NO: 506302 - DNA, 1255 bp, Homo sapiens
  misc_feature (1255)..(1255): n is a, c, g, or t
gctcgagttttttattaagaacatagagaggtcacaacgcctatttattccccacatcgtcactgccctgacacccctgtgtgtgggcttggcacacacctcaccgccatgaccggtgcagggccgaggcggccccgtcctacggctcacctacgaatacacggtactggcgccaacctcaaagacggccaggagccagggaagccccaggatgtctccgaattgacaaccctgctgctgggaccactggagccgtgggactcgtctgccacccccaaggcctcaggaacccaaacacggctttgccatgacatgtcacaggatactcaagagcaagcatacacatgggtggcctagtacaacgggagccaaagggaggagctgacaaaccttagagggttagtcccaagtgaccatccaacccagagcacaaggacgggggaaagcattccacatagaaggagacacacaagaggcccacattggaaaccctaccaggggcacacagaacagggagcccccacgagaagggagaacaacaaagaaaagaaaaaaacagggccacaaagaacgacctaaacccacttgttagcccaggggggactcaaaagaggagggccctggcgcaaacagaaacgtgcacaaacggatgtgacagcaccccatgagcagacccatcaaagaacagagcaaaggcaacacaaagacaaaaacatatgaagcgcgtttgacgcaaagagaaagtgcgtcaacaaacaatagtattcgtgtgaacaacagaaaagtagcagcacaaaagcgtgtacaacaaaaaagaagtgtagaagaatacaacaacatagggtacgtaataatagcgcacccacaacggaaacagaatatatatgaacaaccgcagggaaaagagcaaatgcatgaatcgaaccacgaaaagagacaaaatctcataaaagtagcacagccacaactcaacgcagaagatacgccacaaaaaagcaaccaaacaaacaacagaagagcgaccaagagagagaaacgaccaacagggcaaggaacgacagtagaaacacgagcaacggcaccacacacaacaaacaaagacagaggcccaaccactagccaacagaaagcataagcgcccaaggaacgaagggaaccgaacccaagcagaaaaacacacgagtagacaccaacaacacaataggagaccgaagaacgagagacgagaaacaagaaccaccaagagacaacagan

SEQ ID NO: 506303 - DNA, 1409 bp, Homo sapiens
gcagcagggtgccagagcgagtggaaccggatgactggacctccacgttgatgtcccggggccggaatcgaccgcctctggtgttaggggacaacgttttttgcagacctggtggtgcaattggctagacttgccagaactggagaagtggtggggagaagggtgagactgggtggtggcactgtgaacccaaaggacgagaaatggccatgcccaggatgctgggccgcaggttatgccctgacagcaaacatctttaacgaacgttcttgcgtagttgtgcgtgctgaccgtgaccggctgctgacacggagaagccaggctgggtgacacccatggtccctgagatcccgaacctggccgctcacagaaggtcaagaagcggagcctttccaagggctctggacatttaccccattcccaggcaccggggagccacaggcgaggggagaatccccccacaagcctgcccaaggacctggaagcactcaccctcagcgattcgatattaacacagctgtttgggtctcgacatcctagagacagaacgttgactgagcctgaacgggccagggcccagttgctgggccctgcggcacgcaggcacgcgctgcgccgcccggccctccacacccacccccctcctccccacgacacccggacaccccaaccccgcccccgcacccgcacgccgccgccccgcccccggccccccccgccagacgacacacacgccactccccccacccaccaacccccaccccaccgccacaccccgcgacccaacaccagcgcacccacaccccaccccaccctcatgccgcgccgcacccccacaccaacacacccccacaagcgccaacacacacacaccccaggcacgcaagcgcccagcccgcacgccgcagtcgcaaccaacgccacaacacccccccacaacgccgcgggcggagcgacgagagcacgccggacggcacgacgagcagccggggcgcagaagcggcaagcaggcggagcagacgggacggatcgagagagcgagacgcgccgaggacagccgagcaagcgcgcacggcagcgcacacggcccgagactcgaggagacggagggagcgcgggagaccagcgaagaggagcaggggccgagagcgcgacggcgcggggggggggggacgggcgggtggggggggggcagcgcccgcgtggcggcccgggtgcgatcgcggcggaccggcaggagccagggccgcagaccgcggggggacgaggagagaagggcacgcggcgaccacgggcgcgacggaggcgcaagagcgagcggccccgacgccgacgccgcggcgcggagcaggggcgcacgcccgcgccgcgcacggcccgacagagcgggaggtccgcgcgggcgccgc

SEQ ID NO: 506304 - DNA, 236 bp, Homo sapiens
tgacgtgtcgacactcagaggatccctactttcaccggcaggaatggaagtagatagcacacagacaggattatccggttctgaactcagtatcacgtaggacttaaatcgttgaacacacgaacctttaatagcggctgtcgaccatcgggatgtcctgatccaacatcgaggtcgtaaaccgctattgttgatctggactctagaataggattgcgctgttatccctagggtaa

SEQ ID NO: 506305 - DNA, 431 bp, Homo sapiens
  misc_feature (28)..(28): n is a, c, g, or t
  misc_feature (93)..(93): n is a, c, g, or t
  misc_feature (111)..(111): n is a, c, g, or t
  misc_feature (115)..(115): n is a, c, g, or t
  misc_feature (227)..(227): n is a, c, g, or t
  misc_feature (231)..(231): n is a, c, g, or t
  misc_feature (305)..(305): n is a, c, g, or t
  misc_feature (327)..(327): n is a, c, g, or t
  misc_feature (410)..(410): n is a, c, g, or t
  misc_feature (416)..(416): n is a, c, g, or t
ttagaggaaagtggtgaggaggataagnagaggtgatttagtgatagtgatgaggatcctggcagacctggacatcatcacacattcctgaanctggtatgaggcaagaancagncctctctatacaagacctaaactcttaaagaaatgatatgtccctttttagcccttaaggatgcccattatgccatgctcttggtacacctacatagatgttaaggccaggnggcncttgttccattgtatatagtggtgcaagctaagttagttgacccaatactcccttcccagagtctccagctgtntttatatccccaactacttgantattgtttgatggacatttatttccccaggggaattcttgcattttggtatatggttccctccagggtgggccccaaaaaggntttggnttttttttttgggga

SEQ ID NO: 506306 - DNA, 242 bp, Homo sapiens
ctagtggcacgtagaaaagaacagtagatttcactagtcctatagattttgcccaagcagaagtagcacaaggagatgctaaagttacagagtacaaatgtatatataactaaacctacttcacgtactaaaccttttttttttttggacaacaaattctcgcccggttggtccaggcgggaattgcaggggacagccctcagctctcaccgacacccctccatctctccaggtttacaagc

SEQ ID NO: 506307 - DNA, 106 bp, Homo sapiens
gattctcagagagagagggaaggatttgctttgtagccccagaggagattttgtaggacccatatcttaggggcaaatgatagatgtaggacccctgttcctctta

SEQ ID NO: 506308 - DNA, 241 bp, Homo sapiens
ttatctagaggatccttcatgtcgagccccttcatgcatctccaaacaaacccattacctcaaaagaggaagaaaatgggccaggcgcggtggctcatgcttgtaatcccagcactttgggaggccaaggcgggcagatcacgaggtcaggagatcgagaccatcctggctaacacggtgaacacccgtctctactaaaaatacaaaaaaattagctggggatgaaggccctcgacatgaa

SEQ ID NO: 506309 - DNA, 572 bp, Homo sapiens
ctcgggaacccattccaggaagctcctgaaggaaatggtggatctcatcggatctatgagtgaaagttctgcaggacctgtaggaggctcgcctggacagtctgggccagtggaagggccttggatagggttcaaggaggaggggccctggggaagcaagaaggaggctctgtgctctctggggtgaatcccatttctgacggctaaccccaggagaaactgaacaatgccgtctctggctgggcacttgtgtaaattgtttatgccatcctgtgactgtgaatgacagtactttagtcccttaaaacctatgtacaagcaggacatgaggggcagacgggacagagaggaggacaggaggggttcatcggttgactacggggatttctcagaatcgttatgttgtttggcacaggccagtactttcccagataatgtgtctgtgttttgtatgtaaatagatcatttatctactacagggctatagattcagcccaggctgtagcagttcattcctgggtcagaaacccaggttgaaattcaccaataaaaagatttaatatccaggaaaa

SEQ ID NO: 506310 - DNA, 154 bp, Homo sapiens
cacaagagacaatgaccctatggagctttaattttaaatgcaagtttggtaatttaggacctgtgggtttgttaggtactgttaagcacttaataaacttaaagctaccatctccgtctcttctcttgtacagtcctcgtctcgttctcttgta

SEQ ID NO: 506311 - DNA, 286 bp, Homo sapiens
actggtccgtgagttgtacaggtctaattgtctgggtcgcctaggaagtctggtgagaatagtgttaatagtcattaaggagagaaggacagagaagtaagaccgagggcgtctattgattgtgatagtaagggtggaaggtgatttaatcaggaatgggaggtgattcctacagggggttgtttagatccacgtaatcgtgacaagaataggcaggtggcagtgctagctaagggctagcaaataatgcaagggccaagcatgaagtgcaacaggtcaaagcaat

SEQ ID NO: 506312 - DNA, 170 bp, Homo sapiens
ctaccacggtgatcacacgtgtctgatatactcttgtgccacgttctccttggggtcagtactgcaagactgcatcagaatgctttcagagagtcttgtggactttggggacgtgtcatctgggtgaaatgctgggggctaagggaatgagcccgaattccttggtgact

SEQ ID NO: 506313 - DNA, 247 bp, Homo sapiens
cctctcgggcttaacaggtgccatctgtgcctgtcacctgtcgttcatgaagatgggggttaccgtgctctccacacacgagctgacctctctgctcgagaaaggagctggagcagtagccagaacggaggcctcagacgcatctgtgagcagaaccaggctcactgcgaggaccatgcgtgagtggtaggcccctgtggccctgtggatgcatgagctgccctgtgatggggcctactgtgcttgc

SEQ ID NO: 506314 - DNA, 122 bp, Homo sapiens
agcgggggcagtttcccgaccagagagaacgaacgtgtctgcgggcgcgcggggagcagaggcggtggcgggcggcggcggcaccgggagccgccgagtgagtcgaaagataaaaaaaaaac

SEQ ID NO: 506315 - DNA, 218 bp, Homo sapiens
  misc_feature (41)..(41): n is a, c, g, or t
gatccggctacaacgccaaggcgatcaagttaagaagctgngtttcctctccaacgacctggttatgaacaggttaatttcatcctttgccacgtgccctctcgtgtcagaagaagataaacacgccatcatagtggaaccggagaaaaggggtaaatatgtggtctgttttgatccccttgatggatcttccaacatcgatcgccttggcgttgtag

SEQ ID NO: 506316 - DNA, 393 bp, Homo sapiens
ccagtcgcaggcatctctactgatgggagccacacttaacatcagtttctaccaccacttcattcccaaagcacagcttcacagctgtccacgtctagtcttatcatgcagtacttctactcctactcttagctgaaaccgttggtacttagcgcacactcactatattagacatctcatagcattacaactggattggctttctccctctctgcaccatcttcctcttcctctcctgtagcaggagtgtctagttatatttctcagcctggtgtgctgcatcctttggtcattccatcagtcatagcttttacttctattaatccccaagcagcaggacctacttctacacctttattaccccaagtacttagtatcccacccttggtacag

SEQ ID NO: 506317 - DNA, 102 bp, Homo sapiens
atcaagtgcaaggctgcagttgcttgggaggcatggaaagctcatcatccatagaggagatagaggtggcacccccacagctcaatgaagttcgaatcaaga

SEQ ID NO: 506318 - DNA, 119 bp, Homo sapiens
tcagtgcggcaagtacctgtaaacctgtcggggatgatgaaactgagggtatcgctcgtgttcatctgagcgccctctcgcgcgggcgcccgttcccgctgccatgcccgggcattggg

SEQ ID NO: 506319 - DNA, 606 bp, Homo sapiens
  misc_feature (325)..(325): n is a, c, g, or t
gatgtatacgaaggaagcaaaaccaggcccccacaccccccctgtccaaagaggccttcgaagggggataatcccatttatacccccagaagttttttttttggcaggatttttttgagccttttaccaatccagcatggccccaccccccaattaggagggcattggcccccaacagggatccccccgttaaatcccctaaaagtccccctcctaaacacatcggttttattggcatcgggggtatcattcccctgggctccccatagtttaatagaaaccccccgaacccaaataattcaggcccggcttattccaattttanggggtttttattttcccctcccccaagcctcagaggatttggggtttcccttccccatttccggggggatttaggggtcaacattttttgtagccacggggttccccggacttccggtcattatggggcccaactttcccccaaattggtttcaccccccaaataatatttccctttacatccaaacatccctttggttttgaaccccccccctgaaacgggcattttgtaaatggggtttgactttttttgtatgttcccctctattgatgggggtttta

SEQ ID NO: 506320 - DNA, 131 bp, Homo sapiens
ggtgatctgcctgccttggactcccaaagtgctgggattacaggcgtgacgaccacgcctggcctcaaaactttaatttgtgttcatattcatgtaaactacttttggataatatgacaaaccaccaaata

SEQ ID NO: 506321 - DNA, 1241 bp, Homo sapiens
  misc_feature (764)..(764): n is a, c, g, or t
  misc_feature (959)..(959): n is a, c, g, or t
gtatgttggttgtgttcgttggtatgattgtttgtttttggtgtttgttgctcggcggggggtgtggtgtctgaggtgtttggcctccggtcctgggagccccccccccgtgttcgtcccctaggaagcccggggtccttcttctctctcggctttttcctttgccccgggcccggtacccttttttcaccccgggacccgctttttggccctttgcgctttttttgggccacgattgggacccaggttgtcccagaaagcccgcgtggtacccggttccggatttccccgggtttttttttcgccccccgcggttctttcccagaaggaaattgggaggaaagcttcttttaagatggcccccaggctcccctagggctccccccaggtgtccccccaaagcattggcaaagcatttcgctccgttttctactccctccttgtgtccacgccaggtgatttttgggctgtgaataaccgggcccctgggaccccttcccccttccgaggtgtttccacccagggttctttgctcttctcccccaccaagcgtttccaggatagcccctagttgttacctgggggggaaatttttagcccctttgtggcgttcgcccccaccccccttcctcgtccaccctcggaggccctcccaccccctcgctctgtttgagagcccctcgagtttggcttaaggggagaatatgggagaagaaggagttttccacactcgcgcctctggccatatctcttgtgttgctcgnctcttggtttatgagatcacataataggctaaatgagaattatggccacgcgggagagctatatttttttgaaagagatgagtgtgacctaaaatgtttgagaagacccacgctttgagagaatcctgttaaaaaatgtgagatttttttaacctctccaccctattaaataacttgttgaattgtgggaaggtnttgttggaaaattcacaattattgagtgagaaaacccattcttttttggtaaatgttggcacaaactctggggaaatttaagtggccaaatacacattctccccgccggcccttttgttggttgccctaactgccaggttgtctgggagaatatgagtcccatttggttgatgagcctttgactgccggttttgggacccttacctcttcctcccttatgccccaaattgcctgtcttgggtcctattccaataaagttatttttcctggtttccaaaacca

SEQ ID NO: 506322 - DNA, 692 bp, Homo sapiens
  misc_feature (120)..(120): n is a, c, g, or t
actataattcaatttctggcggtctcctgtctattggcaggaacaggcagcattgatccagcagccctcatgcaaatcggtgtcattccaacaaatgtccggcaacttatgtattatacntgaggcctcatcagcattcattgttgtgaagttaatgcctacaattgactcgccgattagtggatgtaatataacatcaatttcaagctataatgcaacagtgacaaaactcctacagccgatcggtgagaatttggagacaattaggaaccagttgattccaactcggaggagacgccgatttgcaggggtggtgattggattagctgcattaggagtagctactgccgcacaggtcactgccgcagtagcactagtaaaggcaaatgaaaatgctgcggctatactcaatctcaaaaatgcaatccaaaaaacaaatgcggcagttgcagacgtggtccaggccacacaatcactaggaacggcagttcaagcagttcaagatcatataaacagtgtggtaagtccagcaattacagcagccaactgtaaggcccaagatgctatcattggctcaatcctcaatctctatttgaccgagttgacaactatcttccacaatcaaattacaaaccctgcattgagtcctattacaattcaagctttaaggattctactggggagtacctcgg

SEQ ID NO: 506323 - DNA, 302 bp, Homo sapiens
tccctccattaaaagggttaaagggctccccccccccggaaaatttttttttcccccaaaacttttaaaaaaaaaaattttttttttaaaaagggcaaaaggggaatttttttgggggcccaaaaaaaggggttttttttaaaaatttgggtttgttttaaattttttttaaacccccaaaaaggtttttttaaaaaatttttttttttttaaaaaatttttcgggaaaaaaattttttttttttttaacggggccccccacattaacccttttttttgggggttcccctaaaccaattgaa

SEQ ID NO: 506324 - DNA, 1070 bp, Homo sapiens
  misc_feature (74)..(74): n is a, c, g, or t
  misc_feature (77)..(77): n is a, c, g, or t
  misc_feature (144)..(144): n is a, c, g, or t
  misc_feature (285)..(285): n is a, c, g, or t
  misc_feature (405)..(405): n is a, c, g, or t
  misc_feature (431)..(431): n is a, c, g, or t
  misc_feature (459)..(459): n is a, c, g, or t
  misc_feature (469)..(470): n is a, c, g, or t
  misc_feature (472)..(472): n is a, c, g, or t
  misc_feature (474)..(475): n is a, c, g, or t
  misc_feature (481)..(481): n is a, c, g, or t
  misc_feature (490)..(490): n is a, c, g, or t
  misc_feature (548)..(548): n is a, c, g, or t
taaaactcagtaattcctttattttggatttaaaacttaatcacaaccatcgaaggtggtaagaaacagctganagngtgtacttaaaaatactgaattgacagctacattgaatgcagggtttcccagggtagttcttatttngtcacttactccaattacattcaaggtcgttatgcctcatctttttcctgagctgtggcagctctaactggggcacccagagaagatacataccaggtaatctccacttctacttttctggtagcttggccctggcaaaantgagccccacaatctagaaagtaggatgctaaacaaagttgaatcaacatatctttttagaaaatatcaggttagagaatactcctgaggacctgtttctaaccagagttgacaaatgtnaaaaatgcatcagctagacagcagtnatgtgaacacagcccggaactgcaagtnaaggaaatgnntncnnggcctnccttcccangtaaccaaaaccattattcaaaagcaactactgaaatgccagcttgtggggaaagaantgggaaaggtgataaaatcacaattaaatccatgtatatacatgaataccaaagctattatttacaaataaaatcaaaacactttacaccaacaacaaatcacacacctcctactctatgggcccacgggttaacattcaaaactcggagtaatcttggcctaagccttgatacggggcaccactcttacccctggggaacacaccgcagttgtttcaacaccgtccacctgctccttctcccctcgaactacgggtgccgcacatatgtccgcaacagctaacagcgacacgccggggaagtggtcgccagccaaagcacggtgaggacaaaaggcgttcacggagagccggacgcgacacaaacgaaaacaccatggcccccctggaaaaaacaacgacgacgggcgaggaaacacatcgacaacgacaccgaagttagcagagacaaccgagccaagcgaacgcaacacagtgaagacaaacacccggtgggcaccccagaaaccacacagaacgaaca

SEQ ID NO: 506325 - DNA, 578 bp, Homo sapiens
gacacacataggctcaaaataaagggatggatgaatatttaccaagcaaatggaaagcaaaaaaaaaaaaaaaaaaaaaaaaaaaaccgggggtggcaccccttttgggggaaaaaaaacttttaaccccaaaaaattaaaaaaaaacttcaagaaggggggatatacattaagggggaaagggcatcatggccagaaaggaaaaacgttacccttctttaaaatattattgcgccccccaaaacagggagcccccaagatttcatagagggaagggttctttaaaacgaccttaaaaagagacttatagttccccacaaaataatattagtgctggacagactttaaaccccccctgtgtaatttttagccaaagaaccgccgaagacgagaaaatttaaccaggttttccgggttgggacctcacgttcgggacgcaagcggatttaataaaatctcaccagaacttccttcccaagaataaggtgggactccacattttccagacccattcaattttccttaactgatatatggggataaaactctttggaaaggcaagaatgattctaacaagg

SEQ ID NO: 506326 - DNA, 278 bp, Homo sapiens
gaccctagaaaacccattggcggagcccttgaacagcagatctttctgcccaataggggagccaaagagcgggggcttcggtgacttgtccttgccaaacttttcctgtgcctggcggagaagattccagatggcatcctccttgccattcacacttcgtgccacaacggcatgagaagggacccgcaccagatggcagtctttgaacttgtccactggcttccgagtgttgtctgggcagaagaactcatactcgtccctttcagcctcgtctgaca

SEQ ID NO: 506327 - DNA, 948 bp, Homo sapiens
gggagagaaggagaaagacgagtcgggagagggcggtaggatgtgaggggggcctgaagcgggagtgggcggcttcgtctggcgagagctaggacgtgggaccgggctgctgctgttctcccgggttgcctgtcggccggcagtccttcatacgcagactccatgttggtgctcgtgcgcgcgtgggatcaagtgcgcaggtcgggagagtctgtcttcatggggtgtggtgctcgcctgtgagacaggttattgtttggccgatgtggggtcgtggtctgtctgtgggctgggttgagtcggtctttaatcccggttgttctgagtctttccctcgtcttgttgtggcacttttggctcggggtgaggcagagatgcacgagtaaaatgaggtacgatgtatgcgctgagttaatagttagcagcggtcttttgggcaatagtgtgaagcagtgggagagagttgcgtggagggggtggtgggagaagttccggtagtcactcagggggattgaagtatgtgggtgccttggccattggttagtaagatgggggattgtgtataggggaagggggagtggtagtgttgtatcgtgggttgaggtgaaaagtgaagaggagttgttgttacatggatagtgtggaatcgatgaatgagtcgttgggggggatggctggtgcatgcgaagggccccaggagaggttttcggattgcccatttgacttgcttgtgtggcaggaccgttcattcaggctcgggataagtggtcttggcgagagtggtaccgtgggtcaattcccaagggtcctttggggaaggtcttttcagacaccggggcggagaaagctccgggggtaggcagccataatgtatcggtgggtgggcctattggtccacccggcgggttttctctgggggcgaaaggtgtagccctttttgtgcatgag

SEQ ID NO: 506328 - DNA, 146 bp, Homo sapiens
gtgtgtaacttccaagcaataccttggtgtcatgttactgctgtcagatgtattgttccttacataggaaatcaatgccaagatgcaactagagattctcatactaagaagtaagtcagaaagagaaaggcaaggggggggggggg

SEQ ID NO: 506329 - DNA, 283 bp, Homo sapiens
aggcaaagctcctactacatatgaggaaatatagtgtagtcacagtatttatcgcatactttgatagcctaggaagttattcaatcctgttttcaggtaaaagagggataatcgcatctatctcatgtagctgctcacaagattgaatgagtaaatacatgcaatgtatattggaataagtaacgtggcatgtaatagagcaccccaagatttgacttatctctgtgcaaggcacgtgggaaaacaaaagactgcgaaataatgtaagaatccaccggttcta

SEQ ID NO: 506330 - DNA, 150 bp, Homo sapiens
gagtctaggagacgacgtgcagaaatagcacctcggaaaggggaaggaaaagagggaaggacaggtcatcagcctcggacctcaggtggctaagggagagaatgtatttggtgtctccatatctttcatcttcaattacacttttgtcat

SEQ ID NO: 506331 - DNA, 145 bp, Homo sapiens
ccttttaaaaaaaaaaaaaaaaaaaaaaggggggggggggggccaaaaccccccccttttcccccccccaaaagggtttgggggggtcccccccccccctttttgggttttttttccccccttttaaaaacccttttccccggta

SEQ ID NO: 506332 - DNA, 401 bp, Homo sapiens
  misc_feature (26)..(26): n is a, c, g, or t
  misc_feature (56)..(56): n is a, c, g, or t
  misc_feature (60)..(60): n is a, c, g, or t
  misc_feature (67)..(67): n is a, c, g, or t
  misc_feature (70)..(70): n is a, c, g, or t
  misc_feature (75)..(75): n is a, c, g, or t
  misc_feature (77)..(77): n is a, c, g, or t
  misc_feature (79)..(79): n is a, c, g, or t
  misc_feature (88)..(88): n is a, c, g, or t
  misc_feature (90)..(90): n is a, c, g, or t
  misc_feature (99)..(99): n is a, c, g, or t
  misc_feature (108)..(108): n is a, c, g, or t
  misc_feature (116)..(116): n is a, c, g, or t
  misc_feature (122)..(122): n is a, c, g, or t
  misc_feature (125)..(125): n is a, c, g, or t
  misc_feature (128)..(128): n is a, c, g, or t
  misc_feature (131)..(131): n is a, c, g, or t
  misc_feature (137)..(137): n is a, c, g, or t
  misc_feature (259)..(259): n is a, c, g, or t
  misc_feature (293)..(293): n is a, c, g, or t
  misc_feature (401)..(401): n is a, c, g, or t
ctgaggcagagctcgggggctgtcgntggggaccttgcaggagggcaccccaagcncgcncggccgnccnacccngncnctgcgcgcngnccgggccgngttgacccngcgccctngcatgnggngcnctngcggtnctgagaccgcgcgggtcgcgtggtcaacgatgacattttggaggtgggcacgtgctgttggaggacagcgtggtgcgggcactctggcacgaactgctgtcttccgggggcgcttctgtggngctgtgggtccttgacgccgccggcaagctcgtnctgtccggaggcattgacacacacacgcacatgcagtttccctttatgggctcgcggtccattgacgacttccaccagggcaccaaggctgttctctcaggaggcacn

SEQ ID NO: 506333 - DNA, 330 bp, Homo sapiens
tggtctgtgctggaataaattctccagcttagatacctcaccttccttttaagtgacatataatgactttcctttttctcaaatcatattagtctacaagtatgcctttcatatagcaatcctgcatccacataaaagctgcattttcaatgagataaaaagctattttgcaaaaagcacaaggttttgggcacctgctagagtagctgcagtgacagattcacaatttccttttttttttaaaaaaaaatttttaaaaggaggatcttactctggtggcctatgctgggagtacagtgggtgccatcaatcgcttactacagtctcgaa

SEQ ID NO: 506334 - DNA, 936 bp, Homo sapiens
gtctgtgttcctgcgcgcacgtgaagcaccgtaaaggtgctgcgcacttgcgcagcacggtgaattacgctgagcggcccggttacatcaagggcatcgtcacaggacatcatccacgacccggtaccgacgtcgcgacccctcagccaaggtgtgtctatccgggatccgtactcggtatctacgagagcggaactgcgagctgattacatttgccagcgagggcattcacacgggccagtttgtgtattgcggacaagaaggcccagctcaacattggcaatgtgctccctgtgggcacccatgccctgagggtacaatcgttgtgcttgcctggaggagaagcctggagaccgtggcaagctgtgccccgggcatcagggaactatgccacggttatctcccacaaccctgagagcaaggaacgacccgtgtgaagctgcccctcgcgggctccaaagaaaggtaatctcctcagccaacagagcatgtggtggtgttggtgcctgatgtgttggcgattgacaaacccattctttgaaaggctggccgggcgtcccaccaaattctaaggcacaacgaaggacctgcatggccacaaagttacgggggtgtgaccatgaactcctgtggaagcaataccttatgggaggtggaaccaccaggccacatcggcaaggccctccacaatccggagagatgcccctgttggccgcaacaggggtctcatgctgccgccggactggacgtctaccggggaaccaaaattgtgcggaaacaagacactaagtgctcgaggcccccaaaggttgggtcactgccaaaaagacaaaaaaaaaggggggcacaaaaccagcagggcacacgtacaccagtttagacaagccacacaggcgaaaaagagagcggggaacacggcacgaaacgcgtgcaacg

SEQ ID NO: 506335 - DNA, 204 bp, Homo sapiens
ggcccagcgtcgcctattttggggggtgcgatggagaggggactcgctttcgctgcagctgtctaaactggctacagctctcacttcatttaaccctctttcagtctttgtcttccaggaagtgtgcgtccctgtaatttaccagctttaatgggcatattaagaaaaccataaactttttggcagtttatgtcaaccccaaaa

SEQ ID NO: 506336 - DNA, 189 bp, Homo sapiens
aagaacacgcgctttgatagcttctggtatacctcacccatttctgattacgaacgcagacaccagagggctgctgttgaaagccgttttttctgggacaacgtggtggccaagcaatcaataaatgcgttcggccaagcacgcttcgaattcactgccaacgcaaagggccaagtgcgtccgtagcgg

SEQ ID NO: 506337 - DNA, 271 bp, Homo sapiens
caacgtggatgcctataaaagtcttctgcaacgatggagatttggtgagacctgcgtgttcccggactcagcccattgtgggccagaagaactgttacatcagcgagaaccccctggacaagaggcgtttctggttcggtgagagcatgagcgatggattccagttctgagtatggcggacagtgactcgatccttccgatgtgtgcatccatctgagcttcttgcgctcttgattgtcaccgagggctcccagaagatcacctaacgact

SEQ ID NO: 506338 - DNA, 89 bp, Homo sapiens
gccgaaagggatggaaagcgcctaccttgtcctttccgttcccctccccccatgccgggcagtgcctcaagatcctgaagggaaagaag

SEQ ID NO: 506339 - DNA, 1386 bp, Homo sapiens
  misc_feature (38)..(38): n is a, c, g, or t
  misc_feature (77)..(77): n is a, c, g, or t
  misc_feature (110)..(110): n is a, c, g, or t
  misc_feature (137)..(137): n is a, c, g, or t
  misc_feature (156)..(156): n is a, c, g, or t
  misc_feature (162)..(162): n is a, c, g, or t
  misc_feature (189)..(189): n is a, c, g, or t
  misc_feature (230)..(230): n is a, c, g, or t
  misc_feature (239)..(239): n is a, c, g, or t
  misc_feature (292)..(292): n is a, c, g, or t
  misc_feature (320)..(320): n is a, c, g, or t
  misc_feature (336)..(336): n is a, c, g, or t
  misc_feature (344)..(344): n is a, c, g, or t
  misc_feature (444)..(444): n is a, c, g, or t
gggttggagacgaggccaggtctccagttggggtggangtgcccaccagctgccgaaggccaagacgccaggtccgntggacgtgacaagcaggacatgacatggtccgntgtgacggcgaggacagaggaggcgcntccggcttacctgaacacnttaggntggtggggctgcggcaagaagcgggtntgtttctttacttcctccacggagtcggcacactatggctncctctgggntcccagaacccacaacatgaaagaaatggtgctacccagctcaagcctgggcntttgaatccggacacaaaaccctctagnttggaaatgaatatgntgcacttnacaaccactgcactacctgactcaggaatcggcttctggaaggtgaagctagaggaaccagacctcatcagcccaacatcaaagacaccatcggaacagnagcgcccgcagcacccaccccgcaccggcgacgtccatcttcatggccaccccctgcggcggacggttgaccaccagccaccacatcatcccagagctgagctcctccagcgggatgacgccgtccccaccacctccctcttcttctttttcatccttctgtctctttgtttctgagctttcctgtctttccttttttctgagagattcaaagcctccacgactctgtttcccccgtcccttctgaatttaatttgcactaagtcatttgcactggttggagttgtggagacggccttgagtctcagtacgagtgtgcgtgagtgtgagccaccttggcaagtgcctgtgcagggcccggccgccctccatctgggccgggtgactgggcgccggtgtgtgccagaggcctcaccctgccctcgcctagtctggaagctccgaccgacatcacggagcagccttcaagcattccattacgccccatctcgctctgtgcccctccccaccagggcttcagcaggagccctggactcatcatcaataaacactgttacagcaaaaaagacaccaaaataacatacaaagaaaaaaaaaaacctctgaagacaagccctgcacccagcagcctacgcggtcaaaacacagagggtagcgcacccacgcctgcagagacgaacaaagaatgcggagcaggcctcagcagaagaagcctccatcaaaacgcggcactgaccgctgggtacgccacgacagtggggcaagacggggccgcgcctgcctacacaacgtggcggccgcggtcgtcaactagcgcgaagcccacgtcagttccagatgccctgcaggctcggagaaaagccaacggaccgccggcacacacataaccccccactgacaagggacaaacaacagggaccaagacagggggcactatccacaa

SEQ ID NO: 506340 - DNA, 790 bp, Homo sapiens
atcgcacgaggttagcaccgagcgccaatctgtctgcctattgaatcgggagagatcaagggctacaagattatgtctccccgcggccttgtagatttaatttgcactaagtcatttgcactggttggagttgtggagacggccttgagtctcagtacgagtgtgcgtgagtgtgagccaccttggcaagtgcctgtgcagggcccggccgccctccatctgggccgggtgactgggcgccggtgtgtgccagaggcctcaccctgccctcgcctagtctggaagctccgaccgacatcacggagcagccttcaagcattccattacgccccatctcgctctgtgcccctccccaccagggcttcagcaggagccctggactcatcatcaataaacactgttacagcaaaaaagacaccaaaataacatacaaagaaaaaaaaaaacctctgaagacaagccctgcacccagcagcctacgcggtcaaaacacagagggtagcgcacccacgcctgcagagacgaacaaagaatgcggagcaggcctcagcagaagaagcctccatcaaaacgcggcactgaccgctgggtacgccacgacagtggggcaagacggggccgcgcctgcctacacaacgtggcggccgcggtcgtcaactagcgcgaagcccacgtcagttccagatgccctgcaggctcggagaaaagccaacggaccgccggcacacacataaccccccactgacaagggacaaacaacagggaccaagacagggggcactatccacaa

SEQ ID NO: 506341 - DNA, 610 bp, Homo sapiens
gtcatctagaggatcctttggaaacgagagacctccatctgggccggtatgactgggcgccggtgtgtgccagaggcctcaccctgccctcgcctagtctggaagctccgaccgacatcacggagcagccttcaagcattccattacgccccatctcgctctgtgcccctccccaccagggcttcagcaggagccctggactcatcatcaataaacactgttacagcaaaaaagacaccaaaataacatacaaagaaaaaaaaaaacctctgaagacaagccctgcacccagcagcctacgcggtcaaaacacagagggtagcgcacccacgcctgcagagacgaacaaagaatgcggagcaggcctcagcagaagaagcctccatcaaaacgcggcactgaccgctgggtacgccacgacagtggggcaagacggggccgcgcctgcctacacaacgtggcggccgcggtcgtcaactagcgcgaagcccacgtcagttccagatgccctgcaggctcggagaaaagccaacggaccgccggcacacacataaccccccactgacaagggacaaacaacagggaccaagacagggggcactatccacaa

SEQ ID NO: 506342 - DNA, 349 bp, Homo sapiens
ccagttacaacagctaatagtatgcagtgtccatacaatgaagttattatataaactgccacattcactccgaagcccactcaatctccttcagcatcccacagactacgtcacatgttccgcttagtctagatcataatgaggtggcacacacgctgcaccgctgacatcacaggacagctgcctataaaactagacttctagacgctgggctctcaccttcattctcacaggtcatcatcctcatccgggagagcagttatctagagcaacctctaagtcgtgctcatactgtgctgccagagctgggtccattacaacttctggtggtgcgagtagcaggcattgt

SEQ ID NO: 506343 - DNA, 1568 bp, Homo sapiens
  misc_feature (38)..(38): n is a, c, g, or t
  misc_feature (77)..(77): n is a, c, g, or t
  misc_feature (110)..(110): n is a, c, g, or t
  misc_feature (137)..(137): n is a, c, g, or t
  misc_feature (156)..(156): n is a, c, g, or t
  misc_feature (162)..(162): n is a, c, g, or t
  misc_feature (189)..(189): n is a, c, g, or t
  misc_feature (230)..(230): n is a, c, g, or t
  misc_feature (239)..(239): n is a, c, g, or t
  misc_feature (292)..(292): n is a, c, g, or t
  misc_feature (320)..(320): n is a, c, g, or t
  misc_feature (336)..(336): n is a, c, g, or t
  misc_feature (344)..(344): n is a, c, g, or t
  misc_feature (444)..(444): n is a, c, g, or t
gggttggagacgaggccaggtctccagttggggtggangtgcccaccagctgccgaaggccaagacgccaggtccgntggacgtgacaagcaggacatgacatggtccgntgtgacggcgaggacagaggaggcgcntccggcttacctgaacacnttaggntggtggggctgcggcaagaagcgggtntgtttctttacttcctccacggagtcggcacactatggctncctctgggntcccagaacccacaacatgaaagaaatggtgctacccagctcaagcctgggcntttgaatccggacacaaaaccctctagnttggaaatgaatatgntgcacttnacaaccactgcactacctgactcaggaatcggcttctggaaggtgaagctagaggaaccagacctcatcagcccaacatcaaagacaccatcggaacagnagcgcccgcagcacccaccccgcaccggcgacgtccatcttcatggccaccccctgcggcggacggttgaccaccagccaccacatcatcccagagctgagctcctccagcgggatgacgccgtccccaccacctccctcttcttctttttcatccttctgtctctttgtttctgagctttcctgtctttccttttttctgagagattcaaagcctccacgactctgtttcccccgtcccttctgaatttaatttgcactaagtcatttgcactggttggagttgtggagacggccttgagtctcagtacgagtgtgcgtgagtgtgagccaccttggcaagtgcctgtgcagggcccggccgccctccatctgggccgggtgtgacattgttgctgcctgtgctttgtgtgccctgaagtgctggtgctggtgtgctgtgatgtgcaatagagctactcagtgagtggagtgataggttgcagtgcagggtgtagatgtgatgctgcagcttggctgtgctgatgctggggatgtgcacttgtgcctaccagagcccctgtggcacaattgctgtgtgcctacgcgtggcgagctgactgtgatgcctgggcatctggttgcctacagcagtatccgggcttgtgaagactgatggccatgagtactaccatgcttggtgtgtaggactgtagccacaccaggctagcctgaagtgccaaaggactgcacatgtgtcctggtaggcactgtgacaagccagtgacattgacatgtgtcccaggatgttggaccgcgccgacgtgacctgatgggaggcgctggtccaggccttaccttgaaacagccttaaggcttgggtggtggttgctgggagagaacgctgggtctgtttctattacttgctaccaaggaaggtcagggacgactagttggcttgcccctactgtggttccccagaagacacacaacgcatgaagagaagtggtgcaacccaggcttcaagcctgggcctatggattccggaaccaaaccctctagcgtggggattgagttgcttggtcgttagagactggggtactgacacaggagccggtctcgaagagaggagaggaccaaaccata

SEQ ID NO: 506344 - DNA, 95 bp, Homo sapiens
  misc_feature (36)..(36): n is a, c, g, or t
  misc_feature (48)..(48): n is a, c, g, or t
gacagcagcttctacatctgcagtgctacttctcgncgagcgggaagnagcacagatacgcagtattttggcccaggcacccggctgacagtgct

SEQ ID NO: 506345 - DNA, 95 bp, Homo sapiens
  misc_feature (25)..(26): n is a, c, g, or t
  misc_feature (35)..(37): n is a, c, g, or t
  misc_feature (39)..(40): n is a, c, g, or t
  misc_feature (42)..(42): n is a, c, g, or t
  misc_feature (45)..(46): n is a, c, g, or t
  misc_feature (48)..(48): n is a, c, g, or t
gggggactcggccctttatctttgnnccagcagcnnngnncnacnngnagcacagatacgcagtattttggcccaggcacccggctgacagtgct

SEQ ID NO: 506346 - DNA, 114 bp, Homo sapiens
  misc_feature (67)..(67): n is a, c, g, or t
catcctgaagacagcagcttctacatctgcagtgctaggacggacgatccggggtgggccggagcgnagcacagatacgcagtattttggcccaggcacccggctgacagtgct

SEQ ID NO: 506347 - DNA, 479 bp, Homo sapiens
gactttcaaggaacagatgggtactgtgctgaacgatcacactaatacctaatacatcgctttatcatccagacaggaggtacagggtacaatcatagctcaccgcagactcaaacctctgagctaaggcacttctcccgaccaagtctcccaatcagccaggaccacaggtatgcaccagcacacctgattaattttctaattttttgtagagacagagtctcgatatgtagctggggctggtctatgaattcctgggctcaagcaatcctcccgactcagactcccaaagtgcggggattacaggccacggtgcccggcctgattattctatttgaacagataagatttttacctttgcctttactatgttggcacaatgtgtttggatttttacacctaaccagtacatcacccatcatgcataataggtatacgatctatggtagtcgaaaaaacttgaaatggtcgcccatccg

SEQ ID NO: 506348 - DNA, 104 bp, Homo sapiens
  misc_feature (57)..(57): n is a, c, g, or t
catcctgaagacagcagcttctacatctgcagtgcccaacttgatacgcagtattgnagcacagatacgcagtattttggcccaggcacccggctgacagtgct

SEQ ID NO: 506349 - DNA, 150 bp, Homo sapiens
cctcctctgagcctatgcttttactctctgtaaaatgacgataataaagcctagagagtgtatgaggatctttaaagccgaagcttttttctttatttccaaggttctatccctttgcgggggtttaatatataactttctcttgggact

SEQ ID NO: 506350 - DNA, 88 bp, Homo sapiens
  misc_feature (7)..(7): n is a, c, g, or t
  misc_feature (55)..(55): n is a, c, g, or t
ggtcaanattagtaaactttatttaaacttcaatgaacataaaataacagacaanaggcagctttagctttgttctgtcccgaggatc

SEQ ID NO: 506351 - DNA, 180 bp, Homo sapiens
cactcctttgagtgagaccgacttcaagcttgcagcgccgaccctcggacggatcccagaatgcaccgcgtgtacacggtcttataaacgagtgcgggtggaagcgtggcgacagggtaaccgacatagaggactatccgaacgatacggccgccacgtcggcctcttgacaacgtatcg

SEQ ID NO: 506352 - DNA, 682 bp, Homo sapiens
  misc_feature (421)..(421): n is a, c, g, or t
tggaaacgaaatttcactctggtggcctaggctgggagtgcaagggcttgctatcagctcactgcaacctctgccttgcaggttgaagcgattctccggcctcagccctcccaagttagcgtggcatttacgggcttgcgccaacaagcccggctagttttttgtgtatttttagttagagacgggatttctccatgtggtggctcgaggcgtggttctcgaacctccgtgacctcgagggtgactccctcccgcctcgtgcctcccaagaggtgcgtgggaattcacaagggccgtgagccacgtggtgcccgggcctaatttgtggtattttatagtagaagaagaggggtttatatctcggtgtgtggctcaggcgtgactctgtgaaactcccgaaccacgagggtgactccacccngcctcaatccacccaaaactggcgtggggactacagggcatagacgccaccaagcccgggccgttatataagcggttataaaagggattggcagcatggagttgggtggcagtccctcgtgctccgggcacagacgcggggggagacccgtggtgtcttcagacagcagggacttcaggaccctacggagagagggaatcaagagctctcgggggtctaggaggggggaggttgatcggaaaccaccataagcgcgccgaa

SEQ ID NO: 506353 - DNA, 428 bp, Homo sapiens
agcggacgtacgccgtctctaacactacagggtggtagcggcctcattcgtactgcgtccggggcaggaccgtgcgcggggccgcggtgggtgctgggagccagcgccatgcctcgccgccgacccgtcgcatggcgtgccactccggtcttgggccgttctccgcaccgatgcagaggcggcagggactggggactggagcggcagccaagcaacgaggattcacaagcacgaaggggcacagccagcgtagaagacacctgaaggggacacggggcacacagagcggcccatgaatacaaatgagtgcaatgctgattggccagacaaggtaattccagcttactgatgggccatagaagtcattcatgccattcaatgaaagatgccatgacgagatgcttgatactatgacatctattcctaca

SEQ ID NO: 506354 - DNA, 324 bp, Homo sapiens
  misc_feature (69)..(69): n is a, c, g, or t
tataaaaatattaattaaaattgttttaaaactaagcaggagaggctgggcgcagtgactcacgctgtnaatcccagcactttgggaggccaaggtagttggatccctgaggtcaggagttcaagaccagcctggccaacatggcgaaagcacatctctacaaaaatacaaaaaattagctggccatggtgacaggtgtctgtaatcccagctacttgggaagctaaggcaagagaattgcttgaacttggaaggcgaaggttgcagtgagccaagattgctccattgcactccagcctaagcaacagagtgagactctgtctc

SEQ ID NO: 506355 - DNA, 500 bp, Homo sapiens
atgtatatagaaagagatctatgaagaaattaacttccatgattatgaaagttaatatctcttccatgattatggaaactggtaagtctacaatctgcatgctgggctggacaggctggagaaccggagagaagacaatgctacagctcaagtcaaaaggccatcaggctgaaggaccccaggaagagctgatgttgcaggtggagtccgcaagaacagttagctggagaatttgcctcttgttcagggagctcagccttttactctattcaggccttcgactgactggacgaagcctgcccaggctctggaaggcaatctgctttactgaaggcccagcaatttcaatgtaaatcccctatcagaaacaccctcacagaaacattccggacaagttgagactcaaaatcagctacagaagctccaacacatcagactggccatgacattggtcttgcagtaccaagtgttgacccaaaaggcgaacactagaaagtcat

SEQ ID NO: 506356 - DNA, 172 bp, Homo sapiens
gcccctgatgctacgactggagacgagggacaacgcaaattaacgacagtgcaaagggaataacaatctgaaaccaaatcctcttcgtgtcaccccatcgaatggttgaccaaaagcggcctatgattgcagatgtctgagctctgaagactcggttgtctatctggctctt

SEQ ID NO: 506357 - DNA, 558 bp, Homo sapiens
tgcagtggctcatgcctgtaatgccagaacttgggaggccaaagcaggcagatcaattgaggccaggagtttgggaccagcctggccaacatggtaaaatcccatctctactaaaaatacaaaaattagctaggcatgatggcacaggcctttaatcccagctacttgggtggctgagccatgagaatcccctgaaccaggaggtggaggttgcagtgagccaagatcgcatcactgcactccagcctgcgtgacagagtgaggctctgaaacaaaaaaaaaacaaaagaaagaaaagaaacgggagaacagaaacgaacaagcgtgttcaggggccaggcccgggtgactcacaccgttgtaatctcagcacttggggaggctgatgaaggcagaatcacttgaggccaggagtttcaagaaccagcctgaccaacacacagtcgaaacccaatctctcactacaacttagcaacaaattagccgggccgtggtggacgggcgcctgttaatcccagctactggtggcagcgctgaggcagcagcaatggcgttgac

SEQ ID NO: 506358 - DNA, 152 bp, Homo sapiens
tcggcacgagggcgggtgaccagcatggtccctcttggaatttggattcgccatttatttttctggctgctaattcacgagcccggagattagagagttttatttctgggattcctgtggacacaccaccacatacatacatttatatatat

SEQ ID NO: 506359 - DNA, 334 bp, Homo sapiens
caagttgcccttcccttttgaattttaaaatgatggttttatttgttgtgtgaagtggttcccccttgaggcccaggagcctccatttcctgactgaaacccttttttgagacttaaagtaccagtacttttggttccttgagttttcctgtctccaaataccaaatgcccttgacttttttcccttgtgaatttgtagtccaatcagctgaaatttaatcccttgggagggacgcataaaaggagctttaggaacccagtgccagtgcagaagtttttccaggtggcctccctttcccccaatgtacataataaagggtttgccctttcccta

SEQ ID NO: 506360 - DNA, 302 bp, Homo sapiens
aatgctgtatacttaggatatactcaaatttttaaaaaattgtgttagtacgcatattctcactcataggtgggaattgaacgatgagaacatatggacacaggaaggggaacatcacactctggggactgttctggggtggggggaggggggagggatagcattgggagatatacctaatgctagatgacgagttagtgggtgcagcgcaccagcatggcaaatgtatacatatgtaactaacctgcacattgtgcacatgtaccctaaaacttaaagtataatatttaattttaattttt

SEQ ID NO: 506361 - DNA, 396 bp, Homo sapiens
  misc_feature (33)..(33): n is a, c, g, or t
  misc_feature (104)..(104): n is a, c, g, or t
taaagagtttaatggatataaggctagccatgntgtatgggagatagagttattacctaaatcaattccctgaaaatttaaagttcagggagcttgcttttgantggggcttaaggacttgtggggtggagggagagcaggtccaggtggagccatcagtcgtcagaaatgcaaaaacttgaaaagacatctcaaccaccaatcttaggctctacaatagtgatgttatttgcaggagcagctggggagttgcaaatcttgtgatctctggaataatggctggtaatcttttatgtctacaccttagcagaattcaggctcctcacatcctcctaacctggtggcctttcattagcttcgcaaaggtgatttagtttgggggaagactgttatcat

SEQ ID NO: 506362 - DNA, 122 bp, Homo sapiens
atgaacatgaagctgaagtgtggaccttataacgagacgagcgggacattgaggacaaaaagtctgattccagggacacagagtaactgatgagctagattccagagctgcgaggtcgtcat

SEQ ID NO: 506363 - DNA, 340 bp, Homo sapiens
tacaaccccggacaatgcaggtgacgccccaggcttgtcactgaccacattacacgcacacgcacacttcgatcgcgctacccacactcacatacacactcagagtgctattgagagccttgggccaggacgctagaagatagggatgtagttgtcgattttggcgcggtggcgctgggcgatacattcagcgatccacacgatgttgcgacactcctgctccttgagcttcaggaaggcatagaagacaccaaagtggaactggttcaggaaggccaacttgttcagctttacctcgtgctcaaagaatcggtcctccagcgtcttgtccggggttgtt

SEQ ID NO: 506364 - DNA, 225 bp, Homo sapiens
ccccagggcccaatccccttctccacttactataatggttgactaacgtcccaaggggtttccggtgaaatggagctgtggattgtctggttctaggctagtaggcaaagagacctcctctccctcttacccgtgaggcaagatccctcaaagcaggagtctgccctctcccatgggccggcttgtctgtgtatgtaccacccatgtagggaataccggcctagg

SEQ ID NO: 506365 - DNA, 178 bp, Homo sapiens
aaatatctcagtgacgtccagctaaagcgaatctaactaattgatatatacataaataccgctgctctcgacactaataaacagtaactgaacgtaactacgtaaataaaaacacatttagaggtccagttataaaaaccttaataacaagacagcaacaacataccaaataaagatt

SEQ ID NO: 506366 - DNA, 1570 bp, Homo sapiens
  misc_feature (847)..(847): n is a, c, g, or t
  misc_feature (932)..(932): n is a, c, g, or t
  misc_feature (989)..(989): n is a, c, g, or t
  misc_feature (991)..(991): n is a, c, g, or t
  misc_feature (1028)..(1028): n is a, c, g, or t
  misc_feature (1309)..(1309): n is a, c, g, or t
cagcctcctctgtggtgtgttgtgattagtacagcctattctgtggtaactgctctcccgttgatgatcacttatcgcttggttgtgtggttgccatccactaatgatctttgttcatatcaatcgctgctgcctctgtgctcacaagtagtcagcaatttgggggtatggatcctcttcttgtgctgcacgtggtaggttgtgtgttttcgtctaacccccgtgtgttgggagcacccctgtgcccccgctccagtttcaccccgcgagtttacttgtttgctccgaatgcccgcccctggctgttttggtagtggttctctctttccccggggggaacacaaattgtgggggtctctccaaatgtgaacgaggaagtgttgctgtgttctcgcaagggaagtttgttttcgtgtcggggggaccaacgacttttgtgtcggggggtgaccgaccgccgcaagatgtggagccgccaccccctgctggggaagcccccgctcttggggcctttctcatctccggctcccacggtgtgggattgtattgcccgttgggccccccgtgtcccacggtcgtccatattatgtccccccggcgcttaatgaccccccggttagttgggaatttgtgcccacccaccagcggcgtccaccacagttgggcagaggacacaaggttttgcgctggtaggcctgtatagcgtgatacagaagtttggatctgccccgcttttcctgcggtatacaaaacgccttgtgaagaagattgggccccccagagagattgtctgtggaaggcttcttcgggtggatattgcctcggcgcactctggtgtggaataatnggagtgttcctcggggagcacaagaccacacatcggtgggttgttttggagagagaggctttttctcccacggaggctatgttcncacccactcttctcgggtgtttctcgctcttgtactcggttctctgctcgagtaatntngagagacacacagacccacagcttctttgccggcgtntgggggtgtgttccactaccacaaacgcacacagttgggacacacacgagaaaggtctctgctctcgagagagccttctggcgcacacaggtgtcacacccacacagtgtctcggccccacagagaaaagtctctcacagagtagaggtctatacaatctgagatgatttgattgcccctcataatatcgctcgcccacccgcccacacttcttagaatccacagtgcgtggagatagagaccgcgttctcacgaagactcgttttgttgttccacaattnggccacatcttataagtttatagtatagtataaaaagagacttggttataatgagatacacccaaatgcactcgtaaaacctctcacgagaggaaaggagaatgttttgtggagccacctcttggttttctctttttgcgctgtggcacgtctttaacgttattagtcttttataaatcacgtacctttttatatggaaacacaacttgagcccaaaatttgtcacagaattttgagacccctttaaaaagtttaatgaga

SEQ ID NO: 506367 - DNA, 492 bp, Homo sapiens
  misc_feature (10)..(10): n is a, c, g, or t
  misc_feature (17)..(17): n is a, c, g, or t
  misc_feature (224)..(224): n is a, c, g, or t
  misc_feature (228)..(228): n is a, c, g, or t
  misc_feature (251)..(251): n is a, c, g, or t
  misc_feature (254)..(254): n is a, c, g, or t
  misc_feature (256)..(257): n is a, c, g, or t
  misc_feature (268)..(268): n is a, c, g, or t
  misc_feature (291)..(291): n is a, c, g, or t
  misc_feature (308)..(308): n is a, c, g, or t
  misc_feature (311)..(311): n is a, c, g, or t
  misc_feature (325)..(325): n is a, c, g, or t
  misc_feature (350)..(350): n is a, c, g, or t
  misc_feature (385)..(385): n is a, c, g, or t
ggccctgatnggcctcnttggtaatagacggttggactatattgttagcgccacgtaagcagtcattgtatagtaatgctgcaccctaactagtatagccacgaccatttattaacagtcagggcctatccttgcctgtagttctccgtcatggacgcacaaatcactgtgtaacttggctcactggtgagcatagggttgactgataaatgtttaatccttgntagnttgtgagagaatgagttgatgantgntnnataccagtggntagatggagtattaaggtggagnagaaaagaagtgagaanatnttgattcccctttnacttgatggtgtttatgaacatgcngtagtgcctttatggccagtttgagtcctgcctantttgacttttacgttcccattcctgtgttaccaccttcctcccgatttgttcacctattttgtgctttaaatctcaataaaatacttactgagggaaaaaaaaaaaa

SEQ ID NO: 506368 - DNA, 254 bp, Homo sapiens
tccagaaaggaaagagagtcagcgctacgaagaacaggaactcaaggagaaagtttcttctgtagattaacaggagagaacagtacatgagatcctggtagcatgctcaagaatgcgtgcgcaggacttgattggacaccagccagtctgatagtatcgagtagcacgtctgatcgagctcatgatgaacactagaagaaagctgaaattcagaagaaaccaattaagaaatagaacgaggatgatgttggaat

SEQ ID NO: 506369 - DNA, 835 bp, Homo sapiens
tgtgtcccctgtgttcgctctggcctgtgtcgtccgtcttcagtcggcgtctccctgttctcgggcgagctgttcgccattcgtggtttggcgttctatcctcctcgcatctgtctggtgtttttccttctggtgttggcttttatccgttttggccttccctgttcttcgcctactgtgctgtgtgttagctgcccattggtgctcgtgtaatcccctctctctcccatatgctgagttcatgccatcactagagccagaccttggtaggatctgcagtccttctcggtgtcggggtgacctctccctcaggagagtctgtccttccatgtccacctaatcagcagcctccccggcactcttcgaccagaactgcctctgcatcctgtggggtctgtgccagttagacccaggcggtccccagggtacgacttacatggagcagcttctggagaagcagggcgacggggaggccggcgtcaactatctgtggagatgctgaaggcgcttgcacgcgctgcagaaggagaactcatgcggctgcaagatgcagtatcctgagcctgacggcctaaaaaggagcggctgctagattctcaacgtgctagctctctgtgcccttccctgccctgccatgcgtgtcccgtgccagccggcacaacaggaccatgtcccgtgggccctatggccgtgcactcacaccaagccggcagcagcgactccttgagcaccagcaagagccctccgggaaagagcagcctcggcctggacaacctcgctgtcacacttcttcgtgaggtgggcgctaacgaggagtggggcaggaaggagggga

SEQ ID NO: 506370 - DNA, 285 bp, Homo sapiens
  misc_feature (153)..(153): n is a, c, g, or t
  misc_feature (185)..(185): n is a, c, g, or t
  misc_feature (285)..(285): n is a, c, g, or t
ctgagtcggatactgtcaggaggagatgatgactgggacatctgtcttcaaagaagtggacgtctaaggtgactccagtcctaagatgcagaatcgaagggcaagtctctggaccctcccaggaggaccacaggctgaaggaagctgcttgtnaccacatctcccggcagagggtgacctgcggntgattgagtccctctcccagatgctgtccatgggcttctctgatgaaggcggctggctcaccaggctcctgcagaccaagaactatgacatcggagcggn

SEQ ID NO: 506371 - DNA, 226 bp, Homo sapiens
  misc_feature (8)..(8): n is a, c, g, or t
  misc_feature (32)..(32): n is a, c, g, or t
  misc_feature (62)..(62): n is a, c, g, or t
  misc_feature (135)..(135): n is a, c, g, or t
  misc_feature (138)..(138): n is a, c, g, or t
  misc_feature (174)..(174): n is a, c, g, or t
ggcctgangtgctggtgtctcctcgcgggccnaaaggtggctggccgcttctccgggcgcanacttcgtggccggcaggttcgtgcccgatgacgtgcgccgcaagattgctctgcgctgccgggataaacgggncangactgcgtcgcggcactgtgacgccacccgggccanaccgcagggaccctcgccaataaacagccctcccaccaccgccaaaaaaaaa

SEQ ID NO: 506372 - DNA, 1004 bp, Homo sapiens
agcgggtgggcctctgcggtccgctccgccggttgctgtccctggcgcgcctccgttgctctcagcccagccgcctctgagagccgcccacctctcagccgtccccgggcagtgccagtagcggcggcgggtcctcgacgcgaggagcccctcctgtgcgtgcccaggcgggagcaaaatgtgggctctcatactccacgtcttgccatgctggcactcgacggtcaacgttttaagacggagtttgactactgagaggcacagaagtcacgataggtgccaagatgagctatagccactatgttgtcacacaattgtctgggagaaagcgagctgtcgcgtagctcgtctatgttacacgctccaacacagagagagtctcaaactcgctcgtagcggggcaacttgtccggtgtaaccgtaggacttgatactgccagggtatcgagctgatcttaagtacgcgtattatagccacctgtagtttcactgtcactttcccatgaagtcagcggcaacgagccaggatgacttcgatcatcgtatgggcaaggctcgatgcagagggcatgctatttccgttcgtctcgcatcgtgcgtgcctgaaacttggcaggaagaatgatgtccgaattctacgtccgacattggcctactactgagaggctttactcagcgactgagggtcccaggaacaaggttatggaggtaggcgccgccaataccgctgaccttggacgcaagtgattcctctgcaaggaggtccatgtgctaggtggtgatagtgcaccgttcccggagacgtggttagtgcgtaggcaggcaaagtgacctgagatgatggtcccaggtattcagcgtaaccaggagattcttggagccgataagtgcgagtcaaactcccctttaatacgccttggactgcaaaaaggccaacttcgtgttcttacggctgagtgtgagaagaccacaaagttccgggatttaaagaacctcggaaaccg

SEQ ID NO: 506373 - DNA, 832 bp, Homo sapiens
gtcattccgagagcctgattatttcctcttggggaattgctggcaattcaagaatctaccaccagatggcagtggtgcttgtgatggatctaggcaaagccagttttctacagggggatagttgttgaacaggcagttctcctttatggcaagaatgtacagaaaataactcttttagataatttctaaaataattgatcatgaaatcttagatataggagttgttttaaagttaaatttacctttcaaacattacagctgagctttccaatatggtgaccactagccatgtgtggctttgagcacctgaaaagtggttaaatggtgatgtgctgaaggtgtcataaacacatggctttcattctttagaagttcctatgacttaaagacataaataaaaaaattagctttcaaaagcaaaaaaagtcttattaatatgaagatggcatgtgaaatatctgagttgagttaaataaaagtttattacaattcatttcgcctctttttcctttttaatgtgactactagaaaagtttagatcatatgtgtctcatattctatttctaatggaccggtgctgctgaaataatctaaattattcttcatttttgcaagtggagatccggggctcagtttgatggaactggggttgagtcaagcctgttattcacgtggaacacggttagctcgggagagatacttctgaccccttatggtggggaggggttaggggtcttaagatttagcacgggaggttggggggtagcacagaaaaatgtgggggagaaaccccgggaaaaaaggggcgcgtgggggagagcgtgactcgtta

SEQ ID NO: 506374 - DNA, 387 bp, Homo sapiens
gacttacaggatcttgtgtcatccccttgtgtctcatcctacttgtgtgtcataccccttcgtgtgtcatccccttcgtattgttgatcatgaggtgctgatggtctttggcatgaggtcgcggatggacttgtgatgatggccacgtatgagtacaccaggttgcgaatggtctgcacctgccgctccagttggtggtccatggagaaggtggtcttcctggtgccccatcatcgttgtcttgtgtgtggctcttcttgggtaacaggccagttcgaaggaactgaggccttccagctgtccacgtttttcctgggagttcacagggccagctcgatctgccgcagtgtccttgtagacgtgtctctacgcaaagggggatggaca

SEQ ID NO: 506375 - DNA, 301 bp, Homo sapiens
ttaaattctgggacactgagttagattgcaaataatgacttacgaaagttgaattgggtgaggcgggcaaatcacctgaggtcagcagtttgagactagcctggcaaacatgatgaaaccctgtctctactaaaaatacaaaaaaaaaaaaattagccaggcgtggtgttgcacacctgtagtcctagctaattgggaggctgaggccggagaattgcttgaccccaggaggtggtggttgccgtaagccaagatcacaccactggactccaacctgtacaacagagcgagactccatctc

SEQ ID NO: 506376 - DNA, 685 bp, Homo sapiens
ttgggagtaatgtgttaacctataacctggcaggtagctgccagcaaaaattgcgtatttaccaattccaaggactttcctgcgggtcggtggctcaggcttgtaatcccagcactttgggaggttgaggtgggtggatcacttgaggtcaggagttccggaccagcctgaccaacatggtgaaaccctgtctctcttaaaaacacaaaaattagccgggcgtggtggcagtcacctgtagtcccagctacttgggaggctgaggcacaagaatcacttgaacctgggaggcagaggttgcaatgagctgagatcgtgccgctgcacgccatcctgggtgatagattgagactcagtctcaaaaaaaaaaggcaacaaagtactttcctttggaaaagagtgcccactggctgggtgaagtggctcacgcctgtaatctcagcacttgtggggctgaggcaggcagatcagttgaagccaggagtttgagaccagtttcatgtggccaacatggtgaaaccccgtctactaaaaatacaaaaataagccagatgtggtgtcatgtgcctgtagtcccagctactcaggagagtgagacaggagaatcatttgaaccctggagttggaggttgcagtgagcagagatcggccactgcactccagcctgggtgacagagtaaaactc

SEQ ID NO: 506377 - DNA, 642 bp, Homo sapiens
  misc_feature (260)..(260): n is a, c, g, or t
  misc_feature (438)..(438): n is a, c, g, or t
  misc_feature (446)..(446): n is a, c, g, or t
  misc_feature (459)..(459): n is a, c, g, or t
gccctggtgaaccctatcactcactacccctaactggcatatatgacatctgtgccttttcaatacacccagtttggacccctaacttgctgggcagccttaggcaagtcagttcacttgagtcttagctctcatctgcacacacaaaagcagaataatctatccctcccctacttcaagtctgttctgacagctcagtataaaaacatgcaggaggttcccacctctgtgcctgacacttgggtataaacacaagtgtntaagtgaaattttcaaagttggcaatatttggtcaagataacttccctactcagaaactgaaatatattccaagccctaactctggaatctccagtccctggtctgctaccataccacctttacccaggcctgagaaatgaaagatagatgttttaaggcagcacttcccaagtcaantgaggtangggtgagtggtcnggattttgtttaaaatgcagattccaactgacaaggtcaggaggttaagttactgcaaacaagctatggagcataagattccaaagaaccataatgcttctagactttttttttgagacaggaatttcgctcgtacccagactagagtgcaatggcacgatcttggctcactgcagataggtt

SEQ ID NO: 506378 - DNA, 275 bp, Homo sapiens
tagcgggtacgcggtcagggtggcgtcgcgtcccaggccggcataagccaggaaatctgcaggtcgggcgggggcaaaagaccctcggccgctccggccattcgatcaaaacgaccgcatcttcacgcagtaaatcccggaatcctgcgtccaaccattcgcgcgaatcactaaatctataaaaatcaagatgatagaagtataagttagaaactttataggattcaagcagcgcgtagcttggactctggattcggcctgtgatgccgcattcg

SEQ ID NO: 506379 - DNA, 244 bp, Homo sapiens
  misc_feature (46)..(46): n is a, c, g, or t
tctagacgatccccgtacacggtagattttggagaaaatcttcacngtttatacatctgacaagactaatatccagaatctacaagggactcaaacaaattagcaggaaaaaagaaagaaagaaaaaaaaatcccatcaaaaagtgggctaaggacatgaatagacaatcctcaaaagaagatgtacaaatagccggcaaacatatgaaaaaatgctcagcatcactaatgatcagggaagtgc

SEQ ID NO: 506380 - DNA, 1345 bp, Homo sapiens
  misc_feature (471)..(471): n is a, c, g, or t
  misc_feature (473)..(473): n is a, c, g, or t
gacgcatatgaggtgaccgttcaccaaccgtgcccaagacccatccctgaatggggacccacaacagcagtccataggaaatttgctcgttgatgctcgtgattgtgatcgacgccagagttgatgggtaaccgacgctcatgcattgaagcgtcagggcatgtctgtgggttacccacatagctagtctatcacgctgagtagggcacctcgtgagaagtgccgcgaccgaggctgacgtgatgtacgcgtatcatcactgctggaaatcgtaacgtctacaccatttgacctacgaattccatgactagactcacagattatcctgcaacgattggtaggaagcgcatcaagatagcctgttgagcaactaattgcacacaactagtaccctgagtcccatgacctacgaacgagattctcaaactaagcggtattccaaacgtgtcacaactttcaacttgcgtagcnancaaaaacctgtctaatgagggtatgtcgctgtctgagcaacctatagtatgtcatggaatccaggtctcgccatcctttcgagacgacgtcatgacgcctcatattgaatcgttgcgcgtctagtaacgacatccggcagaactgttttccgtgctccagaagatgccagacactccatgaaccaattccggactacatgccccgtgtgggttgtactaggttcatcacgggcatctccatcctgcgtggtgggctccgtcatcctgctcatcgttctgcatgacctggaggctagctgggcctggaagtgaacacactacagtgatgacaccaaatacaccgatggccttgcctgtggctgacttgaatccccccaacggtgaagcccaagaaggctggatcatctactcaggcggaacaccccttacgtggacgctggtcctgaagaattggcccaggttctgctccaccgacagacggcacaggaaaggtgtcctgcgaacctggtggcacaaacgggcaacaccgagaggagcaagcataaccagtggtggacgcaaagacggacaggggcggagagacaacacaacaagagacggaagagaatgaccagcaggagagagccaacataaagagaggccaccctgacgggacgccgccaacgactttgattccacagcagggtgagacggcgaccgacaagaacacatactgcataaagagaaagcggaggacaaccataaatacacagacatggaagcaaaacaccgaggaactcacaacagagattacatcaaatgcagacgatgggagagagaggcgcgagctccgacgcgactgacgtctacattggtctgagcactgactacct

SEQ ID NO: 506381 - DNA, 974 bp, Homo sapiens
agctcccagcatatttagataatagggcaggggaagcagcctctttcttgctagagctggattatgctcactatgctccactgtcccatgacacttgtttgctaaatgtctgtgcccatttgctgtagcatacacgttcagaattaagagtaggagaaagaatgtgctgagtgttttcctcccttggcctctacctggaccatcatccgcaacagcaccagtcaacggggagagacgaaacgagaattcttttctatagaagcgagtgggggcggggatgggtagggatttatccaactctaagccgcatagacgctcgcagcgttagtgacctcagtgtgctcttcgcattccttcttactgccctgtcctctgcctgggaagaggcttcgggaactaggttcatagggaagggacaacatggaagaaacagcgcatttcacattgtcatcgaacagggcatataaccatgcattctgtaccctgatctggccatatagcgtctcacaactgccagtggcgagtgtccactcgtctgtcagttagctaccgttaactgtccagccgttactacctgtgggatcggtgcctggtctcgtcttctctgtgtccaggagcaaagccagctaccttaaaacgtgaaacgtccagttctacgtctcgggaaagacaggaggtcctacctcaggaactgggggaacggagcgggaacctaggacctggggccgcgaggccgggactcaggcccccgtcaaggatccccagaaaatggcattgagctactcctggccggtggcgactaggccgttcgatgcaaagacctaaaccctagtcatcggacccacaggcccctagcacccaaaggcagcaagggcacagggcgaatacccatgagactccaaggacccgccgcaacacacagcgcggcccacccgcccaacacaaacccccatggcggcagcccagcacccaca

SEQ ID NO: 506382 - DNA, 172 bp, Homo sapiens
tgcatggacactgaaggacttcaccgtataggggcaggaggctttctggtgggcagtccgacggggcatgtgccctaatgccatggggtccctatctcgtactcagtggccctggcccagggagttctcgcttctcgtcctgtgcttgtccacgggagtggctgacttgcca

SEQ ID NO: 506383 - DNA, 320 bp, Homo sapiens
agcggaggtcacgtcatgagatccttcctcttcgtgtgcctctcccatcttggtctgcatctgtctgcactgatctccagcaacttcactttctcatagtcttctcctctgccgcagatgcctttttcttttcctcttcctttaggttcccactccaaacagagctttttgtggcttcccaagtttgcacggtaattttcagtcttttatcttacttccacaatcctcctggtgacttacattaccgacgcttacttccgcactcaggtgcacgctcccggaactttgcgcacgtctcgtgttcgcgacttctgacgcgg

SEQ ID NO: 506384 - DNA, 421 bp, Homo sapiens
  misc_feature (175)..(175): n is a, c, g, or t
  misc_feature (206)..(206): n is a, c, g, or t
  misc_feature (232)..(233): n is a, c, g, or t
  misc_feature (260)..(260): n is a, c, g, or t
  misc_feature (341)..(341): n is a, c, g, or t
  misc_feature (352)..(352): n is a, c, g, or t
  misc_feature (383)..(383): n is a, c, g, or t
cttactgtcatacagagcggtactagcgtcgtgctgtataaaatcatttgcacattcctgagtagaggtatactgattataagacccaaagggtaatttctatagcaaaataccataaaatcagtcggagctttgtatacaaacaatggaagaccaactttggtagaacttttgnccgcattgtgatctgaggagtctggaatatnggagcgtttgtaataccacattcatnnatttcttatgttggacaatatgcaccnaggtttaagatatgtacctcctctgagtgggcctttgactagaagagcgccaagttttaatgaagcgtagttgtgcatccnactaaggaatnatgttttatacagctaagagacccactgctntgcctgaaagggccgttctttaaatttgtgtgcagcga

SEQ ID NO: 506385 - DNA, 568 bp, Homo sapiens
ggacgatggacccagctgctgagccggctgagtgctggtgtggtgtgaccacctgtggcacctctgccgccagctccagcacccagcagtcagccctgtgcctggctgtgtgatgactgttcctcctcctccagctgcagccccaccactgcccagggccctggctaagccctgcctgtcttcatcccctgtgaacctgctcccctggaaatgcatggatgtgaactggctgaatgctcccaattctctccgaagaacaagtaatcatgtgagtgctgtgtgcctgagcaccccatcgtcatctgtgtgtggtgagacctggcagctgggaagaccacacagtgtgcctacagtttctctatgaagcatggcttcagcagttgaatgacatgcatcatacggtgtcactggatgcccctgcctgacgtgtgccgcctgttgtgccatgtccgcatctgagttggccaatgtgagatgaatcttgtccacagctgcggtcgtctccataccacgatcctggtatgacaggaaactgtgacacgaggagaccagaatcaagttcattgac

SEQ ID NO: 506386 - DNA, 200 bp, Homo sapiens
ttgggggggggggggggccccccccttttttggggccccctttttagggggggggggggggttttggccccccccattgggggggggattttttttttcttttgttccttggggggggggtccccccccccccggcccccggtttttttttggggtttcccgggaaacgggcccccccttcttttaaggtttgggcggga

SEQ ID NO: 506387 - DNA, 405 bp, Homo sapiens
tctagaggatctgcaagatcctattgggactgtcagtaggagggacatgccaggttcatggagtgcatgccttcagcagcctgaccagctagggtcttgcgcctcacctcatagctgtcaccttgacactggagtccctcctgcaggacccccagtgctaggcacatctttggcaggatcaaagcccagcaccttgccaagagctatgcaggaactccacaatggtccatgcagtctgagaaggctccactgagcaatgtcagaccaggtactcgtgagaagtcaggcaggggctgctggtccgtcagacacatatcctctggcggcttcttcatttcctccaagatcatctgctgcctctgccgttcctccaagcgcctctgtgtggccagggtcttatctgct

SEQ ID NO: 506388 - DNA, 694 bp, Homo sapiens
agggcccccgggtggaaaggcccccaagaaaacgcggggcttacaggggagcattacaaaagtgtcaagagaagaatgaggggaggcccaaaacgaagtttggtcccacgccgtagtgatgcttgaaccagcgccgcggccgcataaagattggtagcctgtgaagaaggggtcataaacatgtacataggcacagtagttagtaatgatagggcgggagggccaaaaacaacaggtgcgtggggagagaaagagccctgcttctcaagaagaggcccccgtcggtgaaacctcaaaaaagtggaatatcgcgcccctcacaccaaataacggcgtcttctcgttagggccacaccgtgaccacagcatattgcgtgagagtgctcgccgccgcagccgttctgcggggccttgggccaatttcttggctgcatcatggaatcctttacactggcggttccatacccccctggatcttctccctcggtgggaattaaaacgccgagttacccccatacgctgtgtcgaacaacgaccagtacgatcgtgtaactacccaccatcagcgaggtagggcgcgtaagactcgcgcgcaatccggaacgaccgaagcgcacgcgaagacacctcgtgaagaagacagggaccgtcggcccgcacaagcgtcgaatagcatacaccactacgaagatta

SEQ ID NO: 506389 - DNA, 931 bp, Homo sapiens
  misc_feature (931)..(931): n is a, c, g, or t
gaggcagaggttgcagtgagtcgagatctggccactgtactccagcctgggcgacagagtgagactctgttcccccactcccccaataaaaaaagtctgatgagcaagaaaagttcaggggtagagttgcttgtgtaattgagatgtttaacagcatcaggctaattccttgccatagtagaacccagaagctctgagctgtgtgccaggagatacctccctggtcagtacttagtaccagagttttccctagattctttaattttagtaaatgtgctcacattgagtcaatccttacataactgggtatgttatttccagcccaaggaatgtttatttttaaaaatatttttaattatccataatttcagacttacaaaatgtcgcaagtattcccggataccatttacctagatttgccaaatgtaaacaatttgcctcatttgctttctttccccttctcactaataattttttcctcaacatttaagagtaaaatgcagacatgatgcttctttatcctttaaatatttcagcattcccccccgctcaaaaaacaaggaattctcgaatcacagtgtagtgatcactatcagaaaattaacattgacacaaaactgttatctaattgataggccgtattagatgtccgtatctcataagtcgttctaaaatgtaatctaagatcgcgtgcatcaggttcctatttcctcgcctcttactcggactagtcgacggtaggtcatggactggacttggaagatcagccggttgtacaggaacaccatggtgcgagtgtccacacacgatgccctgggaatgcgcgatgccattcgacgtagcaggcggagacacagccacctgtggcgacgacgcccactccaaagcagcgcgcaacaacccgcgaacgcgtgacacaacatgccttccn

SEQ ID NO: 506390 - DNA, 672 bp, Homo sapiens
gcactttaacacctaacagtttctatgtgttcatagtggacttgtcaccagaaatacacacactggatgatattaggagattatatagatctgcccacacgcacgctgcattggaccaatgtgtgacttgtactggtccgatccttctgaaaattcggcaatgaacccaatcacaggaacatcttagtcacaatacagttcgaggctgtatcttatttttataactatccagcagtgtgtgaatttttgcaaaacaatacaattagtcatcgattcattagagctcatgaagctcaagatgcaggctatagaatgtaccagaaaaagtcaaactacagggttcccttcattaataacacatatttttcggacacctaattacttagatgtctacacagtaataacgctgctgttattcaaaacgtatgacaaatcaatgtgcatgacatattcgacagtataactgttctccacatccttactggttgcctaactttctatggactgtcttcacgtggtctattaccgccgtaggacgaaccaagtgcaccgaaaatgttggtaaatgtcctgagtacttggctctgcatgatgcacctacatgactgacaaggtgaagaccatgtatagatggatcaagcctgcagcccggaacacaactccataccgcaa

SEQ ID NO: 506391 - DNA, 313 bp, Homo sapiens
cgcgtatatgctgtctcagttttctcctctataaaatagggtaactaatagtatctacctcataggattggtgagaggattaaatgtattgctataagacaagcacttggaacagtgcctggtgcgcagtaaatgtttcatattttctagtttttttttttaacctcaaagtaaaaggtgagtatgaagtcactgtacaattagttagatttgggaagtgaatagaataaatcatgtatctcttccctttttttttttttttttatttttttttttttttttttattggggggggaaaaatataggggggccc

SEQ ID NO: 506392 - DNA, 412 bp, Homo sapiens
  misc_feature (36)..(36): n is a, c, g, or t
ccggggggggttaactgctctttttataccatttgntgccagtgcttgattcgtatctggggagcgctggctgggcggatttgtccctgcgcctgggcaatcgcctggcgccattgattggtgcgcgtgagggcgaggtggtgatcaccgataccacctcgatcaacctgttcaaagtgctcagcgccgtcttgagtgtgcagcgccaacgtacacctgcgcgcaaggtcatcgtcagcgaagcgagcaactttcccaccgacttgtacatcgccgaaggcttggccgaattgctgcaacaaggctattccttgcgcctggtgaacagcccggcggaacttccccaggctatcgatgcggacgtggcggtggtgatgctcacccacgtctactacaagaccggctatatgta

SEQ ID NO: 506393 - DNA, 469 bp, Homo sapiens
  misc_feature (42)..(42): n is a, c, g, or t
  misc_feature (55)..(55): n is a, c, g, or t
tgaatgtcataactaaagacaatgtagagattgagccccccncaatccccttgtnttagacatggggacacagagacccaggcagggtacgtcagcaacttgctggtgattacacaactacagacaaggacgcggccagccctgaaacccagggtgaggagccaattagacaatgctgtaacagtctatgaaacttaaggactgctttgcttgatggaagtaacaatcccgctatgtacaaggaacagtaaaactgaggctaagggcaatgcaaggatggcacatttcctaagtacagagatgacaggaagctctcgtcacgccatcttggaaagcctctagaagtggtgtgtggatgtctggtctcccatgagattcctctgattctgcatcttcttcaacactactcatcagctgtgtcatgattatcattcctgagcccttgcttaaattttggatcaatttcaaa

SEQ ID NO: 506394 - DNA, 175 bp, Homo sapiens
atttgacaacgtactctatgcttgtgggaaacacagccttgctagtcatgttaatagaatttcagggggaagcagaagtagatagggtgggtttagagctgccctctaccactcgagaagtccttgttttgaccttgttcgtactggtatgggtgtacggggtaccgacgctcga

SEQ ID NO: 506395 - DNA, 221 bp, Homo sapiens
ttgatcccctcaactgcaaattgcccagcatccagagggtgaggacgaggagcgcgagcagatcaagaccctcaacactaatgtttgcctccttcatcgacaaggtgcggttcctggagcagcagaacaaggttctggaaacaaatgtggaccctgcatgcaggagcagggcaccacagcctgtgagtgcagaacctggagcgcgttgttctgagcagtac

SEQ ID NO: 506396 - DNA, 126 bp, Homo sapiens
acttgagttcagcagcatcttgtactcttggttctggcactccatctcactgcggagtctcgcatcagtctgggcctcgatgctgctgatgagtccctggatctgctgcagctgcagggcatagcg

SEQ ID NO: 506397 - DNA, 430 bp, Homo sapiens
tctgataagcaatgcctgttcctaccagtcatctgtgcatgcttgcagagtatgcagtgagcgatccgaggtctgtttgcagtagtcagatgcagcctggtatacttatgcctcataggcatagtccaagctatgggtcggctatgtgactggtcatgcggttaagactcagtgtcaggcgtattataccatagccgcctagagttcagagtagtccggcaagtcctattgatccagcgatggtggctccaacatgggctttaggcagtcatcagtgtcgtcagtatggcggcatcctgtctatgcaacctaatgcgtaagctcgtcgtattgaggtgctggcgcatgagagtgatagtgcctggtcactgagactgagtagtagaatgtctagtgagtctaggctgtggcaagtgtagcagagtgcgtt

SEQ ID NO: 506398 - DNA, 189 bp, Homo sapiens
catccaggcgcacttctccaggaagctggggaagagttggggagagggaggcaagaagattccccacccatcttaggcgcagggagcggtcagggaggcgccagaggtgggccagagctgtgacctggcctcacaccccgtcccggtggggctctcaggcccctgagggccagaagtgcgcctgggtgc

SEQ ID NO: 506399 - DNA, 138 bp, Homo sapiens
ctagttgaactgcaggaggggccggagccggcgggcatccacgaccatgtgaagcgggcctgcatgtatagcaccaaatacaggataagtgtacatggagaaggaaggcatggccatgagaagaaggacttcgctggg

SEQ ID NO: 506400 - DNA, 746 bp, Homo sapiens
ggaagaggagtgaggccaagtacattggctcagctgacttccaggccaaggagatatttagcacctgcctggagggagagcagaggtgccacaggtttgtcgccctctggccccaccccgttgagcacagtggactctgtatcccaggtgtgcaccggcagtcgccctgtggaacctgaaacattccctgtatagggtattccctgcagttctggctttgggcaacttttgagttgtctcctcagtggctctcagagacccgaatacagcaagaagcggtgcttccccccttgtgcgacaacccagtaagagctgatccagacataaggtgtccagaaggttaggcagggtggagcggaagagatgagcgagaaacagataagagtgagcatttttccaaaggtggattcctagcaaggattgtaaattgcttggaagcaacgggtgagcttccatattcccaccagagtgtgggaatgctgtggcatgtgattgtatgatctccttgcaagctcagtgtgagttgattcctccaatatgggccagatgctttggaatgatagggaaagtctacatatcaatccagtgtcctcttgtatagagggagtatagtgtattcatctcagtgatccatgtgcttagtgaagtccactgttattctctgtggggacaagagctgggccgttttgaatgggtacttgacgtgggtccccctctgtgagtctgaggatgcctcacttcctgta

SEQ ID NO: 506401 - DNA, 474 bp, Homo sapiens
ttcacaggtacaaagcaagttctaagtcaaggccacaccaattcctacagtattcgtatcgcgtctcaattctcaaaactaacttttaatacgcttaaacttaccctaagggattatacatgaaaatataaactagaatgaacaatcatgagaaatattgctttgaatcagggagctagcaccttagagcttgccacaccgcaggtctccccggggtgtgcacggtgatgtggtgtatcagatccaccatttaagcatactaaaagtatttagacttagataacatcactctgaagtatactaccaaaatgttacttgagaaaagctgaaaatagtattagtatatgcattatcacatgctagaagaaaatatggcatgagaaaacattgaagaggtcattttttactccagatcatgcagaaactcagtggtgcaaaatgggtcccctagtttcctctattataagtgctatt

SEQ ID NO: 506402 - DNA, 697 bp, Homo sapiens
  misc_feature (692)..(692): n is a, c, g, or t
acttagggagctggccaggcacttgcaaggttggacattccaggcaaggtacacagaatatgcagaggaacctgggcgcttagagggagtgtcatgtctgcagaaggccaaaccatttggcgtacctggagctcccactaaaggctgcagcctgtgctaaggaaggaagttgagccagaaggtaggttaggtgccagctcaccaaggctatcatccaaggcatggctgaactgctgactttattggttgtgacatgacacgttaggataggtcactccatgagacaggtgattgtgctttcatatggtgtgaaaatgatggtgcttaaactgttgcagaactaaaaggatctgtgccttacatttcaagtcaatttcacatttgtgtgaagcttatcctgcttctaagacttgaaagttcatgtgcctctgctgagctgcagcgctagtaattaggtgcctcagtatactcaccgcaacccatgctcatgaaaagacttgagaggcagaacatacttgtcttgaagatagctgcactcaagcgtaccgaatgagtgcgctgccttcacgcttgaattactcgtacttctctaggatgcaccggccatatcctaatgtcagaaaaccgtgccatagtgcggcgctcttaccatgcacagatatattccgaccgagtgttgattccaactgccntcccg

SEQ ID NO: 506403 - DNA, 592 bp, Homo sapiens
caagaaatggaagcttatacacccaagttaactcaggttctctcaagcagtgctgtgatggtactactggcatgcactacttagagagaagctggactaactaggatgtataaacgctcctgaaatccagcagcatttaagacagctagccgaccggaaacccaacagcaggacaaccaagaacctgaagagagaagacaagaggtctacacaagacacgggcaagtcaacggactagcgacaaagcacactagacaacacagcacccacagaagacgacccacgacagagacaaacgtacacaaacaaaacccacagaacagcaagccaacaccgcaccaaacgacgacggcacagagcaacaacgaagaaaaggacaaaaagaacacaccatgacgaccgaagagccaaaacgaagcagaatcacaagaagaagcagcgcggcaacaaagaataagcaagcacggcagaaaacaaagcgaaccagagaaacaataagagggaacccacgaccacaaaccaccacagcgacaccaaaaagagcaaaagacgcaacggaacgaagagaagacgcaacaaaagacagacaaaa

SEQ ID NO: 506404 - DNA, 330 bp, Homo sapiens
gaggatcccggctcatttcatgtcatatgtagaacacagtgcgctacccaccacaactccgtgggctcaagagatccttccacctcagccttccaagtagtctaagaccacagggcacatgcaacaacacccaactccttctttttctttctcctactaccattcttactatgtacaggttggtcatagatataacagtataatcaaaatattttttctgttctagatcagaaaacaaatcatacagcatgggtcggccatgtcttggtctcttccatccctctttaatagtgattactgcaagagaatctccctgtcaccaaaatgcca

SEQ ID NO: 506405 - DNA, 275 bp, Homo sapiens
atcatatgcaaggcagaacctcaagggagacctacctcccagcctggggaaggtgagtgtcccagaggaggagactggaacgcaatgactgcaagagggcaagggcccaactaaactacacaccgtcttactcacggtctttggggaagaggctacaatggggacagacccccaggagccatcctgagtcaccttccgatttttaacccaggcgcaaacggcgtggtgaacaggatagcttaagaggttttatcaacccgagaaagtacttaccg

SEQ ID NO: 506406 - DNA, 286 bp, Homo sapiens
tgggcctcaccctgtcaggcgcggtccaggctcaggcccaatcccagcccgagagcgccacgacgacgctgccgcctgccacggtcgtggcagaccgtacgggcgaagcagtcaaggtggagcgggtgagcagcggtgcgctcggtgatcgcaaggctgtggatacgcctttctccgtgaatgcggtatcgagcgacgagatccagcagcgcctggcgcagaccgccaacgacgtcttcaagtacgaccccgctgtgcaggtgctgagcgacagggtaccgagctc

SEQ ID NO: 506407 - DNA, 688 bp, Homo sapiens
  misc_feature (31)..(31): n is a, c, g, or t
  misc_feature (85)..(85): n is a, c, g, or t
  misc_feature (88)..(89): n is a, c, g, or t
  misc_feature (98)..(99): n is a, c, g, or t
  misc_feature (115)..(115): n is a, c, g, or t
  misc_feature (137)..(137): n is a, c, g, or t
  misc_feature (141)..(141): n is a, c, g, or t
  misc_feature (214)..(214): n is a, c, g, or t
  misc_feature (247)..(247): n is a, c, g, or t
  misc_feature (268)..(268): n is a, c, g, or t
  misc_feature (271)..(271): n is a, c, g, or t
  misc_feature (273)..(273): n is a, c, g, or t
  misc_feature (283)..(283): n is a, c, g, or t
  misc_feature (307)..(307): n is a, c, g, or t
  misc_feature (314)..(315): n is a, c, g, or t
  misc_feature (325)..(325): n is a, c, g, or t
  misc_feature (338)..(338): n is a, c, g, or t
  misc_feature (340)..(340): n is a, c, g, or t
  misc_feature (346)..(346): n is a, c, g, or t
  misc_feature (360)..(360): n is a, c, g, or t
  misc_feature (387)..(387): n is a, c, g, or t
  misc_feature (390)..(390): n is a, c, g, or t
  misc_feature (393)..(393): n is a, c, g, or t
  misc_feature (395)..(395): n is a, c, g, or t
  misc_feature (407)..(409): n is a, c, g, or t
  misc_feature (416)..(417): n is a, c, g, or t
  misc_feature (431)..(431): n is a, c, g, or t
  misc_feature (433)..(433): n is a, c, g, or t
  misc_feature (435)..(435): n is a, c, g, or t
  misc_feature (443)..(443): n is a, c, g, or t
  misc_feature (468)..(468): n is a, c, g, or t
  misc_feature (484)..(484): n is a, c, g, or t
  misc_feature (489)..(489): n is a, c, g, or t
  misc_feature (501)..(501): n is a, c, g, or t
  misc_feature (514)..(514): n is a, c, g, or t
caggacgcgccgttcgcgccgccgccgcaantcgtgcccatccgccggggcgcggcgccccctcccggcggcgcccccagcaagntgnncagccaagnnggagaggcggctaagntgttaggaggcttccaggtggnaccngctcccgatggccagtttgctttcctaattcccaacggggccttcgcgaacagcggacctgtcatccccgtcnacaccagcaacagcggcacctcacgagagcacnaaaaaaaaaaaaaaaaccagnagnancaagctaacngcgaacaccatgatggaggccgtngcggaannaagggagaanaggccaccccacnanaaaaanaccccaacccacanatcttcccaccgaactctaaacagaanttnaanantggagaaagagnnnttttttnnataagtggtacttngngntttttaantttctaagaagttactttttgaganagagctgtattaagtnactgnccatgcacatanttgtatatatttnatatgttcatattggattgcgcctttgtattataaaagctcagatgacatttcgttttttacacgagatttcttttttatgtgatgccaaagatgtttgaaaatgctcttaaaatatcttcctttggggaagtttatttgagaaaatataataaaagaaaaaagtaaaggcaaa

SEQ ID NO: 506408 - DNA, 855 bp, Homo sapiens
  misc_feature (236)..(236): n is a, c, g, or t
  misc_feature (843)..(843): n is a, c, g, or t
taagacgggacgataaggctaggtacgaggctgggtggtgaaaaaattaattagttcaccttgctcacctgcggtgacagggacagctcaggctcttggtgactgtggcagcgggagttcccggccctccacacccgggccagaccctcggggccatgccttggtggggcctgtgtcgggcgtgggcctgcaggtgggcgcccccgacacgacttgtgcttcccttgttgccttanaaaaaacttggccttccctgcaaggccacagcaacccaacccgggggtggttcctgggggaccccaaggggggttggggggggtcaccacccaagaagacgaggcagggggggcccttggccgtgcttcctgcaggatcatgcagctggggcgcgggcggccggcggtttgggaaagccccaatccccagcccttctaatcaaaggtcactgtgcattctcccctttcacgcccgtgccccccaggggccttcccctttcttgcccccccaggggggggctcccctgttttgctccaggcgtagcgggaaggcttgggtcggagcattaagtcttcgttgtaattataattatttaagctttttgtgggccaggtttgcgcagagaaccggttctggttgcccttaggcaagtatttttcccaggtttgaaccgaaattaattcctagatcgtatttgttcgatttaatatttgccaaacacgaagagtaggtttcgaacggtacacttttttatcagcagaggagttgactaccaagtggcgtatgacgttgtaatcttagaactttccctttggtggtgtattaccctgtgttaattgcgttgtnagctttatagtt

SEQ ID NO: 506409 - DNA, 189 bp, Homo sapiens
gtattgaaaaagtagcaagaagactggatttgggcaagcatggtctacaattggttgtgaaatactgaagctatgaagaataaatgctatcaactttggattatgaaaccccatttatgattcttataaatacacttgaaatacaaatgattaaactaaatttgggtccagtgacattactttgcactg

SEQ ID NO: 506410 - DNA, 923 bp, Homo sapiens
  misc_feature (23)..(23): n is a, c, g, or t
  misc_feature (78)..(78): n is a, c, g, or t
  misc_feature (207)..(208): n is a, c, g, or t
  misc_feature (217)..(217): n is a, c, g, or t
  misc_feature (233)..(233): n is a, c, g, or t
  misc_feature (237)..(237): n is a, c, g, or t
  misc_feature (243)..(243): n is a, c, g, or t
  misc_feature (247)..(248): n is a, c, g, or t
  misc_feature (251)..(251): n is a, c, g, or t
  misc_feature (289)..(289): n is a, c, g, or t
  misc_feature (294)..(294): n is a, c, g, or t
  misc_feature (314)..(314): n is a, c, g, or t
  misc_feature (323)..(323): n is a, c, g, or t
  misc_feature (330)..(330): n is a, c, g, or t
  misc_feature (336)..(336): n is a, c, g, or t
  misc_feature (346)..(346): n is a, c, g, or t
  misc_feature (349)..(349): n is a, c, g, or t
  misc_feature (368)..(368): n is a, c, g, or t
  misc_feature (398)..(398): n is a, c, g, or t
  misc_feature (411)..(411): n is a, c, g, or t
  misc_feature (417)..(417): n is a, c, g, or t
  misc_feature (511)..(511): n is a, c, g, or t
  misc_feature (522)..(522): n is a, c, g, or t
  misc_feature (524)..(524): n is a, c, g, or t
  misc_feature (534)..(534): n is a, c, g, or t
  misc_feature (551)..(551): n is a, c, g, or t
  misc_feature (566)..(566): n is a, c, g, or t
  misc_feature (582)..(582): n is a, c, g, or t
  misc_feature (618)..(618): n is a, c, g, or t
  misc_feature (678)..(679): n is a, c, g, or t
  misc_feature (693)..(693): n is a, c, g, or t
  misc_feature (731)..(731): n is a, c, g, or t
  misc_feature (738)..(738): n is a, c, g, or t
  misc_feature (740)..(740): n is a, c, g, or t
  misc_feature (767)..(767): n is a, c, g, or t
  misc_feature (791)..(791): n is a, c, g, or t
  misc_feature (798)..(798): n is a, c, g, or t
  misc_feature (851)..(851): n is a, c, g, or t
  misc_feature (854)..(854): n is a, c, g, or t
  misc_feature (856)..(856): n is a, c, g, or t
  misc_feature (896)..(896): n is a, c, g, or t
cgctgcccggagccggccggcgngacctggcgcccaatcctgggggacccggtgccgtggcccaggggccgggccgangtcccgggggcggtgccttgcgggcccgtcccggggcggtgcctggtgggctggccccgcggttcctcccctctctgcgggcccagtcgccctttggccgggcgagctaatcgtcggctcaatgacaannaggcccganccttcccgtccaaaanctanaaaaanaaannaanaaaacccaaagcggcttctttgctgtcgccgcccccantgaancaaaaactccccggctccantaaaaaaanaactcanttaaantttccccaanaancggccctccgggacgatanctaaaaaaaaacggcgcccgcatctggaanaagctggcgaaanacttantatccgagggctcgggacttggcgccatcgaggtcatggggacccaggatccagggaacatgggaaccggcgtcccagcctcggagcagataanctgtgccaaanangatccacaantttattgccctgaaganactggcggcaccaangatgtgcaggttacanactgtaagagtcccgaagacagccgacccccaaaanagacggactgctgcaatccggaggactctgggcagctgatggtttcctatgagggtaaanntatgggctaccaantgcctccctttggctggcgcatctgtctggctcatgantttacananaagaggaaaccctttcaagctaacaangtctccctaagcaacatgataaancatatangcatgggcttgaggtacctgcagtggtggtaccggaagacccatgtggaaaanaananacctttcatcgacatgatcaattctgtacccctaagacanatttatggttgtcccttgggtggcatc

SEQ ID NO: 506411 - DNA, 278 bp, Homo sapiens
aaaaaaaggggtttttgggggggggggggttttgggaaacaaccccccccccctggggcccccttttttgggggggggggaaaggggggtttctttcccccgttggggggccggaacccccttgggggggggggttttcccttttgggggccgggccccccccccggggggggtggggggtttttccccctttaaagccctttttttttggggtttttccccccccgggggggggtgggtttttttttttggggtttaaatttttttttcccccccca

SEQ ID NO: 506412 - DNA, 199 bp, Homo sapiens
gggacatgtttctaggagaaccgcgtcatactttatctatagctttcctaggtctcagaagcatcaagtttaactgtggacattggatttggtggacattgtttctaggagataccgcgtcatacctttatctatagccttccgctaggtcttcagaagcatcaagttttaactgtggacatcggatttggtggaacat

SEQ ID NO: 506413 - DNA, 334 bp, Homo sapiens
  misc_feature (68)..(68): n is a, c, g, or t
  misc_feature (194)..(195): n is a, c, g, or t
  misc_feature (253)..(253): n is a, c, g, or t
  misc_feature (271)..(271): n is a, c, g, or t
  misc_feature (293)..(293): n is a, c, g, or t
  misc_feature (327)..(327): n is a, c, g, or t
ggcccttcccccagggtcccgtagtacccttgccatggaccccacaggacttcctgcacctggcatgntgcccttttgccatctttggggaccggtgaccctagtggctgctggggctgcccaaccttctgcccccatggtcatgttcccccatttcccagctttgcccccccattgcccccccagcccccgcnngtcccagtacatgccagctaacgatgggccccaggggtacccagactacccagaccanagcccataaagggcagcntttgggcaaaatatgtgctggncaataaatgggtcaaaaaatgagtaattttttgnctgccca

SEQ ID NO: 506414 - DNA, 938 bp, Homo sapiens
caaggtacgaggggggggcccgccccacaactttggggggaacgacgcaagtcggacagagccccaccgcgtggtgcgacgaacaagggggtgggccccacgcggggcaacacgaccaaccgacattggggagccaaccggggggagacgcaacactcaccaccgtggtgtgctgagggcgacacacccaccccgaggggggtttttctcctcagcagaagcgaggcgagaccaaccccctcacgtcggggcgtacacacgagggcagccgcccccacagggggtggtgacaagtgcatacacatccccggcgaccaggtgtgttgcccaccaccctccccaccggggggattagccgggccgcccccgcttggttttgttctcaccccgttgtagagcagccccaacatcgtgagaacagagaagtcatctttgtttgatagctgctctttctctctcgattactcgcacgaagcacgcggtgagtagttcgtcttttttctctctccacccccccctctttgtttggttgaagaacaacagtcacttcgcatagtgaactcctggtgggccgtctcgcgacgaatcttctcctcttcttccttacggaggagaaaatatgtttttcctggcgcccctccccgccccgcgctgggccgcccctccccagagagggcggggggtgtcttcttttgtctgacccccccctgatgcgccaccctggtgggcgggggccctcctctctcttttttttttctgctgggcgctcccttccctcccctgccgccgctcggggctgggagtcctgttttgttcatcgtctgtcggggagcaggttgctgtttgtgtcgcctgcgccgccccccccttgtggggggggttgtggggggcccccttaacacccccccccgtttttttttttcggggcccttttttta

SEQ ID NO: 506415 - DNA, 357 bp, Homo sapiens
  misc_feature (332)..(332): n is a, c, g, or t
tcatggcaccaatcacagtttcatagccacgtcccattcccctatgatttgggcctatggggggataggatattccagaccccaagtaaagtccatgccaccccaagacactttgtggtgcctgggacatcttagcacctcctttgacacctgggcattggacatatcataattccagtcacaactatactacaacctttattcataatcacactgatcagtgcctgatttgcactacccatccatatgtttttccttgtgggggaactaatattttctgtttattaccccaaaactccatgttttgtggacccggggtggcgggggacagnccttgggtttcacctcatgtattta

SEQ ID NO: 506416 - DNA, 856 bp, Homo sapiens
cagtcgtagctgctgccatcactatactactaagagagcagaaactcaacaccagcttcttcgaccgccgccggaggggggagatcccgattctataccaacacctagtctgatgtttgcggtccacctcgcttgaagtcttgtatgcgttatcctaccaggctttcggcatataatctcgccaatcatggtaacttatatactccggcaagataaatagacaccctatttggcataccataggtcatggctctgcagctagtgagtatcagattgggttctcctcagggtgtcttatcagtgtgatgcgagtagcactatatttgacagttaggaatagaccgtatgacaacacggtatgccactttttcagccttcccgagtagccataattcatcgctaggtccccaaccggtcgttcccacatgatatttatgctggattcgtccagaagtccagcggaaggcactctagtgaagcatggatcgtggctgcagtgcgtctgaaggcctagagaattcatcattttcttttccacgcgtagatgttgggccttgtagttgggctattcgttgttaggcaaaacttcatttcatcgtaggaaccattcgttactaccatgacactgtatcgtacgtttgtagacatcaacgttccacattatgtcctattcaattaggagcatgttatttgtgccagtcataaggaagcgctatcatttccagcgtggattatccccttatgctcagggcgtacgacccctaggacccaaacattacggcaccaaaaagttccatttcgcactaatcgatattcaatgcggcgtaaaatctaaagttgtcttccccaacaaaaa

SEQ ID NO: 506417 - DNA, 541 bp, Homo sapiens
atgttggtaggcacatcgtgtcaagtgaagtagtgttataggtatgggtttttctcccccttcaccaggtgggtggaataagttgattgtggccaatgtgtaatatttaaactgttctgtaaaataagtgtctggccattgtggtatgatttctgtgtgtgaaaggtcccaaaatcaaaatggtacatccataatcagccaccatttaacccttccttgttctaaaacaaaaaccaaagggcgctggttggtagggcaggtgggggagtatcttaatttctggaatttgggaagcagacagctttacttgtgtaaggttggaacagcagcactataccatgacattataaagccaaaaacctttactgtttctaacatttcctacgcatggctattgataagggaaggttaagttgagtattccacagaaagtggtaattatacgtcttactctcttcctccattagacaaattaggtaaataatgggagttcctaataatgggagcatacacacttattaaaagacacatagacatgatg

SEQ ID NO: 506418 - DNA, 624 bp, Homo sapiens
agcgggaggccaggacgtccccgtgacctcccccaaaatgctcgcagccccgccgtccccgggaccccccgggaacccagcggcccgctgtctccgggaccccacccagggcacccgtgcaggactacgtcgtccctgggacccctccagggcatcccagccagccagtgacagcacctggagaccccagcgcgtctacatcagccgcgagccatccgtcgccggagtaagacgactttccagggagaaacatcgcccaggcgcgaggccgggcctgccccggcccttcgctccggagtgtcctcgcgagaaacgccaactccacgacatccctagggccggcagaaacccgctctcaagacctgtggatgacccagacgccagaaaaacccgggtggccgtccactgaaagcccctaagccaaagggcatccagggaagacaccacttcaaccctataatacgaaccggggccaagcaacatgagcagcgaagagtagcacgccccagggctagacactccagatgaggccgggcaactcgaggccagcaacgggcacaagcaagcaggcacacaagaacaaagaagcgaggggtaccccccaaaggagcaaccaggtaaccg

SEQ ID NO: 506419 - DNA, 327 bp, Homo sapiens
cggcaggcatatgatctaagctgtatctgctttagggggactcaagcccagcaggactgtgtttcttgcagactcttaagaggtaccaccttgacggtcttggacaaaatccaagagttctctggattactagaaaaagactcttgttttcttcctgtactttctcccaaacaaatagaacctctttctctctctgctctgagccacttagagatggggatggactgacacaagtactcctatggccaccagctctaggacttcgctgggtcaaacctgaagccagcatagcactgggtttcacccaaggcctcacacacaatctta

SEQ ID NO: 506420 - DNA, 357 bp, Homo sapiens
cttatcaagaaacaatccaaatacccgtgctattgaacgaaatacacattctttgtttctataaactaagttctgcaactacaacatttttttgtgtaaatagtattatatcagtatggttctatacaatgagatttagggtgcattttgtaaaataattcgcctctccatacataacgtgcattttacaagtgaagcaaatgtcttggcctgacaaaccctgtgcgtgttgtacaattcagttttattacaaatcacaaatatagttaatccttagacctgcagacggttaaagagaatggctctagaagtcagtaaactctcatcagaattactttgcaggataatgtgatagcc

SEQ ID NO: 506421 - DNA, 164 bp, Homo sapiens
cccccccccccccctttggggtttaaaaaaaagggatttttttttggggcccctttcccgggccccccaatttgggttttaaacccccctggaaaagcttttcccccccttacccccggggggggggaaaaaaaagttttttttttttttttcctgggggccca

SEQ ID NO: 506422 - DNA, 986 bp, Homo sapiens
  misc_feature (27)..(27): n is a, c, g, or t
  misc_feature (77)..(77): n is a, c, g, or t
  misc_feature (103)..(103): n is a, c, g, or t
  misc_feature (120)..(120): n is a, c, g, or t
  misc_feature (135)..(135): n is a, c, g, or t
  misc_feature (195)..(195): n is a, c, g, or t
  misc_feature (199)..(199): n is a, c, g, or t
  misc_feature (220)..(220): n is a, c, g, or t
  misc_feature (555)..(556): n is a, c, g, or t
  misc_feature (670)..(670): n is a, c, g, or t
  misc_feature (672)..(672): n is a, c, g, or t
  misc_feature (834)..(834): n is a, c, g, or t
gtcaccctctgccttttctgctgcccntgcacccccctggctcgaagagaccccacccatcttgccctctgcgaggncactctatcagctctggggccttggngcctgttcgaccccttntacagccctggaccnacccgagaatagccagcagcgcagcagcctgggggctcgactctcccgtttcgagggggntttntgcaccaccccagcccgtggnagccccccggcgactccccattttcaatcgcatctctgtttctgagtgacaaagtgactgcccggtcagatcagctggatctcagcggggagccacgtctcttgcactgtggtctctgcatggaccccaggggctgtgggaacttgggggacagtaatcaagtaatccccttttccagaatgcattaacccactcccctgacctcacgctggggcaggtccccaagtgtgcaagctcagtattcatgatggtgggggatggagtgtcttccgaggttcttgggggaaaaaaaattgtagcatatttaagggaggcaatgaaccctctcccccacnncttccctgcccaaatctgtctcctagaatcttatgtgctgtgaataataggccttcactgcccctccagtttttatagacctgaggttccagtgtctcctggtaactggaaccncncctgagggggaatcctggtgctcaaattaccctccaaaagcaagtagccaaagccgttgccaaaccccacccataaatcaatgggccctttatttatgacgactttatttattctaatatgattttatagtatttatatatattgggtcgtctgcttccctngtatttttcttcctttttttgtaatattgaaaacgacgatataattattataagtagactataatatatttagtaatatatattattaccttaaaagtctatttttgtgttttgggcatttttaaataaccattttgagtgtaaaaaaaaaa

SEQ ID NO: 506423 - DNA, 334 bp, Homo sapiens
ggatcgagctcggtacctcggaagtgttatcgtacttaagacagattggcaatgtaaagtagtaaagaaagtcttaaatgtgcttggtttgacaatgagagatgaaaaaattaaaattctccaattgagcaagggtatgcaaggatttgtatgtggtagttttatattttggttgaaagagtgagagcaaaataatttacggggttttaaagataagagctgaatgagcatgccactaatgggagaaaggggggtattttcacagaatcagtatttttccccatccggtctccacttgatgtcaatcaaaacataccatgggcggtgtagttac

SEQ ID NO: 506424 - DNA, 1017 bp, Homo sapiens
  misc_feature (27)..(27): n is a, c, g, or t
  misc_feature (77)..(77): n is a, c, g, or t
  misc_feature (103)..(103): n is a, c, g, or t
  misc_feature (120)..(120): n is a, c, g, or t
  misc_feature (135)..(135): n is a, c, g, or t
  misc_feature (195)..(195): n is a, c, g, or t
  misc_feature (199)..(199): n is a, c, g, or t
  misc_feature (220)..(220): n is a, c, g, or t
  misc_feature (555)..(556): n is a, c, g, or t
  misc_feature (669)..(669): n is a, c, g, or t
  misc_feature (701)..(701): n is a, c, g, or t
  misc_feature (703)..(703): n is a, c, g, or t
  misc_feature (865)..(865): n is a, c, g, or t
gtcaccctctgccttttctgctgcccntgcacccccctggctcgaagagaccccacccatcttgccctctgcgaggncactctatcagctctggggccttggngcctgttcgaccccttntacagccctggaccnacccgagaatagccagcagcgcagcagcctgggggctcgactctcccgtttcgagggggntttntgcaccaccccagcccgtggnagccccccggcgactccccattttcaatcgcatctctgtttctgagtgacaaagtgactgcccggtcagatcagctggatctcagcggggagccacgtctcttgcactgtggtctctgcatggaccccaggggctgtgggaacttgggggacagtaatcaagtaatccccttttccagaatgcattaacccactcccctgacctcacgctggggcaggtccccaagtgtgcaagctcagtattcatgatggtgggggatggagtgtcttccgaggttcttgggggaaaaaaaattgtagcatatttaagggaggcaatgaaccctctcccccacnncttccctgcccaaatctgtctcctagaatcttatgtgctgtgaataataggccttcactgcccctccagtttttatagacctgaggttccccccccaaaagggggtttggttncttccttgagtgtctcctggtaactggaaccncncctgagggggaatcctggtgctcaaattaccctccaaaagcaagtagccaaagccgttgccaaaccccacccataaatcaatgggccctttatttatgacgactttatttattctaatatgattttatagtatttatatatattgggtcgtctgcttccctngtatttttcttcctttttttgtaatattgaaaacgacgatataattattataagtagactataatatatttagtaatatatattattaccttaaaagtctatttttgtgttttgggcatttttaaataaccattttgagtgtaaaaaaaaaa

SEQ ID NO: 506425 - DNA, 345 bp, Homo sapiens
tgcccaagccagtggtcgtatagggatgtggccaaacaatgacctaccgcagtgtgattatcagtgtctgtgaagaataacgcgcacggtttcgcctttacaataattcacatcaacggtatctgggagaacctggagctggcctcacattggcgtagaaagcagggacaggtgccacccacggggccctcgtgtggggacgggtgcctgagggcctgagcccctcgagcctctggatcactggatgagctgactgtgtgctgttgtctcgtctgtcccaccccgagaagggagtagaacaatgtgagttgtctgtggcgttggaaagtgcagtggttacatggg

SEQ ID NO: 506426 - DNA, 590 bp, Homo sapiens
ctcagccttctgagtagttgggactacaggcgtgagccaccatgctggctagtttttctatctgaaagcgtagattttaactcttattctgagcgtccacttaatctcccatgtactacttgtgtttttttaagtaatacagtaaattacttaaatttactctttgtaaattcaacaagcttgaatttctaaatccattaaggtggcttgatgattcactgtggtactgtggtgggaactctgctgtgcactggttgtagtgtgatccctgctcttaataagttgctattctttaatagaattaagccctgcatccaaaaaacaaaatctattactaaacaaatagatagtatcccacagtggtgaatttattgagacgttagagggagagataatttgggagccattggtatgtgttttaggacgtgaatttcataatgataatattcacacctgattaccatccaagtaacctgccccatgaagcagttctagcaattccagtcagtatttatgctttctgactgttaacggatcatttgagaaacagaagatgttccactggtgttgctatgaaaaggcttcgtgaa

SEQ ID NO: 506427 - DNA, 114 bp, Homo sapiens
atgtgcttgggccatttcacatataaggtttggtcactggtccaggaaacaggtaccagggttgagacgaataatgtatacgtgctcttaatagcacatcctggtacaatatct

SEQ ID NO: 506428 - DNA, 621 bp, Homo sapiens
ggtggagtgtttttgtttagggtggagctatgttttgttgggggttggttgggtgtttcgggggtggttgggggttgtgttgtgaggtgggggggggggtggtgggtgtgtggagtgagaggtgtggtgggtatggtttggatggaggtgttgattgttgtgggctttgggtttttgggttggatgttttgtggggtggggggttttgttgtgtttttgtatggtgggattgtggaggggcgttttgttttttttttggaagtgtgggttttttttggtatgtgaggtgtgggtgttttggggggggagatgtttgttgggtttgttagagataggttggggttgtgagattggttgggggcgaattgtttgttttgttgagcaagtggtgggggggtttttgaggggtgtgggggagtgtttttggagggtggggtttgttttttttggggagagtttttggttgttggagggagcggtggtttttgtttggtgaggtggggtgtttgttgttttttgggatatagaggggaattaaagaatataaaaaaataaaaagggggtgtgggggggatatatataaaaaaaagaaaagaaaaaggaaaaaataaattaacatgt

SEQ ID NO: 506429 - DNA, 308 bp, Homo sapiens
cggccgccggctgatcaacaagccaagcaccaaggatgagctccacgcttcgccttcctcttcattcggcgaaagcgtgaaccgccgtagctaaacacactggaaatgacatgacactcgcaatcatctggacctcgatcttcttggctggcgccttggcatgtgcaacagcaacttggtctgcctctgaggcctggcccgactccctggatgcgtcgttttccggtgcccgttttccttcggcggtcaaagccttcctggccgcattggtcttgtgcttcctggccttcaagtcctcctctgactac

SEQ ID NO: 506430 - DNA, 1283 bp, Homo sapiens
atttagtagatctttctatacctacgtcgttgacatatacttagactttattgttatggtttatctcattcggaatgcggcttcctgataggttgtatcgtccaaacttatctcttcctattgttatatactgggggagggatgttcctattttagaaggttatatggctaagtgtcgcgagatgcgatagtgccgatatttcgagatactaatattttcctgttccagaggtgtgtttattataaaatccatgcttgctcctgttgctgtgatttcattccccctaagttaatttgaacttaagcagataatgatacttttgactagtgccacttcggtatctaattaggagagatggactagcagaagacgtgcactatttcgccacgctttgctggcctcttgtccagatgattgacatccaaggcccgtgacaaattgcttgttcatggaggaaggataaaggtttctccattatctaaacgtgcgtgtatgggaacaagaactattcattcgcggtaatcttttttaattagttccagtcgtattcgatactggaacctggaattaggccaggatactatatctcaagtgtcagtcgtttacttatgcttagtatagcacggactagaaccttacatctaggggtgtactccctctgtcaaatgtctacttaggttattgttcaattaaatggtgtttttacggttaatgtgtcatgagagcccggataaggaagtctcttaatgttaagtctgtacttaaagtatgtgttctgcacgtggacgtctcaactgtaaattttcagccactgcaataaataacaacgatagtaagcaacactagaagcggatagatgactatggattgtggaagagctagacaacatgtaacagtgttgtgggcagacacaaggaactatactagtaaatcacgctcaattatgttaccttttgtggcttacgttctattgtagatctattatgctatcagcttgacaactctttttctagttaagtgtacctaatttatggaactgggtgctactcctgtcttatgtgtgtcttggttttgtccttggctacacgaaaaatctgttcgcagggcaacactatgtcttgataatttagatttactctccaatgagactcaatggctgggccgtggtagactcatagttcctcttgttctttattaaattcatcctgctaattagactttctagtgacattgtaacatgtagtttacactgaattgcaattatacatgcagagaactacta

SEQ ID NO: 506431 - DNA, 189 bp, Homo sapiens
tctagcaggatccccggtgatcctgtacagcaatggccaggccgtcagcgccagctccccgcggtccagatcctgaattcggcttgctctccatcttctgctctctccaggccatgctcccagctcgtaccttgtgagctcccccttcccctacgggctccacggtgacctgaacggggctcctaggca

SEQ ID NO: 506432 - DNA, 385 bp, Homo sapiens
agccaggatcagaaagcgtaaataaagcaggtgtccgcttttagcaggaagtcatttaggtcaagttactctatctcaattaacaaaaactagagtggcttggccgggtgcagtggctcatgcctgtaatctcagcactttgggaagctgaggcccgtagatcacctgaggtcaggagtttgaggccagcctggccaacatggtgaaaccccatctctactaaaaatacaaaaaattagccttgagagatgtattggctaaattcaaggattccccactttgtgcttttaattccactcgctgatagtctcagcttgaagtcaagcctctttgaaaaataggcttttttttttaagtgaaaggcactttattttgagtaatatac

SEQ ID NO: 506433 - DNA, 130 bp, Homo sapiens
actcggcttaactccaggtagggtgagcagcgcttctccactgtgatccgtttatggggttcaggttcacatccggtccagcaggtcaagggcctggagtctgactggggaaaagcttggcccaagccac

SEQ ID NO: 506434 - DNA, 286 bp, Homo sapiens
ctgcgaacgcctggcgtgtgtctccctacccccacatatcctcatcactccgtaaccctgcacatcctgcgtcactccctacccccacatatacctcatcacctccgtacccgccgcaacactcgtgcgtcacctccctacccccacatatacctcatcacctccgtacacccgcacacaactgcgtcagctccctacccccgcacacagctgcgtcaccatccgtacccccgaacacacctccgtcacctccgtacccccgcaggagtcgaccttgatcatcaga

SEQ ID NO: 506435 - DNA, 396 bp, Homo sapiens
ctaggctcaaggggtcaagtactaccagcgctgcaccctagcgattcggtgtagaatagtgtctgccatttaccgggcctgcatgcacctctaggactgtctctcgatgtaacaggattcaccctggtgaggtcatccagtttgtacagcaggacctccccacccaggaactcctgcaggtcttctctgaggtactccctggcttggccatcagaccccggattgtggccattgacctgctggagcatcctccttcaaagtggtcagccagggttctgggttgcaggaggtacaaggagtactatccacctagtcatgggaccatgggctggggtatggttccaacaaagggctcagttctggaggaatctcagacaagtccatggtccgagcgga

SEQ ID NO: 506436 - DNA, 777 bp, Homo sapiens
tgcacgggtgctgctggctgtggaggagctgggctctgcctccctgtgcatggcgcgtccctctcgggctctggcctgtgtgagtgtggctgagttgcttgtctccggaaatgtaccaatctgtgccgtccttgggggtatatgtcctcggggggtatacggctctgtgtcctgctccgacatcagggccccaggagctgccagcaggtaccagcctgccctgccacacgagtgtgcctgcatggactgtccggcggatgcccagggtaggagacgacacggacatcgtggaacggaccggaggaaggtatgtgcagttgcatccttttcagcagacgccctgagaactgggaggtcaagagtaggaacaaacggtcagatctggtgcttggagctttctcatgcaggtgttaatggggctggggtcagcctaggggtgtgatcttgaatccactggaagccttgctggggtctggctctctcttggtgcgtgggcgggtgtgacgggagccctgcatcaatagcagcactgggggggcctcctatggatactcatcctctgcacgtcacgcgtgggtgcatgctctgaggaccatggagaccatccctgccgcagacccgggccatgctctgaggaccaggagaccatccctgcagcagcctgggcctatgctctgaggatgtgggactgaggacccccattgtctctgagtgtagggtggtgacttctttgcacagactggccagggtcccccaggggccagtacaggtatcccg

SEQ ID NO: 506437 - DNA, 130 bp, Homo sapiens
aagaacagtgaaacgatcaaagaacttttcttataaccctgcaatcagcatactcagccaggaaaacaaaacaataaccttaactgccatatagagagaagactgtgttcgggggagctggcatagacta

SEQ ID NO: 506438 - DNA, 324 bp, Homo sapiens
ggtactctagaggaccctccatatgtgtgccagtgtgatgacatggcggcagcagcagagtataaagagcatgcatcaacaggcctcatgctgcagcagcatgggtatactgaggtagaagtagcataggatgttttcagctatgtattgaggacccaggaacaggaaaagatgcagaagacaaattgccaccaaattaatgtgaattcgtgatcgctgctctgaataataaggagattaaactccatgaagcactttactcaaatgccaaagtccctcaaattataggtatagaaaggtgcgagttggaaaggaccgtggaaa

SEQ ID NO: 506439 - DNA, 396 bp, Homo sapiens
tccggcaagttcgtggtgctgatcctgctggtgctgcaactggtcgcttcaggaggcacattcccctggcagaccacgccggaaccgctgcacgcgctgcatcagatccagcccatggggcacgtcgtcgacggcatgcggatcctgatctacggtgcggatctgagccggatcgtgccgattatcctgggcttggtgggctacaccctgttcggcttgctgctttcctacctggcggcacggaaacacaagttctggaccctgaagacgctgcagccggagatcgcggtatgagcggggaggccaacaccatgaagcgcccggaacggaccatgatcacccggcaaaagctgttcgaggcttccatgcagctgatcggcgagcgcggccccgccg

SEQ ID NO: 506440 - DNA, 230 bp, Homo sapiens
attgactgaatctttcagctggttttattttattgggtttaggttttaaagaaaactggcccccaaattcagtggcacttagtacaagtggcttcatttgggttcggtcgggtctgctggggctccaggcatgtgccactgtaccaagcagaaatttcttttttcacagttctggaactgggaagtccaagatcagggctcctgcccttggacctgaacctggatcttgg

SEQ ID NO: 506441 - DNA, 1373 bp, Homo sapiens
tccatcaaaatagttcattggtgtcaaaaaaatcccagtttgaggaacccttaaacaataagtcacacaagaagaaatgccccagtggggctttccatagcagagaacagcacctcctgttatgtttctatcccagaaggcactgctagtggtgataactaacatactgataggaacatagaggatacctcgtatcccgaggacacggcacactcaagcacagcggaaacgacacccacacaagcgtaacagcacgatcagcgggacaacacacacgcagagacggcattcaccacacaagcatgggaggccgcccctaccccgcggccagccccaaaccagccagcaaaacaatcacaacacaccagacacacaccaagagcacaggcacaccccacaacaccacaccacaaccacagcaacacaacaccaacaacacagaacaaagacagcagccagcagagagagcgccgtaggccgacgacagcacaagcgagcagacgacaacacacgagaacagacacgaagagagcgacgtacacgagcgacggtagacaccaaccaagcacggacacaaaggaagagaggagccggacggcacaagaagagacagacaggagacgcgcgcacgggcacaggcgcgcgccagcccggggcgacagacaacgacaaaggagaggcagaaacccgaaaacacacgaaagaaaccagaagacaaacggagaaaccaacaccagcagaagcaaaaaacaaaacaaacaaagagagaagcgaagagaccacaaagaagaaacgaaacaaaaatcaacagaacggtgggcaccaaaagaaaagaaaggcacgaacacgaacgacgcacaaaggacagcgacaacagagacaaaaacacaaaagacgagaagtaagacaaccaggccacgggcccaccatgaacgcgcgcgaccaacgagcgaccgccgcaacagacgcggaaggccgggggggagccgcaccaaccagccacagtcaagcacaggcgacagggccgaacagagccaaggcagactcaccgcacacagagcaacgcggcaacagcacctgagacgcacgaacagccaacaccgacaacaccacgaccggacgcacggcgagcgaggcggtcggcggagcaggccagacggacgggaagcagggagggacggacggccgcgcgccccgcgcggcgcggcggacggcgaggacgggctcgaccgcccgcacacagagcgcggcagactacgagagagcggcgcagacgggcgagccgacagagcagcggccgaaagcgtcaaggaagcacccgcccgaccgcgagcagacagaggacgcgccgacaggaccgagacaggccggcg

SEQ ID NO: 506442 - DNA, 303 bp, Homo sapiens
acgctactgttattatactccctcactatccatgtgtgaaatctaagtatttggtattccttcagtacttaagacttatcaaagactagtactttcaggaagccttaatttttttttttttcgcctctttcattttctctgttttagctccacattaattacctagctttagctgaagaagcacttatgtttgtccccatccctcctgtggactgactcttcaggcttcagaagcagcttctgcgacttgccaaacatcatacaggttcttttaaaatgtgtttatcacgtaggtccttgctc

SEQ ID NO: 506443 - DNA, 884 bp, Homo sapiens
aaagccatcttggcattgttcctcatccgcctccttgcgcgccgcagccgcctccgccgcgcgcctcctccgccgccgcggactccggcagctttatcgccagagtccctgaactctcgctttctttttaatcccctgcatcggatcaccggcgtgccccaccatgtcagacgcagccgtagacaccagctccgaaatcaccaccaaggacttaaaggagaagaaggaagttgtggaagaggcagaaaatggaagagacgcccctgctaacgggaatgctaatgaggaaacctggggacgcaggaggctgacaatgaggtagacgaagacacgagcgaacgaaacggtggggacggaacgcacggacgcgacggccacgaaccgacacgggtgactggtgacggaacgacggactgcgaccactgacacgactgacggaagctgagtcagctacgggcaagcgggcagctgaagatgatgaggatgacgatgtcgataccaagaagcagaagaccgacgaggatgactagacagcaaaacaaggaaacagttaaactaaaaaaaaaaaggccgccttgacctattcaccctccacttcccgtctcagaatctaaacgtggtcaccttcgagtagacgaggcctgccgcccaccgtgggcagtgccacccgcagatgacacgcgctctccaacagccaaaccaaaccatgacgaaattgcaacacgggggagcgacaaaacgaaccaagaatttccaagggtccctgcctgtttttctttaaaagtactttaacaaggaaatttggccgggaattgtattgaacatttacatatttcgtaccatcttggtaaggtcagccattttaactgatccggattaccaag

SEQ ID NO: 506444 - DNA, 365 bp, Homo sapiens
aatcatatgaaatgagctggtcttgaatgacgctgatgcctgcggaatgactgctggattcaccagtagaacatggacaaagaagcctgctcctcagaactacatgggatccctgttcctcataacctagacagacctggtcctcctcactgggtcctcatcctgatcacagggccctggtcctagaccaatgggaccgtaaaccgatcactgagctctggtcctactactatgatccctgtacctgatcactataattctacccttgatcacttgagccttagtcctgatcactgagtcctactcctagtaaatggccctggacctcatcactcagccctgatcctcatcactcagacccggta

SEQ ID NO: 506445 - DNA, 304 bp, Homo sapiens
gggatgtcacgcacggtcacgtgcatcgcgcaggatgatggactcgctgttgtggtccaggcacgaggtgacacactccgaccctatggcatagccatcagggcactggagtttgaggttgctgttgagctcgtgtggaaccgagcactggccttgcatctcctggcagacatggatggagccgttccaggtgccatctttccggcatggaatgacattgctcccaagtccctgggaggcatcatggtcttcacacttgatcctacaatcactgccacttggatgatgggcatggggtaccgag

SEQ ID NO: 506446 - DNA, 457 bp, Homo sapiens
acgggcacagagaattttatttctatactaattactacatagaactaacgtctaagatcaaactaaaaatgccttcctctactttgaaacaatagtcttctctcataaacattttattcaaatatttcccagcgacaggctcgtgtgcacttaaccaggaagtgagaccggatatgatcatattgtgaaagcagagtataatgaaagaacacaattggaattatctgaagcattattaaaatttcatctgacaatccaattcccttggaaacgacaatttaatcacggaagtaatataaggaatttcaaaagcataattcttcattttcttgtgtggcagtgtccccagtcttctatgcgcatatcttttcctgtagccaggctggctcatctgaaacacaagctttcaccaacccgcctagtgtataccgggagcagggttcagccatcattttca

SEQ ID NO: 506447 - DNA, 685 bp, Homo sapiens
  misc_feature (397)..(397): n is a, c, g, or t
  misc_feature (509)..(509): n is a, c, g, or t
agcagtgtctcacacctctaatcccagcactttgggaggccgaggtggacagataacctgaggtcaggagttcaagaccagcatggccaacatggtgaaaccccgtctctactaaaaatataaaaattagctacgcatgggccgggtgcggtggctcatgcctgtaatcccagcactttgggaggctgaggcgggcagatcatgaggtcaggagatcgagaccatcctggttaacatggtgaaaccccatctctactaaaaatataaaaaattagccaggcatggtggtgggcgcctgtagtcccagctactcgggaggctgaggtaggagaatggcatgaacccgggaggtagagcttgcagtgagctgagatagcaccactgcactccagcctgngtgacagagcgaaactccgtctcaaaaaaaaaaaaattaacttggcgtggtggtgggcgcctgtaatcccagctactcaggaggctgaggcaggagaatcactagaagctgngaggcagaggttgcagtgagctgagattgtgccagtgccctcctgggcaacaagagtgaaactttgtttcaccataatataaattaagtgttctttaatatgttgttgaatgaataaattggttcagtcaccaatttattggattaaggatgggtttatcaatataggtccctacc

SEQ ID NO: 506448 - DNA, 121 bp, Homo sapiens
ggtgccatctcgacggctccccccgatgtctgcgacaggtgcatgtgccctcaactgctcctctgtgcctaggccttacgcatttgctgactgactccgcccccatgcttctggggccact

SEQ ID NO: 506449 - DNA, 124 bp, Homo sapiens
catattctgtagacgtctctgtgaacttgcgcattctaggacatttcatataatggcatcatataacatgtggccttttgaaacatgatactattcactatgcctaacaattttaagttacatt

SEQ ID NO: 506450 - DNA, 145 bp, Homo sapiens
gcccaatcgagccgtctcagtcatgattcgacgcctgccctgtctatgctctggacgcagaggagctcgacggaggatcattctgatatcgctaagcgtcatgatgccagacttctcgtcaatgatctctgcagagtgtgatctc

SEQ ID NO: 506451 - DNA, 123 bp, Homo sapiens
cttaagagttcagctttgtacttcccctatctttgctctccctccccatcactacacatctcataatgcttggcttatggtaagacagttaagtactcagtaaataatgaatgaatgaatatg

SEQ ID NO: 506452 - DNA, 549 bp, Homo sapiens
gcacgaggagaccaccattttagggactgtcaaactcactactgtgttcctttgtcctgaacaacgttgagtttctttcacagtatcttaacttactgaggaaaactcctcatgcttataagtgtgcagggcctgttcctaaacttgcttgggggggacacactaataactggattacctgactgacaaacgtggaaggctaactcgtggatagtgtttacaaaagtacaaaagcactacttgcaaggaaaatgctctgattctctgatgaggcatttgtgaaggattccagagcctttcccaaagtgagaccatttctggggtatttgtaccaggtcagggtttttgtgttgtgttcaaataagtttgactaaaactaggatggctgacagcttttgaatacctgctttaatgtttataaaatttttattgaggtataattaacatattagtaaaatgcacagaggttaaataattttacctgctttaattgtgaaacagattttattgccaatcagaatttgaaagcatgtgtttaacacatggata

SEQ ID NO: 506453 - DNA, 213 bp, Homo sapiens
ttcgcacctgtaaggttcccacaccgtgatcccaagatagatgttcacattttagagtgttctttcgtgggacggacgtggctacgctagaggacgtgaactcaggacccagcttttggactaacgacacttagcttgattgacgcctagactttaggggactagtcggtttacattctgttaggacgtgttaatgacagggtccaaatttca

SEQ ID NO: 506454 - DNA, 246 bp, Homo sapiens
ccctaatcgccaagcccttggtgtacctgatcccaggcacaccgggctgaaacgggatttgagactattcaagcatcaatcggctgcgcgcattgggctgttgctccaggctgcagcgttaattgcctggcggttcctgggctcggaaaaccgtcttcacaaaacagcggcaacagttcaccgcgtaccaggtattcacgggccaaccaggtcggcaggtgagcgatgcccgcgattagggatagt

SEQ ID NO: 506455 - DNA, 458 bp, Homo sapiens
  misc_feature (5)..(5): n is a, c, g, or t
  misc_feature (14)..(14): n is a, c, g, or t
  misc_feature (54)..(54): n is a, c, g, or t
  misc_feature (181)..(181): n is a, c, g, or t
  misc_feature (183)..(183): n is a, c, g, or t
tatgnaatttaaanactccacccctcctatgtggttttaataaacacattaatnatttaatgaatatcacatccccattgtcctggatgtacccacagtttatcattcacttactgaaggatattgagtttgccattgagtttttggtgattaagaataaagcttctggcctggccgcggntntcacgcctgtaatcccagtgctttgggaggccaaggcaggcagatcacctgaggtcaggagttcaacaccagcctgacaaacatggagaaagcctgtctgttataaaaatacagaattagccgggcgtggtggtgcatgcctgtaatcccagctacttgggaggctgaggcaggagaatcgcttgaacccgggaggtggaggttgccgtgagccaaagtcatgttgttgcactccagcctgggcaacaagagagaaactctgtcttaaaaaaaaa

SEQ ID NO: 506456 - DNA, 352 bp, Homo sapiens
accggctgcagtctgcattcttcctgacactctgcgctgtggggattgcgagctagcactgtggtagaagagactgtttaagaggaaccatcacaatctgagctctaagcacggtctaaagggctcgtctcgctaaaagtgcctcagctttcttaagatagaatgcacgagagtgttctgaactccccaggaacgtatgagctggggacccttgagaaacagccgcttctagtagagggaggagggagtgcgcgggcagacaatggcaggtctgtgtctggtatcccgggaagctcctgggatggctagagtgcccccctccccttctcctccccaccacaaggtcccagag

SEQ ID NO: 506457 - DNA, 131 bp, Homo sapiens
agatctccatcctatccattgggccagtccgtcctccatcgcgtcgccatccatctcctccgacgcgctccctccattctcctccatccttctccatcctcgcgctcccaggatgtcggagggggatcctc

SEQ ID NO: 506458 - DNA, 416 bp, Homo sapiens
  misc_feature (4)..(5): n is a, c, g, or t
  misc_feature (128)..(128): n is a, c, g, or t
cccnncccccccccccttgttgtgggggggccccctcttctccctcctctcccccggggggggggggggccctttttttttgtaatattttggggggcccaattttttttttttggcccccccccgantttttttttttttttttttttgggggggggggggggggccccccccccccctttttttttccccccccttatggtggggggggggtttttttttccccggggggggggggggggcccgggggtttttttttccttttttttgtccccctttttttttggggggcccccccttctccataaaaaacattagaagaaccagataacataaaatataagcgataaaggaatggaatagaacacccccataagatggtttcaagaaaacaacatggcatccataaaatattc

SEQ ID NO: 506459 - DNA, 290 bp, Homo sapiens
  misc_feature (50)..(50): n is a, c, g, or t
  misc_feature (72)..(72): n is a, c, g, or t
  misc_feature (93)..(93): n is a, c, g, or t
  misc_feature (98)..(98): n is a, c, g, or t
  misc_feature (119)..(119): n is a, c, g, or t
  misc_feature (132)..(132): n is a, c, g, or t
  misc_feature (185)..(186): n is a, c, g, or t
  misc_feature (196)..(197): n is a, c, g, or t
  misc_feature (200)..(200): n is a, c, g, or t
ggagactgtgtggttagtggcctcaggatgtgatagaaacatccagtgtnaaaagaagtgaatggagtgcgncaggaacgaggggaagattgngctgncacagaaggcctggccgttgntgcactaacttgnagctcagggcatctagagggactgggagggagctaacttggctggctgcttgnncttgcatagnntgnaaagggctaccctggggctctgaccacactgtagtatgtgtggagggtgccctcccgtctcccacaacttctgctataacaataaactgt

SEQ ID NO: 506460 - DNA, 146 bp, Homo sapiens
gctatgaatgtatttgcttctaaaacctcccaaagtgaatttaattttaaaactacaagttgtaagtattttgaaattgggaaacatttattttaaaagcaatcaggtagtgttgctttttacagcataataaatatatgtttcca

SEQ ID NO: 506461 - DNA, 86 bp, Homo sapiens
  misc_feature (32)..(32): n is a, c, g, or t
  misc_feature (38)..(38): n is a, c, g, or t
gggctgcaggaattcggcacgaggaactttgncaaatncttccttcaccaatctcatgaggagagggaacatgctgagcaaactga

SEQ ID NO: 506462 - DNA, 1497 bp, Homo sapiens
  misc_feature (205)..(205): n is a, c, g, or t
caaaaatgtggggttgggaacgacaccccagtagtgtttcgtagagagaggagaaagagaattatggggggaatatagaaaaataggtgggaagaagagggcgcacaaccccgtggccctataaaaaagggttgccgccaagtatatttaaagagaggaaagaataagtagtggggggagaaaagggaacccgccccttgtctgnggtgtcctacaccacccgacgggggagatctccccccaacacggggggtgcaccacccgccacgagagaagtgtggggccgaattactcgtccgcaataaggtgttgttccatcaccacaagaaggtgttttccgcctgaggttgggttttttggaaaaaagagtgggtaaggagtttctctccttgcgcctgtcgaagatgtttttggccccacccgcaggaaattggtaggtggtagaagagatgttgcaccacgtcttgttatgaggagaaagaaattgttctcacagcaggcctgcggagatgtttatctcctcgtaggaaggaaaatggggttgtctcaccgccgcggtattaaaaaagaatcaccgtcggccctcctcggagactcatagaaccttgttccccacctcgggccaccatcgggagatttctttattaccccccgcgtggagcccccacacaaattgtgtgggtgtccccacacgtgggtccacacaaaaaaagttgtgcgcaccagaacccacacatgagagtttgagatagcgctcccaccgcgtgtagagatggtctcacagaagactcatcccgcacgtggggtgtacacacgtgtgcgtctgcgcgtcctcgtgtgttctgtgtgtgttgtgggtgttttatacctataaataacacggccccaccacacatacacgcagatatccgcgcaaagacaccctctcttattatgtgcgctcacagacacacccacacacagggtctcgccccacacatatctccgctgagaagaagaagagagtgagtagtgtgagaattatccacagtgagcacctctcgcagcagagaggggtgtcacagcaccacacatagtgagacacttgagaaaggagatagaggtgttccacacatataaatgtggagatgttccacagcagccacgccacattgtggagataaagagcacacatatagagaaaagaggctctgtccacacttctatgtttaatcctctctctccacatcgagatgttctttcgcttatagagaaaagtataaaaatggctcgagaagaagccccacagtttgagaattgggagaagctcactggaggctttactggtgaaaggccacgctagtttctggagaaagccccctcggggaacgcaagacaccggtgctataaagttgaaccgcagactgatggataatgtgaccccccgtcccacgaaatctgtttttaagattccagaccttcccaatagtggcccaataaaaagtgctatttggtgat

SEQ ID NO: 506463 - DNA, 889 bp, Homo sapiens
caatggttgcttaacgactgccaaacaaccgcctgggcccaacagccggatacaccccccatcaacgagaacgggcaacaccacacgggaaaaaacgccgtggagtggccaaagcagaggactcttaggcccatcgagacagtcttggccactcaaaacggggacaagaccccccaccttgggagcgctagcggcctcgccccgggagtaggctaactccgggcattagaattgcagcaggcccccccacacgtgtttagatcactacacgggtatgcatctcgcgatatagaacagcaagtgcaacccccccttttttcccccttaaaaaccctgtccgaaagaagtcctaacaaccactggagctattttcatcaccattcttcaaatactacaacactttccgtccacaattatcccccatgaattaccaattttggggcaccaccaaccacattcagcgagctctctctcttaagaggaagtcccccaccctcacgtgaggaacaagacagtcccgacgatttatacacagccgctgtggacacaatcgcccacccccaaaaatactttcttgtaatatgtggcctgcacccatcatgaccattcgtacacataactcattactcgtttcctccccgcaaccctgtctcttctcaccacaaagaaggttgatttgtataatatcttcttgtgtgtccggacaaactatgtcttccaatagaaggagaatattctccaccccacttggtatttgttttttaaccgtactctccccgccccgtttgtccacagaaaacacccccttctcctccccgttctttctaaattccgtcgagaccaacccagaaaatttgcaaattttttaaaaaaacccccggaaacagac

SEQ ID NO: 506464 - DNA, 727 bp, Homo sapiens
  misc_feature (62)..(62): n is a, c, g, or t
  misc_feature (70)..(70): n is a, c, g, or t
  misc_feature (76)..(76): n is a, c, g, or t
  misc_feature (94)..(94): n is a, c, g, or t
  misc_feature (98)..(98): n is a, c, g, or t
  misc_feature (100)..(100): n is a, c, g, or t
  misc_feature (120)..(120): n is a, c, g, or t
  misc_feature (124)..(124): n is a, c, g, or t
  misc_feature (130)..(130): n is a, c, g, or t
  misc_feature (139)..(139): n is a, c, g, or t
  misc_feature (169)..(169): n is a, c, g, or t
  misc_feature (176)..(176): n is a, c, g, or t
  misc_feature (185)..(185): n is a, c, g, or t
  misc_feature (194)..(194): n is a, c, g, or t
  misc_feature (200)..(202): n is a, c, g, or t
  misc_feature (204)..(206): n is a, c, g, or t
  misc_feature (211)..(211): n is a, c, g, or t
  misc_feature (214)..(214): n is a, c, g, or t
  misc_feature (218)..(218): n is a, c, g, or t
  misc_feature (223)..(223): n is a, c, g, or t
  misc_feature (225)..(225): n is a, c, g, or t
  misc_feature (232)..(232): n is a, c, g, or t
  misc_feature (239)..(240): n is a, c, g, or t
  misc_feature (257)..(258): n is a, c, g, or t
  misc_feature (261)..(262): n is a, c, g, or t
  misc_feature (276)..(277): n is a, c, g, or t
gtctgtgccaaccaaacgatagccccatccaagccagctgagaacctaggaaggagtagtangaatatgnttgatnagattggatctcccaagnttantngaaaggagatgaacgaaaancttnctgctntctgtccgntaaagagctcctcatctgatcttgcagctngaccctntgagacttnagagctgcntcccannncnnnaagcnagngctnattgngntaggacnatattcnnagcccctaagctctgtnnatnntgcataagaagcannaagtcaggctcagatgcaactaaaacacatctttgagccttttctttttcccttctcccctttctaaacaaaaaccttcctaggatggcatcttttgctctaactgggagacagtcataattggttgtagtcaattctactaagcagtgttggggtggttggaagtctcttttttgtaatttgtttttgcaaatcattgtgaggccactttttctttctttctttctttctttctttctttctttctttctttcgttctttcgttctttcgttctttcgttctttcgttctttcgttctttctttcttccttccttctctttcttcttttgctttccttctttcatctctttttgtaatttgttgttgcaaatcattgtgaggccacttttctttccccttccttccttcctttttttctgttttttttttttttcccagagtcttgctc

SEQ ID NO: 506465 - DNA, 256 bp, Homo sapiens
agaaacttagctctttcataagcatgggaagctttgttttctgaaaccatcaagaccagcctggccaacacggtgaaacccttgtctactaaaaatacaaaaattagccgggcatggtggcaggtgcctgtgatccaagctactgaagaggctgaggcgggagaattgcttgaacctgggaagtggaggttgcagtgagccaacatcacaccactgcactccatccagcctggatgacagagcaagactctgtctc

SEQ ID NO: 506466 - DNA, 757 bp, Homo sapiens
gccccctctcacgccaccccggccccaacgggctgcaggtgctgctgatgcgctgggatctggattgagtgataaaaaggaatggagagatgacccctaccccctcatcccccagttttgaaaaggtctaatcaagtgagtctggtgtgaggatgctgagggagggagccatggaaggtgccagaaggaaggttgcgagggggcacgttgttgtggccggtggctttgaagctggtccagaagtggctgtgagctgccgcggctgcgcatgccccttgcgcccagatgtgatgcagtggtaagttgttgtgtgatgtccatgtgatatgcgtgtccgtcatgtctgtctagtgtctgggtttggcccaagactgggctgtagttacattaatgcccagcagacaagcccatgccactcagccctcctggaccaggccttgcttgactctctgagctggggaggtgggaggccagtgagagctctgacatctgtaagatctaaccggtgcctgggccccctcccctcagagcccatgggtaacgaaccacatagacaggagagaacgggcgtcagggtgtgccacagatccacaaatgaagaacaaggtttcgtggaagacacggacggacactcaagcatctgtgcccaggaggggaaccaatgaaggctggactttgctagcgctcagatgactgagacccttcctgtttcttgtgactgatttgttgctgggaaaaagaggggactgatgaaata

SEQ ID NO: 506467 - DNA, 115 bp, Homo sapiens
ttttctaagcactcacacagaactaactaatactaacatctcagacgctcagtgatgattagaagccgtctgagcatactcctgcccgccactcatccttgtcctcatacgccct

SEQ ID NO: 506468 - DNA, 130 bp, Homo sapiens
gatgtgatctagaggatcccagtccgggtccccactccttattgctggtgagatggccctatctgtgctcttctgtctgcagtgtgcacgggcttgtctaaccgggaataaaggtgatggatggtatggc

SEQ ID NO: 506469 - DNA, 483 bp, Homo sapiens
tatgttaaaaaactatatagtatctgttttcctaatcatgttccttaatagatgaacattttaaagattttagaattaataagagattctcctcccttttcaatgatgtcaatatcctaggcaacatgttatagcattttaaattacattatgagataatttttctttagattcatgtaacttaggaattgccacacatataaacataagtaagaaacaaataagagtaattttcagcagagggttatataacttttttagatctgctgtcatcctgatcttgaaaattaagatggcccctagaatgcctgaaatatagaaaggtatatttggtttggaaagaagggacatgataaacagaggaacttatttaacaagtatctattatctattgatttagatgctattcgtacattcattgttcattaactgtattgttatcacattgctgtaaaggactgcccaagactgggttattttcga

SEQ ID NO: 506470 - DNA, 420 bp, Homo sapiens
gcgcagttgtcggcttgtagagctcgcgagagagccctgtgaccagaacttgggaccttttcgcgtttgtgctccgcgtagagctcctcctcggcgggagcgcctctgcgacagcgcccgggccggagcccccagagcacaggccgcgtttgaaggatgacctctaggaagaaagtgttgctgaagggtatcaatctgggagaatctggagtcgggaagacattacttatgaaccaggatgtgaataagaaattcagcaatcagtacaaaggcacaataggagctgactttctgaccaaggaggtgaaggtggatgacaggctagtcacagatctgacgtaatccttcagaccttggccgtgggctccttgtggtctgtctgtgcacccacatgagcccgcgagtatggcagcaggaccg

SEQ ID NO: 506471 - DNA, 1839 bp, Homo sapiens
  misc_feature (520)..(520): n is a, c, g, or t
  misc_feature (1367)..(1367): n is a, c, g, or t
  misc_feature (1837)..(1838): n is a, c, g, or t
atcacgttgtgagtccaggtgcgcgaagctgaggtaaccagtgtcctgatacggtgcttgcgtacgggggactctttgcctagatgacctcagatgctgtgagagtgtcatcatgcacattaaaagagacgcgcgcggttcggcaccctgcgacgacgattctgagagcaagactcgcgagactgagatgtcgcggagtgctcagtggactcggactctacacaaagcatgatgagatcctacagcgcagcctcgcatatccaggattgacggcacgcgcgaactcgatgactcccacttcaaagggttagaaccaacccttgcacacataaagcagacaccattcggcacaggaacaacggctttgatgtcgtggctgatctctttccggaaagaacaggttaccagaggagcagtcatgttcgagagaagacatgattgtttaccaaattcccagtgactggagaaatctcggattcacaagccaaaaaggaggaatgttccgcacagacaggagttnacaagacagataatcagagataagaggcataactacaaacagagaacaaaaacagggcccggacaggaacaagggcgctagttgagagaggaggagaagcgccacaaagaggggaaagtacgcgccacaagataggagacaaacacagggagcagacagcagtcgatagagtctaggcgagcaacggggagaccaccgagacgcgaacagccgttaagagcagagaggcagcgccacaaaaactgtagtgcgacgggacagacacaaagaagagcgacagcggacacccacccaccgaggaggaacaaccatcaacagccacacacacaaagacatagtccaccagcgaccacgagagaagaggagacaagcacggggcgacacaagccaccacgacagagcacaaagagagaaaaaacgaggaggagacagaacacgagaattagagacataacaccgggagcacagccagcgccgagagagcaacgcccagcagtaacatcagccacctaactaacaaggagcagaggagaagatgacagccgagcagcatagcaatgagactactaccccaggcaaaggcacaacgacgaagacggtgagaacccacagacgggatcactatcggacagagcgcacgagaatatatcacgacaacaaaaacgacgcgtgtcgatcgaaaaagagtcttcatgtggtgtgcatcccacagaccaaactgatggattgttctacgaggaaatcactgctagataatagtaccacacatcgcataagtgttctaacagagaatttccacgaacacagaaaacctgctctcacaacgtgtccaaaatgattctctacntaccatggtgctacttcccaaaatattctctagatacgaaagggccaccaacgagtaccacgagcacttcgaagtcgcaaggagaatactcacctcccccaagtactgttctaaagaacgggaatcccaacaaatccgctggttggaaacgaaagagatgctccgccaacagattctcagtaagagacaaaggaacggaggatccacgttgaaaacaagtgacataagcgaaacaagagtaagaggaagaatgatggaacaagagaccaatgcacgatgaaagacgaccgctaccaaagcaagcatgacgaacaatctgatgacaattgaagtcatgacttagacgcgacagagaagacagcactggacctgagatggccgactctgaagacggaagcgatcataggaatgatgagtagactgcatgtcgtgatatagatgcttgttgcttactaacacgtactatatanng

SEQ ID NO: 506472 - DNA, 184 bp, Homo sapiens
  misc_feature (164)..(164): n is a, c, g, or t
gctgtctctgggtaatagagagggagacgtaggtttacaagtcaatcttttggaatttggtactagcctgagccaggtggtgggtcactgtggctcccagatgccacacgggagctctgggcaaagctgtccacatggtctgttggctcagctaaattcctggnttgccatcattgaaatcacc

SEQ ID NO: 506473 - DNA, 155 bp, Homo sapiens
ccttcaggcctcccccacatccggcagataaggacacactacaaagcagcaaacagcccagcaaggccagactagaggaatattacctacatactacagagactatcaagagtccacgtgtagaacagagactagccaagcagccctactaccta

SEQ ID NO: 506474 - DNA, 319 bp, Homo sapiens
atagacgggtttgcccgtgtacgccacggactggatcttgactctccgtgatctcatgactctgccgtgcctcggcctcccaaagagctgggattacacggcgtgaggcaccgtcgcccagccaatatcaacgtatcatttggaaatgacctctctcgtgcagcacagatacagctcttacctacggggcatatgtgactgcccctgtaggccaggtggctacatattcccacccacatgggccttgtttggggcaccctcctcgcaggtttaaacagaaatctctgtggccacaacatttccagcgtgtccgcgcgca

SEQ ID NO: 506475 - DNA, 1258 bp, Homo sapiens
  misc_feature (171)..(171): n is a, c, g, or t
  misc_feature (323)..(323): n is a, c, g, or t
  misc_feature (341)..(341): n is a, c, g, or t
agcggcggttgccggtctggcggcagccatcaggatatgccaagatgggtgcattacaatgctacatccatggagtctatcgagaaagaagcatctctgatgtcatgcgctttcttcgttgagggtcctgatgcatggctcgcttccgcgcaatgcatctcgtgctctccnacgatgggctccccgcccctaccctggcctgcataaggctgcgcctgactcggcgctcacgtagggcgcaagctcaaggttagcgttagtatctacggattccgtggtacgcgccgtgtgtggccagacaaagaaccgcccaatgttgcctnaaaggtcgcaacactttngacctggctatagccgtggctcctatcgatggttgtttaacgcaagctcaacatacgttatggcctcccgcagagccaacctttcagatcgcacgtttgcctatgtagcgtagcagcagcctatgcgactgccataacctagttgggggagctactcggagagcttcccttgaaattcttttacattgggttcgtgttgaagaattccgacagtacccaaacttgtgttcgcatggttaatccctcgatttgattcccactatcgcataagaagtcgtaatcgaagcagatgcaatactcccttgtacaaccccaggttgcgatcagcctaaaaacccagggtcctaccacacgacatcagtgggagcaatcgcgctatggcgacttgcatcactccttgccagagaccgcaaagaaggccgtgtggcctctgggaaggggggccccacatagcttcccactcaacacttactgtgggttcggtcttctccgcccggtgcctcagttcttgagcagcaaactggcgccaaagtaaacatcttctcgccttccccacacagtttacccggcgtaatctaataaggttaagaacggttcttggtacccaacttgcacttacgtggtacattaaaccaccaatttttagcgacccaggcccaactgaattcaagaaaccaaattgttccctcccaggtgcatgtgaatttcccgcgcactattaaagggggcgcatgaatccctttccccggcgtggggggccccccctggttgtccccagcctttttggcttccccgcttgtccgtgagcagagggttgagattcctccgccacctttggggggtagaagccaggtgggccaatacagcactggttttccccggggttgtgtaaccatcttctgattcccgggcccaaa

SEQ ID NO: 506476 - DNA, 292 bp, Homo sapiens
  misc_feature (28)..(28): n is a, c, g, or t
  misc_feature (38)..(38): n is a, c, g, or t
  misc_feature (54)..(54): n is a, c, g, or t
  misc_feature (101)..(101): n is a, c, g, or t
  misc_feature (123)..(123): n is a, c, g, or t
  misc_feature (129)..(129): n is a, c, g, or t
  misc_feature (162)..(162): n is a, c, g, or t
  misc_feature (177)..(177): n is a, c, g, or t
  misc_feature (191)..(191): n is a, c, g, or t
  misc_feature (226)..(226): n is a, c, g, or t
  misc_feature (257)..(257): n is a, c, g, or t
  misc_feature (277)..(277): n is a, c, g, or t
  misc_feature (284)..(287): n is a, c, g, or t
ctggctttggcatgatttatgattcccnggattatgcnaagaaaaatgaacccnaacatagacttgcaagacatgccctgtatgagaagaaaaagacctcnagaaagcaacgaaaggaacgcnagaacngaatgaagaaagtcagggggactgcaaaggccnatgttggtgctggcnaaaagtgagctggngattggatcacagccgaaggagtaaaggtgctgcnatgatgttagctgtggccactgtggattttncgcaagaacattaataaacnaaaaccnnnntgtgt

SEQ ID NO: 506477 - DNA, 189 bp, Homo sapiens
accaggagagctggcgccatcatcgagaggggagaggacgcagcgcaccatcgactcgggagtcttgtcatgatgggcgccagagaaaagaccgaaaggaagagcgagaggagctgccgaggcttccgcatcttcgacagaagcagacggtacatcgacccggagagctgctgagatttcaggcctccg

SEQ ID NO: 506478 - DNA, 1582 bp, Homo sapiens
cttgctttcgccgcgcactccgccgtccatggagcagcgccgcgtcaccgacttcttcgcgcgccgtcgacccgggacctacaggaaaatcgcgtctggtcccaagacaggacggatggaaacacgacggccagtgagcgagcataataagacagactcgactattagggagcaagtggcagcaacgaacagcgtggagataccgcgtacagctagaggcacccaacgaaggagcatacacaagaagaagggacgacccaaaaaacacagacaaaaaacaaaaaaaaaaacaaaccacaaacaacaaacaacaaaaaaaaaaaaacaaacaaacacaaaacacaacacacaaacaaacacacaacaaacaacgaaaagaaggagaaaccagaacaccagaaaccagagaaggagacgcacaatgaacgaacgagaagagcaaacacaacaaaggacagcaaaaacaagagacaaagaaaaaacagaagaagagacggagcagaacaagaaaaacaaaacacaagcgaaagaaaagccaacgaggcaagaaaggagagaaaagagacgaagacgcgcacaacgacgcacacaccgcgcagaagaaaacacaaaagaccgaccaaaaggaccgcagacgacagagagccacacagcgacagcacgcacgcaaacacaagacacaggcaaggccagcggagaccgaaacgcaaccccccgacagaggaacgacaagacaaaccagcgaaaagcaacagcgacaagcgaaacacgagacgaaagacgccacaagacaacagcggagggacacgacgacgacgagacgacagaagacaacaacaggcgaaagaaaccaccgcaacaaccgcgcagcggagagaggcaggcgcgaagcagcgacaaagaacgacgacaacacaagaacagaaacaagagagacacgaggaccgaacgagcagcgaagaagagagagcacaacagcacgacgcatcagcaaacgaaacgcgacgcaaaacaagacgagaagaagaaaacgaaaaagaaaaaataaacaacacgcgccaacgcacaaggacgacgacacaaggagaggcaggcactgcaccaaaacgaccgaccaccaccacagcagccacaagcaacacatgcgaggacaagcaacaacaaggcaccacaacaaagaacagaaggacaagaacaacgcaccgaaggcagcaacggagaagcgcaacaccgagagacggacacagacagaaagagaccagaggcgacacggggaggaaacagaagcggaagaacgaaaggacagaaaacagcaaggacgccacaggacgcaacacacacagaccaagcaaacagagcccacacaaccacacaggagcacaacacaacgaacggaagagaccggaaaagagccagagacgagagacaacagacaacacgccagccaaaacacaaacaacaaaaaacacacaacgagaaagaggacagaaaacaaagcaaaaaccacacgtgacaggaagaacaacaaacaaagaaagaaacacacacacaacaggcaaaagaaagaacgcgagcggcgacg

SEQ ID NO: 506479 - DNA, 601 bp, Homo sapiens
atgagtaaaacttggcaagttcgtgtctttgcataagatagcttggggtattccgggtctttgtaattccatattagttttaggactgttttttctatctctgtgaaggaatgtcacagaatgcagtctacatattgcatagaatctgtagattgcattgggtagcatggacattttaacaatattgattcttccaattcatgaacatgaaatatctttccattttttgaggtcttcttcaatctcttttatcagtgtttcctaattctgattatagagatctttcacatctttgatcaagttgattcctacgtatttcactttatttgtggctgttgtaaatgggattactttttgcatttccttctcagattgttcagtcagcatacaggaatgatactgattttggtatgttgattttacatcttgcaactttactaaatttgtttatcagttctaacagttttgatggcgtctctggatttttccaaatataagatcatatatctgcaaacaaggataatttgacttatcttcctgtttggatgcctttatttctttctgttgctgattgtctagctaggactcagtactatattga

SEQ ID NO: 506480 - DNA, 258 bp, Homo sapiens
  misc_feature (100)..(100): n is a, c, g, or t
  misc_feature (243)..(243): n is a, c, g, or t
gagtctgaatgtcgggcggacgtagcgtatcgatgggcagtgaggcggcgcatatgcatctaggctataaatattcgaagtatacgtacgcggtaatgtnaacaacggtacctctagaatatagctagcatgcgaaattaaaagcgctgatatcgatcgcgcgcagatctgtcatgatgatcattgcaattggatccatatatagggccggggtaataataacctcaggtcgacgtcccatgnccattcgaattcgta

SEQ ID NO: 506481 - DNA, 219 bp, Homo sapiens
  misc_feature (1)..(1): n is a, c, g, or t
ntgcacgaggccaaaggaaagcctgtagagtggctcacaaccgtaatcccagcaacttgggaggctgagatgggaagatcacttgaggccgggagttcaagaccagcttgggcaacatagcgagatcccatctctacaaaaaataagtttagccaaggtgtggtggtgtgtgcatgtggttctagctactggaaagctgaggtgtgaggatcacttggg

SEQ ID NO: 506482 - DNA, 189 bp, Homo sapiens
tccccattttttggtaaggtttctaggaggtgtgttaggtggccatcctgcagcatattggcttaaaatggcctctccttttatgtggtctctttggggccgattgggaaaaagaaaaatcaatagggcaactgttttgatactgaatattgacaagggtctttttgaaataaaaaaccagtccctcca

SEQ ID NO: 506483 - DNA, 406 bp, Homo sapiens
cactcatgccgtttcctcctcccccctcatcccaatactatttccactcttccagagtctccaattatcagcatcaattgagcagggtcgcggtgggagtggtcgcattgcgctgtctgccatgatggtgtgttgcatgttgtttggatgcttgactagttgtatctgacgggagaagtttgtgttgtaccagcgttgtccttggaaagatttaagtaatgcaaaagtttgtccttttttttttttttttttttttaatctactgacatgttgttctagtatacccaaagaattgtagtagatatcatctgcttctctgtccagactattgatttttctatatgtttcaattcctcttgatacatttaatcttcataaatttttttatcttttataaaaaaaaaaa

SEQ ID NO: 506484 - DNA, 612 bp, Homo sapiens
tggaaacggggttcttagtttatcacccagggccaagatgtggcatggggcgtgtagatcacacattacatctggcagcttatgacctcccagggctcaaggcagatcctcccacctcagcctcctgatgtacgctggggaccaccggtgttgtttgccaccatagcccagctgattggttgtatcggttttgcgcaagagaccagggcctctgccatgtgtttcgccccagggtgtggccttttgaactctccgtggaactctcaaggccaactccacgctgtgccttggggccctcccaaaaaagtgcgtggagatttaacggggtgttcaacccacgtggtctcctatagccttttctttacttattctctcgcgtgggtggtaccgtgaagtagactcacgattccctaacataatggaatatcaatatccacacggccttatatggacccttatccccagctttatgtgaaatactccctcttatgggttcgtagaaaacagcgaacccctcttaagttttctcctttgggggggacaacccactatcatacttcctaacgcttgggacatgtgaactccgggtgtggcgcaaaaaaacgccccttt

SEQ ID NO: 506485 - DNA, 931 bp, Homo sapiens
  misc_feature (97)..(97): n is a, c, g, or t
  misc_feature (179)..(179): n is a, c, g, or t
  misc_feature (928)..(928): n is a, c, g, or t
  misc_feature (931)..(931): n is a, c, g, or t
tttttttttctagggagaaggtgcttaattctgggatctgcgtaccaggctggctggggtgctggagtgggaaggggaatccaaggagcaaaccaanaaggtcctagggccagcctaggcctccacggcccggccgttgatgacgcggattgtggcggatgacgtccgggatgtggctntcagattgttgtgcccgtggcccccgatgtccggagtggtgcattttctcattggcccgtgtgatgttcgcacgggaagcgctcctacggggagtgggggggcgcataagagctgccttgttgagggtgctccagcatcatgcagctggccagagggtggccgtggggttggcgatgtctaatgggggatactcctgggccggtgtcctcgtaggctgtttcaaaacaccgagtacacatggccatagtgtggccccagccaaaggccgtgggcccccgaccagtcccgcggcagaccattgttgacgatgttgccatagaagatgcgcatcaccatgacactcaaactgttggggccgggacccagctgcatggtggtgttatccacagtcatgttctcgaaggtgactgaggggacagggggtgcacctcccctgcaagagtgggggaaaaggccattggcaagttacagaatgtgggactttgagcacggcggcatagtttgggcccgtcccctggcgccagtgagaaggaaatcgggaatgggaggaaattgccatggggaaagactaagggatcaagaaacgcggacgtatgccggggtggaacagcctgtgccgggaaaaggttatgttgtccgggcacccggaagccaagataggcaacgcgcggccagttaataacggcactgagacacgaacgggcaggagccaaaggacaagccagaagaatggcctggcgtgcggatnggn

SEQ ID NO: 506486 - DNA, 563 bp, Homo sapiens
ctcaacgcagttcaacttcattataaagactatatttttcatttaattgatactccaggtcatgtggattttacttatgaagtttcacgttcattagctgctactgaaggtgctttattactagtggatgcaactcaaggaattgaagctcaaacacttgctaatgtttatctagcgatagaaaataatttagaaataattacaataataaacaaaatagatttgccagcagctgatgttgacagagttaaagaaaaaatagaaaatgctattggtattccgacagatgatgcgattttaatttctgctaaaaatggtacaaatattgaagctgttttagaagcaattattaataaaattccagctccaaaagtggttgaaaatgaaaaagaattaaaagctctagttttgattcttattttgatattacagaggagtaattattttagtaagaattggttcaggtctattaagggggggacgaaattaagttcatggcaaatgggaagaagtttggtgggatgaattagcggaagaactccaaagagcttaaaaaaaaaaaa

SEQ ID NO: 506487 - DNA, 757 bp, Homo sapiens
  misc_feature (97)..(97): n is a, c, g, or t
  misc_feature (179)..(179): n is a, c, g, or t
  misc_feature (648)..(648): n is a, c, g, or t
tttttttttctagggagaaggtgcttaattctgggatctgcgtaccaggctggctggggtgctggagtgggaaggggaatccaaggagcaaaccaanaaggtcctagggccagcctaggcctccacggcccggccgttgatgacgcggattgtggcggatgacgtccgggatgtggctntcagattgttgtgcccgtggcccccgatgtccggagtggtgcatttgtaggacacaggcaggctcggcacacaccaggccctgccaccccccgctgtctcctgtgactgtgcaggactgggagatttgccacaggagggaatggtggcaccagcataagggccaaaaagagtggggccagactccagtaccatcctcccctgttgggggctggggctcagtgcattgaggcggggctacaggaggctgcatgggggaagactggggcgtgggcaacaagggtagggtgcagaggggaacctcactttctcattggtccatggttgccaggacagccttacggatggaggtggcataggagtgcagcctaaaggatgggacgccagccttcagtccctgtggcccggagggctgccaggggcttgcggggccaggggagcccctcacttgaggtgtccagatcatgcagntggcacaggtgccggggttgcaaagtcctatgggaacccggcgggtcccggactgttcacgcgtaccttggctgtggccccccatgtggcccgcatcggaattgtcttc

SEQ ID NO: 506488 - DNA, 200 bp, Homo sapiens
  misc_feature (83)..(83): n is a, c, g, or t
aaatgtaggctatgggggtactgtaattgttgcagtgcgtactatgtaagggtttgaaatctgtaccaacaggtccttggacngctgcctgagcttgtgctgtgctaggaaacagagctttagaagatgcagacagactttctgaattggatgaagctgtacttgagactacactcaaaactgcatcaacaatattttag

SEQ ID NO: 506489 - DNA, 363 bp, Homo sapiens
  misc_feature (8)..(8): n is a, c, g, or t
  misc_feature (26)..(26): n is a, c, g, or t
  misc_feature (43)..(43): n is a, c, g, or t
  misc_feature (48)..(48): n is a, c, g, or t
  misc_feature (70)..(70): n is a, c, g, or t
  misc_feature (97)..(97): n is a, c, g, or t
  misc_feature (166)..(166): n is a, c, g, or t
  misc_feature (361)..(361): n is a, c, g, or t
tggccccntgacccttcccctgtccngaacctacgttgatganttggnccaggagcagatattatgatanaggtttggtctgtatttatgcattttnaattcagagagttaaatccatggctcctcacagtacgtttactgtctccacataggtgcatggtggccnttggtgtacccctggccctggactggaagactgtcatttgaggaggttaaaatgcatgcagggaggataccgggatggcaccatttaagctctgggtagccagctccagctctggattatcctggagagccaacaccttaactagtttgatgtggttttccgttgctttatgagcaaagtggttctcatagagtnat

SEQ ID NO: 506490 - DNA, 81 bp, Homo sapiens
gcccaaaagaacccgacagctttctatctctgtgccagtacttatagttcgggcagaatgaacactgaagctttctttgga

SEQ ID NO: 506491 - DNA, 797 bp, Homo sapiens
  misc_feature (97)..(97): n is a, c, g, or t
  misc_feature (179)..(179): n is a, c, g, or t
  misc_feature (688)..(688): n is a, c, g, or t
tttttttttctagggagaaggtgcttaattctgggatctgcgtaccaggctggctggggtgctggagtgggaaggggaatccaaggagcaaaccaanaaggtcctagggccagcctaggcctccacggcccggccgttgatgacgcggattgtggcggatgacgtccgggatgtggctntcagattgttgtgcccgtggcccccgatgtccggagtggtgcatttgtaggacacaggcaggctcggcacacaccaggccctgccaccccccgctgtctcctgtgactgtgcaggactgggagatttgccacaggagggaatggtggcaccagcataagggccaaaaagagtggggccagactccagtatacacactcctcttccccgtgtgggcgcgtggtggtctccaggtgcatgtgaagggcgggcatacagggaaggcttggcagggtgagaaacgtgggggcgggcgcacgccacgggtctaggggtgtgcgaggtggacaccctcacatttcctcatgttggtccatgtgggatgtgcccaggacagccttacggatggaggtggcataggagtgcagcctaaaggatgggacgccagccttcagtccctgtggcccggagggctgccaggggcttgcggggccaggggagcccctcacttgaggtgtccagatcatgcagntggcacaggtgccggggttgcaaagtcctatgggaacccggcgggtcccggactgttcacgcgtaccttggctgtggccccccatgtggcccgcatcggaattgtcttc

SEQ ID NO: 506492 - DNA, 186 bp, Homo sapiens
cgtcggagctgccattcctaatccaatccctggccctgttgactttgttggcagctcctcctgacactctcacttggtctccacgaacaagcggactcctcgctggtcctcatcctgcctccatggctgcacctgctcttctttctggccatcaatgtcggggtgcccagcggctcagtccttagc

SEQ ID NO: 506493 - DNA, 134 bp, Homo sapiens
tctctccacactggtttaagttggttttagtcactggcataagtattataatagagctacttagctgtgtgttttaatacccttctgttaaacaatttgcaggcaaacttaatggccttttctaacatagttca

SEQ ID NO: 506494 - DNA, 110 bp, Homo sapiens
tattatgggcacagaaattagtagtcaacatctcaaaactgaaaaggagaagaaggatcaatggcatgttatgatgtgaattaaatcttgaatttttttcttgtgccagt

SEQ ID NO: 506495 - DNA, 1088 bp, Homo sapiens
  misc_feature (321)..(321): n is a, c, g, or t
  misc_feature (529)..(529): n is a, c, g, or t
taaagatatcccgttgacctcatgactcgtgcataatcggaacaatacgggtctcgcaagaatgatgtaaactatcatagctgaggtggcggaagtgtaatgaaaaactgaatatcgtgacagaggtggatgtcaatgaccgtgtgtgcatggagaaagcgtgtgatagtgagagaggaaagcagttaaggtgtccacttgctgtcatgatttgctttggattagcgaagagagtgccagattgatctaaggatgggtcctagtagtgaaataattgtagtacaatacaaggtatatgatcgggttggacagtgatggcangagagtgcgcaacgctggcaaggaaagtcagaagcatgtgtttctaaggagacaataggggtgcgtaacgctcgtagtcaatacggatcctacgagaaggtgaagtgggttctgcagatcatagtgccgtcaacttggaatgccatgtgcaacacgcgtgtttgcgtgccaagtagagtaagtggtagggtacgtccatgtactctgntagggaaagtatagtcgcacatagtacaatggttgcatggtctagtctttcaccagggcaaagagggagtagctcgtttcattccaaggttgccctcgtacgcgatcccgtatgcgttcaagaggattccatcgctcgtaccaggggattgctccgaccgcttcgtttggctgcaaacaggcgaaataagacaagctcctgggcccaattgggttgtggtaacccttcaacgcgctagagaaaagcgccgttgataaggaaacctatgcgacaggcgcaagaaatcctcccttggcgttgggcaccacattctgtgcaaggggaaaacggtagccaccaaccaaaggggataatggaattcacaagaggcccaaggaactgggttcgcccacgtctaccgccctgtacaagcgttctgtggcaagagcactacccgggcgaccccaaactgtgggaaattctttatgtgcaacaccaaatattagcccaaggcccttttgggaaaaggagcgccaatagactaaggaagggacacacagtgtacggacacacacctctg

SEQ ID NO: 506496 - DNA, 449 bp, Homo sapiens
cccccaaggcccgagggttttttcccccgggggcggggtttcctccccccccccccccggggggggggttaaaaaaccccaaaaggggggtttttttccccccttgttttggccccaaaaaaccccccccccctttggggcgggtttttttgggggggaaggaaaaaatatttcccccccccccttttggttttgggggggggtttaccggggtttttggggttttttccccccccccccgggggcttttttttttttttttttagggggaggggggggttaaattgggccccccctttaaggggagggttttaaaaagggccctttttgggtttccccccagcccctttgggggggcccccttttttccccccctttttaccccccctttttcccccccttttttttttgggggggggtttttaaaggggggggttttttttttttta

SEQ ID NO: 506497 - DNA, 694 bp, Homo sapiens
  misc_feature (86)..(86): n is a, c, g, or t
  misc_feature (123)..(123): n is a, c, g, or t
  misc_feature (129)..(129): n is a, c, g, or t
cactgtggacgatgagtcagtgcttaggggcgccaggacgtgggcgtgcaggacgccagagctgggtcagagctcgagccagcggngcccggagagattcggagatgcagtgcggctcggatngcctgngagcttggggctggcagcgtgcctgagtgctcggtgtgtgctggaattgtctgtgttgtgacaatgagggacggtgtggcagcgtgcccttgtggcccacctggtgcctggcactgaacccccactccccacagctcgcgtgctcactggctgctcccttgtggtgcatgcccctgtgccctggcccttgccctgtgctgtgccctagtgcctgtgtggattgcctgctcatggcttgggctcgttggagcagaggtcagagttcccaaccccgtcttgacggctcttgaccatgggaaaagaaccgggccaagtgcggaattctacagttccttttgcctgtgggaattgttcaaagggccacggcatcacccacaaggaatccagggtgttcccattacgcccgtcccgttgcttcaacggagagaaggcgggacaacaatgtttcctttaaaagaaggctcggttgggatgccttgtgttccccgtattcattcgaacggacagtgagacggatccctggccaaggaattgacggctcttggagattggtgagaggagaaca

SEQ ID NO: 506498 - DNA, 1016 bp, Homo sapiens
ggcgcgaatccgtagactactctaccatgctcagctgtaacgttgcattattccgtgtgcttgtgcactgatccagtccctgagtcctgctctgagtacgtgtacttccgtgtagttcctattgtcttgactgttggctaggccctcggtcttacctatcaagatggcgatcatgttatcactcttgcgcgtcgaacggatcgcagtccatggatccttgctattagatatactactttcgtgtaagtatactgctccggagcatgtgaaccaataagcaatactaccagtcaatatctcatcagttaataactcataactggctatatgcagataagaactaggaagtagcaccctctttcacgttctgatgtccgcagaggttagcccaagggcacccctctgagcatccggatctgcttcttctcagcatgactagaaatagtatgccgcccatctcaatcatatagccaagatctctccctcgactagaacgtaagcgcttctcctcactctctcaagtcttatccatcataggcaggcagtgtgaggtggattaagaccaaatgccagctagggcaaaaatcttagcatactcgctcaattacccacataggactgaataatagcagttctaccgtacaagcctaacgataaccgattcttaatttaactatttatattatcctaaaatactacctgcattcctacgtactcaagtttaaactccagcaccacgatccttactactatctcgcagctgaaaaagctaacatgactaaacaaccttgattccatccaccctcctctcctaggagggctgcccccgttaccggcttttgccaaatgggcccttatcggagaattcccaacaaacatatgcttatatcccaccattataggcaacatcaccttcttaacttatatttactacgctatctatcaactcataaactattcccatatttaacacgtaaaataatgcagttgaaatacaaaaccaaccattcttccga

SEQ ID NO: 506499 - DNA, 332 bp, Homo sapiens
gtcatcccggagggtactgtcctccaatggcagcactgactatgaccgtggacaactaaagatcgaggaggaaggaaagcgagactcacgaatctgggaagcatgtaaacagagcaccccatgccgaaagggctgcaggctgtctttggtttgggaaccaggaaagaagggatctggggacagaatcaccctactcctatagcctcactagactctgtattttcctgaagacacagagcagagctagcgaaggagggcgggcaggtctcacaacttgctggacgcaatcccctcttggtgtgtgtataacctgactctgacagccaaggaaa

SEQ ID NO: 506500 - DNA, 1694 bp, Homo sapiens
atggctccaggacgtttcttagaaatagtggcaggcaacaggtgtggacagctcatgcctgctaatcataacctatcagactactaagcacaggtgtggtaggctcacgcctgctgattataatcttcagcttactaagacagagtccatgcagcagtgctctcactgggaccattctacctttacatcagcatgcttttatatgcaacgacacctgctatccacacaggcggcgcaagcacaaatgtcatcttaactagcgtgacatccaacatcgagcgcaatacttgtactgcagcatacatggcaatagaagctctcacacgcgctactactggacagaacccaactacttcatattcgctacacactctgctggcggcactaacactgctagtcgtgcacttcaatagacgcgcttaaagccaacaattacgccacgtctcctctcgcgcccgtcgctagcgcgcgctcgccaaccacgccctcacaccaccaccgctcgcttcacctaggcgccacttcccagccacctccaaccaaccgagcccatctacaacgcgcccacacttcgcactgcgttccttaaggagcctattcaatcctctttccgacgccaagcaactatacgacgtattgctacttggctatccgcacgccatcccttccaagtggtcactaccatcgactgcggacacgcacacgtacacaacccgagccaaacagcaccttatctcagcagccgctagctcatcccccccttgacatctaaacaacagctacatgacgccaacctacacctccacacgcccgcaaacgaatcacaaacccctcaacacactcccgcctcaacccgtatctcccattaccattgacaaacacacacataatccacacccacacagaagaactatcgacatacacctcaacttacgccacaactcacaactaccatccaccatctactacgcacacccaccttcctccaagcaacaacaacaccacaaatcaccacggacacacctcatctacaccaaactccacattccacagctataacaggagcattcatatcgaacccctcaacctagccagtagtcgacctactgcctcacatcaacttatcgaccaacacacaactctggcgatccactcgaacaacgcaaccactctctcaccatcgagtgctatatcctaaccacctatagttccacaatacgcacccattccacatttgtccacacacatccccatttcacaatcccgaccattatcacagcaattagcacaccacctaaatatttcatcctttaccccctattagatacacaccatatcctcacacacacccgtccatcaccaccaccgacagcgacattaaaagcccatccagcaacggggacatctaatcgacaaacccacagagcagatgacaagacacaactgaagcacgcaaaagactagtcctaaccaccataaactcatccctcggtcggcgtcctgaatccaatcgattaatgctcagcatcagcgaccgaatacgattacaataccatcaccataacacaggctcatctcacaccacgcatctaacctcgaagcggacgcacaatcttaatcatccaacacccgcacaccatgagaccatatcgtaggcgcatccaccatatgacgagcagcgaggcgcccaagat

SEQ ID NO: 506501 - DNA, 1060 bp, Homo sapiens
cccagccccaaagcaacagggagagagtcacctcccccatccctctgcatggagtacctttcagccttcaaccccaatggcctgctaaggtcagtatccactgtgagctcggagttaagccgtagggtctggaactcagctcctccacctcagcgacccttccgtgtctgtgatcataagcggacagtccggaaaggactgacagctgccagcctccaagaactgctagataaggtcctggagaccttgctgctacgtggagtgctaacactggtcctggaggaggatgggactgctgtggacagtgaggacttcttccagctgctggaggacgacacgtgcttgatggtgcttgagcagggccagagctggagccccaagagtgggatgttgtcatacggcctaggacgggagaagccaaaacacagcaaggacatcgcccgcatcaccttcgatgtgtacaagcaaaatccccgagacctctttggcagcctcaacgtgaaagctacattctatggactctactccatgagctgtgatttccaaggagttggccctaaaagagtactcagggagctcctccgttggacttcctcgctgctgcaaggcctgggccatatgctgctgggcatctcctccacccttcgccatgtggtggagggggctgatcgatggcagtggcacgggcagagacacctccactcctaatgagatcatgctttgagcctgtgctgaaagactggttccatgtgacacaggagggtagtaaaggcaccatcaggcttggggtctgcagtgtaccctaggtaaccaagctgactccatcctaacagatctgcacactgccttgttcctctggcctgtacatcttcctgaagaatgctacctgtcttccctccactcctgccttccacataccctgcagaaccacagccttgtcccctgcatcctgatcccaccgtaatcgctgcttcatctaggttcttactgacgcctacccctaagatcctgcataccaacggccactgtccctagctttactacaagataactttcccct

SEQ ID NO: 506502 - DNA, 214 bp, Homo sapiens
ggagttcaagaccatcatgggcaatatagtgagaaccccccaccgtataaaactgaaaagctcactgaatggtactagctcttcctatataaatcccagttctagtgttctttcctgttccttgctgaagattgtatttactgtgtggcattgtcctgagggctggtataactacgtagtactttcctaaccctgaggcactgtttgcactctg

SEQ ID NO: 506503 - DNA, 150 bp, Homo sapiens
ctcctaaaaaattaaaatggtaagaaaattgaaaacctcatatagaacaactgtaaatcaagaaaaaggaaatctccctgaaagtaagcaaagttaaaagacaagaaagacgaggtgatggaaaataaggaaaaaaacttttaaaactta

SEQ ID NO: 506504 - DNA, 744 bp, Homo sapiens
agcggggggtcggagtcggctggggatggagccgctcgggccgagccctccaccgcccaccatcaccgagtccggcccaggctcctagcgcggccgccggaaggggcgggtcagcgggcgggcatttcctgccggtgcctagggccgacggggacgctggcactggtggggagctgttggggggtcccgcatctagggctctcctttcctgcctccggcccccgcgaggggcgcgcgcctctccccgccctccagcagtcctggtagggcccgggcgcgtccgcgctctgcagcgggaggtcctcgtcgcccctcgtctccagccaggtactcactgggctcctgcctgccgcctccggcccaggacgcgcagcgtcggtatgggccccgccgcctccccgcaccccggcgctccagggatgtggcaagacccggctttgagcacctcccgggcgccggccccgaggccgacctagctctgcacgtgggccgcggggctctgccgttgaaaggagagcctctaactaggagcacgcacgggaccctggcgggcccctccgcctggctcagatgcctggcatctcaggccttggcacagctagcaggcccctggcaggccgtggacccagcagggctgttttagtgcagattggccctgaatctcaagcccactaattgttccagtctctccatgagacccagatccctgaaagttagtggaagggaggcgccagggttgagtga

SEQ ID NO: 506505 - DNA, 230 bp, Homo sapiens
acagaagttagaggagagcagaaccacggttcagcagtcttcaacctggcaaggaatagatcatatcctattttcctttcaggacttcatacaatccccaggatagcacctttgtatgagctgatccattaactaaaccaaagctaacattcaacactgccgttcaagctaccatcactcagtttttcctctgcactgtgtcagtaacacgcatcctgcaaagagtacag

SEQ ID NO: 506506 - DNA, 674 bp, Homo sapiens
tcatctagacactggtgatgccagtgaaattttgcacgttggaggtataaggtatctgtcacactgtctggaaatacaggttaccaggacacatactagtttcttggttcggtagaataaaggaaactctaagccacgctatgacacattttcaagggcacatctcgaaaccagatagtactcattcctagattgaatttgactctagatgtggatgtgggggacttgcagatggttgaagttcatgtggtataacaatgtgatcaacccaactttaacctagagtgggagcatccaaggattagtacgtggatgacaaagtgttggcaaaacagttcaacttctgtagtccagaaaccgtcagggaggaagttctgctcgaccctgcatcaccgtgttaggagactactgtctatttgaccaatgaattgacttctaagtaaaatctagctggctgataccaaaaataacaactctaaataaaaattcctagctatgataacacaatcgtgttgtggccgcccgttggcccccctgagaagaagttctttgtaaacaccgtcgcgtgttgtcccccgggtcccaacccggtgtttccctgccacgtgggccactaccggtttcccaggaagaaccggcgcgctcgacacgcccggggttttcccccgttctac

SEQ ID NO: 506507 - DNA, 205 bp, Homo sapiens
gtcagtttaataacataaatatcatcttctctctatcgctacgcgacacaacttatgtgtattttgctctctagtctagtttttcttcattgtgctatctaccccttgcttggtttccaaagtgcagttagaatgactataaattttaacctaccagaggcggaagccaagaccaaagccgattcctatatgccaccccaggagc

SEQ ID NO: 506508 - DNA, 319 bp, Homo sapiens
tgccttcttttgctccagtcaaagtgctgaatgtagttaggctcttcttctccactcttcgttcctagccgcacttcttgtatagctatgccttcttgctcttctcctcttctctgctctcatttatacaacgtggctgagctgatactttaggaacgatcactggcattaatcatctgtattctttcactgtgcttagctgtgagtcctttctttggtaagacattgagaggtattcctgttttagaagatattcgaatttgtttgggctttggttgatacttgataagctgtggatggttatataaatttgagtatg

SEQ ID NO: 506509 - DNA, 100 bp, Homo sapiens
gttgtacttttgtaaatgattttttaaatggaattttgcccataatacattgtaaaactgtatgataatcatgtgggaaaataatttttgaaatatccca

SEQ ID NO: 506510 - DNA, 714 bp, Homo sapiens
  misc_feature (318)..(318): n is a, c, g, or t
  misc_feature (347)..(347): n is a, c, g, or t
  misc_feature (468)..(468): n is a, c, g, or t
  misc_feature (534)..(534): n is a, c, g, or t
  misc_feature (581)..(581): n is a, c, g, or t
  misc_feature (590)..(590): n is a, c, g, or t
  misc_feature (592)..(592): n is a, c, g, or t
  misc_feature (707)..(707): n is a, c, g, or t
cgcctgcagtgcatcggaagccggatggggtacgagaggctttctctcaccagggtgattgtgcatgaatccggtccccaacgggctcaggttttgtcaaatgaccagcatattcaagatgcgctgggcgtctaaagaaatcggcatagaatcattaggcacattattaaaggtttttaccgggggaaaccagcaaaatacacccaaacgccgcgagtaagcaataccacaaagtttcatattttaaatgggccaatactaaaacaatttctctcacaaggtccagggtctataccttatacactgggaacatcattncaaacgaggcgccctttacccataggggnccacttttaagttaaaaaagtaatgaaaaccgagaaagcatttccccatgtgtgcgaacccttatgggtccacaacccctctacttcacgaaaactaccaccaaacaacccaaactgggtncctcccccttcattttcgctcactgatattatacattcccattttattaaacataaccgatcatantaatatataaagttccaccacaaacaatttgaaggtcatccaaattnaacccattntnactgtactaacaaccttctatttctacctattctatttatttatattatctcttccccatattttagttcgtcctttcctttttttacactttaatctatactaattatatctanattgata

SEQ ID NO: 506511 - DNA, 339 bp, Homo sapiens
  misc_feature (243)..(243): n is a, c, g, or t
  misc_feature (339)..(339): n is a, c, g, or t
tctcaacctcccagggtggctgagactacagggtgctggccactatgcccaattaatattgggaattttcgtatacgtggattccagaggggtgacagtgaaaggggggaccatccagtggcaggaaaacaagcttaagacgcccacggattctacattatgctcctacctccgggcagcctctccaggcccagaactttctccagtcagcctctacagaccaagctcatgactcacaagggnctatttagggccataccctaggtcacggcagtctccggagatgagcctaatggcccaaaaaaggctccaaaggcacagctccatcgttacaatggn

SEQ ID NO: 506512 - DNA, 586 bp, Homo sapiens
  misc_feature (472)..(472): n is a, c, g, or t
  misc_feature (545)..(545): n is a, c, g, or t
gtctttgcattttttattaagcgaaggacaaagaaatgtggcgatgcgcgtaaagaagtcgaggcggaatagactgggtgatggccttacacggacgaaaacgagaaccagatgaatatgctggtgattttcattggccttatataattctcatggtaggctgggaagcttttaattgtgaagttataagcctcatgccttttgacttgccgtaacaagttttttaccctactaggcatagctggcatgtttatagggagccgtgcagaacttatctacattagttgggagaactgaggtaacagctctcaggagctattgtgttgccttgggcctgagagtcacgagctcaacacgtgcagggggaggcatgaattcgctcttcttctcagagagggggcatgtatacgcatggtatgtgaatgttttagcattcaacactctgtgaacgtatgtatcatggcatttcatntctgtttagcatgccggctgtagaccatcgaatactgtggcatatttagcgaagtggttcacttactgccgtntgtgtcatgcggacattcataagctgagatggggaacaggt

SEQ ID NO: 506513 - DNA, 179 bp, Homo sapiens
tatcacctgtgattgggacgttactcctacagcctgagctctggtactcccctccccttgatgattatctctggaaatcacagaacgttagtacttattagcagtagcgaggtgcagagcatgaagtttgcccagcgtctggccatgcagaagtctcacggagatctcacaggaaaggg

SEQ ID NO: 506514 - DNA, 107 bp, Homo sapiens
agccaggtgtgtaggtccaggctcagatttatgcctctctggtcctcctcagccttcatggagcacttgcattctttcagcttggaacttctctgttctgcactact

SEQ ID NO: 506515 - DNA, 890 bp, Homo sapiens
tggacttttggtcatttaattgtaacccaagaaattttttccaaaataaaaaatgtattggtaccttattggtccaacacaaatattttcctattggtaaaaccctagggggattcaccaaatacttcattagctgtatttttacattgcactatatgaactcgtgcctcgcgagtgctaatagtcataagtgggttaaatctctaaaaaatccatatggcaaagtgtcacttgtaaaaaaaatacacacagcctataaaaagtggataaacactccatttataatcctaatctacaaatagatcataaacacagccaaaatataaacgtgattaatttttccaatacgtgtattcaacagcgtgattgttaccatagtggtagtctgcacattaattcacaaacagtgaggaaaatttaaccaaaactattgcaagtgaaaagtccgaggcttttacactctattagtgcaagtgggcttaaaaggtgtgaccttttttttttcttcaaaccattgattggttggggccccaccactacctatctctcttggggatgctccgtgaccaggtcggggaaatattcctctcacccaggaagcgaattcttgacggctgtgttgcaccaacacccttggtctacaacacgagttccaactctacaaggggtaaaccccagctctattgttttggttccttcacaaagggttctcacgataactgctatttaacagccgcacccttgttcctctatacataatttgtctcggcgccaaaataaattccctttaaaaggtcggacaaaatcaagaaacggccaacaaaaattttttgtccgaccagaagttggaattctctcggtggcctgaaaaatggttaataaaaagctgg

SEQ ID NO: 506516 - DNA, 762 bp, Homo sapiens
gtatttttagaaggcaaggaaccaattatgctgtattccataagtacttctctaaatgttcttgttctcgtaattcttggctaagacccctttaacatggttatcgctagtacaacggaatcccttaatgggaacactcatggtggctggctagctagtttctaccaggacctttatttgcctcttataggaaggctaacttcttagatcatgtcatccaatgggaacactcctctttcttagccttacttcggagtcttgcctataactaaacgctagagcaacacacatctgaaaggcggttcgtgatccacggtcctgaaattttcatccttgaatgtcctttgtagtaaatctgaaatgtttcattttaagctaacacaagatcataaatttccaatgattagccgtgggactccctgcaatgaatggtgttatgctgacttgaagcccaatgtggatcgctcattatctttcaaaaagtggccagcagatgacttatactgagtcacagcgatgatccctctatgccctgacacattgagtttagtgtagtcattttacttattttaatcattagctaactttgtctaagtatagtttctagatcagtgagtagtgtaatcgattataaaggatatttatccaatccaaggcgattgcattttggaattattattattttctctctgtctgaagtattcagttgtaaacataccaataacatatctcttaaacactctccgttttagccaccattta

SEQ ID NO: 506517 - DNA, 752 bp, Homo sapiens
gaggcaatggtggtcttggcaacagaatgctcagcccctcgtggcaggacttgacaagggcaagcttgaccaggaagctgccatcagggatcttcccctgcccgaaaagctaggctccagctgcaggcgggctccaaccctctgctcctggccttgggcaaagggcactcagcgcctcgcttggcccgtgccttgtggcaatgcgaggtccttccttatccccaccatgggggtccatgctctcctatttattctcgcccagtcaaccctctacaagacacttgtccctgggtgccacacttcctcctctccctcgcttgtgtacttccttgtcccctttttaatttcatggggcaggggagggggaggggcacaggcaaagaagagattcaccagtgtcctggggtaaggggggggttccacaagtcaatcatgggtctactcctctttccgtggctggggggtagacttaattacagagagacattcagcaaaaaaaaaacaaaacaaaacaaaaaaacatagtgtgcggccgccagggcctaggaaaaagtttttcacaccccaccgttgggcgccagggccccagtagagagaagtgaacatgggccacaacgtgcccacagagacaaccgggcccgaacatggccgggtttcccacaaaaaaaagccggggacacggacgctggacacaccaagggtcgaggcacacggctccaacggacaagaagattacgcggccgtagaagtgt

SEQ ID NO: 506518 - DNA, 546 bp, Homo sapiens
  misc_feature (408)..(408): n is a, c, g, or t
acagttatagaacacatggcacttaaaccccttattaatgctcagctatatactatttatacacaagtgataacccagatttgtaacattagttttaaaaagggaaagttttgttctgtatattttgttcccttttacagaataaaagaattacatatgaaaacccctttaacccatggcccttgatgtgatgtggcaggagggcagtggtggagctggccctgcctgctgcagtcacgtgtaaacaggattattattagtgttttaggcaggtaatggactaggcccacttttaattttgtcagattcacacaggcccctatgagctttcagactccagctgtgaagagactctgtttgcttgggtttgtttgttcgcagtctctttctgccagggcctgggcaggntgctggaaggcagcttgtggaggccgttggttccgcccactcattccttttggggcacggctttttccttcccagttaagatgccatgggcggggggattccatcccgcagacatgaaataaaagctttgcaaaggca

SEQ ID NO: 506519 - DNA, 841 bp, Homo sapiens
  misc_feature (287)..(287): n is a, c, g, or t
  misc_feature (447)..(447): n is a, c, g, or t
  misc_feature (450)..(450): n is a, c, g, or t
  misc_feature (454)..(454): n is a, c, g, or t
  misc_feature (480)..(480): n is a, c, g, or t
  misc_feature (638)..(638): n is a, c, g, or t
  misc_feature (665)..(665): n is a, c, g, or t
  misc_feature (725)..(725): n is a, c, g, or t
  misc_feature (833)..(833): n is a, c, g, or t
  misc_feature (835)..(835): n is a, c, g, or t
gagctcactgtaaccttgaactcctgggctcaagtgatcttcctgcttcaactttctgagtagctgggactacaggcatgcaccaccatgcacagctgcaggacaagttcgagcatcttaaaatgattcagcaggaggagataaggaagctcgaggaagagaaaaaacaactggaaggagaaatcatagatttttataaaatgaaagctgcctctgaagcactgcagactcagctgagcactgatacaaagaaagacaaacatcctgatccatatgaattcctcttnttaagaaaaataaagcatccaggattcaatgaagaactgactatcaccttgttaatcattcagaaacatgttgcaggcttaagccatttttgatatagatactgaaacaattacttgctaagagcaaacttgaaggtatggataaggccctgagtcatcntcntganctgaatgatagttaagctgaatgtangtataaaatatgattttctaaccacttgctcgccaacaaggaaaacttttaagtagagcagaacctgaatagacaagacatttctttcttttggtagaaaatgatttaccatcactgtctagttaattgtagactaggtaattttaactttgtgattnattgccggagacattttcttctgtacngtaaagtgtgtgtcagaaaaattagcgattttggaggattaggggactttgataaattgnctgcattctggcagtatgaactgcatattaattttctctctttcaagaacatttttatttattaattccttacaaatactccctaaactttggaacagctctcattgncnggattc

SEQ ID NO: 506520 - DNA, 242 bp, Homo sapiens
tatcaaggcaggagcagacagctttatttagtcagtcattgttttaaagcctttttttccaaaataaatattttacagatattttttttttttaaagattcttttcactgttaagtatgcttattccatgttcttccaagtagacagctgaagatttggtatcacaggtttttaatgactattcacatttcaatagcaagtgggaagtgaggttaagaaaggggattaaactccacacctgc

SEQ ID NO: 506521 - DNA, 642 bp, Homo sapiens
  misc_feature (582)..(582): n is a, c, g, or t
caccacaatgcctggctaattttgtgtttttagtagaggcagggtttttccatgttggtcaggctggtcttgaactcctgacctcaggtgatccacctgcctcggcctcccaaagtgctgcgattacagctgtgagccaccatgcctgaacgcttgttcgtttttgcagcagacggaatagtggtgttgtaggttaggcctgcatttattttttgcagataaatggagaagggaggaatggtggaaaagattacacaagtggctaaaggactgacttaaggtttttatctgcaaattttacaactagagggagaaaacctccctaaatatgtttattgtaaacatttaggacatattgaagagtataaagaaataaacaatataaaatcacttatagttccattacttagatgaactacttcatcactcttaatattttggtgtatggccagccatactcttccttttttatacatgcatacagacttttgcacttttatataagacacattgaagtggcattatactgtacatgcttcctataagtggatttccaggctacacacaaacttttaaagcgtnttctttactgtcacaatttacaaatataccaaaacaaccaaacacgctacacaaaaccct

SEQ ID NO: 506522 - DNA, 110 bp, Homo sapiens
aagctcaacacccactacctaaaaacatccccaaacatcatcacactagcaactcctacacacccaataggaccaatctatcaccctattagaactggctatgagaggag

SEQ ID NO: 506523 - DNA, 131 bp, Homo sapiens
  misc_feature (73)..(73): n is a, c, g, or t
ctccgcttaactgcgtcggataaagcagactagtgaggttagttgagccaataaatgacgtgaagtcctgtgnaagccctgtgcgttacaaacaatgttgagcctgtagatgccgtcggaaatggtgaagg

SEQ ID NO: 506524 - DNA, 1017 bp, Homo sapiens
aaaaaaaaaagaaatgcttttggtgtaattattttcccttcctttggacttaccttgcttatggaataaatcatagatactctgcttccttgccagaaactctcatggcaagaagtatgggagtttatgtggtgaggaagggctgagtgttctctgatgtcagtcatgctgaagttgttttctttgtcctggttaaggggtggtgaaccaaactattgcattttatttttccattcttaaagtctctgtatgtgaggaccccatggttgccccaagacaatattctttgacagaacaaataaatgcatcagtggcatttacatttgagcaagaggtgagatactggatttgatggtagaatattaacatatgtggctttttgagataggatcgagctttgtaaagaattggtaagtcatgatgatgggtgtggtagacttaaatgtttaaaaatgagttaatttttctaattcttagagaattgttaaaataaagatgcttggtatttcctttagtcttcacctacaagaaatttagtatgctctccacttagaaaacctatcttgattcatagacttaattatgccatcttggctatttctgagagttcgagggccctctgtttcttgtctctttcttttctgtgtagaaaccctgaagggtccataaggatcatgacatctctcaataagttgcggaaagtaaagcgggcgcgggtggtcatgctgtaatcccagcatttggaggccgagggggcagatcacgaggtcaggagatcgagaccatcttggtaacatggtggaacgcatcttattaaaatacaaaattagtggggcggggggggtgttggaaatccagtattagaaggttaagaaggaatgggtgaaccagggttggctggtgagtgagtaggacagagccggtggagaaaagggatccttaaaaaaaaaaaaggggggtaatattgggccttgtccttttaagcgagagataaaaggggaagaaaattggattgtc

SEQ ID NO: 506525 - DNA, 144 bp, Homo sapiens
ctgatccgcttaagggaacaaagcaaaagacgacaatggctaaattcgtgatccgcccagccactgccgccgactgcagtgacatactgcggctagatcaaggtagctggctacaatatgaactacattggcaatcacacaagt

SEQ ID NO: 506526 - DNA, 144 bp, Homo sapiens
ggttgaggagcagacatcattccctgccctggaattgatttggagccctgaagaagggaccactcatgggaccacagccactgtgccctgctgttacctgctgtgcccctgcatatgcccctgagcctggggctgccacgtgct

SEQ ID NO: 506527 - DNA, 574 bp, Homo sapiens
  misc_feature (24)..(24): n is a, c, g, or t
tttgctgcatacccctgcgcttcntacagggactttgagtctaacaaatgcttcccctgcccagatcaaggctgcccacagatgggtcactatgctgatagtttgccaacaatacaagtgtggagccacagaagttcttcctgaacacaggagaagccaagaactttgcacgctggaggtaccgtgtttccttgacattctctggaaggacggtcacaggccaagtcaaagtgtctctgtttggaagtaacggcaatactcgccagtgtgatatcttcaggggaattatcaagcccggtgtacgcattccaatgagtttgatgccaagcttgatgtgggaacaattgagaaagtcaagtttctttggaataaccacgtggtaaacccaagtttccccaaagtggcgcagccaagatcactgtgcaaaagggggaggagcggacagagcacaacttctgtagtgaagagaccgtgagagaagacatcctgctcactctcttgccttgtaaaacctcagacacaatgtgacctcttggtaacaccaataaaatcatcagctgcacctaaaaaaaaa

SEQ ID NO: 506528 - DNA, 346 bp, Homo sapiens
agcgacacaaagcttacaagacagcaaagacaacagcaaagctgggcccagcagccatcacctaaagaactcttcactcgttacattggagcaggtgatctctctggaaccaggaaccatcacctaaagaactcttcactcgttacattggagcaggtgatctctctggaaccaggaaccacagaacactgaaggacacggagctggtggctaaggattcaaggcctgcagtgaaaatgtaacatttccctccaagtgcttatttctgctataaactggtttagttttgcaatgaacaactagatttctacctgatattcacgttaataaacttttctttaataaa

SEQ ID NO: 506529 - DNA, 231 bp, Homo sapiens
ccctctattccgaaaaataagcttgtatcgtatgtactctgagtccctagtaaataatgtcttggcctagagaaccacagaaaggactagatattcatacatgcgagagcaacactgagactgcatgttactctggcataatgtatagaaaaaagtccgcaaagaactgccagaaccaggcctgtaaccaagtttaccaggtacatctagtttctctcacaagtttcagaa

SEQ ID NO: 506530 - DNA, 260 bp, Homo sapiens
ggttaaaccggggggggaattcccttttttcccaaaaaaaggtcccccttcccccgccccccggccctttttccccctccccagggtttaccaatttttttaattttttttcggggcccccccccccccccccccttttttttaaatgggcccttttttaacccccccccggtggggccccctttccgggtttttttttaaaggggtccccgggccccccccttttgcctttttaaaaagccccccttttttggggttta

SEQ ID NO: 506531 - DNA, 133 bp, Homo sapiens
atagaagtattctggtctcaagccatgtagacaagtccgggtcatctcagcagccaccgcacaacacccctggtgaaagacacgccctcctcccctctggtcacacaacgagaacatcttccagtctgcctct

SEQ ID NO: 506532 - DNA, 361 bp, Homo sapiens
catatgatatatcatttcatcccttcctcattaggatgcatcgggacgcgttatctatgggctcaggcctctgagcttctgtcatagttgttcctggtctttaatagggtccatccaactcacagacctaattaaaggaggaaatgggacataagtccaataagtaaaattttgagttgcttttacagtaggggggcttaccggcacatgttagtaccaccatcatagccaccattaggttactagttgttattgatttgttctgtgctctcagattgtcctctgccatctgtgccagtttcctgatttgtccccatgttggagggtctgcctggtgagtattctcggtcttttcctttgt

SEQ ID NO: 506533 - DNA, 178 bp, Homo sapiens
atgcatagttgaggactacggatatgtttaatggatgggaggcttagtggaaaggctgatagctggtgggttccgtggggcctgctgtgtgggtcaggatggaggtcctgggtgggctaacgcgtgagccccagcactaggtgggaaggctgctgaggtctctcccacccctgaggag

SEQ ID NO: 506534 - DNA, 129 bp, Homo sapiens
tgagcttacttctctgatcgcttttctctgatcggtatctctgatcgctctttctctgatcgccttttctctgatcgctctctgatcgcttttctctgatcgctcccccccccccccgtattcgaggcc

SEQ ID NO: 506535 - DNA, 153 bp, Homo sapiens
gcaatcctattctagagtccactatcaacaatatgaggttggcgaccctctcatgtatgtatcaggacatccctgatagtgcagccgccattaaaggttcgtttgttcaacgattaaagtcctcacgtcttgcacttgacactctttgtggag

SEQ ID NO: 506536 - DNA, 181 bp, Homo sapiens
  misc_feature (170)..(170): n is a, c, g, or t
  misc_feature (181)..(181): n is a, c, g, or t
attcactcaaccggctgcttctgcatttattgccttttttctttttctctgcttctaaggggtggtggccaccactgtttagaatgaccctgggaacagtgaacgtagagaatgtttttagcagagtttgtgaccaaagtcagagtggatcatggtggtttggcagcagngttggtgaatn

SEQ ID NO: 506537 - DNA, 323 bp, Homo sapiens
atcgtagtgtgtggtaggtagagtgaagtctggtgggctctccaggtgcatagaggggcggcggcagtgtatggagatttctgaggcagcgatttgaaagacgtgtgttggaggaagctgtcatcgtggtggtggggaccggaatgagctcagttccacgacagttatgttcgagggcggccggaacattgtgggaggcattaagggtcatggtgtggacaatgtcgtgggctggaactcgggtttcctggtctgggaacctaacaaggtggccccacgactggaggctgtgactgatgaccacattcggatgcacaaggtgc

SEQ ID NO: 506538 - DNA, 379 bp, Homo sapiens
agtgaggaaaggtgcctcacgcctgcaaccaggagcagggggccaacgtcctgggggcaattgggtaacagcgctcagaactcaaactgaccctacctttgaccagctatttcccttctgatctaacagcagcctctgtgagcacgcagggcacacgcacaggaggttcactctcttaagagctaaaaacgacaggccgtccaagtgtccacaaacatcagacaccaaaacaaagggaggtgagccaatgcggcggctcacaaaactaccagaaagatctgtcggctctgtgtgtactgacataaaaaatactgcagacataaataaaaaagcaagctgcccccacgatatgcaattgacaagaaaagaggataggaca

SEQ ID NO: 506539 - DNA, 654 bp, Homo sapiens
aattcggccattatggtcgagtgatgtgagcacgaccagtttgcgacatttgagacccgatggatcggcagggctgactcgtatgaaccgactagatagacaacggtaccgtacatgcctaagcgctccatgagcgtccctccaggagctgcccactagaacgaagaggatgagcatcctgaatatggtaggacactgatcgccaacagggataaagcggttaaatgcattagcagcataagttctagacacatacgtattactctcataatgaggatcagaaacgtgagctcaccatagcgtactagaacacgaccgaacagaatacactcaagcactagttatcaacattcaactgggagcctacgttaccctaatacaagtctcagtacacttagaggctgccttcaccattttcgacggcatctacggcttaacattaattgttgccacagaatcccatgccctaaacgacaatgcgtcaattttcgtcagtatcgtgctaatcacggaagtaatacttcacttaacattcacagatctagctggtgttataactagtcgactgatactagcgtttcgtagaagcgccttgactagcccccgaagaactcatctattggcgagggcctctgtcggcccgcttggcccagc

SEQ ID NO: 506540 - DNA, 233 bp, Homo sapiens
attactcacagttacccccaataaccaactccaggtgctgcctctgacccctcctgtggtggtgacccatggggtgcagattgtgcactccagcggagaagctgtttcaagaagtaccggtccggcagacatccgcacctaaccaccacccccggcccagaatcacacacactcatatttcccagccgcttcctcatgtaggcctgccttccccggaccacagacacgctgct

SEQ ID NO: 506541 - DNA, 323 bp, Homo sapiens
cccttcggagcaggacctcgctcctgtatcggtgcgatcctggcccgcataggagctcttcctcatcatggcctgtgctgctgcagaggttcgacctggaggtgccagacgatgggcagctgccctccctggcaggcatccccaaggtggtctttctgatcgcctctttcaacgtgccgctcatggtgcgccaggtcgggagggcagcccaggctgcgggtaggccctaacggctgtaactcacagcccctgtccaccctatgtggccccagaacacagattacgacatacaaccccgcacccttctccgccattcttcccta

SEQ ID NO: 506542 - DNA, 495 bp, Homo sapiens
  misc_feature (137)..(137): n is a, c, g, or t
  misc_feature (165)..(165): n is a, c, g, or t
aagtccttcctagaggttaatgaagaaggctcagaagctgctgctgtctccaggaatgattgccaatttagttagggatggctgtgcctgtatccctccaagtttattggtcggacccatcccatttttcctttccntatccaggaaaccagggaggaacctggntacaattcctattccatgggacggagtcatgccatccctggaaaccaatgaaccaccaagtggacatgattccgaagaacctttaagttactttattggaataacaaggaaaacagtaactaagcacattatgtttgcaactggtatatatttaggatttgtgttttacagtatatcttaagataatatttaaaatagttccagataaaaacaatatatgtaaattataagtaacttgtcaaggaatgttatcagtattaagctaatggtcctgttatgtcactgtgtttgtgtgctgttgtttaaaataaaagtacctattgaacatga

SEQ ID NO: 506543 - DNA, 152 bp, Homo sapiens
ttttttaaaaaaaggggggaaattttttcccaaagggggttttttttgttttttggggggggttcccccttttaaaaaaccaaggggggggtttcctaaaggggggtttttaagggatgggcccttaaaaaaaccccttttttcccgggcca

SEQ ID NO: 506544 - DNA, 176 bp, Homo sapiens
  misc_feature (115)..(115): n is a, c, g, or t
attccttcctccaccagtacacaggatctttcaagaagccccattgcggagaccacacagtgttatttggagggagccttggctcctttcatggcaatgcccagaaatggaagcngattagatattgttcatgaaaatctaaaaatgggatcagatggtgagagttaccagcttac

SEQ ID NO: 506545 - DNA, 423 bp, Homo sapiens
ctaacatgccaggtcccctggcagcctagaaatggtgagagtgccgggtccgacatcccgagaaggggaaggggctgattggaaccggtgggaagtggctgtggcgggactccggcctccccgcagtcagctccacaatctgcgcctggagttctttcccatctcggcctcagtctccttcagccataagatggcgaatgcgctgactgcgggaccctgggcgacctgtctcctccatgcgctgtgactgtgccctggcctggagccctctctgggccgctctgcacccgcatggccgcgtctctccgagattgtgcagggaccacgggaggggcgtcaggggagaatcctgactccggatgcgggttcatgaatgggaagagctttggtccagtgaggtttccagtccctcttttcttctgt

SEQ ID NO: 506546 - DNA, 440 bp, Homo sapiens
  misc_feature (39)..(39): n is a, c, g, or t
  misc_feature (168)..(168): n is a, c, g, or t
  misc_feature (385)..(385): n is a, c, g, or t
  misc_feature (421)..(421): n is a, c, g, or t
cctgaggacccgacggctcacggaacttgcataaagttntggggtcatccacatatagcatgtatcagcacctcattcctttttataactgaagagcactccgctgtatagattatttttttccattcatcaaatgatgggcaactgggttgcttccaaatttttttngtgagacagagttttactctcgtggccaggctggagtgcaatgacatgatcttggctcactgcaacctctgcctccaaagctcaagcaatcctcccacctttctacctccctcgtagctgggactgcaggcatgtgattcccaagcctgtctaaatttggtggctgtagtagtacttttcgtagagatgaggtttcatcatgtggcctaggttattngtattacttctactgtatataaagaaaagttccgtngaagccgtcgggtaccgag

SEQ ID NO: 506547 - DNA, 445 bp, Homo sapiens
agtcaagtatgtcttatcggcagatgaaaacggactaatacagtaaatggtacaggagtgggatgttctgaaaagatacctgaaaatgtggaaacgactttggaactgggtaataggcagaggttggaacagttttgagggctcagaaaaagacaggaaaatgtggaaaagcttggacctttctagagacctgtcgacatggctttgccaaaaactgctgactactgatctggacagaggggaatgcacatcacgtgtgggacgggacacagactgctgcagaacatggacaagcagagggaactgcacactcacgtgtgggacgggaccagaggacgctgcagacaatggaccgggcagacgggacatgcaccttcagctgctgtgacgggacccgagcgagcagcacgggaacagacaggggactccctctagacgtcgaccc

SEQ ID NO: 506548 - DNA, 748 bp, Homo sapiens
  misc_feature (166)..(166): n is a, c, g, or t
cttaattcgaaggttaatgcgtgtccaacaaaggcaagattaaagaagcctggatttcacgtgtcaaagccagaaaagccattaccatttgtctacatgaaactttgatcctgaaagcatgggctgatactaagaccaaaggtcgatacgggcgtaatactctagnatggtatagtagaaacagtgatgcagcgactatgcgtgggtgttataaaactgatcaaactctaggcgtttgctgcagtgtctaggacatgctgatgactcagagtgactatgagaagtatcggtgacgagtgtttggatctaatggtctcagcaaggaatgttgggttagaaaagtattataactcatcatcaatcatgatatagtatgactggcatcctcaagctgtatgccattatttttaggttcataatatgagcatctaagtgataaaacctttagattccatattgtgctcagaagattgcgtttcttctgcagatctctagtaaaaaaagatctcttccatattcagctgacagaatagcatgttcattttagttttcagcactgaacataagtgggtcaacataaatgtttatactaaatactgacttcaacataatacaaagcactttctttatctttcagaaactgaatatacacagcaagttttttttcaaaatattttcataggctaaggattaaaaacgattttaattatacacatatggtcacaattttgccttaaaaagattgttg

SEQ ID NO: 506549 - DNA, 976 bp, Homo sapiens
gatccgagccctgtggtgagatctgtgagctgcgcctgacgtgtggcaccatgatcagctcaggtgggacgcccggggcttccgccagctctgcgccgcccgcgcatgaagtagggcatgacgttgtgtggtaccgctggctgttgttgactgtctggggtgctgggggggcggtcgtcttgcgtctgagtcattcgtgggcctcttcgaactgcagtcatgcattccatcctcttgaacatcgctggtcggctgtgtggactgattgatggctggctcgttcccagtcggtcgagtcatgcgcatgacccgtgaccacgcgtgctgggacaagcagccaatcgtactttgcatacaggggtgtgcttgttacgggactcatctggctcgtgggcagaaaatgggcggatgcgactcctccgtagtgccaggatcctaggcgagtcaatgacgtttcacgcgaggctgtgattgacgtgagaacgctctggcgtaagaccctgtgaagggggagctgtgaagtggcttggcgtcgacccctccactcgccctgtctctctcattctagagtctctgtagtagggttccaaggtgatggcttgacacgtgttcctccgcttgatggcaccagcctgagagagaggtgtctaatgcggcgtgtcgctaacccgtggaagtcgtcatgctccgtcttgttccagatcttgggtagacgacccaggatggcactgggctcgtcgttgtgaggggtctcgcggctgctggacgttgaggcatagctgcttggttgttgtgttgtacctaggcagggcctagtcttcttgtggggggccttccatccaaagcccatgacgggctgcttgtcccttttgacttgggagggttccctggagttgggccctgttagggggggtttggaccgtccttgcttggggggtccgctttttcgtggcctcgctcaggtcttattcccagg

SEQ ID NO: 506550 - DNA, 768 bp, Homo sapiens
ggcctgtggcagtcttatgcactattttttttttaccacacagcttcttggttgacaagagtgtatgcacaataataacgagggatgacagatagaacacgcacgcggtgcctttggtagagcaccgtaagggttcggcaaaagtgagcacaattgcctgcggatatattaacactacattacagacaaagactaatgctggcctcctaaatgattcggataccactatgtaaagtactcctataccattattcctcgccagctgttaactagcagcattgtacttgtatgttccactttatatatggacatactacacacggtcatgccttgcacaaaccgttagttatggtctcttataattcgacagttaacaatataatgatattgtcttgttaagcttggcgtgccctatataacatgtagtacaaaattgttctggttataacttgaagatatggggttagctttacactggggtactctcaaatttacgctatcaatgcagtagtgcaagagcataatcatcagtctatattgattatcgggaggctatcattggtcgaatcgcctcgtgcgcttcttttaaactcatcggtctagtctatccaccctggagttacactcaatttcgtatatatcgctttctaaacatgtgcacatatatcaaagttacggagtaatacggaatggctggctcacttggttgtattgccactgtaataaacatattggatctgtttcgggtctagaagacacgacaacacg

SEQ ID NO: 506551 - DNA, 114 bp, Homo sapiens
ttacgagatgacaacctccctgagaatgaagacagtccagggagccaggcgtgggtcatgcctgtggtctcagctactggggaggctggggtgagaggactgcctcagcccggg

SEQ ID NO: 506552 - DNA, 955 bp, Homo sapiens
  misc_feature (12)..(12): n is a, c, g, or t
  misc_feature (71)..(71): n is a, c, g, or t
  misc_feature (98)..(98): n is a, c, g, or t
  misc_feature (109)..(109): n is a, c, g, or t
  misc_feature (152)..(152): n is a, c, g, or t
  misc_feature (157)..(158): n is a, c, g, or t
  misc_feature (179)..(179): n is a, c, g, or t
  misc_feature (182)..(182): n is a, c, g, or t
  misc_feature (195)..(195): n is a, c, g, or t
  misc_feature (201)..(201): n is a, c, g, or t
  misc_feature (228)..(228): n is a, c, g, or t
  misc_feature (240)..(240): n is a, c, g, or t
  misc_feature (248)..(248): n is a, c, g, or t
  misc_feature (322)..(323): n is a, c, g, or t
  misc_feature (329)..(329): n is a, c, g, or t
  misc_feature (332)..(332): n is a, c, g, or t
  misc_feature (349)..(349): n is a, c, g, or t
  misc_feature (351)..(351): n is a, c, g, or t
  misc_feature (360)..(360): n is a, c, g, or t
  misc_feature (365)..(365): n is a, c, g, or t
  misc_feature (370)..(370): n is a, c, g, or t
  misc_feature (379)..(379): n is a, c, g, or t
  misc_feature (430)..(430): n is a, c, g, or t
  misc_feature (433)..(433): n is a, c, g, or t
  misc_feature (436)..(436): n is a, c, g, or t
  misc_feature (441)..(441): n is a, c, g, or t
  misc_feature (446)..(446): n is a, c, g, or t
  misc_feature (448)..(448): n is a, c, g, or t
  misc_feature (462)..(462): n is a, c, g, or t
  misc_feature (469)..(469): n is a, c, g, or t
  misc_feature (476)..(476): n is a, c, g, or t
  misc_feature (480)..(480): n is a, c, g, or t
  misc_feature (491)..(491): n is a, c, g, or t
  misc_feature (498)..(499): n is a, c, g, or t
  misc_feature (512)..(512): n is a, c, g, or t
  misc_feature (537)..(537): n is a, c, g, or t
  misc_feature (575)..(575): n is a, c, g, or t
  misc_feature (587)..(587): n is a, c, g, or t
  misc_feature (621)..(621): n is a, c, g, or t
  misc_feature (626)..(626): n is a, c, g, or t
  misc_feature (671)..(671): n is a, c, g, or t
  misc_feature (687)..(687): n is a, c, g, or t
  misc_feature (790)..(790): n is a, c, g, or t
  misc_feature (928)..(928): n is a, c, g, or t
ctcggtgccccncccacccgtttctccccccccgcccgctccgtacccccccccccttccccgcctccccntcccccccccccccccccccccccctncccccctttgncccctgtcccccccttcccccttgctgccttcccgtctgtggnctatnntcccgccccttcacaccccanccnccccccccgcccncttccnccgcccccttcctgccccccgtccctncccccctgaccntgtcgacncccccccccccgggggcccccatgtcccctccccccctggccccctgccccccttcccctgtccctgcctggcnncccccnccncctgtctggcgcccccncnggccccccnccccncggcncctcccctncctgggtcccccccccccccccccccccctccccccccccccccccccgcntgnctngcggnccccncngcgcctggcgcccnccccccncctttgnctgnccacccccctnccccccnnccccgggccgccntcccccccccccctgcccgtgtccnggctcccccccccccccgggcccccctcccccccccgncttccccccccncccccccgccccgctgggctgccccgccgggccntcttncgcgtgtccccctccttctggcttctcgcgccgcggcccccctcntccacctcctcggccngccacccatctcccgcctggtggctctgctagtcaggggacttggaacagagaaagaggactcttgctttgagctcctccacagagctgttggacactttganttgaggaaaaatggcaccatgccacgagaggtggccagagacccgcagctatgtgaaaaactgactgttctgtgctcagctccaggaactctaaaaacactcgctcgctatgccgtgcgccgtagcctggggactccngtatctccccgatgcagtgaagggcct

SEQ ID NO: 506553 - DNA, 936 bp, Homo sapiens
  misc_feature (40)..(40): n is a, c, g, or t
  misc_feature (84)..(84): n is a, c, g, or t
  misc_feature (107)..(107): n is a, c, g, or t
  misc_feature (111)..(111): n is a, c, g, or t
  misc_feature (155)..(155): n is a, c, g, or t
  misc_feature (159)..(159): n is a, c, g, or t
  misc_feature (168)..(169): n is a, c, g, or t
  misc_feature (172)..(173): n is a, c, g, or t
  misc_feature (198)..(198): n is a, c, g, or t
  misc_feature (207)..(207): n is a, c, g, or t
  misc_feature (231)..(231): n is a, c, g, or t
  misc_feature (243)..(243): n is a, c, g, or t
  misc_feature (253)..(253): n is a, c, g, or t
  misc_feature (258)..(258): n is a, c, g, or t
  misc_feature (279)..(279): n is a, c, g, or t
  misc_feature (281)..(281): n is a, c, g, or t
  misc_feature (288)..(288): n is a, c, g, or t
  misc_feature (324)..(325): n is a, c, g, or t
  misc_feature (334)..(334): n is a, c, g, or t
  misc_feature (341)..(341): n is a, c, g, or t
  misc_feature (343)..(343): n is a, c, g, or t
  misc_feature (363)..(364): n is a, c, g, or t
  misc_feature (369)..(369): n is a, c, g, or t
  misc_feature (386)..(386): n is a, c, g, or t
  misc_feature (393)..(393): n is a, c, g, or t
  misc_feature (397)..(397): n is a, c, g, or t
  misc_feature (419)..(419): n is a, c, g, or t
  misc_feature (445)..(445): n is a, c, g, or t
  misc_feature (450)..(450): n is a, c, g, or t
  misc_feature (457)..(457): n is a, c, g, or t
  misc_feature (521)..(521): n is a, c, g, or t
ttcctccggaagtgcggcacccagaggcggtcctgtagcngggccggcttggggcttggttctatgtccctgcgggtcggtgcnagggcgaagaggaacccgtgggnctcnggggatcccggggggccggaccagtgttccctagttgtgggagnagangcgtgggcnnatnncgggcgggcagggcctgaagtgcangtgcgggcngtggaccctggcgggggctgggangacaggcgtggngtcccggcantgaancgggttctagaggcgcaggancnggtaggngaggccggtggccctgggcccggagtctgcaggccnngctcctgtnctgccgntnagggacccggttaccaaccnncatgncgctcagtttgcccatntgtcccngtgntaacacacagttctcgggagangttccccattcccagaggagtagtgngaaangcgtgcncctctagtcttaaacttggcgtttgtattagttgggtttcctggtgtctctttagcaagtgaantttctggttccctccttcactgtgtgacctgcctagtcctcctgggtcgcatttacagaagtttatacgagacctagtttccagggaagaactcactgattccgcgagggagatggcttaatggatgatggtcgtcagccttaaggatacttcagtcttaactgtgtgttacaaagtttgaaagggagggttccctatgaataagaagcacacttgaaagaacagcatctgggtctaatctctcactgggtgcttcagaggaggaaccacaggtccccaggtgaagatccccggttttccttgctcagggaaataataattctactccctagaatgcccaggattggcaagactaggtgatagtaaaaggtttggacgaactttcagaaggtgaagggaattcagttaaaagacg

SEQ ID NO: 506554 - DNA, 858 bp, Homo sapiens
  misc_feature (76)..(76): n is a, c, g, or t
  misc_feature (91)..(91): n is a, c, g, or t
ctacaccacactacaatatataaatctgcatgatgtttatatatccgcgacgcaaaagcttgagtggcagccgcanccactagattcatgnagctatatacgaatgtcacagaagctgcaaagagtccaaatggattggtggtagtttctatatttataaaagtatctgattcatcaaacccatttcttaatcgaatgctcaacagagatactattacaagaataacatataaaaatgatgcatatttactacaggggcttaatatataggaactatatccaaagacctgtagtttgatcactcaagatgggtatatgactattccaccctgctatgagacaacaagtccgaccataatgaacaaactccgtctatatatccaacatgcacattctttccttgctcttgctcacatacaaccactcaccccatatctttattatcctgattgaccccttcaggccccgaccactatactaaatcacctgccccctcccgtacatctcacttcatccgccggttaaggacttgtcctaacaccccaccccaaaatttcatgaacccccccatatgaacggatccctacacagtgaacaatgtgttgaacatcgtctacactatcgttatctcacctctcggtccgtctcgtaaccacgaagtaacacgcccctcaccctaatttcttataatcaccaacccccgtaactttatagtcatcgcacatcaactaaccgatactcctctactttacacaagaccacaaaacgcatccatcacaacactctatatccatccctccgctgctcttatcatttttctttatcacccacgtctcacgtaatacccgcacgcgcacg

SEQ ID NO: 506555 - DNA, 1128 bp, Homo sapiens
  misc_feature (12)..(12): n is a, c, g, or t
gtccggctgcgngcgcagcggtggtggtggcggcgcgatcggccgggctgtaaccgtcgtctgtccgggagcggctggagcggcagcggcggccgggcacggcgcgaggtgacgccacagggcagcggcggcagcggaggcagcggcggcagcaggagacgcagcggcggccgcagcagcagcagcaagacggactcgtggagacgcgccgccgccgccgccgccgggccgggccgggtgtcgcgcgccgaggctggggggggagtcgtcgccgccgccgccaccgttaccgccgcgcgcgccgccgccgaggtgactgaggagagaggcgcctcctcgctcccgccaccgccggacttcaatgcccagtccccagctcgccagcgtttttcgttggaatatacgttgcacatttatggcgattctgagtgtgagggcagacttctgccaggctcagcacagcattttcgctgacaagtgagcttggaggttctatgtgccataattaacattgccttgaagactcctggacaccgagactggcctcagaaatagttggcttttttttttttaaattgcaagcatatttcttttaatgactccagtaaaattaagcatcaagtaaacaagtggaaagtgacctacacttttaacttgtctcactagtgcctaaatgtagtaaaggctgcttaagttttgtatgtagttggatttttgggagtccgaaggtatccatctgcagaaattgaggcccaaattggaatttggattcaagtggattctaaatactttgcttatcttgaagagagaagcttcataaggaataaacaagttgaatagagaaaacactgatggataataggcatttaaggggtcttttaatgtgtatctgctgtgaaacatttcaagatttattgattatatttttcactttccccatcacactcacacgcacgctcacactttttatttgccataatgaaccgtccagcccctgtggagatctcctatgagaacatgcgttttctgataactcacaaccctaccaatgctactctaaaaaagttcacagaggaacttaagaagtatggagtgacgactttggttcgagtttgtgatgctacatat

SEQ ID NO: 506556 - DNA, 883 bp, Homo sapiens
  misc_feature (12)..(12): n is a, c, g, or t
gtccggctgcgngcgcagcggtggtggtggcggcgcgatcggccgggctgtaaccgccgccgccgaggtgactgaggagagaggcgcctcctcgctcccgccaccgccggacttcaatgcccagtccccagctcgccagcgtttttcgttggaatatacgttgcacatttatggcgattctgagtgtgagggcagacttctgccaggctcagcacagcattttcgctgacaagtgagcttggaggttctatgtgccataattaacattgccttgaagactcctggacaccgagactggcctcagaaatagttggcttttttttttttaaattgcaagcatatttcttttaatgactccagtaaaattaagcatcaagtaaacaagtggaaagtgacctacacttttaacttgtctcactagtgcctaaatgtagtaaaggctgcttaagttttgtatgtagttggatttttgggagtccgaaggtatccatctgcagaaattgaggcccaaattggaatttggattcaagtggattctaaatactttgcttatcttgaagagagaagcttcataaggaataaacaagttgaatagagaaaacactgatggataataggcatttaaggggtcttttaatgtgtatctgctgtgaaacatttcaagatttattgattatatttttcactttccccatcacactcacacgcacgctcacactttttatttgccataatgaaccgtccagcccctgtggagatctcctatgagaacatgcgttttctgataactcacaaccctaccaatgctactctaaaaaagttcacagaggaacttaagaagtatggagtgacgactttggttcgagtttgtgatgctacatat

SEQ ID NO: 506557 - DNA, 752 bp, Homo sapiens
gggtaagctaaaatataaaaaaaaattttaaaaaaaaaaaaaaaaaaaaaaaaaaaaaaagaaaaaaaaaaaaaaaaaaaaaaaaaaaaaaaaaaaaaaaaaaaaaaaaaaaaaaggaaaaaaaaaaaaaaaaaaaaaaaaaaaaacttttgggcccctttgccccatccaattttaaattgggcaaactttttgcaggggcccaaatttgggcctaattggccaaattccccctatagggggccgtttacaatttaattggccgccttttaaaaactttgaaactggaaaaacccggggtttcccaaattaaatccctttgaaaaaaatccccttttccccagttggcaaatattcaaaaagcccccaaccaatcccctttccaaaaatttgccaaccctaatgggcaattgaaaattgtaacctttaatttttggaaaaaattccggaaaaatttgtgaaaaaccacctatattttaacccattgggccaaaatggggaaaacccttttaaactaaaagaatttcccccaaaaagggttaaattttttccaaattggaacaagagagcccttttaaaaaacacggacttcaacgttcaaagggcaaaaaaccgttttaaagggcaatggcccccttcggaaccttccccttaacaagttcttttggggctaagtgccccaaaagccttaaatggacaccctaaaggggccccccgttttaaaatctttccggggaaccccccctttgcct

SEQ ID NO: 506558 - DNA, 173 bp, Homo sapiens
tgctgggattacaggcatgagccaccccaggcccagctggaattttgtaacttagaaaaaaaaagttacagtgttggtccttacccattatgtgcccagtgaggtctacctggccaggtagacctagcatgatctttctggctccactcagtgtctaaggcaccctgcttcct

SEQ ID NO: 506559 - DNA, 221 bp, Homo sapiens
  misc_feature (182)..(182): n is a, c, g, or t
tccaggtcatactaaatatttattttcgggcaaacggacttcggagtaattctggacccaggaggggaagcggtatagggtccaaatggcggagacatcttagggtcaaaaacgctaccaagaaaacgaaatcaccttggaaacacacaaggacctcaagaggcagtacacccctgtgccangcaatctccaaagagctggaggagggctctcgagtcgcc

SEQ ID NO: 506560 - DNA, 238 bp, Homo sapiens
caaatgtaatatccctcagagatatattttaggcacaccaaacagagttatagtcgagattaaatggcattttaaaaatcttggagatcagactgtctgcctactatttacactattccatacaaccgacgaaagaagagttctctaattatttcctaaaattatgacagtccacattttagaatcctgacgtgcctgttcgttcatttatagatgaattatcttatgaaaacagggc

SEQ ID NO: 506561 - DNA, 955 bp, Homo sapiens
gcttgattatgcttcttaaatcagtactgttttcatgtgagctaacatttgccttctgagaacaagtttggatattaacttccatttaggccaggcacggtggctcacgcctgtaatcccaacactttggggaggccaagacgagtggatcacgaggtcaggagttcaagaccagcctgggcaagatgctgaaaccctgtctctactaaaaataaaaaaattagctgggctacttgggaggctgaggctggagaatcgcttgaacccgggaggtggaggttgcagtgagccgagattgcccagcctaggtgacagagcgaggctccacctcaaaaaaaaaaaaaaaaaaaaaaaaaaaaaaaaaaaaaaaaaaaaaaagggggggggggcaaattccccgaggggggccccagtgtttgccggtgtaccccatttttttttagcaaggggggcccccatataggggagggtgtaattataagcgacgggcgccggggcgcggggttaaaccaaggtcgtgggcggggacgacacggtccgcgcgggcacacttttgtgagagggaacctcattcgtgtgtgcgggcgctgccattttgtcgccccccctcccagaggaaattttaggggtccagggtacaatttacacttggcgcttcttgcggcgtcttcacccccgtctatttccttgcgggctgagaaaaattccgccacgggttgttctttcgcacgacctttccgaccgcgtctactatacaaacagaacaagatatcacaacccgagtgatactacagtgaagtatgtagatgcgtaaatcaatgaagcctacaggaagatggtactgagactatagtaactcagctattaaacacgcaagaaaaatagcaagggaggacagcacaaaacatctcgctataaacaagagacggacgatcaatgacatatctattaccat

SEQ ID NO: 506562 - DNA, 425 bp, Homo sapiens
acggctgcgggggcgtcggctccgatcggcgcttcggccgcgcatggcgcgtcggcggtcgaaagcacgccggcggcgcctgccgcgggtgccagcgggccgcatgtctggagcggtgcgattcagtcggcaccgtcgtccgcgagcgaggccgcggttcagtcgatgccgggcagccaggtttcgggtgtgcacgacccggcaggcgcggcgcctgccacgggcgcgtcgcaaccgcgcccgtcgagcctgcagcaattgctggcgctgaagaatcgcgtgctgatggaattgcagaagcacggcatcggcaagcaggctacgacgaccggcgtcgcgcctgcgcccgctccggtgcccgccgcaccgcgtccggcagcgaatgacacgagtgcgccggccgctgcgtcgacggcaggcgaacc

SEQ ID NO: 506563 - DNA, 787 bp, Homo sapiens
tagggaacttgcccccggtggtgtgaggtgcaggtggagcacccagacaagcgcctccaacatgctctgtctgtgcctgtacgtgccggtccatcgtgggaagcccaaacacgatattccagatacttatgaagtacgaaagggggctccctgccgaagctgatatgtccaataatacaatgcatcaggtgtcttacaatcccactcccaggaattctccacctaccagccagttgagaacgcacagaaaactgtgtcacacaggcttggaagataaaggaccctataaatggcgaagcctaagacttatgaaaagaaattttgtccatataatcctcacaaaagaatcatgagaggaaaaagaaggcatagaagcgctgggggatgttacaaacagtgtttggtgacacaacacaagaaattgaatggcgaccgcattttagaacagccgcaagcgagagactcaatcgccagctccccagtagagagaggacctcggggaccgtcaacaagactacttcatagaccacggcagggcaagaaaaacaaaatctcctccaaagagtcgactgttgactatacaaaaacggggaaccatagtgaaaccagtcgtaagtggggaaacacgccatgattgtgaagaagaaacataaccaacactcttttcacaaccctctggatgataaaaacagatatcccccgaaaaataactcactacaatgttgaaaacaattcaacggaaacatatcgaagcttcgtgtgaaaatctaaggggcaccatgaatct

SEQ ID NO: 506564 - DNA, 266 bp, Homo sapiens
gctcgacgagggagacagggagagagaacggccagctccacctcagacagcctagagaccgacaccaaggctctggctctgcatcaactgggccctggtatcctggaggccctgaccggtggtgtaggaggaggaacacgcgcggtggcactggttcatgtccgggagggggagataagatagaagatgaaaagcgtcggcgctggcaccggtccctttgagacgggctgattgacggcacgtttcctccttccctttggtcgacg

SEQ ID NO: 506565 - DNA, 444 bp, Homo sapiens
aggcagcgcctcgatctcggcgtgaacaatgtcttctactgcacaggtcgagcaagcgatcgcctctcgcgggctcggggttcgatagcgctgtcaggctcctgtcggaacacttccgttggccgacagagaaaagcttggagtttggcctgctcggagttttttcagaaaaacacctatgaacttggcgtcgacttcacctcaaaaaaaaggcggggggcggacaataagtcgtgggtcaaggcgaccggaagaaatggcgacaccgtttatgaaattgacttgaaagcagctgctatcagcgtggtgccagcttctgaattaacaacaaaacgagagcggctagccaacaaaacgttcaagacggaacacttcaatcccaaggccgtgaatgaggctgcccttggcccgaaaaaccaggcgggcttatcgacgccgcccatc

SEQ ID NO: 506566 - DNA, 456 bp, Homo sapiens
agcggggtcccggcagcggctcggggcgggcggaggaggggccgagggcggggcggccgcagcctccgccattcccgggccggggggaccgcacagcgaggaactcgagcacgagcgcaccgcgacaccgcaacaaataaccacgaccaacaccgcacgcacaacaaatagcacaaaaaacaaccacatacacacaaaccaccacaaacaaccaccaaacaacaaaaaaccaacacccacacaaacgcacagaaagcggcacaaaacaacaacacagaagaagcaccgctaagagagcagagaaagaacgacaggagaaaaacaaaaagagagcggagaaacgcagaagcgtagacaaggaaaaaaaagcaaccgggaagcagaaagaaggaaggacaacgcgacacacgacacaaaccaaaaagaaaaggacacaaaggacacaacaaaaaaaaa

SEQ ID NO: 506567 - DNA, 403 bp, Homo sapiens
attggaaattatgagacactcttggcagggggactgggggctcaggagagtactacccaccagggggagcttctggggaccttggatgcgcactgtttcaggcagttgcctcggtttgggccgccgagggaacaggccttcgctgaatttttctacagtcagcttcctctttttagcaggctatcgtgccagcagctttttctaaaactagactttggcttgcgctcagaagcccgagtgggtggcaagcgccgaattcccaagtttggttcgagcgctttgaaggccagaggtgctgttccggggatgctggcaggcgcctctggccagggactagggacgtggccacctgaggtgtatactacttgacacctcaggtgtatactacttggggatccgttca

SEQ ID NO: 506568 - DNA, 166 bp, Homo sapiens
caacttctcattcttatttcacatataaagtaatatgcctcatatccccctcacacagtaagacaccttacaataaaaattatcttatttgttgttatatttaacttctcatatagcacattgtcttgtccaatgtagagactcagatttgtagaagcaagggaag

SEQ ID NO: 506569 - DNA, 204 bp, Homo sapiens
tccgcgactcttacctcatcctcatgctgttcactggacctcttaacaccagctcccatctcattctcaccctcacccttttggccagctggctaccattctcccacttgacacgacaaggaaaccaaggccctgcacgacagggcctgaccttctgtggcgccatgtgaccctggtaccagtacagggtctctgacttctgca

SEQ ID NO: 506570 - DNA, 218 bp, Homo sapiens
gaatttgcgtatttatgtgccaaggagaagaatcctcatacagtagctgaaaagttagtacagaccttgtgcacttgaatagcacaaattagttttggaccagatgcacaaaaaagcttcagcaggtaaccttatcagatgatgtgatccatctagaattgatgaatgagccaggatatctacagcagtcctggaggatcaagccagtcctttaaaga

SEQ ID NO: 506571 - DNA, 330 bp, Homo sapiens
cacgaggggaaatgttcgccgagatcaagatggacctcggcgatcgcggcgcgcagggcaaccacaccgacgtggtgacgctggacgcgacgctgctgggcatcgaaaccaccgacagccagcatgtggccagcgtgcgcttcagcggcatgatccgcgagaacgagggcgaggccgcccagccgttcgccgaggtgtggaacctggccaagccggccagcggcgccggcggctgggtgctggcggggatccagcaggaatcctgagttcgccgatgaactgctgattgagccaaagcgcgggtgcggcgtgatgtgcccggcgctggct

SEQ ID NO: 506572 - DNA, 207 bp, Homo sapiens
  misc_feature (36)..(36): n is a, c, g, or t
  misc_feature (49)..(49): n is a, c, g, or t
  misc_feature (79)..(79): n is a, c, g, or t
agccatatttgaaccaaaaacatatctataacaaantaatattgaaaanctaagcatgtataactgatgttgttagaantcaattttaggaggcttttttagtttgcttaaatggcaaggactagtgaactggtgctgtgtcattatttcctatatctgatacggtaacagtggttttaatcaaccataataagcattaaatctcta

SEQ ID NO: 506573 - DNA, 835 bp, Homo sapiens
  misc_feature (396)..(396): n is a, c, g, or t
  misc_feature (466)..(466): n is a, c, g, or t
  misc_feature (560)..(562): n is a, c, g, or t
gctcctgacaagtggggattgcgggcgcccgccaccacgccctggctaattttttgtttagtagaggtggagtttcaccatgttggccgggctggtcttgaacccctgacctcaggtgaccaccccctcccagcctcccaaagtgctgggattacaggcgtgagccaccacacccagcttacgcctggttaactcttaatgaccaaaatcaaagtatggatgaaaaagacgagaatctgggaagtcacattgctgaggtctgagagtcatgactccactgtcaccggggaggcccagcagagggcagcacctggatgatgagacccagttcaggaggcgcagcacagagcggtcaccatccttccccggttcaccgggaagcttgctccccctccntctgtattcctggcaaatgacaacgggcaaagcgaagcgtgggccaaggacggaggaggcggtgccgcgngtctgccgtggtcacaagccacagaagtttgcttcactcctgccagaaaccggcaggacagtagaattctcttttaaagcacgtgttgaccagnnngtgtataacatgagattacacccgttactgcaaacgacaaaatataacttgttaaaatgaagcttccaatgaaccagacgggataaacacagcaaaaacatcccgggggcagtctattgtgcgggggggcgaaacaagcgcgtatcaagcaggcgcgcggtgcacacaagggttccgcgaccgagtttttgtgtcacaggggggagaatccgcgggccccataaggagggacatacatgccaaggccggtgtacccgctttgactgcggaaag

SEQ ID NO: 506574 - DNA, 198 bp, Homo sapiens
cgaaaacaaaatcgaacataggtataaaaggtaaaatatatgatacaaggtacacagaaccgtgaggtatacacggaatacacacaatgcatgtaagtagttagcctaggcatagccctaaaggatgacggcctgatagtagagccatttctcaaaatacagtatatatggtatacccagtttaaccacctaatttca

SEQ ID NO: 506575 - DNA, 322 bp, Homo sapiens
cggcgacgctagagagatccccttcattcaggccaagtatcagtatctcagtggagtagatacattaaattaaccaccgcagcattatgatttatcgcatcaattcattcactcatgtatttatggaacctctgtcttgtatttcatctgctgaactaatataaagagctctcagataattatctagctgcgtggaacattacatccaaattcctctctttaagaatagttttggacatgggctgggaagaaagtcttagcatgttcaaaacagaattcttgatttccaccacccatcacctgccacatttgcctgaatgaa

SEQ ID NO: 506576 - DNA, 150 bp, Homo sapiens
cagtcatctagagatccctgtggagacggggtccaaaaactccgtggggcgataatccttccgcctcagcctcctgagtagctagaatgactttttctttttctcttttggagatggagtctggctctgtcacccagccgggagtgcagt

SEQ ID NO: 506577 - DNA, 769 bp, Homo sapiens
  misc_feature (97)..(97): n is a, c, g, or t
acccgccccgcccgcgcgtcggcccccacagtcgcctgggggtggcccggagagtcgaggtgctcatagtggagccctggctcccgggcggacgganccgcacggtagtagatgggggtgtggccgtggcccccgactctgctcggcggggccgttcctgctttgccatccgtgtgggacttccacgacagtggaggcacgagagctgggccccatatgctgcttgcccagcttgggaaagaggaggctgctgcaaaggaccgatcggcggcttcgggctgccggctcactcggctgctgcgtctggtctggcgtctgctgagaagatcctcttctaccctgctctgcacctgtgctcgactgccagccggctgagggcgggggtctccacggtggtcccagctcccaaggaggttgcagaagtaccgtacagagtggatttgcagggcagtggcatggagcccctcttccccgcgccgttctgggaggttatctacggcagccaccttcaggggcaacctgtccctcctgagccccaaccacagtctgctgcccccgcatctgctgctcaatgccagccacggcgccttcctgcccctcgggctcaaggtcaccatcgtggggctctacctggccgtgtgtgtcggagggctcctggggaactgccttgtcatgtacgtcatcctcaggcacaccaaaatgaagacagccaccaatatttaccatctttaacctggcctggcgacactctggtcctgctgacgctgcc

SEQ ID NO: 506578 - DNA, 727 bp, Homo sapiens
cgagcaggtggggcgggtcgtggcgggggcagggtcccctccggaggcgccctgggttagagtctgggcgtggacgcgcccctcataggggtcattggggcatagaggcatagagccggcttctccagcttgggattcacgtgtttttcaaagggctaacggaaatgctgagatctaaaagcatgtttattgctgccaaggcctgatgatgaaacttcaagtcaaattacttcgggctgccggctcactcggctgctgcgtctggtctggcgtctgctgagaagatcctcttctaccctgctctgcacctgtgctcgactgccagccggctgagggcgggggtctccacggtggtcccagctcccaaggaggttgcagaagtaccgtacagagtggatttgcagggcagtggcatggagcccctcttccccgcgccgttctgggaggttatctacggcagccaccttcaggggcaacctgtccctcctgagccccaaccacagtctgctgcccccgcatctgctgctcaatgccagccacggcgccttcctgcccctcgggctcaaggtcaccatcgtggggctctacctggccgtgtgtgtcggagggctcctggggaactgccttgtcatgtacgtcatcctcaggcacaccaaaatgaagacagccaccaatatttaccatctttaacctggcctggcgacactctggtcctgctgacgctgcc

SEQ ID NO: 506579 - DNA, 599 bp, Homo sapiens
aaacgcgaaatggaagtagtttgtatttatttttacttcggtccccaatccaaatattcgaagcggtgcacacgaataagaacattttacttaacacaagggttggcttactttgcccaagaaaataacatctgtcaagtaggaccttccttatcaaaacctgaacgccccttcgctctaaaaagtatccctactcccctatcctcaaccggactaactcatccacctcacttgcacttctctcctctcccttcccgcaccactgccaatgtctaccgccgcacttccgtctcgctaccacttcccccaccccccaatcacccccccttcatttcctccccctcctcactcgcgcacaaattttcccgttcaccatcctcaactattatcacggtcgcactcttcccactctcacccgtccggccaaccacccgccttcacaaatataaagcctcttcctactcccccactcttctttttctaacctctctttcccattgccccctcatcctcccactatttccacacacttccttgcaacttcactttcttctccctctccctctctctcccttcccctcttctacctactcctactc

SEQ ID NO: 506580 - DNA, 618 bp, Homo sapiens
  misc_feature (97)..(97): n is a, c, g, or t
acccgccccgcccgcgcgtcggcccccacagtcgcctgggggtggcccggagagtcgaggtgctcatagtggagccctggctcccgggcggacgganccgcacggtagtagatgggggtgtggccgtggcccccgactctgctcggcggggccgttcctgctttgccatccgtgtgggacttccacgacagtggaggcacgagagctgggccccatatgctgcttgcccagcttgggaaagaggaggctgctgcaaaggaccgatcggcgggtaccgtacagagtggatttgcagggcagtggcatggagcccctcttccccgcgccgttctgggaggttatctacggcagccaccttcaggggcaacctgtccctcctgagccccaaccacagtctgctgcccccgcatctgctgctcaatgccagccacggcgccttcctgcccctcgggctcaaggtcaccatcgtggggctctacctggccgtgtgtgtcggagggctcctggggaactgccttgtcatgtacgtcatcctcaggcacaccaaaatgaagacagccaccaatatttaccatctttaacctggcctggcgacactctggtcctgctgacgctgcc

SEQ ID NO: 506581 - DNA, 139 bp, Homo sapiens
tgcgaagagtgtgcggagcaatgatgtgggcttaggatgttcaaactgtcattttatttgtacgatgatagataccaggagtagcgcgactgaagagcagtagattaggcgtaggtagaaggagagcctaaagagcggg

SEQ ID NO: 506582 - DNA, 664 bp, Homo sapiens
cattgcatatgtgctaactctggagatcccaggatggtcgatagggatagtactaaccattttagatgcagccgcagaaccgtctttgctctctggaatggatacctgattgggcggaaaggaagcatgcattgtagcatagcaagatgccattgtgggagacaaaagtggctacttcccatgtgcagtccttgtgcagccccgacagtcctacagcgtcaagctgatcatgaacggcttagagctttccgaagatatgactgaccttctaacactcggatgggccggctcatctgcgaattggagaactatactattgtgagcaacatgaagacattgtcctacgataagcctgcgcagattaaccaagcgaacctggcgccgtagctttgatagagcatgtaggccgaatcggtccggcgctttggactcgtgcatgcttaagcctgcccagctaatccgagcgtactaggtcagagcaccttggaccgagtcgcatcacatgcgctgctcgccgtcaacagcccggtgtcttgaagatcccggatggtcctgaatagcctcaggtaaaccgcttgttgcaactcgcttaatccgattggcactgaccgatggcctgcccaaagggccctccaccatggccacgccttgcagcctttttggt

SEQ ID NO: 506583 - DNA, 330 bp, Homo sapiens
acaatggagcgcggaacaatcacttttgatgaacatttatttagtaattgttttgatctgaattatccctaatttctagtatggttactcatactataacatagtatactagtacttctatttgtataactacttaataaatttatgtacattttctaaaggacaatgtatctttttactatactagaatcttataacaattctttatagtacgatgttaatattatacaagccataattttctgcaaattcatcacttatttatcttttactacataaagtatttaaatatttatttagtcaaagataaataagtgattgttccccgct

SEQ ID NO: 506584 - DNA, 477 bp, Homo sapiens
  misc_feature (4)..(4): n is a, c, g, or t
  misc_feature (48)..(48): n is a, c, g, or t
  misc_feature (69)..(69): n is a, c, g, or t
  misc_feature (105)..(105): n is a, c, g, or t
  misc_feature (294)..(294): n is a, c, g, or t
  misc_feature (345)..(345): n is a, c, g, or t
tgcnggaatttccgcgcgaggtgctctcttggaaaaaagtccgacaantgtaagaaccagatggggtantgtaatccagagagggtggaaattcctaagaaagantccaaaaagaaatgctagagctgaaaaacacggtaacagaaatgaagaatgcctttgatgggctcattagcaacctaggacacagctgaggaaggaatctctgcgcttgagaatatgtcactagaaacttccaaaactgagaagcaaagaggaaaaaagaccgaggagtgtgggggaaagagcagaatntccaagaactgcgggacatctacaaaacctataacatgcacagtgagagtnccagaaagagaagaaaaagacaaaggaacacaaaccatgtttaaagtaataatgacttagaatttccccgaattaatgtcagacacagatccaggaagctcagagaacacaagtaggttacatgcaaaaaaa

SEQ ID NO: 506585 - DNA, 527 bp, Homo sapiens
gaagaggggtcatcctggaggctcttagcgatgcaccataactcgccaggtggcagcgtgtttgagtgtgccggcctttcggagtcagtgacgtttctgtactctcttccgtcagaaccctgaggtctgtcttgtgctcagagtgggtcttttgctcatggacatgatttggtaacacacacgggggttgtttggaaatattgttacatggagttgtttttttttctaaatgttaacacattccattatgtaaacttgaagaaaatcctattttttaatgtcatcactgatctcatcagaagaaaaagtgagaaactgtcaaattagcagtagtagagaaaagttttccaaaattctaattttctcttgaaagcttggattttatcattggtaacaaatactgtcagttactttctgtgaagtgagggacgcagtgtgttcattttcaagtcaatttctgccagataccaaattcttaataaccaaagttggtcagttgttctttcaaataaaaatggcattccatg

SEQ ID NO: 506586 - DNA, 163 bp, Homo sapiens
aatctcaggcaaaaacagctttccgacattctttgaggacatggtggtggcaccaagcaggcacgtccgggtggcatcaagggtgttggcaggcaggctcctctgacttggtttccaccacacccatcagtcaattctaggcaggatggttcggcttttccaa

SEQ ID NO: 506587 - DNA, 281 bp, Homo sapiens
aagttttctataaactccatccaggtgatgcggatcacttgagtgccaggagttcaatgactagcctggtcaacatgctgaaaccccgtctctactaaacacacacacacacacacacacacacacacacacacacacacaatagggaaggaaacttgatttgggaagggcggtctaacataaagctttgggtgaaggatttatgtgtgtgtgtatatagccatatactctatctgtgtgtgtcattacaagctatcaccattgtcgtgaggggcatcgca

SEQ ID NO: 506588 - DNA, 124 bp, Homo sapiens
tctagaggatccgctagtttagagtatgggcagtactattgaccagctgatggggctcgacatgggcttagggagtcataagtggagtcgtaaagaggtatctttactataaaaagctattgtg

SEQ ID NO: 506589 - DNA, 202 bp, Homo sapiens
tctaatgtttgctggcaaaacaaagggacagaagagcaggatattcaaaaggcagaaccaaatcttccactgccgtcatgatgaacattaaatgttctatttcagagcagagcaggggatacatggatgcttcctggagtggagggggaaggggacaagggagtcacctggtacactttattaacctgagcacaaacatcag

SEQ ID NO: 506590 - DNA, 155 bp, Homo sapiens
cacgcttgatgcttatgagagcggcaagctggtgaattcggcggtttcgaccaccggtaaactggccgatttatctgcgcaatcggccccgatttatgtcggcggaggttttgccggaggtgaggtcggcgcatgctatggcaccttgcgcgagg

SEQ ID NO: 506591 - DNA, 587 bp, Homo sapiens
  misc_feature (16)..(16): n is a, c, g, or t
  misc_feature (496)..(496): n is a, c, g, or t
tatagaggatcccgtnacggtaccaacacgtagtagtaagagacttgtggtgtctgctgctctgaattcagttccgaggctgtgagttgaactctgtacaaatgtctggatgatctggggaatattggttgggtgtgtgtaaattcgtccacaaagaaggagtggtctctggcggggtgagtggaatgacttctagctcctcttgggcagcccaggcaacgcctatcgcataggtgatcactcccttcagatgggcagccatggctgggatccggacgtcgtcgtaggacctcccgtcggtgatgaggatcattaacttcctcttgttgggcttggacttcttgaagagctgctccagggcgaagttgatggcagcccccgtgctggtgccaccactccagtagcccaccctcttgatggcgttgaggatgtcaggcttgctgctgtacttgtcgaacccaaactccagccgctgttcgtaggtgtactgcacggncccgatgcgcgtgtccgtgtcggaaatctcaaactctttggtgaggttggcacaaactggaggacggtgcggaagttgcccgtccccacac

SEQ ID NO: 506592 - DNA, 160 bp, Homo sapiens
gcaatacggggaaatcgtcgagtagactgacgagaaattggtatctgtagctttaaggtgccacatatccatattaaatgcattcttatctgaaattaaatctaacttatagcaggagtaagtctttactgcttacagtagagaagtacttgagatctgt

SEQ ID NO: 506593 - DNA, 100 bp, Homo sapiens
cgcatcagagcttcacagtggccagagtacccctacaaatagagccagtgctgagcaatcagacgtattcagatgcatttagccactttagatgctatgc

SEQ ID NO: 506594 - DNA, 449 bp, Homo sapiens
gatccccagatgcacttcgtagacttaaccttttaaagacattaccatttgttgcgcctggcacagttgtgctcatgcctatcatcccatactactttggtaggctgcggttgcggatgagcagagatcgtgccattgcactccagcctgggcaacaagaacaaaactccatttctgaaataaaaaaatcatatagaatagttcaaatgttatgctggcttattaacaatgcttagtacgtatgtactcagcgtaagacagatttctttcaaccatactcattttacctatcgggcactagatttaagatctctacaaatattgaaactttttaacatctttaatagcaacagatatttgaagctctcatgattaattatctcttatcaatgatccatggtaaggtcagtaatatttgaaatgctaaccagttcccacttttttcaaaa

SEQ ID NO: 506595 - DNA, 880 bp, Homo sapiens
  misc_feature (880)..(880): n is a, c, g, or t
tcaatataatctatgtcataatttagttttcaccaatatttatcattcattgatgccctccgtctggatagattaagagactggagtggtgtttggtgccagcctattcctgctgctttcattgacagtcttcatcattgtgagcgtaacagcctacattgcctaggccctgctctctgtagaccatcatctttaggatatacaagggtagtgatccaatgctatccaaatattaaatgaatgccacctatttagggcaatatctggaatctagagttgtcttatctaaggagttggttaacaatacctacaatatattcttttttttcatgtaaacttgtattatttaggatctgttgctcttattctaagatggtgaaatagaaaattttctaaaggagcaaatatttcattattatttgtacttattactaatacaggcgtaactagcatatgggtcatacacaataaaaattcattgtaaagtaattccaatgcgtgttttaaacggttatttttatgtgtgttggtaaactaatatcatatgagttatatactaactaaatttatcgagtaacaggctatttaattcatatttttattctattgaatctatttttttatctgactgtgatttctaccgtatttcttcttgtatttgcgttcgtttttactataataatcactcctgtattaatttctatagtacttaaaaacttctatgttcacccgtccttacggttgttctctcctatttcacattaataatttattctctatcacatactctttatatatacgatttttcttttaatataacatatcatctatttcaatatatttattctaacgtctatctgagactcataagtaatatcan

SEQ ID NO: 506596 - DNA, 898 bp, Homo sapiens
gaggatccagacccgggagaaggaccagagctggaggagctgggtgtggggtgcgttagggctaggatggggaggcctagatttgggtgcaagtacggtctgacttgacgcttgtgttgtgctgaacgggacagccctgggtctaggggagagagtccctgagatgtgagacccgaacttaccccggtcccagccaccatcccaagatccccacagggcacggccaaatacacaggtacaccgacagcaaccatggactgcaagaacaaccgaagagtacgaatacgaacagtgacaggcctagagcagacgacactgggcgccaacagcactggcggaaccaggccccaaaacacaccaccagcgagcacatggacccaatggacaacgtggtggacctcacaggagcagcgaaccgtcccacagcaaacgacaacccgaatagaaaaaaaaccacaaagggcaggaaccccgaacgaacagatgcaccagacaagacaggatgaccgcaaaagaagagggcacgacgaacccaaaaaacacgagacaagaaaataggcacaaacagcaaaagcgtagacaccaaccaggagagcacgcgaacgaccaaggaacacggaaaggacacaaaagcccgaggagaacaccgcagacgcaagagatggaccccatacaccaagggagaacgcagaacaaaagccaaggaccaagaatccagaaccacggacgcaaaaaaagaccacacgcaaggccggcggacccgagcacaaaaaaacgagacacaccaaacatacccggaaactaacaacacatcccagaacgtaacacaccgcagaaaaaacacacacagaggacccaagcagccggcaccaacaaacggccaccaccccagacacaa

SEQ ID NO: 506597 - DNA, 936 bp, Homo sapiens
  misc_feature (45)..(45): n is a, c, g, or t
  misc_feature (76)..(76): n is a, c, g, or t
  misc_feature (85)..(85): n is a, c, g, or t
  misc_feature (89)..(89): n is a, c, g, or t
  misc_feature (105)..(105): n is a, c, g, or t
  misc_feature (110)..(110): n is a, c, g, or t
  misc_feature (126)..(126): n is a, c, g, or t
  misc_feature (185)..(185): n is a, c, g, or t
  misc_feature (196)..(196): n is a, c, g, or t
  misc_feature (200)..(200): n is a, c, g, or t
  misc_feature (214)..(214): n is a, c, g, or t
  misc_feature (234)..(236): n is a, c, g, or t
  misc_feature (239)..(239): n is a, c, g, or t
  misc_feature (243)..(243): n is a, c, g, or t
  misc_feature (246)..(247): n is a, c, g, or t
  misc_feature (249)..(249): n is a, c, g, or t
  misc_feature (252)..(252): n is a, c, g, or t
  misc_feature (260)..(262): n is a, c, g, or t
  misc_feature (323)..(323): n is a, c, g, or t
  misc_feature (331)..(331): n is a, c, g, or t
  misc_feature (430)..(430): n is a, c, g, or t
  misc_feature (444)..(444): n is a, c, g, or t
  misc_feature (447)..(447): n is a, c, g, or t
  misc_feature (451)..(451): n is a, c, g, or t
  misc_feature (466)..(466): n is a, c, g, or t
  misc_feature (485)..(485): n is a, c, g, or t
  misc_feature (511)..(512): n is a, c, g, or t
  misc_feature (521)..(521): n is a, c, g, or t
  misc_feature (524)..(524): n is a, c, g, or t
  misc_feature (671)..(671): n is a, c, g, or t
  misc_feature (824)..(824): n is a, c, g, or t
  misc_feature (826)..(826): n is a, c, g, or t
  misc_feature (831)..(831): n is a, c, g, or t
  misc_feature (864)..(865): n is a, c, g, or t
  misc_feature (894)..(894): n is a, c, g, or t
ctactcttctggctacacactttatcagctttagaactgaaagtncctccactcatgggtcacaatcacaatttcnagggttaanaacnatctattcttaaatgntacantgttttagagcatcangtcactgcagttattcagttctgggagactgtcgatttattttagcatttacatatganatttatttaanaganacacaaagcaagcnaacaggtaaagatgcttatnnnggntgtnganntngtnaggttttnnnttgttttttaagataataaccaaaataaccaaaaattattatgatccggtacaggaaaaanaggaagantcaagtgaatactagagctgcaagtgtttcttagaattgaaacaaaaattgtttttttccaacttgttcaaattttgtctaagtgcaggtgagaaaaanagtaaatatattangtnaacnaattatttttttaanagtgcaatttatgtttaanataacaaataaacaacaacaacaaannacgcaaaangcnaaccagatccccaaaggcaaaatgtgtagagagacaagggtggtgatggaatgacctactttgtgatgtttttacgctttacaaaaagcagatttggtattcagaaaagcctgcaaatacaacattgcttaagagaacctgtaaacncgtttggaatacaatgcaacacaagtcagcaaggacaggggtaggtccaaaggagccagctagggggaaaggtgacagaaaaggagagggaaggatggagacagacatcgcctgtggtctctaagggggccatgtgtttaatttataaggttncnccccncaggagttctgatgtgatctatcgttcataaannacatttctcctcttgcaaagtagaatagnctttaagtttcccaatgactttttgagtttatagggctcttt

SEQ ID NO: 506598 - DNA, 908 bp, Homo sapiens
ggaagaagcccaaaaactctgggagcaatataaggaagaacgcaaaagaggctctgccagcagaaaagaaacagaacactggctcaaagaaagagcaataaaaataagagtggaagaaccagtttcatcagaggtggtggccatagaggaggtgaaggattcaatatgcgtggtgaaattacagaggaggagcccctgaaaatcgtggggatatacataggaggggcaaaaatgcaacagagaggtggtggaggatggaggaagtggtggcatcggatatacgatagccctcgtgacccatgatattccgtggccgtggtaagttaactcaagcagaggggaatagaaaagaggtggaaatgcccgaacagacggggaacgtaccaacgcaggaaccctctcagcaggcacaggaggaacccaaatcgtgtgctacaaatacactccaatcttcagggctacacacacagacgccagcgacgcggtccaaaaccttggcgcgtcagacagcccatgggcgtcacgggattaatcaccgaaggactctatcgacataccccaaataaaacagaaaaagtataccatattgctccacagacccttcacaaagaagttgccggtttgctatgacgtagcgctcacctaataaaaaatgccagaagaggaagtgccggcgggtacctatacagaacagcatggggggatgaaacgcggccataacacccgaccacgcaactagcagggtacacagcgaaccggaagaaaacccagcagtgcacgaaacggaaggggccagaatcagggccacaacccccgcacatcacacagagcacacccacccagaacctggctccacgagcaacaacgaacgccccccacacaaacggggagaggacaaaaacataact

SEQ ID NO: 506599 - DNA, 259 bp, Homo sapiens
atacctcaagggttctcttgtttatcgaggtttttgggcttgtggtttcggcagccagttctggtgactcagtccccagctatagttccagtaagaactaaaaaacgtttcacacctcctatttatcaccctaaatttaaacagaaagggggtttatgcacatcccgaaagcaggattggttatcccccagaaaatcggaccgtccatacatctgcctgtacagctggtatattgatgcctatgtccccctagggttat

SEQ ID NO: 506600 - DNA, 466 bp, Homo sapiens
tgacatagaagccatgagagaaataaacattgtaatgacatatatcgttgaactaggtgtgatgttagctgttgatgctgtaattgctgaactttacaaggccagtcttatacctgtgaccaccccttgtaagaaatggcacaggtaaggacttaacatgttacacgttttttaaaaaaaatttaattggcatgtgtgatttctgttttacccttggatcgacagccaagtgtcagaattaacagatactagcccaatcatcaagtcttagaatcatgtgtatcttactgctaaaacctttgaaaggaattatgaccataatggttggtcattgagttctacatgtggtcgtcatgtcagttctacatggcctgctaaacactggattcataatgattcgtgaacactgtccttagccatggctcaaagggtgcctaaagtttccgtcaatccggtatgagagtca

SEQ ID NO: 506601 - DNA, 184 bp, Homo sapiens
  misc_feature (28)..(28): n is a, c, g, or t
agcatcagtagtagtgtgtgctcatcgngcagctgacgctcagccatcactctccgacattgctgaggttgcaccccacggcggctcgatgtgaacgccagattgccgatctctcaccactgatcagagcgcgctccatcaccaggccgggctgcttctcctcgccatcactctggatggctca

SEQ ID NO: 506602 - DNA, 451 bp, Homo sapiens
gagaagtttattctctctgatgagcaaagaaggtggtttcttgaaatggaatctactctgggtgaagatggtgtgaacattgttgaaatgacaacagaagatagagaatgttacataaacttagttgagaaagaggcgtcagtatttgagaggagtgactccaattttgaatgctgttctacttaggtaaaatgctatcaaacagcatcgcatgctacagataaatcttttgtgaaaggaagagtcaatcaatgtggcaagatttgttgttgtcctattttacgaaattggcacagccacgccagcctttggcaaccaccattctgatcagtcagcagccattgacatcaaggcaagatgccctccatcagcaaagaaattatgactcactgaaagctcaggtgattttagcatgtatttggtaataaattattttttgattaaaaaaaaa

SEQ ID NO: 506603 - DNA, 124 bp, Homo sapiens
gtggcgaacacgtagtggccggacacgtataggagtacctgagatgtagcagaaatggacacgtggacatgtttggagcagaaggtgtcctgcctggagagaggtaggtgtgtgtgtgtgtgtg

SEQ ID NO: 506604 - DNA, 175 bp, Homo sapiens
actcccagtgcggagtcttagactatcgtgtgttcagattttttaaagtcactttcgtagctcaatatattgtgtcaactggagtttttacaactcaggtgagttttagctttattggggagggggtgatctaaaacaccctttacgccggcttctattgacttggcttatcgag

SEQ ID NO: 506605 - DNA, 528 bp, Homo sapiens
tagatggttgcttcatctatgtggcgggcgcggattgcgtctggcgcgctttaatacccaggtggggactgccgacaagcactacttcattggcctggccagtccggctgcggcgggtgtggtagccggtatagtctgggcattcagcgactacggtatccagggttccaagatgtcgttcctggtggccttgatggttgcggcggccggcatgctgatggtcagcaatatcaagtacaacagcttcaaggagctggatctcaaagggcgtgtgccgtttgtggctatcctggcagtggtgctggtgtttgccgtggtcttcagtgatccgccgcgaatcctgctgctggctttccttgtgtatgccgcgtccggcccggtgcagtaccttctgcatcttcgtcagcgcaaaacgttgccttaatgtaatttcccccatactccgcagtctatgggtgcatctgtcctccaaagctgcggagttgccatgttactcaagtttcccaaagcgtcagattgccaagaatc

SEQ ID NO: 506606 - DNA, 209 bp, Homo sapiens
tgatcttgaggttccgtcagtatttccatgcaggctgagctcctgtcggcgtggaggtcggacacgtggcggaatggtctgcagcaccagacaccattgccaccagtgcctcaggaccgaggttgcctgtgaccagcaccttgtataggtcccggtagggctggcctgtggcttccctgggcacgtcttcgcccagtgcgcaatggtgg

SEQ ID NO: 506607 - DNA, 583 bp, Homo sapiens
agcggtgggggagcctggtgccccatcgggtaccgcacggctgccgcggctggcttaccctgccgcgagcgcctgtgacagcggcgccgctgatgctcgtctgacccggctccgggcctctgccgacctcaggggcaggaaagagtcgcccggcgggatgggcggtgaggctgggtgcgcggcggccgtgggtgccgagggccgcgtgaagagcctgggtctggtgttcgaggacgagcgcaagggctgctattccagcggcgagacagtggccgggcacgtgcgtgctggaggcgtcctgagccggtggccctgatgcgcgctgcgacactgtgaggcccaggggctgcgccaactgcgcctggggcccagagcacctgaccccgaagcctctggccagccgccgatgagcctgggctgtcatatctcggaaggtggacgtacctgaacgtgcgcctcagccatgcgggagcccccgagcggtgaaggcatcattttattacatgcctggaagaacatgaatttccatttcgctttcaacttccatcatgaacctatggtcaccatcgtctactgggaaata

SEQ ID NO: 506608 - DNA, 948 bp, Homo sapiens
gacagcctccaggcaggcagccacattatggggcactgtacccacctgggtccagtggacatgggcaacagccttaccaccgcccaataaatgacttcagcttggggaatcttgctctttgatgactcctgccttgacccgttctcttcctggcatgcacatgctctggcccagcagctggagcaattcaacatggagagcccatcaaccagcctggtgctggatccccctgccttttctgaaggtcctggatttttagggagtgagggatcaatgagtggcccccaggaccctcacgtcctcaaccaccagaacttgacccactgttcccgccatggctcaggacctaatatcatactcacaggagactcttccccaggtttctctaaggagattgcagcagccctggctggagtgcctggctttgaggtgtcagcatctgggttggagctgggcctggggctagaagatgagctgcgcatggagccactgggcctggaaggactaactatgctgagtgacccctgtgccctgctgcctgaccctgctgtggaggactcattccgtagtgatcggctacagtgaggggacctcactgcatccttcttcatggcctgtcccatcagtcttcatccctttcccctggcagtagagactactctctgcccccagatcctttttcttatatgaatgaaggatctaaactgaggaaggaaggggttggcaggggccctgaatgtgtatgtctgtgggctgggcgatccagggggctaaagcttgtactttgaaccgctgctggggcgaccctgtggacagcgtcaggaacttggcagggccaagggggacacacctattttcctggtgagaacgcgggttctaaattttttcacctagaagggggttcgcggcgccctagggagatatgggaatcctcacacctcggtataa

SEQ ID NO: 506609 - DNA, 271 bp, Homo sapiens
tgattggcatgtgactgtcctgtatgaccagatgaggaaattgaggctcaacgagggcctcaggtcacacagcaatggtgcgaaggcagctagtcccgagagcttgtggttggtttgcttctctcttgcctgggctacatgtgagtgacgcagtgggcagcccccgccctatcttcctgggtggcactggtgttggctctggtgggatgctcttgattcctgtgtaatttcctggagcagccctgcaccatgctagctcaaaatgcctttt

SEQ ID NO: 506610 - DNA, 387 bp, Homo sapiens
  misc_feature (12)..(12): n is a, c, g, or t
  misc_feature (32)..(32): n is a, c, g, or t
  misc_feature (82)..(82): n is a, c, g, or t
cccgacttttcnaaaaatttgattaaatggtnttatagtataatattgggaccccccataccgttagccccttgtatgtatncccaacactgcccaaagtaaaacattaggtcaggcatggtgcctcaggccctgtaatccccagcattttgggaggctgaggcaagtggataacttgaggtcatgagttcgaaaccagccctggccaaaacagtgaaaccccgtctctactaaaaatacaaaattagccagatgtggtggcgcacacctgtaatcccagctactcaggaagctgaggcaggaaaatcgcttgaacctgggaggtggaagttgcagtgagccgagatcgcaccactgcactccagcctgggtgacaagagcgaaact

SEQ ID NO: 506611 - DNA, 219 bp, Homo sapiens
cagaggtgatatagggctagctatcagtcatcagtggatacgtactgtcacacagatcagattttcatgcattgtgtgcggctgctgctagatgataaaggaagttatctgtagctggtggaaatcgctttggcttaagcgcctccaaattaaggactctcttttctccatcagccgaaacttctgaaaatggtgctaggtcggtaaagatttctcttg

SEQ ID NO: 506612 - DNA, 308 bp, Homo sapiens
cgggtgcctgtaatcccagctactccagaggctgaggcagagaatcgcttgaaaaggggaggcggaggttgcagtgagccgagatcgcgcccctgcactccagcttggtctccgtctcaaaaaataaaaaataaaagtaaagtcatcaattctgttttcccctgtccttgccgagaagcaaaatgacatgaaaaggatagagaattgtgtctccgaagctgagtcttacccctttaccagagaaaagacacaactttgggaggccaaggcgggcggatggccaacatgatgaaaccttgtctctacca

SEQ ID NO: 506613 - DNA, 286 bp, Homo sapiens
ggggcagtatctctcacccagtctggagtgcaacagcgtggtctccgctcactgcaacctccacctcccagattcaaatgattcttgtgcctcagcctcctgagtagctgggactacaggcatgtgacactatgcctggctaatttttttgctatttttaagtagagacggggttttgccatgttggcccgaggcaggtggatcacttgaggccagaattcgagaccagcctggccaatgtggtgaaaccctgtatcactcttttaggcccttctgtcgtcttctc

SEQ ID NO: 506614 - DNA, 221 bp, Homo sapiens
  misc_feature (217)..(217): n is a, c, g, or t
cgagctcggtaccaccacgccacctgagaaggtccggaccgcgacgagttcggccgagatcaacgaatcctgatcgtcgagttgtactcgcgctgatcctgagggctggcccacgcaccgcggatggcgcggcgcgtgggcgtctgcctttcccggtcctggcgcgggaggatatcgccgggtggtccatcagccttatcggccttctccggtggcntggt

SEQ ID NO: 506615 - DNA, 242 bp, Homo sapiens
acctcgggaccggcacgaggcaagatccacctgaacacaggagagggagggtgaagcgggccgaaatcactccactgtactccagcctgggtgacagagagagactctgtcccaaaaaaaaaaaaaaaaaaaaattctaattctaaatttccaattaaaaagctggaaagggcaaaaaagcctaagaaaccaggtaactaatctaatttgggggggccaagtggaacacagtgagaatatcc

SEQ ID NO: 506616 - DNA, 228 bp, Homo sapiens
tgtttttgtttacctgtggcctgggccatgtcagtatcagctgaccttgcaggtcaacgaagagactagttgccatgggcatgaagcatgccaatgtgatcaatccctagtaaaaccctggacacctagcatgggtgagctactctggttggtaatactctgtgcacacatcattgtaccacacatcattgctggggaattaagcattatcctgagactctgccagga

SEQ ID NO: 506617 - DNA, 209 bp, Homo sapiens
accacaccagtttgctgcttcaagtttggtcatcttcccgccttttgttcaccttcaaggaaagaagggaagtctagagagcagtttctcccccaccccgtcaacctccactctccccatctcgtttcgtgaatcaaggtgcctaaatgaaaacataacgatcctcacatatcgtattttgtcggtctctagctctgtattgagtccat

SEQ ID NO: 506618 - DNA, 586 bp, Homo sapiens
gagtcagaggaccccgaactgtcgaggctatcaatcctttcattgctgaatttgatttgctagtcattttgttgaggatctttgcatcaatatccatcggagatcatggtctgaagttttctttttttgtggtgtccttgtctggcttggaatcagggtaaagctggcctcatggaatgagcttggaaatcgtcccctcctcttcatttttttggaagagtctcaggaggattggcgataattcttctttaaatgtttggtagcattctccgatgaagccatctggtcctgggctttactgtgtagggaggtttttgattactgatccaatctctctcattattggtctgatcagactttccatttcttcatgattcaatcttggtaggttgtgtgtctcctctagaaattggccatttcttctaggttattaaatttgtcaggcatacaattcttcataatattctcttataatcctttttatctctgtcgtataggtagtaatgtcccctctttcatttctgattgtagttattgaatgttctttttttttcttaatctagctaaggatttggcagtttggttt

SEQ ID NO: 506619 - DNA, 637 bp, Homo sapiens
ggacggcggggatggccggggtggccacagctgtgcgcgggggccgtggacacaggcggagctccggtcggtggagctcccccagcgcacgcgccagagtccgggtcagagacgccgcgtctgcggccaggggtcacgaatgcggcgcacatattcagccctcagcgtgctctttcccgagccgccgcgttgcgaggcggaaatcgccgcagtgggtcccgtggtcatccagatgccagagcgcaccgaccaagagggtggttgggaatggatctcacagtgagtggacaggtatcctggtcgtccgctgggaaatgctgaagactgtcgctctgctccgaatttccgtctatctaacactttcttgacctagctttccctgtgtggtgcggaccatgcagtgctttgggccccccgtttcccgctaagcctggacctgggcaaatggagcgaggtcccacttatgcgtctccttgtaatggcacggtgcgttcatccttcctctagggcaggaattccgcacagtgtgtctagtgttcctgggagtggccgtccatgttttatctggttcttgaaatgttgtgttactacagaaaataaaactgcgctactaggaataaaaaagaaatgaaagaaa

SEQ ID NO: 506620 - DNA, 171 bp, Homo sapiens
  misc_feature (84)..(84): n is a, c, g, or t
agcttccgggagctcctctcgcgtcaccctgcgggcctgcccgctgtgaccggccgtcgttttgccgccgtcgtgcctgggctnaccaaggccaggcggctaagggatttagagggccagggggccgttcgattccccccggagggttccaagatcgggcggggtttagcg

SEQ ID NO: 506621 - DNA, 1460 bp, Homo sapiens
taccaacgggtcaaaaaaaaccttaataacttttaatgatggccccttatgctttctggccaaatgccttgggaccaggtgcttccggggcggaacgcttttgggacccttctggagctttggggagcaggcgctggatttcctgggccgggggattttctggggcagaaaccttctggggtctgggacgcctttaaactccgcgggggtagatcttattatggtctgagaacttatagcagcatgcagcagcacgccagcagcgagcagagcaagagagaagcaagccgagagagaataccctttagatcccgaggtgtgcctttgttggggaagaaagccttactcaggagaagcgtgccttttgtgaaagctttcataaactctcataccgtagaataaatacctgtaccctcaataatttctatggcccttacgaataaatttacaaagaagcagactcaaaacattctgggtgtacactcatggggactatcacacctatcatatcacgggacatatacaaactcctgtgcgtgggcgccccaaattcgtgtggtgtgactgtggccccaaatgttgtagcaaatgaggaagtgttaaccgtggaccatcaccttgcaccaaagcgacatagctcggaacaacaattaactatcagtgggcagagagcaccactcgaggcgccggagacaaacaccctgtgccagagagacgtacaaacacctcgcaggggacaccgccgtgacccagtggcaccacgttggggaaacaaagggaccaagagggactccggggtatcaccaccacttcacacactgatgaagactgaacaacggggtccccatactcagcaaccacaagagaagccccccccggaggatgatcagggaaccacaaagaaaagccactaactaaacaagaagtcggggcggcaacccacaaagtgttgatccccgcgggagcatacgtagaagggggtcccacacagcgggagacaggcaacccatatgacggaggacaccacaccccgcgagggagaaacaaccgcactgtacccacaacggagaaaagggccggcccgatgagacaaccaacccactagatgggtgatggcggaccaccaaagcgacaggtggtcgtcccccaacaaaacgcaggagtttaggactacccgaacagaaatacccagcgaatccgaacacctgtagagaggggcgacaaacttgttaccacaaaaatggtcacgggaggaagcccccgtagaagatgttacccgcggcaaaaacatgaacagggcaagcgacagagagtaggtcacacaacagcagatactccgctaaggacgaagaaacgacaaacccccaacattatggtgggtggctgccacccacaacgtcgttggagcatcatcacggaagatgtggagaccaacgagactacgtctataactaacagag

SEQ ID NO: 506622 - DNA, 1130 bp, Homo sapiens
tatattctgtattttattactgaaatatgttgtcctactcatcccaccccacaataaaaatctgacccaggccccccatttctttccctcatccccttttccacacacaccatcccggaacaaggtgctccagggattcccgtgtcgccacgtggccatttgtggaggtgtgtccatgtgggttagcaagtggtggaaaccaccgagggcctttggtgggaagaaaatgggaggggggttagaggggatgtcccaggaggggcttattatggaggggccttggcgcacttggcgccataaggcagagctcagatgctcctcatcatctgggacacggtgggaacgcagaattcttacccgggctgtaggcattggcgccaagtaccgatagcactatcccggaaggcgctcggggatggtggaatccccggtactatcttgacaacaccacctgggactatggtggtaacttgggcaacaggttgcagtcacgccagggtgacgctcgtggccatccaaaaacttcctctgagagacaccttcatcttcagcacgggtttcatccacttcttctgggagggggggatgtcaccgtcaatgtgctcacaaccttcaggggcttccacggagtccctctctccagatggtcactcgaatgccaggatatggaactccagagtacgcgaacaccttggcgccatttgttcacgcccaactctcttggacacacgggtcacaacagcgtcacacacgagggaacccccgcagagagggccaccaggccccccacaaaaacaactcccacatcgcgaggcgcgttccgcggacaccaccggcggcacaacacacgagaggaaacaaccccacgggggaaaccacatacgcgcagagccccccacctagtgagacaggggggccaccccaagcgcgaccgaccgtgcgcagacaacaacacaccatccatgctgaagcgagcacacagtcatgacgcacgccgaacaaacaatacaatgcgggctgtcaacagggcgacaaacgacagaacgagacgacaacacaggtaagacaaacaactccagatcaataggcaactataattatatcttttttatctgacgtgcaccgcgcgg

SEQ ID NO: 506623 - DNA, 295 bp, Homo sapiens
  misc_feature (116)..(116): n is a, c, g, or t
  misc_feature (127)..(127): n is a, c, g, or t
  misc_feature (131)..(131): n is a, c, g, or t
  misc_feature (279)..(279): n is a, c, g, or t
cactgggaggcccgccagtgcagctccaccttctggcgggcttggggcagtcctgaagcattttgagggcgaatttctcctgggtcctcttgttgaagatctccaaaacttttccntttatccccancccnaaaacatagctgaaaaccccgaccccctctttcatggcgttcttcttgatctgcaggccggacttgacgtggaactgcggggactggtgcgggggcggcggcggcgtgcgccggggggtgcggcagggcaggggtgggggggtgcggncgcggggccggggggg

SEQ ID NO: 506624 - DNA, 284 bp, Homo sapiens
acctctccctactgtatctaccacgtagcctctatacacaggcatcagaatcgtacggtctctctcttcctaagggagcgagagctcaccattagagatgctactatccaagcctgaatgagacatgacagataataagcggaaaagttggtgaggcacagaggtacacagctgtagtcgcagtactgcgggaggcagaggcgggcagatcacggtgcaggtcaggagttcaagagcaggcaggctaatagtgaacatcctgtctctcaggatacagtagggag

SEQ ID NO: 506625 - DNA, 489 bp, Homo sapiens
ccctcccatgaagccctacggacggcgcaatgggatttggcttttgaagacctgggtgaccccctgacccaagaacttactggaagtgtgcctctgtgtctccttcctcgggggtaagggggggacagtgcttcccaagttccagctgcaagtccaacttaaccaactttccttcaaagtcagttacttccaattttttgaaaaaagcattttccctatactaagtctcttttctcacggttggaaattataccgcccaggtttgccgcctccttttcattgatgtagaaaattttgcggttggcccgaaaaatcctggccgcttttttccaggcatttgggtccctaaaaactggttttctaaaattattgggtttgtattttgttattaagggggaaaatgtgatttgtgcctgatctttcatctgtggtttttataagggctttgttttccgaaaaactaaaaataaaaggccttggctttaacca

SEQ ID NO: 506626 - DNA, 149 bp, Homo sapiens
tataggatcacgtgactctgaactgagcgtcctaccagaatcagcccaccatccttcaacgacaatgaagagaggttctgtacattggaaaacaccttacggagaactcccgcggtactacaagaacatcggtctgggcttcaagacac

SEQ ID NO: 506627 - DNA, 483 bp, Homo sapiens
  misc_feature (482)..(482): n is a, c, g, or t
tctagagcataccgacggcgggtgtactcctgttggagactctccctttcctttaatcacccagcctgtttcacctgaatggactctcccttagctaagagagccagacggagtccatctgggctttttcactgggcagcccgttcctcgaggacttaactggtgcaagctgactcccagcacatccaagaatgcaattaactgataagatactgtggcgagcaatatccgcaattctcaggaattcgtctgatggataatgcccagagccccaagtctatcacctggtaatggtcttaaagcccctgcacctggaactgtttactttcctgtaaccatttatccttttaacttctggcctactttatttctgtaaaatggttttaactagaccccccctcccttttctaaaccaaagtataaaagaaaatctagccccttcttcgggccgagagaatttggagtgttagctgtctctgggnc

SEQ ID NO: 506628 - DNA, 594 bp, Homo sapiens
atatccctccagcctggtgacagagtgagacccagtctcaaaaaaaagaaagaaagaaaaaaaagaaaagcaacccataaaaaggttggaaaaagaaaacagagaaacaaaaagcaaagaatagaaagcaaaaactaaaatggcagaaagcagaattaagccctaacatataaataactgcattaaatgtgaatgacctaaatacaccaattgaaaaacaaagattggcacagtggattaaaaaacaggatccaggctggctgtggtggatcatgcctgcaatcccagcactttgggaggccaaggcgggtgtatcaccgaggtcaggagtatgaaaccagcctggccaacatggtgaaatcctgtctctactaaaaatacaaaaattagccgggcatgctggcacgcacctgtaatctcagctactcgggaggctgaggcaaggagaattacttgaatccaagaggtagaggttgcagtgagccaaaatcactccactgcgctccagtgtaggagacagagcaagactctgtctcaaaacaaacaaacaaaaaaaaacaggatccactacaagaaatcacttcagttatatga

SEQ ID NO: 506629 - DNA, 264 bp, Homo sapiens
aggaacctcggttctgggaatgcccaaccccgtcccagaaaaatcatgaataatccacaccttgtttagtatataacaagaaatataataaccataaaaatgggcaaccagcagtcctcggggctgctctgcctatggagtagacattcttttattcttttactttcttaataaacttgctttcactttactttatggactcaccttgaatcctttcttgtgagagatccaagaaccctctcttggggtctcttggattgggag

SEQ ID NO: 506630 - DNA, 468 bp, Homo sapiens
gcggcgttctagaggatctcctccatatgtgtgaccagttcgataaatttcttgcccccacattagaggttatatagaatggacctatcaccattactttatgattaaaaaggagtaacatttctatttgaataaataaatcatagatctgacatacacagaaagaactgaaaaaaaaacagattttatataattagtggtaataaccagaaaaataaagttttaaagaattaatcaatatttctatttgggatgaactatggtcatttggttataatacttacacaaatgagtgtatctcttatatatagctactatctcaaaaacctatcttaagtgattctaatgcaaatttctattccagaaaacatcagtgtggtaaaaattatcagctttcatcactatttacccgcctttctacctactctaactctctgggttatgctcaatggtacttgagcatagtac

SEQ ID NO: 506631 - DNA, 193 bp, Homo sapiens
ttttaatttttttgccccccccccggttttgggttggttttcccaggttggggtttaggggatggtgggcttcccccctttttcctttaaaatggcaggtttgggaattcttgggggggggggggtcccccccttcccggttgtgggcgggggttggggtttaggcttcctttttttaccccccccggcccca

SEQ ID NO: 506632 - DNA, 933 bp, Homo sapiens
atgctgctctcgggacatgagggggaagtgtactgctgcaagtttcaccccaatggatccaccctggcttctgcaggatttgaccggctaatactgttgtggaacgtctatggagactgtgataactatgcgacgttgaagggacacagtggagcagtgatggagctgcactataacacagatggcagcatgctcttctcagcgtcgacagacaaaactgtggcggtgtgggatagtgaaactggggagagagtgaaaaggctaaaggggcatacttcctttgtgaactcctgttacccagccaggcggggcccccaacttgtctgtactggcagtgacgatggtacagttaagctttgggacatccggaagaaagcagctgtccagacatttcagaacacgtaccaggtgttggctgtgaccttcaatgacacgagcgatcagattatctctggtggaatagataatgacatcaaggtctgggacctacgccaaaacaagttaacctacaccatgagaggccatgcagactctgtaactggcctgagcttgagttctgaaggctcttatctcctgtccaatgcaatggacaacacagttcgtgtctgggatgtccggccatttgctcccaaagagagatgtgtgaagatatttcaaggaaatgtccacaactttgaaaagaacctcctgagatgttcctggtctccagatggaagcaagatagcagctggctcagcagacaggtttgtgtacgtgtgggacaccacaagccgaaggtcctgtacaagctgcctggtcacgctggctccatcaatgaagtggctttccaccccgacgagcccatcatcctctcagcatccagtgacaagaggctgtacatgggtgagatccagtgaagatggggaatggaaggctcccggctcccagccctga

SEQ ID NO: 506633 - DNA, 111 bp, Homo sapiens
ttaatcttagagcgaaagctatgatcactggccgctcataaggggctggcatggctcaggtttatatgatagttgggtggtgggtgtcaatgagtgaggccaggcccgaga

SEQ ID NO: 506634 - DNA, 150 bp, Homo sapiens
tatacataaactaaacgaacttaaatcatcatacattacttcatttatagcttgacttctagtaatcttagcttcattgatttggctgctatataaggagatactcctttgtcaggatgatttaaaagcataattcgtcgatgagcatct

SEQ ID NO: 506635 - DNA, 964 bp, Homo sapiens
  misc_feature (310)..(310): n is a, c, g, or t
tatggtaattcatccagcgagatcgttgtacagacgaatacacagatattgaccctatgttccttaatcacttgtactatcatcactgagtgtctcacactagtgccttcacgctgtcctaccttaaaatacctgtatcactgtaggtccctgaccggtctgtccaccatggactaaaagtgcatctcttatgtataaaaagatttcctgtcagacgtcaggatgtaccactaccgtgtagttggtattgcccttatgtgattaggaagttcatggccatggtcgtggctggcatcatagtccgtgtaantacgcaacgcagcgtttgcgagggccgacggtggacagtagatccacgtgtgatgcgtagagggagggttcgagacccagcaggccttggttcatccagtggatgaagtaatcctcatagcgtaatataagttactccccagaagataggtaataatgtagtgccagcgcgagtggctggcaaccactggctctgtactctcccaagggctgcccttgggtagggccttggagagtacgtgcagatattggcgtgcaatccctcggggaaggttggcaggcttggcccttgaagtccgagtattgggtgcccactgtaactttcccagacactggcctctaaacattagcggagacctcaccactctgccgaggttggacagggacactttcactggtgcctcgccgattttttgcactatagttgtccgtaacaagatgtcccatccgtgagagtcctgctctcacttcttactttgtgtcatggcatgcacggtgggggccggggccggcatggcagcaagggttgtttgcggatgtacactgcccggcccgtgtcatcggggtccgcctgggtccctctcaagacctttttgtggttttggctaagacttcggctgtttactcggcggggggggggtttgccctttgcccc

SEQ ID NO: 506636 - DNA, 257 bp, Homo sapiens
ctgactgagacgagatctgggtaggagatgacaagatcctggtaggtctgatgaggatgagcatggatggggcatagacttgtgtggagaagggaagagccacctgagcttctgggcctgagagtggaagctgagaaagaacagaggggctttctggcagatggagcagctttggcaaggggcacaggcagacatatctgggataaacctgaggccaggcctgagtgtggagacaaggtagatccgaggggtaccga

SEQ ID NO: 506637 - DNA, 434 bp, Homo sapiens
ttgagtctgcagatgtgccattgctgcgtcgggtgcgcatgtgtcctgggtcgtcacgtgttaggtttaggggagttctacttatctttgtttttttttatttttatttgtatcttattatctttttatttacatccttacttttcttcatcttacctactactctttacttcctttttttgatctctcttttcttctttctttctttcatttatttccttctctcttctttctcttaactttcctttcattctctttcattctttctctttatcatcttcctttttctttatttctcacttttattttcttttctctctcttttacatctcttccttcttcttcttcacttttctttctctcattctatcttttcctttctcttcttctctttatttctttaccttttttctctctcttttccttttttccct

SEQ ID NO: 506638 - DNA, 696 bp, Homo sapiens
ggggctgcaaatacctggtactgcagatgggcgccaccacatccagctaatttttttgtatttttgtttggttggttggtttttttgttttgttttgtttgtggagagacgggtttttgctgtttcccaggctattctaaagttctaggctctgcctgcatcagcctcccagggagctgggattacaggcgtgagccactgtgcccagcccttagaaataattttctccacctccattcctctgactcttggtttgtgcctcctctgaagaagcttccttgagtgagctctgcatgaataggtcttctttcccaaatgtaagctcttaaagagcaaggatcttgtccacatcaagctcttccttacctgccctcaagcggtgatgttcctcttcctcctttcctatggtttgcctcttctcatgcttcaggccccagcttaaacattacctccaatagagaacctttttctgaccaccatatttaaagtctccccttactattttttgtcacacaagactagttctttttcttcctaatgattcctaattaaagctacattgtttacaagtgattattgcctgtctcttcctctcttcctctaggccttaagctccctggggataaggaccatgtttgtttcgctcaccatccatactcagtgtctgcacagtactttgacactagagaacaccgg

SEQ ID NO: 506639 - DNA, 960 bp, Homo sapiens
  misc_feature (4)..(4): n is a, c, g, or t
tccnaaggagcagagcagaaagagcgaaagagaacagagcaaaaagatgtttcgcgccacacaacgggtaggagcaacaaacagtggaaggccccctcatattcgcgccgcgccgagtccgccccgtaccgggtattggcgaacgtagaaccggcaccaggtccacgagacggacagcttcgagattagggacgcgggggttgtccccggcggagggtccccgaacttcgtggactggaggaaccggcgccccgaatgttcccaccggcgctgcgcccccggaagggtccactacagggcggcccccaacagaacacaaatttgggtccgccgtgtgatatttttggttctttggccgggcgccccattgtgaagaagtgtggtgccgcagctgcgagaagccctgctccggtcatggtcacacggcaggaactctcctgtcgccatccttgcaagtccaggatcttcatcgggcctacaacaagagcctcctcccggttgtgtccacgaggcctgtcatgggcgccctcccttcatatgtgggcacgccccggggaggcacccgtttttcttgacgaatcttctcgcgcgggtaaccccgcagggttgtctgataaccctacggccgccctccccgcttcctgagattatattcaccgggtaacgccatgtgtcgagcgcgccattggtacgcgctctccagatgggtgtagctgattctcggggcatgtctcctgacgacgcacccgcgatatctccaacaacgccaatgacttctggccgccccgtaaagaaagacactggctgaccacccgcccaaaattcaagggtagagaggataaacccctgtcagtctgttgttttcttgtcccatggaattcaaaatggcgctgatgtctgagggggctcttaaagaggaaaaaaaaacaattttcccctgcccttagccccaccaaaaaa

SEQ ID NO: 506640 - DNA, 202 bp, Homo sapiens
tctacgacggctgaatggctccgcagctggcctcgttttggtcatgacaatggcttgggctgcaaagcacctggatcctagagtcttccttgtggctcttccaacagaggcagactttcagctggttagagatgtggttctgtgttcccttctgatcttcctgccagagggtgttgatacaagtctcaaaatcagttccagt

SEQ ID NO: 506641 - DNA, 131 bp, Homo sapiens
cctatgtatgttgaaagggtggtcgattgcgactgcagtgtggtggtgatgcgatgtactatatgagtctatgattagtggaagctacgtttttgatgcatttgtgtaggcgcactgttgcgacagagtgt

SEQ ID NO: 506642 - DNA, 584 bp, Homo sapiens
tgatatgtgttccgtcaataagggctttagtcagtatcgggattaggataaaaagtgggagggtgtgattcttcgtttcagttgaaaactctgaggagactgtagggttcattggcttaattgcaatattgttgtgtctcagggaatagggaggcctgaggtgagggagagagatggtggaacacatgcagcagtgatattctctgttttatatgggtgcagttagtggcacccccaaacaattacaatagatgactgatcaaagatgactgatcacaaatcactggaacagatataatgattatgaaaaaatgtgaaataccgaggagtaccaaaatgtgacacggagacacaagtgagcacatgctgttagaaagaatggcaatgaagacatgctcaactcaagattgctcaagatgcttcaacttgttaaaaaaaacaaaaaacaaacaaaaaaaaatataatatatacaaggctcaaaaaccaggtatgcctgtacagctttatataggagagcactagaaaaaaagctgaagtgtgctgaggggtagtgacgctccagacaaaagccagagcagagtgt

SEQ ID NO: 506643 - DNA, 1164 bp, Homo sapiens
agttgttacaatgatacagtgttggcctagtatctaaaattcttggttaaggagcttattgggctgagcactttcttaggggagaatttgtctctgtctaatttttattcgaaacgtacttcacttttccgaatattctttgtcaggtaatgttcaccttctgtatgatttgggctatatgggtgcttacgctgttactttttattttgtctctatagtagtttttccgggtaggaaggtttgctatttttaggctaattgaatttttattctgctatagaggtgccttaggtatgttatagtaaagtgccctttcctctcaaattatttggggttcaaattaagtttgttggttttgtttggattctaaattagtgtatatacatcaatggtgaatttgctttgggcagtgtgctaacatttgtaaatcgccgtagttaggaccatatggcagtggggtgtgatgtatattttaggcggtaggtgtttcgggattatatggggtatttgaaagttagatgggggtaggtctctgtagggaagtagcggtaggagtagtagtacaggataggaatcgttcctattttcagttggtagacagttctagtaattactacaccatactattatcatttgtattgaagcgtgtcctagtcaccagattgaggacaggttacttggcaacttccaaagacaatgtagcatgtacctaatcattcaaagattcaacttgattcagcaagattcatccataaacttgatattatatatatcatggatatagtctctgtaaatataagtgaaaatttaccatatatatgtgacagagtgaccatactatgaactatatatcgctagttggagaggatatggccactgattagtatttgcccaatgacagggttgccactaactttcaacttgtaaaaagagcagtatactgtgaaagacgcgtaaagtctagaaagcaataaaaatgatagtgtgtcccatgtatactcaactaagaccatagttcattgttaattaataaagcacctgtcaatttcagattgagtaatattgttatcaggaatgggtttgggagttatcgttcaaggcttttaccacgcagtctgtgggataaactaagtagttgtttacctggatctataaatacatata

SEQ ID NO: 506644 - DNA, 208 bp, Homo sapiens
ttgtggtatatatcacaaggaatactactcagccataaaaaagaatgacataatgccatttgcagcaacatggatggaactagagaatcacatactgagtgaaatgagtcagaaagacaaagacaaataccatatgatatcacttataactggaatctaatatccagcacaaaggaacatctcctcagaaaagaaaatcatggacttg

SEQ ID NO: 506645 - DNA, 264 bp, Homo sapiens
ttttttcccccccttttggggggccggggggggggtttcccggggtcggggattcaaccccttttgggttccccgggggaaccccctttttttttaaaaataaaaaaaatttcccccgggggggggggggggcccttttttcccccccctccaggggggggggggggggaatgggttttcccttggggggggggggtttcttttttttttttttttcccccccccccccccggggggccccagggtttttccccttttccccca

SEQ ID NO: 506646 - DNA, 632 bp, Homo sapiens
  misc_feature (5)..(5): n is a, c, g, or t
  misc_feature (68)..(68): n is a, c, g, or t
  misc_feature (77)..(77): n is a, c, g, or t
  misc_feature (100)..(100): n is a, c, g, or t
  misc_feature (105)..(105): n is a, c, g, or t
  misc_feature (110)..(110): n is a, c, g, or t
  misc_feature (159)..(159): n is a, c, g, or t
  misc_feature (171)..(171): n is a, c, g, or t
  misc_feature (174)..(174): n is a, c, g, or t
  misc_feature (215)..(215): n is a, c, g, or t
  misc_feature (229)..(229): n is a, c, g, or t
  misc_feature (240)..(240): n is a, c, g, or t
  misc_feature (252)..(252): n is a, c, g, or t
  misc_feature (279)..(279): n is a, c, g, or t
  misc_feature (282)..(282): n is a, c, g, or t
  misc_feature (321)..(321): n is a, c, g, or t
  misc_feature (343)..(343): n is a, c, g, or t
  misc_feature (345)..(345): n is a, c, g, or t
  misc_feature (351)..(351): n is a, c, g, or t
  misc_feature (401)..(401): n is a, c, g, or t
  misc_feature (410)..(410): n is a, c, g, or t
  misc_feature (446)..(446): n is a, c, g, or t
  misc_feature (452)..(452): n is a, c, g, or t
  misc_feature (461)..(461): n is a, c, g, or t
  misc_feature (521)..(521): n is a, c, g, or t
  misc_feature (523)..(523): n is a, c, g, or t
  misc_feature (598)..(598): n is a, c, g, or t
gggangagccgcttttcagccaccatgtctccaaattcatcagcattgaactgggggaagccccactnctttgagangctggatctcctggcggccaggnaactngaacntggccctgcgcagggcctcaatcacatgccccttgtcctgcagcctggngcggatggacanganaacttggccaatgtgaaccctggccacagtgccctggggcnttccaaaggcaccncgcatgcctgnctggagcctgtnagccccagcacaggacaacatcttgtngangcggatgacgtggaaggggtggagccgcacccggatatngaagccatccctgccacaactntntaccangtacttattggcacaaattcgggcagcctccagggcttcagaggacagcngcccatatncatctgagagcatgtggccacaaagcggaaactcanccactnttgcctttntccgccccaggcgcaaaaatgcgaatctcggcatcagggacacctcggcagaagcgagantntgggtacggcttgtacttacaataccggtaacaacgggcggggcggcggccatggcgacaccaggatcttcagtngcacacgaaggaaaagaggcgctcctccgcctgc

SEQ ID NO: 506647 - DNA, 284 bp, Homo sapiens
  misc_feature (213)..(213): n is a, c, g, or t
tgaaaaacaaaatgaaaccctcaaaaacagactgatttcagccaaacagcaactgggcatcttggttggttctaagtctttgctattgtgaatagtgctgcaataaacattttttttaataaagagacagacactaaacagctttgtgagctatacagtctctcttgcggtcactctactctgccactgtagtgcacagatatagacagtagntaaacaaatgatcctgggctgtgtttccagtaaaaactttttttgcaaagccaggcagttggctggaattt

SEQ ID NO: 506648 - DNA, 130 bp, Homo sapiens
ggagctgcacatgacaggtgaccctggaggtgggcaaggtgatccagcaacgtcggcagagcaaggggcttacgcagaaggaactgggcacgaaaatcaatgagaagccacaggtgatcgttgactatga

SEQ ID NO: 506649 - DNA, 556 bp, Homo sapiens
tggcgctacaggcctcctggcctctcatccacgtctggctcaggtctgatcagaaagggaatccaggtcccacctcacagtagcattggcagtctctgccccactcacccctcactgcctcctggacagacttcctgccccagctcccagcttggccaaccatcctctctctggcgactgcccccctccagcccccagcccggccccggaccctgcatggcctcccccagcctggcctcccctccccaccccatggccatgcccagactaccagccccttggggctccatctgaacactggggcaagggtcatgcccgcttggtccctccagtgcctgcccctcagtggagtgagcacagctctgctggcaggactgtggccggcgtcaggaataagcatgcagcgctctccccagggcctcccggaagaggggcaatgcttgcagctcccccctggagttacgaaagtgctctggaactagacgctggtgactgggcgatgctgtgaacgagccagtgccacagaactgtgcacctgaatgtgtgagttctgtcg

SEQ ID NO: 506650 - DNA, 211 bp, Homo sapiens
ccgcccgcgccacttttggttcactgtttgaaattaccacgagttttaaaatgccactcgttcacttaaagagaatccacgcggtattcacgagtttctggggtttttcactaattgtaattaattattaattccttatgggaatagttccaatgtacccacgaagaaaacttgacccttgctctggtttaacccgtaataggccccttga

SEQ ID NO: 506651 - DNA, 478 bp, Homo sapiens
agcggccgcattggagcacactcaaattgtaaagcatgagagacgaaaagacggatagatggcataattactttcttcccacatcccacaagattgtctggtatgtgcacctcactttgcgagcataaggtcatctaggtcagaagaaacttgctatccgcgcgatacaggagaatctgtagaagtagggtttaagattcgcggggatgccgaagggtatgggacactcactttggacatctaggtcaatcagagttactgcataatggctccccttctatttagcttccctttatgtatgggtctgtttagaccaggagcagcatgactcttgtatgttgccatagcagatcaaataggaaaaacaactaggttgacgaagttggtgcggaaggagctatttaagtcagaactctcagagtgacaaactcaacttccattagttttcccgacagtccatttattggctttcataaac

SEQ ID NO: 506652 - DNA, 236 bp, Homo sapiens
agtcttcctaattgacattcatacgctctatgatgtgtcaaacaagcacatgcacaaatgccagatgctgctatgaagagtgggttatctagaaagcatcccttgatgacagccctgtgtggacagtacaatattttttcatcatccttggtttcactgcgatatgagataaaacgcaagataaatttttcttagcgaccacctctacttatcactctgtctttgctggtgagaag

SEQ ID NO: 506653 - DNA, 104 bp, Homo sapiens
acatctgctatagatggaggcggagtcagaacaggtagaacagtcataccctcccttagacaggaaactactcccaccctggtagcctcacgtagacctaagca

SEQ ID NO: 506654 - DNA, 214 bp, Homo sapiens
agttcaacatcaagcaacaggcaaactgaggtaagaacggtctatcacaggaagacctggcatggatcgggggtcgccccacagacagtggaagaacgaacgagtacgaaatgagagcaagacatctcatgacgaccctgacagtcatatccagaaaagaagaactactgcacgaggctgcctgcgcaccgagaggtccagcgtcggataaggg

SEQ ID NO: 506655 - DNA, 679 bp, Homo sapiens
tggtggctcacaccgtgtaatcccagcatttggggaggctgaggtggccagatcccaaggtcagaagatcgagaccatcctggctaacatggtgaaaccccatctctactaaaaatacaaaaaaaaattagccgggggtggtggcgggtacctgtagtcctagctacttgggaggctgaggcaggagaatggcgtgaacctgggaggtggagcttgcagtgagccaagatcgtgccactgcactccagcctgggcgacagagcaagactccgtctcaaaaaataaaaaaaaaaaaaaaaataggtgaaaattccttataaatccaggatgggctctgagagacacgggctaagattcaggaagaaacaaaaaattcagaatcctacatctcctccgtaaaatttggggccctaatgggtcatcaaaacctgggtaggatgcggatgacaatgagggccaaaattttaggaggagatgtaggatgcgggaagaaaggtgaaaggtgtggaatatataccagaggaggacaaactcagagggcagggaaggaccgggggtagggaaacatgacggacgggccagagcactggctagcggacgcgagacgggcctaaaccgggggacaaggctgccggggccagaacatggggcaaccggaacgctaggggaaacggggaaa

SEQ ID NO: 506656 - DNA, 209 bp, Homo sapiens
gactctagagtatccccacccttcaaccgctgcagatccatcacacttggtcttattcctagatattcaccacatagtcatcacattactcaaagttttttttttaagatcaggtcactcttgtcgcccattttgaattgctgtggcacgatcatggttcaccgcaactcgaatagtgtaccgaggctctcaccttcgtaaatccatcg

SEQ ID NO: 506657 - DNA, 525 bp, Homo sapiens
ccttgatgctgctggatgtctttctgatgctgaaggtgggatgtgaagtctccagctattattgtattgtgatctatctctcttgtggctctaataatatttgtttttatatctgggtactccagtgttgggtgcatatgtatttacaattgttttatccttttgctgaattgacatatttatcattatataatgatcttatttgtctctttttatagttggtgttttgaaatatatttggtctgatttaagtatagctactcttgctcttttttagtttctatttgaatggaatttcttttttcatccctttattttctgtgcctttataggcaaaatgtgtttcttgtaggcagcagattatggcgtctttttttttttttaaatccattcagccactctatgtcttgggatgggagaatttagtccatttacagtaaattttattatggataagtaaagacttacttgggccattatataacttctctgcgggaggaaatgtgaccttctcctttttcttcc

SEQ ID NO: 506658 - DNA, 167 bp, Homo sapiens
tcaggacgcacgatgtccacgggccgctgcgtagcactgtgccacggacagctctgttaggcagggaaggtctgggcacccgatctgagggtccgggcagaggacgtcctccatgtcatcgatgaacttctcagcgaccaggtaggagaacgcgtcaacactcgggg

SEQ ID NO: 506659 - DNA, 165 bp, Homo sapiens
tccaggaaattaaagaacccaagagttgtttgtttaaaggggatgagtttgtaaattaaagttccttaaagctgttattggaaaaaaaccctttgaggaggtaacctttaatgaaaaattttttttttttaaattttcacatttttttccccttccccccttcct

SEQ ID NO: 506660 - DNA, 649 bp, Homo sapiens
tccagtggtcaaatgacccttaatggaaatggtttcccttggggcttaactgggcggggcttcccacagccaccacggtggagtgtctcactcgaagtggaatgctcagtaaggaagtgggggccaatcaacatttacagcccacgtgacgtgggcagtcccccgaggaactcctcttataagtggtctccagaagaagtttcctcgtggcataagggcactcgggtgcgcgcactcgtgctcgagccaatgtggtgtgaccaatctctctcatctcaagaaaggtgtgatatattctcccaccgtggtgtgtaacaaagcgtggttattctctgtgagttctctattctcagtggtcctcgtggggagggggtctcctattgaggggcgctttgagagtagaactcaggggacaagagggcaaaagagggcgcaccacactctctcaatctctgtggggcccgtggtctgtggtcctgtggaaatgtggctcgagtgttctcacctgtgataatctcctctcagggcccttctccaggttcacccgcgttggcctttgggccaatgtgttcatctccccaagctttttttgtgtggaagacccaagaccccggggggcgccgtctttggggggcccagggcagcacgt

SEQ ID NO: 506661 - DNA, 165 bp, Homo sapiens
tgatctgaggatccctgccaagcgtagtacccaaggtcagagttcaagaccagcctggcaacttggagaaaccccagctctacaaaaatacaaaaaaaaagacaaattagctggcatgatggtgggtgcatgttattccagctacttgggtactacgctttggca

SEQ ID NO: 506662 - DNA, 619 bp, Homo sapiens
  misc_feature (609)..(609): n is a, c, g, or t
cctgcacctgtagtcccagctagttgtgaggctgacgcagaagaattgcttaaacccgagaggcgcgttgcttgcagtgagcagagatcgcgccactgcacaccagcctgggtgacagagcgagactccatctaacaaaaaataatagtaacagcctcccgaagaaatacacattttgcccaatgccttctgtttggggctttgaaaagtgagccctgactgggtgtggtggttgacacctgttatcacagcactttgggaggccaaggtgggaggactgcttgagcccaggagttggaggctgcagtgagccatgatcttgcccctgcgctctcgcctgggtgacagagcaagactctatctcaaaaatgtttttaaaaaatacttcctagggaaacacacattttgccctatttggaactttgaaaagtgagccctcctctgcccatgggccgtgctgctcagcctgccatactcgcttgctttgctgtttgggatttgcctccagaataaaggtcctttttgttggaggcaaatcccaaatcggcaaagtgcaggaattggcgcgttgcagttgggtagctgggtggcaggccaaatcggcaaagncaggaattgg

SEQ ID NO: 506663 - DNA, 331 bp, Homo sapiens
  misc_feature (161)..(161): n is a, c, g, or t
atttttgctaaaagagtagattttagatgctcttgctacacacagaaaaggggtgactgaaacgatggattcattgatttgcttgactatgagaaacgtttcactatgtatatgtgtatcaaaacttgtacacattaaatatataaaactttaaaattgantttataaaaagagaattgccaagagaatagattttaagtgttctcaccacaaaaaaataagtatatgaggcatatcttaattagctcaattataaccattccacaaatatacatatttcaaacatctgcgctccagcctggggtgacagagtgagaccttatcttaaaag

SEQ ID NO: 506664 - DNA, 408 bp, Homo sapiens
  misc_feature (22)..(22): n is a, c, g, or t
  misc_feature (39)..(39): n is a, c, g, or t
ccaaaaaggttttcaagtttcnctttattccagatctanctgaagaaattactttttgtagaaagctacagccttgcaaaaagtatttcctgaaataataaaacttgaaagtcagttgggcatggtggcccacacctgtaatcaaagcagtttgggaagccgagatgagcagatcacttgagtcccaggaggtggagactagcccgggcaacatagcaagttcccatctctacaaaaaaaaaaaaaaaaaagaaaacttagctgggcatggtgtggtgcgttcctgtaatcccagctactcaggaggctgaggtgggaggatcactttaggccaagaggtggaggtttcagtaagctgagattgcaaccactgcgctccagcgtgggtgacagagtgaaatcctgtct

SEQ ID NO: 506665 - DNA, 186 bp, Homo sapiens
tttttggcgctgtacacctccctggactttgttggctctggcaaagtagaccacacagtgggccagaagcacctcacattcaggcatgcctatcacatgacagccttcgtaggcagcaaccgcttgtgttaacgcagaccggtctgccagacctatgtcctcgctggcagacctgagcaagccagg

SEQ ID NO: 506666 - DNA, 730 bp, Homo sapiens
gcgctgattgcttgccaggtagtggatcccggaggcgcgcagaggagtccctggaggagctagggaccccaaaggcctttcaccgctgtgggccagtcctcaggtcaggtgggagggtgggtcccagggaatcctgttagtttctaccaccgtccgtccgccctttctctggagctggtggagcttcaggaagtcctgtggagcgtcggctgggatcagttgtctcggtgagaaagtaaagcttgaaagctttccagagtgttgaatcttccaccagaaaaccttgatcacatcagatatctggcagtatccaatttgcccagaagaagaagaagtagctgattttcagctttcttgtggattctttattggaaaaatgacaatgagcattcaagaccagatattcaagttcaatgccaagagactagcagagaagctaagatgtgatacagtggtgagtgaaatcagtactggtcaagaggactgtaagatttcaagaataagacagagagctcttaacaagagacagtgctacaacaagtaattgaagatggtcaaaatatggattaaagaagtgaacttttctctggacttgcccagaagaagatgtggttgacttcaggaaattgtagtagcaaatctcaagagaagctttaggacatcaagtaataagaataaattagcttgggagttggggcatgccagtttggtctttctgggaactggttac

SEQ ID NO: 506667 - DNA, 1392 bp, Homo sapiens
tgtggggggggcgacacgcggcggcgggcacccccgacgggagcgccggcggggggggggggcacaaaaagaaggggcgcgaacaccacacacagagagggggggggggggagaggagacgagaaaaaagggcgagaggggcgcccgcgcgcggcggggagaaaaagaggagagaaaatctctctctctctcacacaaaaaagggggagacgaaacaaacgggggtgcgacgacgaacaggggggggaggcggggagagagaaaaagagagagaaaagggggaggtgcgccccgcgcgcgagagagacacgcggagaggaaaagacaacagagaggggggtgtgcctctcttacaaagcgcggaggagagagagtacaaaagaagagatgtcgtgcgcgaggagtgttcaccacacgcggcgcggggtgggggggagagaaaggagagagaaacacacacacggggtgggtgctcgcgcgagagcgcgcgcacagagagagaggagaagacctgaggcgggggaggggggggtggcgcacacagggggcggcgcccaccgcaaaggatcaaacagagagggggcgcccacacaatattctatcacacaacaaaaattcactcccacccaccaaacacaaactcacccacccagataaagatacctgccgccctagaaaacaaagggaagctaaaccgaacaggcccagccgcgcagcggggggaggggagggggggcccaaaaatacaaaaaacacagccgacgaagagggagcgaacgagaggcggggagggggcaggaaagaaagaatcgccacacaaacaggaagaagaaggagcgcccccccaagagaggatgcatccccgagaagggagaaacaggcgggggagacaaaaccacaccaacgcaggggacgcgcggagcagtaaaaaaagcacctgtaacgacactcgtctgcggcaacacaaagaacccaacaaaacagagcagagctagagccacacggaggggaggcacaacaacacacaacagaggagcgagcagacaacaacactccataagagaagagcgacaacagcgggacacaaaaatacacaagaacacggaggggaacaccaaccacaaaatatctaacaccgagcgagaagagaccccccacaaaaggagcgggagggggcgagcgcccccccagaggggagggtggacggacgcacaacaacacacccacaagagcgcggcacagaagaggagaacgcacaccgaccgaaccgactaccccgagaggccacccccggaggggggaaaaacacaaaagggctgacaacacggaggaagccgccccgcgaggtagtagggcaaccacacaggtggtaccgcgagcgaagaaacacta

SEQ ID NO: 506668 - DNA, 376 bp, Homo sapiens
tcgtgttttggtataagatattgcgcacttcttaagataagcgtttcctccctatccaatgtcttttggggtaaatcatcacatacatctgaatttgtttttcacagtcccagtaatgggtctgcctcattctttccatctcctcccattcttttgtctcccttgcctttttcctgtatatcggtagttctcataaagaagtggtaaatccaagatataaaattcttacacaaaggtctcacatatttgtgcccattctagactctctgcttgaaatgtcctcaattcatttctcctttttctcctggaatatctcttataccacagtcctcaacatatacactatagagagagtcctctgatgaatgcgattgct

SEQ ID NO: 506669 - DNA, 695 bp, Homo sapiens
  misc_feature (103)..(103): n is a, c, g, or t
caggggtaagaaagcattaagaataccgtcgggccaaatctctgcggggcaaaaaggtgggatttatccttttaaaagacaggaaaaattatgccagaggttnctctagcctgcttaaagagattttggggcaaaactcaaaatggtgtttacagtgctgcaaattacacaatgggagctttggaagtaattttgtgtctgctggtatacagaccagttttagggctggtaatccaacagggacttcccagaatggttatgatagccctcagcaatacggaagtaatgttcccaatatgcccaatggtatgaacccacaggcatatgcatatcctgctactgcagctgcacctatgattggttatccaatgcccacaggatattccccataagactttagaaggatatgtaaaagtctgtttttcaaaaatgctctttatattgtgtgttatctgccaagatagttatttaagaaacatgggaattgcagaaatgcctgcagtgcagcagtaattatggggccctttttcgctatttaaggtggatatttctctacattcctgaaacaatttttaggttttttttggactaaaaaaagcaggcagtgttttccccaaagtaaatggacagtgattttaaatacaataaatgaaggcaatgcatggccttcccataaaaaatatttgaaggctgga

SEQ ID NO: 506670 - DNA, 236 bp, Homo sapiens
atggaatgaaggaaaattcctgatgttccatttttctcctctggtaaagtactccatggcaaagtggtctatttaaagagtgagtttgatcttggccctatctaaatcttttgatcttgaaagaaggatggagtaccaataatgagagggcaagacagattttctttaaagaaatgtgataaagttaaagggatggttatgacccagcaagtaactcggacaactcgtttggaact

SEQ ID NO: 506671 - DNA, 263 bp, Homo sapiens
catcacctaaggccgtaacttctaaagcggggactgcttcctgcaaggataagggccgagttcaattagcgatgactgccttgatcaatgcatggagattggcattactagagtactctaattgccagccatgagcgagaggaaaaaatatacatcgtgcttgccatgcgatgagctcttagctgtaaggcatctctcaatctgtacaggcttggtctgcaccagccttaactaacatgagcttcatagattttctagaagct

SEQ ID NO: 506672 - DNA, 878 bp, Homo sapiens
ggacctgcgtatctctgcttgggggagtgtgcgtccgcatatattggtttcttcgctgacctccgtggtcgccggtttcctcatgggttcccacatgcgtggttctttgtagacccgccattcttttagcgcctttagtgttccgtgccgctccgaatttcctggttggtcctttcgccgggaacctgtggggaccctgcgcaaacgcagatttctgtgtatctggcccgcctcgtctgtttttcccttgccaccacaagtttggccccagcccacagttgctggacgcagagattctgcctattctactctgattgtcccggtcctcccacgccattcccccccccttccctacttccgtctttacacggcaagttccccccccgcccatgtcccataaagagcgcgtcgcccccctaatttccgcggctgacctcgtcccaaacccggtcccttgtcttctttaattcttttaagagcgctgtcaaccactctttaaaaccccccaatagctgcctgcttcacacattatataacaaagctgtggtcccccctctttgcaacctcaaataagtttcgccaccctagtgccatgcgccctgtcaccaccaccgcggcatcactatctcgctgcgcacctcggaagaaggacactctcccattcgtggtcgaagtacaaaaaaaggctgtagaaaaattggggttgcgtccccgtcttattcatgagtcgacccacccgaggcccccgagtgtcaccccccaacgcgggaactctcaagtatcaatcacaagcgcacgcatttttctttgcgcccaaagttttaaaacggggaaagcccaattctttaacaacccacaaaaaaaactctaacaaaaca

SEQ ID NO: 506673 - DNA, 368 bp, Homo sapiens
ccgacccttttcacaggaaacaagcataccgctctgctaaacctcgtgatcccctggccgttctcctaaaggcgcgccttctaccttccagccctgcaagaagccctagccagcgaggtagatgacagatggaaagactgaacccacgctatttccattttagaaagtgcaaaggctagagttacaaatatgaagacatctaaacccatcgtacattccagaaaaaaataccgctttcacaaaactcgctcccgcatgacccacagaacacccaaggtcaaaaagagtccaaaggtcagaaagaaaagttatctgagtagactgatgctctcaaacaggcttccgttctctgcagcgaagagcctcat

SEQ ID NO: 506674 - DNA, 1217 bp, Homo sapiens
caccaagagctgtgccaggatccacgagaccagatcgctgaagaaacagggcctgctgcctctgaccttcgctgacccggcatgactacaagcaaagattcacccatgatggatcaagctgaccacttcaggggcctgaaggatcttacaccccatggacaagtgccctgaagtgcactcatcatagcatgcgcaaacgggaccccaggagagccgatccctcctgaaacgcacagcctgcaacgcgacgacggcagcattagacgggtgggtatccgcggctggagtcagatgacgcctcagaccagacactgcaaggaaacctggcagagcaggtagtcgtggggcaagttgtcccttccacccgacacgccggtgccgctagggcagattcagacagttcaacgccataccatcgataggtggcacaatacaaagtgggattcacggattcgcgggtccaaggcacaatggacataatccataatgcccgcagagacatgggctgggtggaacccaagaacaatttgccttcccatggcgtccacccagacagtttagacaccaaacggggagatgaaacctgggttgggatatgtagacgctgggagagaaggaggttgtcagatgaaagacaatcaacatatatattcgacggacccccaccacagtgatccgttgacaccgtaaatgacatgggacaggtttccgggggctgtccgagggaacgtaatataaaggcaaaggcggtaccaacgtggcgaaatcgatggttacactatagtacttataaaaggggacagtggacacggaaagggaatgttccccccaatgcattgaaacggctgcagaacccactccgcgggcacatggccagtcacgttaccaaaaggggagggacatgaacaggggcattacattaggcaggaacaccattcagaagggtacaccctgggaccaacgcgaaacaacacacaggaacatcccacaaacaccccaggacacgaagacaaaaaacaaaacagtgagcggggcagaacgccatagcgagcagaaatccccactacaaaaggggggccccaaagagtacgtaagagcgcgcacaccccacagacatccacagggacaccaaaaggaggggacccagaaatcacagggagacccgcgataacaatagagacgtcagccgaacggggcaaggctgccggtcagaaaac

SEQ ID NO: 506675 - DNA, 150 bp, Homo sapiens
cggcatcggcacaattgtgtcacgcgcacatcaatacacatcatccattcgggcttgcatgtggtggcaggtggtgtatcaaggggttggctcaggtctcacttgtctagggtcgcctcaggaggtctggtgcacaatcagtgttcaatg

SEQ ID NO: 506676 - DNA, 274 bp, Homo sapiens
atatcaccagatcgatgttcctggatcccaaaaccaaagtttccagtatctgagaagttgttttttcttaactcttactcccgcacctttagacccttctccaagaatttcttctagccttgagcccctcgcaactgtgcacgtggacagcaactcttttcatattctccgtgatgccaaacggatcgtgacacgtgtatcatagctttgtgaaaacacatggggtctgctcctgtgagctgctccaacaccttgtggtactacgcttttggca

SEQ ID NO: 506677 - DNA, 137 bp, Homo sapiens
gcgaagagtgtgcgcagccaaacacggtggacttatccttttttgcagccccagccaccgtagggagctgggggaccgtagtaccgacaatctcttctctgatccggctgcagagggatgcggccacgtggcaagtg

SEQ ID NO: 506678 - DNA, 148 bp, Homo sapiens
tcataggctcgcaggcagattcaaaggatcctggaggtatgggatagactggggagacgatgctgttgctttgcatgatcacagtgctggaagcatgaacccaggctccagtaacgtgttgcccggggcccatatgcctctgacactg

SEQ ID NO: 506679 - DNA, 157 bp, Homo sapiens
  misc_feature (53)..(53): n is a, c, g, or t
  misc_feature (64)..(64): n is a, c, g, or t
  misc_feature (94)..(94): n is a, c, g, or t
  misc_feature (147)..(147): n is a, c, g, or t
actaggctttaaagacataggaactatatcttggtcagctttgcacttccaantataaaaaaangcctggcggggggtaggcactcaagaaaanggttgactgaccaatgggggggggggctctgcacactctaaggtaggggaaancaagaacagc

SEQ ID NO: 506680 - DNA, 175 bp, Homo sapiens
actctaacgatcccgtaatcccacttggttgccccggcacacgaatggtgtatgttacataaatggaattgtataatatgaaaccttttggaattggcttttttttcactcagcataacgcccttatccacgttgttgcatatatatgggttgaattatgtcccacccaaaatat

SEQ ID NO: 506681 - DNA, 157 bp, Homo sapiens
tatctagcatcgcagtgctgggagccaaataactgttgacagcttttttggtgcagctcaagaaaacttgaaaagaacatgctttaactgaagcacgtggactctgcagctttctgtgtcaggcccgtgtcactccccactggtcgcggataggcac

SEQ ID NO: 506682 - DNA, 411 bp, Homo sapiens
tcgggtctttcaggctgatcaggccggatttctgcaggagcagcaggcacggccgctgttgctgccttcgttcggaatggccacggtggcgccgtctttcagctcagccaggcttttgactttcttcgagtaaccaccgaaaggctcgacgtgcacgccgatcacggtgaccaggttggtgcccttgcctttattgaagccatccaggtacggcttggtctggaagtagttggcgtccaggtgtttctcggccacctgggtgtcggttgtacgtagtcggtgaagaccttgatttccaggtccacgccttctttggccaggtcggcttgatcagctcgaggatctcggcatgggggatcggcgttgccgccacgaccagtttctcgccggcctgggccagacctgccgcca

SEQ ID NO: 506683 - DNA, 85 bp, Homo sapiens
cctgaatggagagggagaagagaaggtaggaaagagaaaaaaaaatgggagagaaaagaaaaaaggaaaaaaaataaaggaaaaa

SEQ ID NO: 506684 - DNA, 897 bp, Homo sapiens
gcatagtagtgttgacatttcaacctacagatccagtagatatctctgcccccttaggaggttgctccactgtgcctaggaagaggctgcagctcgggtcgtgactgttaaatattataattgtacgtgccccgtcctcactactgtgaaatgacagccgtcttccattatattaagtttagctataacttattctatcaatcggatacatttttcagtcacatgtgcattagtcacaatcctgggcacgaagtgcttgaggtccagctgacgatagtaaaatcaaggggtaggaggcacggggatggaccaggattcatgttcctttgcatttcttacgtaaaatgtgaacaaccggcagctggtggatggtgatccacgcattcccgaagtaataatgtgaggacgaatgcacgtgcatctggaacataacccgagatgctaacctgggggtctcatgtctagtgcagtcgaagctactatcttactcacattcagattttttgtcctacagtgcacatgcaccagatgatcttttcataatgtgacttcttggtaaggcttatcatgaatgagggcgccgtagtctgtggctggggtgtctaaaccaggctaccactattcgaagtgactatactgaatagatccatcttattgagttgctttcagaaacatctgccttatatgttgttgtcgggatgtggcttttggggctaaaagttggtaggccacataaactaaggaagagccattagggactaaagccacggggaagcaaagaggaagtcgccacggcttcgagggcaattcaagttcttcctaatttgaagccggaacaatgtttatggtgtgagacccacattttgcttatttgaatgcctttggggaggtttgcac

SEQ ID NO: 506685 - DNA, 136 bp, Homo sapiens
gtgactctgaggatcccgtcagaagatacctcagaacagattttttaatcactcacaactaaaaattattagaactaagctggtcaggatgaaaatataattaaaaaaatctgttctgaggtgatcttctgcacga

SEQ ID NO: 506686 - DNA, 203 bp, Homo sapiens
ccttgtgcatcaagcccacgtgttggtacggcacgagtgcccgcgggcagggtgactccccagtgttgtgctgaatcctgactggtcggctgctacactagattctccatcattcctctgcctcactgcagtcccagaagaggaaggctgcaggcccagatcccggagcactgccatcacacctacccccgcttatatgaaga

SEQ ID NO: 506687 - DNA, 378 bp, Homo sapiens
ggtttgcagttagccgagatcgcaccacttcacttcaaccttgggtgacagagcaagacttcatctcaaaaacaaagaaacactgaacagttatcctatctgatctttttatatgcaggatagtgattaaatcactctacaaccactttcctctaatttctcctcataaggcctaatcaaatgtatttgccttacttcctaccattctgttgagatctccgaaaattggaggaaggactaaatatggtaggaggatctcttgaggtcctgtgatcttttgaactgcattcctgagtctatcctaacttcctaaaggaggatgacttttgggttgttgtaatagggggctcctgtccttgggtgggggggggggggggg

SEQ ID NO: 506688 - DNA, 887 bp, Homo sapiens
  misc_feature (771)..(771): n is a, c, g, or t
gcgagcagcggcggcggcgcggagagacgcagcggaggttttcctggtttcggaccccagcggccggatggtgaaatcctccctgcagcggatcctcaatagccactgcttcgccagagagaaggaaggggataaacccagcgccaccatccacgccagccgcaccatgccgctcctaagcctgcacagccgcggcggcagcagcagtgagagttccagggtctccctccactgctgtagtaacccgggtccggggcctcggtggtgctcctgatgcccctcacccacccctgaagatcccaggtgggcgagggaatagtcagagggatcacaatctttcagctaacttattctactccgatgatcggctgaatgtaacagaggaactaacggtccaacgacaagacgaggattctcaacgtccagtccaggctcacagacgccaaacgcattaactggcgaacagtgctgagtggcggcagcctctacatcgagatcccgggcggcgcgctgcccgaggggagcaaggacagctttgcagttctcctggagttcgctgaggagcagctgcgagccgaccatgtcttcatttgcttccacaagaaccgcgaggacagagccgccttgctccgaaccttcagctttttgggctttgagattgtgagaccggggcatccccttgtccccaagagacccgacgcttgcttcatggcctacacgttcgagagagagtctttcgggagaggaggaggagtagggccccctcggggntgggcatccggcccctggggcccccccttgtcaaccgggtgggtaggaaccgtaaactcgctcatctcgcctgggtttgtccgcatgttgtaatcgtgcaaataaacgctccctcc

SEQ ID NO: 506689 - DNA, 1031 bp, Homo sapiens
gcgagcagcggcggcggcgcggagagacgcagcggaggttttcctggtttcggaccccagcggccggatggtgaaatcctccctgcagcggatcctcaatagccactgcttcgccagagagaaggaaggggataaacccagcgccaccatccacgccagccgcaccatgccgcttcttagtcagcacagccgcggcggctgcagcagcgagagttctagggttgcccttaattgctgtagtaacccgggtccggggcctcggtggtgctcctgatgcccctcacccacccctgaagatcccaggtgggcgagggaacagtcagcgggatcacagtctttcagctagcatcctgtactccgacgagcggctgaatgtgacagaggagccgacgtctaacgacaagaccagggtcctgagcatccagtccacgctcacggaggccaagcaggtcacctggagggcggtgtggagtggcggcagcctctacatcgagatcccgggcggcgcgctgcccgaggggagcaaggacagctttgcagttctcctggagttcgctgaggagcactccaggctgaccacgttttcatctgcttccccaagaaccgtgaggacagagccgccctactccgaaccttcagctttcttggctttgagattgtgagaccggggcatccccttgtccccaagagacccgacgcttgcttcatggtctacactctggagagagaggacccgggtgaggaggactaggtgccagccctgcccagtgtccctgtgccctctcctgggttagtccacatgtcgtgattgtgcagaataaacgctcactccattagcggggtgcttcttcgagctgaatgctgtgtttgtcacactcaagtgttggctttaattctaaataaaggtttctattttacttttttattgctgtttaagatggtcaggtgacctatgctatagcagtctcctttgaagtctggaaaaatagtgtcacctcccctggctcaaatccaataaagtgatctcgttc

SEQ ID NO: 506690 - DNA, 680 bp, Homo sapiens
tattaaaggttttctcaatttttatcccggggccttgtgggggaccggggagggaagtgtataaaggagtgacggggcccccgggggccctttcccaccctggagcctcaaggccgggggggggaccagtgaaccgtgcagaaggcattcaaaatagggcctcaaaaagcccaggccatctcatttccaggggaccaggggtggccacaatgggtggaactgggccctcccaaagcaccgaggaaaagggctcgacatgtgggtgtgccccccgacaccgtggtgccttgaacgaggcatgggggggcgacaggcacaagacgaaggaggcattcaaacgcccctcccttccccaaaaagggggccagtgggggcagtggggcacaactatccatcccgaggaaacccaaggggaaagcccgggcaggacacccgtgggctgtggcccacatgccccaaaccgtggatctggcgaaggctccaacaaggggagacgggtagacaccaccccccgtggggtaagagaaaggggcccacacacagtatccacaccatttgggggaaacaaaaccgagagcaaggggagcacaaaacagcggtaagcagcggaggagcaccaggagcaaacaaaacacacccccaacaaaaaacccacagaaaggaaacacatatagggaacc

SEQ ID NO: 506691 - DNA, 409 bp, Homo sapiens
  misc_feature (370)..(370): n is a, c, g, or t
  misc_feature (394)..(394): n is a, c, g, or t
ggtccagcagcaggaagaaaccccaggaggaagaaacctcagacagatcgccggcgaggcagcgcgggatcccagcctcaggcgtgcgcggacggtgtgcgggtgagtctccccaaaagtggagcccttgtgatggcgagcacaggtccgcctgcgtgcccgtgggctgctctctcaccggtggctctcagtcgcggagagcagaacccggcagcttcaggggctgcctgcgggagggtgttccctgctgtacgtgtgtgttcgtcatgggtgtgtgtgtgtgtgttggggggggtgcgtctgtgtgtgtgtctgtgtgtgtgcgcgcgcagtgcctgtctgtgtgccgacttctgtctctctctcacgnctctctctctctctctctctctgnctcccttctcgctct

SEQ ID NO: 506692 - DNA, 842 bp, Homo sapiens
gcgagcagcggcggcggcgcggagagacgcagcggaggttttcctggtttcggaccccagcggccggatggtgaaatcctccctgcagcggatcctcaatagccactgcttcgccagagagaaggaaggggataaacccagcgccaccatccacgccagccgcaccatgccgctgcctgagcctgcccggcggcagcggcggccgcagcgccgagagggcctccccccacgtgctgtagtaacccgggtccggggcctcggtggtgctcctgatgcccctcacccacccctgaagatcccaggtgggcgagggaagatagccagagggatcccagcctcgcggccgcgccgctgtactcggaccagcggctgagcgtgaccgaggagctgacgccgagcggccagacgcgggtcctgcacgtgcgctcgcggctctcggacgcccggcaggtcagctggagggccgtgctgagcgccaaccgcctgtacgtggagctgccggccggcgcgctgcccgagggctgcaaggacagcctcgcggtgctgctggagttcgcggaggagcagctgcgcgccgagcacgtcttcatctgcttccccaagaaccgcgaggaccgagccgccctgctccgcaccttcggcttcctgggcttcgagctggtgaggccggggcacccgctggtgcccgcgcggcccgacgcctgcttcctggcctactcgctgcagggctagcgccgcccgcgctgtgcccgccatgaacgcccgcggccccgtgtcgtgtttgtgatactgaagtgtttgctttaattctaaataaaagtttatattttccccgccctcaa

SEQ ID NO: 506693 - DNA, 974 bp, Homo sapiens
  misc_feature (771)..(771): n is a, c, g, or t
  misc_feature (894)..(894): n is a, c, g, or t
  misc_feature (917)..(917): n is a, c, g, or t
gcgagcagcggcggcggcgcggagagacgcagcggaggttttcctggtttcggaccccagcggccggatggtgaaatcctccctgcagcggatcctcaatagccactgcttcgccagagagaaggaaggggataaacccagcgccaccatccacgccagccgcaccatgccgctcctaagcctgcacagccgcggcggcagcagcagtgagagttccagggtctccctccactgctgtagtaacccgggtccggggcctcggtggtgctcctgatgcccctcacccacccctgaagatcccaggtgggcgagggaatagtcagagggatcacaatctttcagctaacttattctactccgatgatcggctgaatgtaacagaggaactaacggtccaacgacaagacgaggattctcaacgtccagtccaggctcacagacgccaaacgcattaactggcgaacagtgctgagtggcggcagcctctacatcgagatcccgggcggcgcgctgcccgaggggagcaaggacagctttgcagttctcctggagttcgctgaggagcagctgcgagccgaccatgtcttcatttgcttccacaagaaccgcgaggacagagccgccttgctccgaaccttcagctttttgggctttgagattgtgagaccggggcatccccttgtccccaagagacccgacgcttgcttcatggcctacacgttcgagagagagtctttcgggagaggaggaggagtagggccccctcggggntgggcatccggcccctggggcccccccttgtcaaccgggtgggtaggaaccgtaaactcgctcatctcgcctgggtttgtccgcatgttgtaatcgtgcaaataaacgctccctccgaattancggggtatttcttgaagtttaanattgggtttgtgaaactgaaggatttgctttaattttaaataaaaatttatatttta

SEQ ID NO: 506694 - DNA, 748 bp, Homo sapiens
gatgtgtgttgccgcccagtgttggtgtcgacgcggcgtcgcaatctgtgagggtgtggcaaggtgttgtgaggcttcgcacaaggttccccttaaggggctactttctgtggggagcccccgcagtgtcgtgtagggtcccccaagggggggcagccccctgctgtttctgggggccgcacgtttattatagatgatgtttgggcacaaggggcgtttctcccgcgtgtgtttcgtgctgcgggttggggttgccgtctgtgtgcaggccacccggcttggggtgtcaacagtgattgccccgctgtgagaaatatgtgtagagtagccgctcttgttccacgtggctctccccgaacttatgagaattgtctcccgcgaatgatcttctcggcggacacagcaacacgtctacggcctttggaatcggtgttgcgagtcggctccagtgtctagcagtaacgaccccgtgtagtatgccccaaagattttcaccggagagacgcctacttgtatgggggtagtagcgtgcacgcacgcgttgtgagcctgctatgcgacttcttcttacggtttttggcggaactgttcattgccttccaccggcgattggtgcggcatcaccacggtccacacgggagtacataggtagtcgcataccgtgtacacgactgccacccgcggctttgtgtataaagaaggattgtactttgtctgtgttcctgtcgttctaataagtagtacgaga

SEQ ID NO: 506695 - DNA, 799 bp, Homo sapiens
cctagttcggtggaaatcagccctgtagccatgagtttcttgcctggggctagccctagagtactggagcagtgctgtgacttttctgtgttccccgccccgccagtgtgtgctggggcctactagtgcctccgtgtgcatccccgtgtctcaatgtatgtgcctcatcttgcctgtgcaatggtgctgccctgaagacgctgtgtgaggctgccatgtctgctgtgttgcttactgccagcagctgatgagagctgagcctgtgatgatgtgctgagccctgatgcctgtgatggaagcagtgatggtgctggttggctcctacatcttgggccctgctttagtggggcttgttctgcttctctccctgctgcccaatggtgtcctggccttgcttgcctcctgccccctcagatgcttggcgccatgcctttccccctgccgcttgttgccttcccgatgccttctgttcccggtcgattacaggttcagactcgtcacgactcaagtgttcacctgattacgctagtccgatcatctagggaccaatccatccctgcgcgaccgatcaagtgcgtttgctaacccagtcctcttatcttgcgtgactgggtattttcggttcttggaggggttccgaatctcttgagttgttctctaccattgtgcccgtccagacgtacggcctgtcccaatctcctgccctgccttgcgttagtcaggatggaagtagctacgcatgtccacatgtcggagggtatcaatccgatatgttaaacggagttgtgtggatgcacca

SEQ ID NO: 506696 - DNA, 1137 bp, Homo sapiens
  misc_feature (771)..(771): n is a, c, g, or t
  misc_feature (894)..(894): n is a, c, g, or t
  misc_feature (917)..(917): n is a, c, g, or t
  misc_feature (1016)..(1016): n is a, c, g, or t
gcgagcagcggcggcggcgcggagagacgcagcggaggttttcctggtttcggaccccagcggccggatggtgaaatcctccctgcagcggatcctcaatagccactgcttcgccagagagaaggaaggggataaacccagcgccaccatccacgccagccgcaccatgccgctcctaagcctgcacagccgcggcggcagcagcagtgagagttccagggtctccctccactgctgtagtaacccgggtccggggcctcggtggtgctcctgatgcccctcacccacccctgaagatcccaggtgggcgagggaatagtcagagggatcacaatctttcagctaacttattctactccgatgatcggctgaatgtaacagaggaactaacggtccaacgacaagacgaggattctcaacgtccagtccaggctcacagacgccaaacgcattaactggcgaacagtgctgagtggcggcagcctctacatcgagatcccgggcggcgcgctgcccgaggggagcaaggacagctttgcagttctcctggagttcgctgaggagcagctgcgagccgaccatgtcttcatttgcttccacaagaaccgcgaggacagagccgccttgctccgaaccttcagctttttgggctttgagattgtgagaccggggcatccccttgtccccaagagacccgacgcttgcttcatggcctacacgttcgagagagagtctttcgggagaggaggaggagtagggccccctcggggntgggcatccggcccctggggcccccccttgtcaaccgggtgggtaggaaccgtaaactcgctcatctcgcctgggtttgtccgcatgttgtaatcgtgcaaataaacgctccctccgaattancggggtatttcttgaagtttaanattgggtttgtgaaactgaaggatttgctttaattttaaataaaaatttatattttacttttttattgctggtttaaaatgattcagattatccttggncttttaggagaagttttttttttggggttttttggaaaccgttttagtttttttacttggaaaaatgaggtttttatccccccccttgctttcccaaagcccataaagtgttttcccccca

SEQ ID NO: 506697 - DNA, 501 bp, Homo sapiens
caaaacaggcatacttacatatttcaagaaggcttgaatttgggaggaggctccgttgcatgcacccagaaagtgacctcaatgacactaaccatgatcatactccagaaccaaagattatctgttaaagggactcatttctaggggtctccatccttcccaggaggctctaagaggggagtagaggcagagaagtgggagcttccggctccttctgcacagacgtcaccctcatccacagcagctccaaagtgagaacagaccgctgtgaacccagggtgatccagggggtcaagaaccctctgatttctgctcccatcttgagctggcaccagcccagccctggtcgagcttcaactttgctaatgagctgtgagttaccagccccacctctggaccaagaaactaagggagtgaatggggaagggttcccaagagcctccgccctgggtaataagcccgtatctgggtcacgaggctggcttgctgctctagccattg

SEQ ID NO: 506698 - DNA, 1030 bp, Homo sapiens
  misc_feature (25)..(25): n is a, c, g, or t
  misc_feature (151)..(151): n is a, c, g, or t
  misc_feature (162)..(162): n is a, c, g, or t
  misc_feature (171)..(171): n is a, c, g, or t
  misc_feature (204)..(204): n is a, c, g, or t
  misc_feature (208)..(208): n is a, c, g, or t
  misc_feature (213)..(213): n is a, c, g, or t
  misc_feature (232)..(232): n is a, c, g, or t
  misc_feature (250)..(250): n is a, c, g, or t
  misc_feature (253)..(253): n is a, c, g, or t
  misc_feature (255)..(255): n is a, c, g, or t
  misc_feature (263)..(263): n is a, c, g, or t
  misc_feature (265)..(265): n is a, c, g, or t
  misc_feature (277)..(277): n is a, c, g, or t
  misc_feature (827)..(827): n is a, c, g, or t
  misc_feature (950)..(950): n is a, c, g, or t
  misc_feature (973)..(973): n is a, c, g, or t
atacaaaaactttctaaaaaaaacnaccctcctacccctccccaattccccccatccccaccacccccccccccccccacacacccaccccaccttttcctcctttcccaccccaccccccccatcctcaaatcctccctccaccccatcntcaataccaanctcttcccnacacacaaccaaccccataaacccacccccacnatcnacccnacccccaccatccccctcntaaccctcaacacccccnccncnaccacaantnacacttccaccntctccctcaactgctgtagtaacccgggtccggggcctcggtggtgctcctgatgcccctcacccacccctgaagatcccaggtgggcgagggaatagtcagagggatcacaatctttcagctaacttattctactccgatgatcggctgaatgtaacagaggaactaacggtccaacgacaagacgaggattctcaacgtccagtccaggctcacagacgccaaacgcattaactggcgaacagtgctgagtggcggcagcctctacatcgagatcccgggcggcgcgctgcccgaggggagcaaggacagctttgcagttctcctggagttcgctgaggagcagctgcgagccgaccatgtcttcatttgcttccacaagaaccgcgaggacagagccgccttgctccgaaccttcagctttttgggctttgagattgtgagaccggggcatccccttgtccccaagagacccgacgcttgcttcatggcctacacgttcgagagagagtctttcgggagaggaggaggagtagggccccctcggggntgggcatccggcccctggggcccccccttgtcaaccgggtgggtaggaaccgtaaactcgctcatctcgcctgggtttgtccgcatgttgtaatcgtgcaaataaacgctccctccgaattancggggtatttcttgaagtttaanattgggtttgtgaaactgaaggatttgctttaattttaaataaaaatttatatttta

SEQ ID NO: 506699 - DNA, 952 bp, Homo sapiens
tcagagaaataagagctaagtagtattcatgctcatactagtagcttctgccttatttgtccccacaaattctcccgcaaattgtcggcgcaaactgtggataaagccctccttacttggtcccccccttttttactccccctttgtcttctcaaatcattaccgtgacacgtggtcccccgcacagccttcttttgcttgcacggcaaccaccattctacctgcgcaacatagtacccacactgtagacatccgtggcaacggacacatgttcctaagtttcaacccgaattaattattgccacatcatctgaaacaaaaaaccggggaaccacaatattgttaagaaattacgtaccaaaaaagatttcgctttcccccccccttttcaaatttccaagggcagtccacaaaaggttgaagtttgcctcatcccttgtgactttatccatcacacgtctccaattttaaccaggtgaaccaccaaagtgagaaatcactatcccctttcggattggcacaaacacccaccccacgttaaccgtctctaatacacgacaaaaaaataaaacttttctccttctagcccccctttcttaaaaacacatcatacaatgagctctcaacaaatgcatctggtggcatataaaaacccacacattggtccccccaccccttcggtaacaatatctgaaaaataaattactgttgcccaacatttgccttaaaaatgttttttcttgccctcgttttatcaccccactaggactgtattctaccttttaacatagctctatactctaaaaaagccttggtagttatgatagaccatgaagtaacttcgaacaggtattccattcttctctgcctttccattataaaagggaaacaatgtttcttgactcttaaaggtttattccccccacatgacaaaaaaaacggaacataaaga

SEQ ID NO: 506700 - DNA, 135 bp, Homo sapiens
tgactatacaatcagctcgtacccacccaacaatgactaatccaactaacccaaaacaaatgataaccatacacaacactaaacggacgaacctgatctcttatactattatccttaatcatttttatttgccac

SEQ ID NO: 506701 - DNA, 834 bp, Homo sapiens
gccccccccatggggaccacctgggcgttctccctgctccagggggattattcccttggccctctcctccgtccctcattttgcccccgcgtatcgcccctggttttggagtccccacccccgccgtccccacttgccaagcccagatttgcttgggctgttaagggaagaggttggtctccccgcttctctggtcagaagacctgggcagatgcgcgccctcaattcttttggaatcttggtgatgctccgccccttgttgatatgggtcccgggccagcccccacaggtgtgcttgaggagctctctcacgagcagatccacccccttggggtcgcctttgcccggttcggtgaataatgaggagcacgaccacgcttctcgcgctgggggggtcacatccaaagcaccctggaccgcacgagaaggctgcctggagagctgggccagggtcaccccacagtctgtccccgcaaaggctcacgaaaggcttaatggataattatccctctatacctcgccccccccacctctcttaatccacatggtgggagggaccggttctcacgagaactcgtttgtttccaaattggcccacttaagtgttagtgagtataaaggaggctcggctttaatgataacccacagcactccgtgaaacccctcacgagaaggagaaaggaggaatgttttcgtggagccacccttgggttttttttttgcgggtggcccttttaagattattagatttttaaaaccgtaccttttaatgggaaccacttggccccaaatttgtccccggaatttgagaccccctttaaaaagtttaatgga

SEQ ID NO: 506702 - DNA, 484 bp, Homo sapiens
  misc_feature (400)..(400): n is a, c, g, or t
  misc_feature (416)..(416): n is a, c, g, or t
caggtgcctcaggcccctctcccagcccactcccaagctgaactagcacgtgttcatttctaccgcgggttgaaccgcagggatccctggcttcaagtcaggcaccaaacagaaggtaggaggcatgaggggttctgtcacatgtctcttcattttcttattgattcttagccttgacagttggagaaggaaaaagcaaggagaaagtgctgagcaggagtggagagtgaagagcaggacctcgtgctgggtttgaaaaagtgcctgagacccatcttagccgcccctacctgagctttagcagcctaggagctattgcaccataaaacactgcaacctgaggctgcattaacagaagcaccacgtccaggtccagggagaatccagcctcacctgcttntcctggccagctcaangaaggacattgacaaatcaggttatgttcagttacctgtgacaaccacagaatgtaagaaatgttaca

SEQ ID NO: 506703 - DNA, 142 bp, Homo sapiens
  misc_feature (38)..(38): n is a, c, g, or t
gtagatttaaatcacatagaagaaatatatgtatatanatattaggagcaatacattttcacagttaatgttaataaatttcagaaacctcttataagtttccagatatattaaacattccaaatgtttttttctacatgta

SEQ ID NO: 506704 - DNA, 215 bp, Homo sapiens
  misc_feature (154)..(154): n is a, c, g, or t
cgattatagaggatcccccctcacaagaccctgactacaacacaataaagttagaaatcatattacgaaatatatatctagcgagaattctgtatgatttgaaaattttaaatattttcccagaaactattaaactacattttaattgtggatnaatctcaatacaatcttaatctgaaataatttaatcacagaagcctggcagaagcaggaag

SEQ ID NO: 506705 - DNA, 520 bp, Homo sapiens
aacaaatacacatataacaatgtccggtggtaaaggtggtaaagcaggatctgctgaaaaggcttctcaatctcgttctgctaaggcaggtttgactttcccagttggtagagtccaccgtttgctcagaaagggtaactacgctcaaagaatcggttctggtgctccagtttacttgactgctgtcttggagtacttggctgctgaaatcttggagttggctggtaacgctgctcgtgacaacaagaagacccgtatcatcccaagacacttgcaatttggccatcagaaacgatgaggaattgaacaagttgttgggtcacgtcaccatcgctcaaggtggtgtcttgccaaacattcaccaaaacttgttgccaaagaagtcctctaaggctaaggcttcccaagagttgtaaacagtgggtgtttgacatttctattacaaagggttttattctgttatttgtacattaataattcggggttttaggtggataactaaagttttttatgattttcg

SEQ ID NO: 506706 - DNA, 130 bp, Homo sapiens
gtacatcatcgccatcatcatcactatcaccatcatcaccatcaccctccttaatctctacttctagctacgcttaatctactccacctcatcatgactatcaccatcatcaccatcatcaccatcaggt

SEQ ID NO: 506707 - DNA, 392 bp, Homo sapiens
  misc_feature (122)..(122): n is a, c, g, or t
  misc_feature (165)..(165): n is a, c, g, or t
  misc_feature (175)..(175): n is a, c, g, or t
  misc_feature (193)..(193): n is a, c, g, or t
  misc_feature (196)..(198): n is a, c, g, or t
  misc_feature (210)..(210): n is a, c, g, or t
aaaattggatctcgtatattaccgtttaatttaaaattaaactgtgagtatggcttgagtcttttcgaacaaactagaagagatttaagacatacatcatgaaaaaaattaacagtgtaaanaaacaatgtagaaacacaggttgttttggacacctttagacanaagtaaaaanaccactccctacccccanttnnncccctctgaacnagattaatacgtatatgtaaactgatacatttccatcaacatctgatatacatatttattgatctattgtgaattataagatttaatatgattccttgtcaccggactcggtactgatcaaaacaccccgacgaccgagaatattgtctcgactggataacctaatttggactctgacttta

SEQ ID NO: 506708 - DNA, 283 bp, Homo sapiens
cggcctagaggatccgggaaaatagccgacggaaatactgaagaaactcttctgtgacatgattgacattctacattaagtttgagatgcgcttgtgtctataattgtgcaccattctatcttaatatgattccatggtcaatgtatatcaagatttatttatacactgctgacaaacgcattaatggttatgtctgtcctatctcatgtcctatcacaacatgagagagactttagatctattgctgcatcacagggtatgtgcattttgaactatatttgg

SEQ ID NO: 506709 - DNA, 129 bp, Homo sapiens
aggctcagattaacgatattatggaggtcagcacggtagctcacgtatcgacgtgaacttgtacagggagtgcatgcaccgcagtggtgaatacacgtcgaccaggctccatgtttgcgataattgggt

SEQ ID NO: 506710 - DNA, 774 bp, Homo sapiens
gtatgggcttagacaaatgtatgatgatatctacaattatagaatcatacagaatagtttcactgccctaaaacttctctatgcttcacctgttcatccctttcttccctaatcccctggcaaccactttaaaaaaaaaattaggttcagggggtacatgtgcaggtaaactcgtgacaagggggttggttatacagattatttagtgacccaggtactaagcctagtacccaatagttacttttctgggtcctgtcccttttcccaccctccaccctcaggtaggcccccagtatgttattccttggtgtccatgttatttcactcccacttgtgagaacatgggaatatttggtttcctgttcctatgtatagttgttaaggataatggcctccagccccatccatgttcctgcaaagggacatgatctttcttgtggcaaccactttttactgtcgccatagttcttccttttctagaatgtcatatggaatcatatagtatgtagccttttcagactggcttcttttcactttaattaatatgcaattaagggttcctcccatgtcatttcatggcttaatagtgcatttactttttagcacttgaataattacctccatggtctagatgaataggttttatccattccaccttattgaagacttcttgggggttcccaagtttgggcattatgaataaagttgggtgtaaccttcttggggcaggttcctatggcctgtttattcctttgaatataatcaccagggtcc

SEQ ID NO: 506711 - DNA, 586 bp, Homo sapiens
agttcctttgtctatatccctgtagatattgtgcatattgtattatgctgattactacagatttataagtttgaaatgaggcagtctaagtcctcaaagttagttctttctcaaaattggtttggctatttctaggtcttttgcattaccacgtagattttaggattggcttgttaatttctaaaaaaaagtctgctgggatttggataggaattgtgtggaatttatagatcattttggggagaactgccctcttgacaacactgaatcttctaaaccataaatatgtaaatgtctatttgtttagatctttaattttctcagcaatttttgtacttttcattgtacaagtcttatacttattttgttaaatttatacccaactattttattctttttgatgctactgtaaatggaattctttcttaatttaatttttaggttgttcactctcagtatatagaaatacaatagatttttaaatgctgatcttgcatcctgtgacccttctaaacatgttggttagtttaagtagctttggtgtgtgtgtgtgtgtgtgtgtgtgtgtgtgtgtgtgtgtgtgtgt

SEQ ID NO: 506712 - DNA, 270 bp, Homo sapiens
tatagacaggttgctggtaatgatatctgggttttcatttctctggaaataatttttttttataacattgaagttggaagaatatttggctggatattaaaaagtttaggttagctgctatttccctccaacagtttcaagatggcctccactatttcagtggtgaagtctgccatcagtcttatggtggactctttggaaagtcatgtcatatatgtctctcttttttttttaaagggacacgggaattaaggggggtcccgagctcga

SEQ ID NO: 506713 - DNA, 408 bp, Homo sapiens
gcaaacggtgctggagatctgcgaggatttctgcatgagcttcacgcccgatgtgcgggaggtggtagagtttgccatacacatcccgagcttccgtgaccttcctcagcatgaccaaatcaccctgcttaaggctggcaccttcgaggtgctgatggcgctcttggcttcattgctcaacgtgaaggaccatacagtgatgttcctaagccgcaccacctacagcctgcaggagcttggtgccatgggcatgggagacctgctcattgccatgttcgactccagtgagatgctcaactccctgtcgcttaccgaggaggagctgggcctcttcaccgctgaggtgcttgtctttgcacaccgctcgtgcatggagaattccgcttctgtggagcagctccatgacac

SEQ ID NO: 506714 - DNA, 835 bp, Homo sapiens
ttttcttttttctcacgagcgcgccatgtgttggtacagcggatcggccatatggccgggcgagtgtattactaacacggggtacgggggcgccagtcctacacttactaataatttttacattttcactaccacaacttaccaaatacataaaaaaatccaccccttacaacagcggcttgaaccctataaaccccgcccgcgtccctttatccataaaattcatctttgactctataggggggggattattagatctagaaattgccctacttatacacataccataagccttacaaacaactaacctgccactaataaaaatggcatccctcttattaaccataatcctagccctaagtctgtcctatgagtagctacaaaaaggataaaactgacccaaaaaaataaaatgtaagggaccaagatctcgtgtgcggccgcccaaggcccactccactataaaactcgagcaatctaatctaatgagaccgcaattgttgcttacttgcccaattccgacatagagggagtggtattaaagtgaacaactcctggttttacaacgtagggcctggaaaaaccatggcagttcccatcttaatttctttagaaaatatcgccttttctacagcggaggtaatattaaaaaggcccaaaagatcgcccttaaataagtaaggaagcctaaatgccaatggaaattataacccaaaattttgtgaaaaaacaagtcaaatcttagaaaagagcctatttttaaccattgggcgaaacccctaaatccctttaaaccaaaagaataaaccggcaggtgagggttttcctttgcccc

SEQ ID NO: 506715 - DNA, 1471 bp, Homo sapiens
tacatatatactttaataatttcaatgatttcttggtatctaaccaattaaggtaatattttctttaacacagaaaggctcccaaaataaagacaataatcaccacagaaatcacagctcaataggtttatttcaatttcacttcacttaagacacataattcaggcctttcccatttaatcaaacaaaacacaaaaaaaaaaaaaaaaaaaaaaaaaaaacaaaaaaaaaaaagggggggaggagaaaaaaagtctccccgagggggcccaaaaagagagaaaacgagatttgggtgaacaagggggcacccaaagagacgagcgaggccgaatataaagaagcagagagagacggagggcgacacagtacaataaaaaagagagagaggaggcgaggaaaacagagggcgacaagcgggagaaaaagagaagacgaggagcgcccctagcatagcgagggagagggaggaaaaaaacagagagggacacaaaaacaacacacaacagagaaaaataaaaaaagagccacaagggagagaaaaaaaacacacacgtcgacaggcgagacaaaacagacgggggcacaacacaaccacacgcaagacaaacaacgcacagagaggagagagaaacaaaaacaaaataatagagaacaaaaagcaagcaggcacagaagtacaaaagcacaagaagaaacatatacgaaaaacaccggagggcgcacagggagaaaacaccaaagcgcacgaacaacaagccagcaaacacaacagacacagacacgaaaaaacccagcacgacgcgaccgacagcacaacaagcgaaggcaaacaagaaagaggaaaaacaagagcggaagcaagaagaaagaggaccactaccagagccggacaacagagagacgggagcggacagaaaagggcgaagtgacaagagaaacgaagacagacgaggacgcggaaagaagcgaacacaacaagcgaaacagacgaacaagcgaggggtgagggaagagcgggacacagcacgaaaccagcacagacacaaaactaccagggcaggagggagaggagacacaagaggaaaaacctcaacacagaagagggagaaaaaagggaggaaagggagagatagagaaatagaggctgatgggaggaagaaatggaagagagaacagagggatacagcgtaagagcgagaagcagaagtaaggtggagggaaaacgaggagctggggaggcaggagagcggcaaacaagatgagacaagaacgacgaggagagaagagaaagaggcaggcaggacgagaggacagaaggacagaacaataagaagaggcgaaggagataagatgagaagatgatagctagggagatggacgagagagagaacgaggcatagcagatagagcagagtacaggacggagaggacgacgagaagagcagcgtgacaagacgaagtcgtcgtg

SEQ ID NO: 506716 - DNA, 411 bp, Homo sapiens
gacgaggtaaagcaaggacaactggaatgaggatatctgggaaaagccaaaggagctgggcaagggcctctgtgctgggcaggaccagaatggaatgaactagaatggacaccactggcctttaggccattaggccgacctgcccccctcccttttttttctgagttggagtcttgctctgtcacccaggctgtcacccaggctggagtgcagtggcgccatctcagcccaccgcaaccaccgcatccagggttcaaacgattctcccgcctcagccccctgagtagctgggaccacaggcatccgccaccacgcccagataatttcctgtacttccagtagagacggggtctcaccatgctgtccaggccggtcctgaactcctggcctcaagtgatctacccacaacca

SEQ ID NO: 506717 - DNA, 539 bp, Homo sapiens
tctcttcgtttcaacgtcacttctcgtgatgaacaagatttcagaaatggccttgcgcattagatgccaaatagtagatccagaagtcttaaggatggtcttctggagaaatgaattcagaagaaaattcatcaggtgcttcttttaaaaactagaactgtggctatatggaatgtgtatcccttaagtgaaatgatggtcaatggtcatcagtgtgtgaagtactatattgtacaagtaataaatgtatggtggagatatatggaccactgaggagcttataaaaacaagtcatcttaggttcacaatgtgctacaagaagaaagtgtgtggataacctaggaaattatgtgtaaggtaactgttaatttcagtacttagcaataagagtcctttaatcacagatgtatctggctgcattaggggtacaggttgaaatagttctgttggttgtcctaagaaatactgggaaaagaatctctgcatgtaagtttttctggttgaaactaagagggtttatcctgttccatatacttttt

SEQ ID NO: 506718 - DNA, 175 bp, Homo sapiens
cgggtcgacttctgacggccccccctcattactcagcaaggctgaatggtcaccccgtgctcacagtttgcttctcttcttcaacagtgcctcaccctccctctaggatgaaagtgcttctgcccttccacgaactcctcctccatttccttttgggattggtcaccatccttct

SEQ ID NO: 506719 - DNA, 258 bp, Homo sapiens
tggtggccagcagtgtcacgggtgtggtggacctggcccggaggggccggcgctggagcgtggagctgaagcgctccgtgagccatgctggggatgttggtctggaaaaattataggaactggtggatcactttctggccatgacggaagaagagctcggtgaggacgacacccttaaccctaacccctgagtcctgccccgttcccattccctgtggtacagatcagaaaggtctgagactcacccaaagtcacaca

SEQ ID NO: 506720 - DNA, 1142 bp, Homo sapiens
ttctctgtgtggactttgtcgtctgtgtcttgtcggctttgttctcgtgtttggggcactctctctctgtgcgccgtgtgtcgatcttggttcctcctgttgttcttttggtgtcattctctgcatcgggcactggttgactccttttactgattttccgtctcaggtttcatgggtactgacatgctgctattgttccgcagggttcctgtcattctggcctttgtttaatttgattgcacaaagagccaatctctaaacttagtccttgtctattcgcaattctctcagggtgcccagtattttgactaagttatccggccttgaaagctacttgagatgtgtactgctattctaaacacgtgatctagtgtctttcatctctggcataagattatatcacttaatgttaagtgtcatgaggcactaaaagccttaaatgtggcttatctataggatctgttttctcatcgaggtctcgggtatcctttcaaagatagtgagaagcagacacttgctccttgtgcagctctggtacctcctgcccactgctgtcacttcaagccactggcaatgcttctgtcctcgtgtcttggaggaaaatcacctggggggaggggacttcttgtggtaagagcaagtgcaggtatgaaatgcgaagattgccccagctaataagtggacaagctccgtctttagtgagatagaatacttcctgagaaatccttgacaagtatctctccaattttaccacttatgaaaactattcatataatacagaaaacagttgtagactgccttctccttattgagggaaaaagcggtgctttttacttgtataacagcagcgtcttatgtattttgatactaccagtggtgtcgaaacttccgatgctctataggcctcgagtacgagttcctgcatatcatgccttgattttggatgcttcacgtatgtcttgtgaagagaggtttactgggacagactctctttttgccctcgggaattatagcaaaatatcatgtttgggtgactgtgtaaagctcagtgtgtaagaacatctcttcttgtctagttcttctttctgctctttagtgaagacaataacaccccatagtgatagttacgcgttggggggggt

SEQ ID NO: 506721 - DNA, 211 bp, Homo sapiens
aaaaaaggggcccccttttggcccaaccccccccaaaagtaattttctgggaggcaaaaaaagggattcccaaaaagggttaggcctttttttttttaagggaaaaaaaaactttttttttttttttccggggggggggggggaagggaaaaagttcatttcccctgggggaaaaaattcccggaaaagaaaaaaccccacttttttttta

SEQ ID NO: 506722 - DNA, 814 bp, Homo sapiens
  misc_feature (717)..(717): n is a, c, g, or t
ctggttccgcgtgcccgttgtcgttaccgtgccacgctagtgttccaccgcgctccatgtgtgtttatccccccctcttcttgggcgctggttgccttcgagccagatgggcgcgccgccatgttctgttgtgtgcgcccggcccccaaaggtttgttgttgcacaggctattagtggtgggttcggcacttgccgggtttgtggtacatgtcgccggggtgtttgtcccctctctggccccgcaggggtttctcccacagttgccttacgcctagttgggtcgagccgcctacggcggtcgtggtgatcccgtccgtgcgcgtgaccttgcgtctgtgttgcctgcggagtcccacggcattattcgccattggcctcgaccaaagtagcggttttcccccggttgcgccccaagttgagatgcccaatcagtgttacccttcaggaggtgtagtaccaccccatcgaggcagggcatggatatatatccccgggtttcaacggtggagttcaggccccgcgtgattgcgatcataattcgggagaccagtgactcacgccgaaccactgcgcggcaatattacgacccggcgctgcttgggtagagattcatctgaaggctacatgaggacaagatccaccgtggattctttctgcgtttgaaaagcttgttgtccccagccaacaggtgggatgaagcacctcagtgatgcccnacccttgtgggggcacccactaaagtagggaggactttagaccccaaggctgggaacccccgagccaagggggaaacccccttttaaaaacaagaca

SEQ ID NO: 506723 - DNA, 407 bp, Homo sapiens
catcatatagtgatgagcctaatacataacggccctattgtggtagataggacccattaggtatttctgagaatacaccagtttgtatacctacaaaaatcttcgtggcagtacacaggttggatggagggaataaaaaaaaatggagagagtctgcttgattataactaattcattcaacaatatttgtggccaccactgtaaatgcactcagtaggaacgcaaaaacttgagaagggtcatcaagtcagctctgatttatataaatattaagaccctaaaatctcaacactttgaataaacattgtatcatttgatgcttctttatatctattctttagaaggctgaggaagaaaatgtggaaaaatcaggagagatagaggacagagatattggaaagagtcag

SEQ ID NO: 506724 - DNA, 286 bp, Homo sapiens
ctcagcccttgaagaattgcagcaatacgaacttttgctagaaactatagaaaaaccaacaaccttcaaataaaaggaaagaaaggaaccagcctatgagagaaactaattaaaactatgaatgcaacgacatttttgagtctgtacctgattgtgagctttaaaaagtcaaatgctttttaaaatgccaggagttttaagttggttaccaaatgccattcttatgttgaagtacagatacacacacacacacacacacacaaatatgtaattgaaacaagtttaa

SEQ ID NO: 506725 - DNA, 136 bp, Homo sapiens
ggatagttgaattgccctgtccacaagtcttaactccatggcaccccgtgcacctgtaggcagctctctgctataagaaaagcagacgcagcagctgggacccctcccaacctcaaatgcctgcgcattaataccg

SEQ ID NO: 506726 - DNA, 93 bp, Homo sapiens
gccctggaggtctgccaggacagtggcaccgtgttcccagcaggccgtggcaacgtggtgacaggagaccgggaccatctgacccgctgcctg

SEQ ID NO: 506727 - DNA, 646 bp, Homo sapiens
cgagaaaggactattgagtgtgcccagtggggaaacttctccaccatcctttgtcaccttgcacagcatagaaagattcatacctgagtgagccttatggaagtggtctttgtgagaaaatcttcagccgagtcaaacttcatgcagcagaatccccataccagaaaaattacctacatgtactgctaatgtggaaaagccttcagaagctactctgtttctgaccagcccaggaacctttgcagggccatctcacccatgcagcataaggcagaagccatagtcactttccatcttgcctggatccaaaaatttgcagcagtcctgtcctcatgcatggggaaaacagtaccctgagccttccttcctgtgtcctctagggattcaggactgtgctcagctcaatggaatggtttaattcccattgcctctgagagggttaggcagtgaactgaaccgatgctggttgaggggccttgagggaaatctaatttgagctcaggaagatgcacattccttgtggatgtggtcaagtctgtgtttaacccctaagatgtgtccattgaggccacaaatcaccctccactggaatcacctaccttgcctgcactaactggtgataataaagaccttattgatcaggtca

SEQ ID NO: 506728 - DNA, 101 bp, Homo sapiens
acaaaagaaaaggaaaacaaaaagattattccacccccatacaagatgcttacttgagaacctgatggataacgtgtttggctggcgtctcctattatgaa

SEQ ID NO: 506729 - DNA, 260 bp, Homo sapiens
  misc_feature (18)..(18): n is a, c, g, or t
  misc_feature (24)..(24): n is a, c, g, or t
  misc_feature (54)..(54): n is a, c, g, or t
  misc_feature (145)..(145): n is a, c, g, or t
  misc_feature (178)..(178): n is a, c, g, or t
  misc_feature (217)..(217): n is a, c, g, or t
  misc_feature (223)..(223): n is a, c, g, or t
  misc_feature (256)..(256): n is a, c, g, or t
atgtacgcctacgccctncaggtnttccccagcaagaagagtgtgtggctgcgngccggtaacttgcgagaagaaccatggcactcgggagtccctggaagcactcctgcagagggctgtggccacctgccccaaagcagaggtnctgtggctcatgggcgccaagtccaagtggctngcaggggatgtgcctgcagcaaggagcatcctggccctngcttancaggcaacccccaacagtgaggagatctggctngcag

SEQ ID NO: 506730 - DNA, 233 bp, Homo sapiens
  misc_feature (187)..(187): n is a, c, g, or t
aaatcataaggcgatggcgagtgcatgtccggcgcatggggcgggaatcgattgtgtcatccccttgtgtgtcatccccttcgtgtgtcatccccttcgtaggcactggtggtccccggtccgggagtcacatattgatggcgaattagtgcggacaccgatcggcatagcgcactacagccagaantcctggactcaagcgatcctccaggctcagcctcccgagtagctgg

SEQ ID NO: 506731 - DNA, 322 bp, Homo sapiens
gcagcctttgtggaaacttaggctttgactccataaaaaatgcccccgggccgggtgcccacagggcaggcatttattttttcacagatttggaggctgcaagtccaaggtggaggggtgggcggggttgtgttttttgcaactgctccttttggctggcagggggtcccttccagccctgtcctttttggcctttcctttgtgcacctgcacccctggggtctttttgcctttaaatgtcctccttgtttatggaccccagtcagacaggattagggccccccctaagggccatgagttaatttaatcccccctttagtga

SEQ ID NO: 506732 - DNA, 93 bp, Homo sapiens
ggtcaatgctgagtgccgcgctgggccaccattgtccacgtgactgagcttgccaccaagcttagccggctggttgcagatggagtggctgat

SEQ ID NO: 506733 - DNA, 532 bp, Homo sapiens
  misc_feature (68)..(68): n is a, c, g, or t
aaaggtatccagtgttttaactacgaaattcgcaactcccatgaccactcttaacagtacgactgggnaacatattccatatcctactgatgttgctgatacgaacagaaggcaagggagatactgggtagtagagggcagttccccagcaaagcctcaagcctggaaacctacggccctaaatgggaacaggcattcctgtttctgcacccaaacgttgccttttggcctgccacgccccccatcctgtacccatataaactccaaaccccaggctccatgagcagaagagcagagaaatagaagagtggcaaggcaaggaaggagagaagagaagaagcatctgaatatcaagaggagttcagctgggggcagttggagagaagatcagccgcaggctggctgaactccaggtgaagatctcatcttcccactccattccctttcataccgctgagagccacctccatctggaataaaattcccagcgtttaccatcaaaaaaaaaaaacacggcctacttggcctcagc

SEQ ID NO: 506734 - DNA, 274 bp, Homo sapiens
gattattggtaaggtattattttagaaatcttaccatggcctttgcgctgaagtattttcatagctgtttatatctcttccattcatatatttaacatactgtctaatttcaaaaataggtcattaaagctttcatttttaagttcatgaaccaaatatttacttagagtggacggactgattgagaatgttccaatccaaatgaatgcatcacaacttacaatgctgctcattgttgtgagtactatgagattcaaatttttctaacatatgg

SEQ ID NO: 506735 - DNA, 287 bp, Homo sapiens
  misc_feature (12)..(12): n is a, c, g, or t
ctaattgcgttncgttcgatgacgaacgagtgcatagagcagccactgtgatctagtttatgttatgtcacgtgacaggtgtgtgggcagccacgtgaacagtgcatgttcagccacgtattcagtgcacgatagccacgtgataggtgtgtgatcatccacgtgaacagtgcatgctcagtcacgtgatcggggcctgctgagctgcgtgtttactgtctgctcatctgcttgacaattgccagctgagctgcacgattcctgcccgtcatcgaagaaccaattag

SEQ ID NO: 506736 - DNA, 1064 bp, Homo sapiens
  misc_feature (334)..(334): n is a, c, g, or t
  misc_feature (471)..(471): n is a, c, g, or t
  misc_feature (661)..(661): n is a, c, g, or t
  misc_feature (852)..(852): n is a, c, g, or t
  misc_feature (1020)..(1020): n is a, c, g, or t
atctacaagtgtgatctctaagttggtccttacgttatacttaagtactgctactgtcatgaaacgattattacattaggtccggtcatgagtggtctcatgtcctgataatcccaggcagtctaggcgagggcatagcacgtgtccgtgagcgtaaatcgaacctagcagtgctcacgagacgtttcagtacggattcacgacgcctgcgactcgacaactattggttagataaactccttgcttctcaataacgttaaaataactcactatacaatatttacggcgccagggctgtgggtggaccactggcgctctgttcacactcctcagncataactgcggtggacggctgaagagtgaggcgatgaatcaccgttgtaaaacccaacggtggaccacgtatacgtgagctacgttttacgcccacacgtactcgtcactttcacttgctagttccaagactctagngtgagacagagaagcgccgagaacttcagtctcagagatatgaaacagatctaaccacatcaccttaggcgggggacacgtactacaacacatccctgcgagacgcggcgcgctcaggaagcttaaaccgattctatctcgcttatctatctctgtagacaggggtgagtgctcctcataatcgtgtagngcggcacattcaagtgtttcagtgcacagagcgaagtgtaatcataataattaaaaatccgcgcatgcgcgagtaaacccagtgtacccaagacggccccctttctgtggcggtacgtgaatccctgtcctatgttcgagcgggggagggtacctacattgcgtcctaaatctctccacagataccatatntctgacgttggtcatacagtaataacttacataaaactatgaaccgcgagagtcttacaggggttgctaacttctttcgagccctcatgtccggacggacggagaacccctattgcgtataccgaggaatctaattctggagtaaatcgtgttcacccgtgaagtttntgatttacaatatatctaaccagggtttcggaataaatctccct

SEQ ID NO: 506737 - DNA, 229 bp, Homo sapiens
aggcgattttgtctttttctgagatgggggaactacagcgtgtgtgaaatgagctcacccacgagatcacatactctgtgtgcggaaagtgtggacagatgggttgtcacattagatctaccctgaatgtgcatttctggtgcctataatctataccgttcggtgtgagctcgacctcactgtcttgagccatggatgcgacatgttgcaggtgttcagaggttggggc

SEQ ID NO: 506738 - DNA, 405 bp, Homo sapiens
ggcacgcatgtcttcgcgtctttgggtgctgagtgtcggcagtgcatgtgctgaagccaccccttcagtgttgtgaggggcacctgctccccaggcccacagactgcctggtgccgggaccttcggtgttgtgaggggcacctgcttcccaggcccacagacagcctggtgccgggactttgcctggctggaccctcctcgtttcacagataagggggttgccctgatttgcccacagccatattgaatattgaataattcacatgagtgttggatggttgaacaatccatactctttgaccttagacccacatggccttttcagtcctttcctagctttaaaatgaacctttagttcttgagcatacaccagtggaaataggtattctgcagtgaggcgttgtg

SEQ ID NO: 506739 - DNA, 596 bp, Homo sapiens
cttggaacgatgtacgataccctcatagtgaccattaaacctgatcctccaccgcgaaaaaaaaaaaaaaaaaaaaaaaaaaaaaaaaaaaaaaaaaaaaaaaaaaaaaaaaaaaaaaaaaaatgtgtgtggggcggcgcgcgcgcgcgcgcgcccgcggagaaaaatatttttaacacacacacacatgtgtggtggaggagcgggcggcggcgccccacgggagaagagcagaaaaacgcggcgcacacaaggcggtgtgttagtcccgcaggaaagaacacgcgtcgcggcggagcacaaacaaaatagagcgggtgtgagcgtgtgtgctctctctcccacacacaaaaataaaacacagacgcgccgcgcggcgggagacaaacagagagaggagagtgttcttcagcgacaaaaacaacaacccccgcgcaagacggagtagggtcgtcttgatgggagagggagtccactgcccatagagcgcgggatcgtccatccaatccaccagacgaggaggagaataccaccacgcgagagagagacgacgaccctagccaaacaaaatagcaacatctatggccgcacgcgcc

SEQ ID NO: 506740 - DNA, 361 bp, Homo sapiens
ctcatgcctgtaatcctagcactttgggaggctgaggcaggtggatcatctgaggtcaagagtttgagaccagcctgatcaacatggtgaaaccccgtctctactaaaaacataaaaattagccgggcatggtggcagatgcctgtaatcccagctacttgagaggctgaggcaggagaattgcttgaatccaggaggcagaggttgcagtgagccgagactgcaccattgcactccagcccgggtgacagagtgagactctgtccctaattagagacaagattccttgtataacaaatactaatcatttcccaatatggcattctgggattcagataccacaggatttcttttgtttggt

SEQ ID NO: 506741 - DNA, 120 bp, Homo sapiens
  misc_feature (119)..(119): n is a, c, g, or t
gtgctggccggtctacggattccaggcgtgtgtacgcatgcaccggcagcaggcggccagcatcgtcgactgctgtgggggaatccccagcggcgctgcggtagcttccacgcaggtgng

SEQ ID NO: 506742 - DNA, 631 bp, Homo sapiens
tgtttatcgatgccaccagtggcggcagaactgcccatgggccagtggtggcagcagcaggagaggctcttccacttgtggaaagaggagggaagggtgggaaggatttcgtcttgtggtttgggttcaagcttagtagaatagaacaccaaacctggagaaagatgccaatattcaagtacaaggttatagaacaccaagcaaatttaacccaaagaagactacctcaaggcatttaataatcaaacttccaaaggtcaaaaataaaggaacctaaaagcagcaagagaaaagaaacaaatagcacacaatggagctccaacacatctgactgcaggcttttcagtgggaaccttacaggccaggacaatggcatgacatatttaaagcgctgaaagaaaaaacttgtaccctagaatagtatatcatgaaaatacccttcaaacatgaaatagcaagacagactttcccagacaaacaaaagctgagagatttcatcaacaccagacctatcttacaggaaatgccatagtttgcgaatctgaaagaacaggatgagcaataataaatcatctgaaggcacaaaactcactggtaataataagcacacataaaaatagactattataat

SEQ ID NO: 506743 - DNA, 511 bp, Homo sapiens
  misc_feature (495)..(495): n is a, c, g, or t
  misc_feature (497)..(497): n is a, c, g, or t
attcgcggccgcgtcgacaaaacaaccacaaaaatccaccgggcgtggtggcatgcccctgtaatcccagctactcagagggctgagacaggagaatcacatgaaccccggaggcggaggttgcagtgagccaagatcgtgccactgcactccagcccgggcaacagagcaagactaatcatagacagaatgtagaatagtggttgctagggtggtgctggggtgaatgaggagttactgtttaatgggtacagagtttcagttctacaagataaaaagagttcctggagatggatagcagtaatggttgcattcaatatgaaggtacttaacatcactgaacacttaaaaatcttgaagacacaacctggccaacatagtgaagccccatctctacaaaaaaacaaaaattagctgggcatggaagtggatgcctatagtcccagctactcgggaggctgaggcatgagaatcactttgaacctgaaggcagangntgcactgagccaag

SEQ ID NO: 506744 - DNA, 346 bp, Homo sapiens
ccctttttcccttttggggggcccccccggggggggggggtttttttaaaggtttttccccctttttgggggggggaattttttttttttccgggggggcccttttttttttttttcccaaaaaaaggggtttgtttttaattacccccaggccctttttttgaaaaaaatttttttttttttcttttttaaaaaccccccgggccccccctggggggggtttttttttttttcccggggcaaacccctttttttccctttgtttttttttcccggggggccgggttttttttttttttttttttcggcggggtttacccccgggcccttaaaaaattgcccccca

SEQ ID NO: 506745 - DNA, 2248 bp, Homo sapiens
  misc_feature (612)..(612): n is a, c, g, or t
  misc_feature (1015)..(1015): n is a, c, g, or t
aatattggtgatcatgtttgttgttatgtactaatttgttcaagtttgtgctgtcttgtattgagatgtctatgttgtgtgtgtagtagagtgtgtgtttgattgatggatgttatgtgataaaggtgtggttgtatgtgtatagtgtgttcgatatgtttggtgtattagtagttgttgagttgtattttatgttttgatttggtttacgttgattgatgatagtatttttagttttgattcgtttggtgtgtgtgtgtatgtgggagttgctttctaatgattgttttagtgtttttagtatggtgagtgtgtggtgtgattgttggaatttatgttttatttgattgtgggaggttgttgtatgttgttggggtgagttgtaattgtttataatttgtttgtatgtttgggtagataatgtgaagatttggaggtgtaaagtagggtttgtggttgttgtgaatgtttatgtggatatttatggtgggttattgtcttagttagttgttgtaggtattgatggtgtgtagagagtgtggtgaattgttgttagatagaactgtgtctcttgtttgtgtgtatatgattgatgtgtatatcaatgatcangtactgaagaagattgagtacgtgttgtgtgtgtgatgttgttggtatgactttattgtgtgaggtgtgtgttgttgtattggtgtgatgtgattgtggtgtggttgtttaatgaatgatggtgtttggttgtgtgtgtgtatttagggtggtggtgacgtatctagtgatgatcaatcgactttgggggtttttgtcagtggtggatgactcatgggttggttgttgtggtggttgtcgcctttcttgattgtggtgggtgtgggctctactgtggggctccggtcggtgttgtcttgtgttgtgtggtgttgtttggtgtgttttgtttgtgtgtgatgactgcctcctcgcgagttggctgctcgtcgtgtttgcgatctggtggtgtgctgctcgtccnatcggtgttggtggtgagttgagtgggctctcctcgagtcggggtggtggtgggtaaccacaaagtgtgtgtttggtgtgtgagtttgtcttctcttctgtttgttgtttgtagggggtttccaacaatatgtggttgtgtcgtgacatcatggcctgcgtgttgtatgtgtgtgggtggtggagtaagtagtagtgtatttttgtatctccacctggttcatttatggcacctcataaggtggtgctgctgtgtcttcgagctgtgatgatgttgtggtgtgaagtagtggcatcagggtagtggcatcaccacataataattgttgtatgtagaagtggaatgtcgtccccgtcgacatttgcttagtgggtgttgcatccaactgggtggggcgcgggtgtgtgtcgcctcaatatggcgtgtgggggtgatggtggtctactgcgtgtcgtctgttcgtcatagttcgctacgcatacagctgtgtgtgcgatcatctaatatgggctcctaactaataggggtattcaatcgctgttggttgggtagatgctcaaagtgatcgacggagggggagccgcaagtagagtagtttttgtggggtgatgaatcaacacggtgggtgttgtgttgacgatgattacttcgtgatatatatgtcgttttggggggctacacgattacaacaattcaatgtggcttgaggggcgcgctttagtggtgcgtcagttatggtatgagcagtgttgtggcacttgtgaattatctttgtctcgatgtggagtgtcagaggtcgacgagatagagagattgtgctagtagagtgggtgtcgtcacactaatatgggtcgtcacgagatgacatccacactgtctctcccgtgtagcactccagggtgtgctgtcacagtcttatggcgtagtgcacacacattgtgggctccacacacacagtctgtctcaactacaacacacagtttgtcaaagacacacacaagggtgtctctcacatgtgtgtgcatgtgatgtgcacagtgcgcaccacagattatgatctcacatagtatgtagtgggggtgtctcacgtgtatgtctagtcacacacacagtatcacgtgaacacaccgtcaggggctcacagtgacacaggtgtatatcacatggtgtttgttaactctggttagtctctgttagatttagggaggtatacagtctcccaccaaaataaat

SEQ ID NO: 506746 - DNA, 299 bp, Homo sapiens
gctatagcatcgccgataacgaccttggggtgaggggagaatactggaagctttacttcatgctaaagctgtcgctaattggaaaacctctttccgccccctccaatcctctgttcactctgtgctctcaaagaatagttgggagggacaagtcctgcggtatctatcatagcctttctctttttagggactcctcctcctcatcttttctccctctccccgccctccattccgttcttcccgatacaaactgttgtctcagattccgaccgagggaatgttttcctcctgtttcttga

SEQ ID NO: 506747 - DNA, 368 bp, Homo sapiens
tagctgggattataggcatgtgccaccacacccagttcatttttgtattctttacagtagagaccgggtttcaccatgttggccaggctggtctcaactcttgaccttgtgatccacccacctcggcctcccaaagtgctaggattacaggcgtgagctaccgtgcctggcctgatctgttttaaaaagagatagcctccttgtattaaataaaatcagcctaaccacttgagatgggtaagttcagtgtgtacatttatattcatctacagaaaaactaccgagaattttataaacctgcattgtcaaagaggatattagaaaacgattgggacttatatagtaaaatctgtatttaggaacttaag

SEQ ID NO: 506748 - DNA, 717 bp, Homo sapiens
agcgggttttacccaccccctagacgccgatgggcctagaaagtgtctctgtcgagcaacgtgacgccaggtctctgtaccgaagatggggtttgtaaagtgttaagaataaggcctacgtttaatggagataccaagtgaaatttagaagcacgacgagagggtaaacactgatggatgtctgctcgagaacactgcttgtgtgatacacgataacacgataatacaacacacccaatatacaaggatgcatagtccgccgtgcacgaaatcagagatactcattatagacaagactagctttatttgcccgaataaaaggagggatatcgattagtactagaagcaagacagtaatagcacacgaacatgcgcaaaactactaggtagtgacagggttagtgcctagaccaaaaatctatagctagaaagcataattagtacatggcccttcgctagaatagaacacgcagcacgggctagcatcacataagcgtcataagcgaaaattgaggacacacaatgcatcctaattgaacagagagcctaacagattgggagcggatgaatagtgggttgaactaggacaaatagcacaattattgggaaaaaacgcatgtttggaaacgaagtaaagaaccagagagtgacccttccacacttgctaagtaatggcgaattccgaacgcaacctatgccagtaacacctaacgcata

SEQ ID NO: 506749 - DNA, 98 bp, Homo sapiens
ctgggttcctggaagcaaggattggctccccttctgcctctgtccccctctttctccttcgctgtgctcctcccctcctccctttgggctcccagtcg

SEQ ID NO: 506750 - DNA, 442 bp, Homo sapiens
  misc_feature (67)..(67): n is a, c, g, or t
gacggttggctggcgcgcatagtatccatacgcctgtgaatccgacagagccgccgagcgtctgatncactttagtcaggagaccgataggatttcttgacaaatcctacgcccgacacggacaatagtggccgactgacaggagtccctatgcgtcgtttgtttttttccttgctgatgctctgcgttttgcccgcctgggcagacagccatgaccagttgtacaaggtcgccggctgggcagaccagcgcgcgcattttaatgacgccctcagtgccgcccagcaacgctaccgcaacagcctgccgccggcggtgtatcaagcgctggtggacaacagcaataaacgcttcgcgccgcagtcggtagaccagcgcgccgaagcacagctacccaagaatctggcggacccgaagccggctttggccttcttctaatctc

SEQ ID NO: 506751 - DNA, 329 bp, Homo sapiens
  misc_feature (109)..(109): n is a, c, g, or t
  misc_feature (176)..(176): n is a, c, g, or t
gcccccctaagggctttttgtttgccccagggtgctccatggatttccctgtggcaacaggcatggagagtcagggctgcctttatggcagtaggctttaaatgggtgnctggccacaggccgaaaaaaaggttcagcctttaggtggggttcccaaaaacgccttcaggctggantgaactgctttcccacaaggtttttgtgcaactggattttttttgttgcaaacaagcctggcatttgtttccccttgtttctgagtggccccacatggggcttttaacaggctgtatttggattttggcaataaaagtactttgggtgcttga

SEQ ID NO: 506752 - DNA, 1176 bp, Homo sapiens
gccagaacttcgcccccaacttcaaggagagctgagatgaatgccatcgcggccgacatgtgcaccaacgcccgccgcgtcgtgctgcaagagctggatgcccaatggtcaatggtgctcaatggctgaggatgactgcctacaccaccttcatcatgtgaaacgggcaacgatctgagccgtgacatgatgggtgtaggagcatggcttcgagaccgccagccactgaggtgctgaggctgggtccactcgtgctgaatgccctgctagtaaccctgaccagcctccctgctgggggcctgcaacacattccgcctcgcgcaacgacacgacacacaacctagccatcttgcgtcactgagctacttgtctagtacccttccccaggacaccagacggctgtggttgctagacatgtaaccccggaacctcatggaccactacactgtccataccccactatatcccacacctgagcagctggtcgccgaggacgagtgactcgcagtgacagtgtggccgtgcagtgtcccgtgtctgcctatctttagagacacactctgtgccagctgcgggagagataactggatcgcccaaacctaagacccatagccgtcatcaccaacactcaaacaggcccaaccagggagacgggggctaggacatgagaggtacacagggcgacaggcccactccacacggacccgtacgagccaaccataccgctggagaagccttaaagcgacatccggacccaatcaagttggacagcccaccaatgagcgaccttttgacgtggcgatggccaccaaagcggcgttactaaactagaccaccatcaccaaacatgactacacaagtaggatcacacagtaatcacaacaaggcgagctatcctgtgataagcgcatctgatgtaatcaccagtcagcccattgaggggagcagaggcgtattagcctgaatgccactaaatgtgtgacaatcccacattgtaatatatctaggtgcgtcatagcacgcggcgatcacgcctaaactgtgcgtaaacaccgtgaacactactatggtaggacacgaacacatggctagtgcactggtagcacacctactcttcaatatcacacactagaggtactattaggtaactcagagtgtcttacaacataccagtcc

SEQ ID NO: 506753 - DNA, 111 bp, Homo sapiens
  misc_feature (16)..(16): n is a, c, g, or t
atatagaaaatatcancaagtcaggatttggtccacaatccaatgtgcaaatgggatttctcactgtgaaagaaaacctcaggcggttggctaaaataaaagggatttggc

SEQ ID NO: 506754 - DNA, 651 bp, Homo sapiens
  misc_feature (649)..(649): n is a, c, g, or t
attctagaggccgaggcgggccgacatgttttatttttttctttgttttatctctttttttcgaacaacaaagagcccctcttctttttctcccaacaaaaaaaacaacaaaaaaaaagaaaaacaaaaaaaaaaaaaccagacacacaacaacaacatcacacatcaacacacaaaaaacaaaaaacaaacaacaacaaaaaaacataaactcaacacaccaacaccaaccaacaaagaaaaacggctagacacaaacacaacacgcaggccggcggacgagcggcgcgagcgccaagaatgagaagagagaagcatcacgacagcagcacagaacagcagagagagatacgagcaaacaagaacgaatagaccacgacgaacaacagaacaaaggcgtggtggggtggcgcacccaacaccacgcaacaaatagacaaacaagcgccggggagggggtcacgcgacaggcagcgagtgagtactacatgaaatacaccaacgcgcgaagggaaggagcgagcagacagacgagacgagcaaccagcaacgagagagacaaccaagagcgaagcagccgcacgcagcacagcagcgcacaacatcactcatatacaaacaacagcacccgacgagggggagggggggnag

SEQ ID NO: 506755 - DNA, 526 bp, Homo sapiens
  misc_feature (441)..(441): n is a, c, g, or t
  misc_feature (449)..(449): n is a, c, g, or t
  misc_feature (484)..(484): n is a, c, g, or t
  misc_feature (486)..(486): n is a, c, g, or t
  misc_feature (492)..(492): n is a, c, g, or t
  misc_feature (498)..(498): n is a, c, g, or t
  misc_feature (500)..(500): n is a, c, g, or t
gccctgaggacgcgtgcggggcaggtcacgcttgggcctggctgcctcaggagccaccctgcacggcgccgggcgaggctgtgcgcgccctcccggaccctccactttggggctttgcggtgtagcggcgcgccccactcccttacgtgttcagtcccgaatcacgtacgggccgctgcagctccaggacggcggacgccagcgctcttcggatccccaaggccccttccgttgcttcattctccggaccgcttccgttcctcttgaaggaaaacacactcgccccgttgcccggaaaccgcggctttcttcccaacgcggggcaggccggggcttgttaaggggcaacccgccttgcggatctttggccgggggttttaggaggcggtttcttccggtggaacaaagccgggggcgttgaggggcggtttttccgggttnggggcgcncggggcatgtttcgttaagaagcggaaaattccantngccctnggcttntnccttcccggccgccggttttccgccc

SEQ ID NO: 506756 - DNA, 378 bp, Homo sapiens
gggtaactatcacccttaattttctttaaatttagatctttgagtttgagcttttcattttaggtcaccagccctcgaagaaatctgcagtttctggcctaacgcggtggctcacgcctgtaatcccagcactttaggaggccgaggcgagcagatcacaaggtcaggagttcgagaccagcctggccaacatggtgaaaccctgtctctactaaaaatgcaaaaaaattagctgggcgtggcagcgcactcctgtaatcccagctactcgggaggctgaggcaggagagttgcttgaacccgggaggcggaggttgcagtgagccgagatcgtgccactgcactccagcctgggcaaagaagccagactttgtctca

SEQ ID NO: 506757 - DNA, 600 bp, Homo sapiens
aaattattagtgcaaaccactagtgatataacccaaattttttaatatctttattttccatcaacttgatctgtagacgtcaagagaatcatatttaatgcccccttgcatctcctttctgtttttattactgaatctttcaaatatacacaatagcacagagaaaaatataacggatacctgagtacccatcatccttccttttcatatcttaacatttgtcacacatactcctgaaagtattgttttaattttagctgtttattatgagttacacttaccaagagagtagggagtatgaatgtacagtttaaatagtattagctattaaatacatatgtaactaccactttgttggagaaatagaaaattaccaacatctatgaagccttttgggtatccctcctcaactgtgccctctcttttttccctgaggtacaactaccctgggttttgtcttcatcgttacctaactgtttttgaaggtttattgcacatgtatgaataataaacattatattgttaagttttgcctgtttttgcactttaaataaatggagggtactttttgcactcttctgacttggttttttttttttt

SEQ ID NO: 506758 - DNA, 281 bp, Homo sapiens
ccttagcgtgggcgcggccgtggtactgcttcttttggtcaaataatgttgccagtatgttttctgcattttggggagaaatattagaaaaaattttataatcttttcctgcttttttgacagctgcgctttctactactcatcatattttcagggtttcagattggtaaccgtttattttttattttgtaagacagagtctcgctctgacacccagtctggagtgtgcagtggtgcaatctcagctcactacaacctccaactcccaggttcatgcaatc

SEQ ID NO: 506759 - DNA, 409 bp, Homo sapiens
cctcctcggactcctgcctcactcatgttacaagccgacaccacccaatctatctatataacctagaccatcggccatccccttaatgcaggcgggcgcaagtgattataggctttcgctctaagagtgtacaaaatgccctaatccccacttcttaccacaagcgcacacctacaccccttatccccatacctagttaactactcgaaaaccatcagcctactcattcagaccaatacccctggccgtacgcctaaccgctaacattactgcaggccacctatctcatgcacactaatctggaaagcgccaccctagcaatatcaaccacttaaccatccctctacacttatcatcttcactattctaattctacttgactatcctagaaatcccctctcgcctaaat

SEQ ID NO: 506760 - DNA, 296 bp, Homo sapiens
  misc_feature (97)..(97): n is a, c, g, or t
  misc_feature (103)..(103): n is a, c, g, or t
  misc_feature (123)..(124): n is a, c, g, or t
  misc_feature (156)..(156): n is a, c, g, or t
atagtctgttgggtctaggctgagaatggctgcaaagtactgtttcaccagccgggttctctttccacagcttcgtagtttcttcacagccaccatncccggngtgttgtgggagccacccanncacctcccacaagagcaggcactgccacttcncccagtttgttccagatgtctccttgtcgcttggctctcgatggaaagacaatgcgcaccaggaggcaggtccaggtcaaggccagcaaggcggcagagccactgctcttactgggaacacctgctttggagactagttc

SEQ ID NO: 506761 - DNA, 768 bp, Homo sapiens
  misc_feature (150)..(150): n is a, c, g, or t
  misc_feature (252)..(252): n is a, c, g, or t
  misc_feature (365)..(366): n is a, c, g, or t
  misc_feature (679)..(679): n is a, c, g, or t
cggaaggcacactgcaacattctcctgagattttaactagtgcccagtaaactccgctataaaagagatatgataaacattcaaaaagggagtaaaggaagagttaattatgtagtctcagggtaggcagagaaatgactgctgtcctgncttgtctgcacctgggaagataagcttgtaatgggcatgtcagtgtgaaatgtaacagactgcaattccgtggacagggagctagacttagattgcagaccnaaagttacagctgacatgtccttttttatgggaagatacacatcttgaaaggtttagggaccagcagagaatttacttatgagcaatttgagggcagtcatccgggatgcacnnggccttctgccttctccaggggtgtggctaatgcatagcgctttgacacaaggttgggaagtcgcagctatctactgggcaggggggcaaggtgcgaggggacagcagcagtgtcacgtgactgtctctccagtcttaagtttccatttggcataaagagtttgggcagtcctgagagggtttattttcctttacacaaacaaacaaagagttccattttctccccactcctttttgagacagggtctcactctgtacccaggctggagtgcagtggcgcaatcttggctcactgcaaccgtcgcctccaggnctcaagccatcctcctacctcagcttcctgagtagctaggactacaggcatgcaccaccaagctcagctaattttgtgtgtgtgtgtgt

SEQ ID NO: 506762 - DNA, 825 bp, Homo sapiens
  misc_feature (326)..(326): n is a, c, g, or t
  misc_feature (573)..(574): n is a, c, g, or t
ggacgaccatctgccagcttctctcgtccgtcgattgggcatggagcggtggcgacctcggccttcagtgtttccgacggtagtgaatggcggtcgtgctgcgctgtggatgctgctgttctgggcttgctgcaggcgggtgggtcggtgctgggccaggcgatggagaaggtgacaggcggcaaccttcttgtccatagctgctggattgccatgcagccattcaccactcacgtgctggtcataccctgatccagtctggctcgcctggccacacttgggtccatgctgcccgcaggggtgacaaagtctcgtcctagtagcanttttcatccaccagattccattccttgggcatgccatagcattgtgggaaacagtccgaattgaatttctagaacatagtgcgatatgagaagtatggacctgtatttagttttaccatggtaggcaagacatttacttaccgttctggggagtgatgctgctgcactgcttatttgataggtcaaataattgaacgacctgaatgcgagaagatgtctacatgtcgcctgacaacgaccgtgtgtnntgggaagggagttgcgtacgatgtgcctaatccagtgtctgtggagcagaagacaatgttgaacgagttggccttaacatagccctactttaaacatggatgttctcctagtactgtgataatatgaaacctggggaattactttgagaagttggggagaaaagtggacgagaaaaagtggtgtttgaaggctctttcctgagctcgttaattttaacagcttagcccatggtttgcatggcacaggacac

SEQ ID NO: 506763 - DNA, 297 bp, Homo sapiens
ccttgacttgttgggctcaagtgatcctcccacctcagtcttctgagtagctaggaccccaggcatgcaccaccatgcctagctaacattttcgaagagacgggggtctccctttgttgttcaggctggtctcagtcaaactcctgggctcaagcgatccctgtctttgcctcccagggtgtaattccagcttctttggaggctgaggcccgagaatttacttgaacctgggaggtggaggttgcagtgagccgagatcacaccactgcactccagcctgggcgacagcaccacttt

SEQ ID NO: 506764 - DNA, 119 bp, Homo sapiens
tcatggaatgtctgatccaccatcgaggtcgtaacaccctattgttgatatggacactagaaacgaggattgcgctattatccctagggttaactatgtgccgttgtgtcaagtaattg

SEQ ID NO: 506765 - DNA, 1024 bp, Homo sapiens
ctcgtgagaggcctggatcaatctttctcctttgcctggacaagatgggccttgagtgagtcctctcagcaattaagaacctgcctgatagaggacaggaggtggtgagaagaaactgtggcacaggtgactgaggtatctgtgatagctaatcctgtccaggtggactgtaggagaatttgatgattggtgcagagagaaaacctgaatacggacgcgtggtcgagtggaaaatcctcgtgccacgaaccaccactgctgaacatcggcgcaggggtgctgcgaagctgtgattgagaatcatatcacgcccaccattgttgcggtgtgccaagtgaccctacccacgcgtgtgcaggccccacttggcgaggttgtgataaagcgtgtgcgagcagagatgactcatcataggacctttcggacgtcgttccttgccgacattctttgcgcaacaatggtgcgacctctgtgacgtgagcgaccaggacagggacacacaagtctccgcctgtgactacatctgggccttgcgactacagttccccccttgaccttggttactctgagctgacccgatcttccctcgctgagcatgcgggactggctcaatggaacgtcctggtcactcgctgtagtgagagcggatgagggtacaaccacccttactgggggtgatgatagctgaagctgtggcgttgatgaagatcctaggaagaaatggggaacccgcctgcgacgctggcgagcatcgcgtgtgctgctgggcgcggagatcgagagtgagtgtcacctgtcgtcttcctggtacctgggctttcggcccttgggtctcaccccttgggggaccctcccggcggggtggcttcctgtgcccccgtttacccggggcttggctcccgggtttcacagctgctggcgggggtgttcccgagatggggggttccccacggaggttccggcttgtgtgaacctcaccccaggctggttccccggccccgcaaagggggggacgcgcgaggaa

SEQ ID NO: 506766 - DNA, 381 bp, Homo sapiens
ctcccagcggggcacattcacttgcagccaggcagtcaagcaccagctggggctgcatggcacaaccttatctccccaaaatattcaaaaactagctgggcgtggtggcctgtacctgtcgtcccagctacctgtgagggtgcggtcggaggatggcttgagcctgggaggcacaggctgcagtgcacctgagctcatgctactgcacgccagcccaggaaacaaagtgagactctgtctcaaaatacacacatacacacacacccccagatttatatctgagatggagtctcgctcttgttgccccagggatggagtgcacgaggatatgatctatggctcaatgcaaactctgactatctgggtacaaagtgattcttg

SEQ ID NO: 506767 - DNA, 206 bp, Homo sapiens
acaaaccagatgtcagtctgcaggatgttcattctggacagagtggaaggtgatacttgttcccttaatgagtttaccttaactggttcaacttatgcacctattggagaagtgcttaaggttgataaaccggtgaattgtacacgagtatgatggtctggtggaattagcaactattgtgctcttatgttatgatcagctttggg

SEQ ID NO: 506768 - DNA, 486 bp, Homo sapiens
tatacgtaatagggagatataatacatcaatcaatacatgtaagatagacataggtacgatcgggggggagacaactatgaagtggggaggggggaacttagaatagtatgccggttatataggactgcctttcttcctttactccccatgggtcctgtaggatctatgatgagataataggtattttatgctccaattttctcataaggtcaaggacatgaatacccaatgatctcagcttctggtcattagagataagcagtgtttccatggtgtctctgtttaattctagtcaaaagcaaaggaacatgatgtataggttagcctgtgtagcatcattgcagcctgatgggtgacacttcacaaacttgtagtatgctaaaaataggccacgaaacccaatggactcaccctgttactggtggaaggtgtacaagttactagcagtgaatccatacgggtctgcaccaacctcaattcttgcc

SEQ ID NO: 506769 - DNA, 113 bp, Homo sapiens
gactggggtagcgaaggctgctctgtcctggtgctcccactaaagtgagaagggctgatcactcaatgttgcgaacaccaatgctcaagcaattgagccctggtaaaattgct

SEQ ID NO: 506770 - DNA, 188 bp, Homo sapiens
tctgtgtgccgcattaggtataggaatatgccactctgccagagaagttcacgtgagtgacagctagatgagaactgaggattctcccaggcagcgaaacaaagaagcaatttgatggtatcctctgaattactgcagtcttcaatgattgtcttcagataagttgttctcacacaataacaactgtc

SEQ ID NO: 506771 - DNA, 888 bp, Homo sapiens
  misc_feature (192)..(192): n is a, c, g, or t
gtcctcagcttcaggcgccaccattgacctgggacagtgatatcgagcaatgccgtgcttctgcttctcgtggcggtcagtgccttctctgacttggcctaaggtcgctgttgacttcgactctggctacccctgttcttccacctggtcatgagagtatgcccctagagggacgtatgtctcgtcctcagnatacgtatctagatagctatcgccaacacatgtatttcaggattcatcgcaattgccttacaatgacattgaatcacctccctcctatatcacatgtgacttgcaagttacagactctctacagctctaatatccgtgcacgctggtcaccatctaggtccacaaagatcaatcgtaatatacttgcgttgctcccactcagttcgaagctatccggttacctagccctttttgcatattgctctccaatggtgcgtgtcctacaggcttgactattctagcgattgaaaattcctgggtacgggccttgttaattatcattaccatcatctgtggtgattactcgggaagagcctcatagatcctagtggagatgagctatctcgggtgcacccaatgctctccccgtttatccccttgctattaccccatgtccaggtaactagaccccatgatcctagcttgacccaaactcgtgaccgaattggggtcctcgttacctccagggcgaacgggtccctagagaagccttatgctgtggaatataggtccatacaggatgtgaattgtgtaagcataatgtttgtgacccatttactaagcaaaggccctttttcactggttccaatcgtttctgccagttggacttggccgaaaaacgaagagttcgagattgaaaccaccaggattcgaacg

SEQ ID NO: 506772 - DNA, 336 bp, Homo sapiens
  misc_feature (166)..(166): n is a, c, g, or t
  misc_feature (175)..(175): n is a, c, g, or t
  misc_feature (260)..(260): n is a, c, g, or t
  misc_feature (305)..(305): n is a, c, g, or t
  misc_feature (327)..(327): n is a, c, g, or t
atcccagcattttgggaggctgaggcgggcagatcacgaggtcaggagttcgagactagcctgaccaacatggtgaaaccccatctctactgaaaatacaaaaattagctgggcatggtgccacacacctgtaatcccagctactcaggaggctgaggcaggagantcacttgancctgggaggcagaggttgcagtgagctgagatcaggccatggcactccagcctgggagatagagcgagactccatctcgggtccnggggagggaagatttaaagaaggagagatgttacaataaatgttnctttaaacatatatatatattnccccaagtg

SEQ ID NO: 506773 - DNA, 97 bp, Homo sapiens
tgcagtgctagagaccccgggggctcacccctccactttgggaatgggaccaggctcactgtgactagaggacctgaacaaggtgttcccacccgag

SEQ ID NO: 506774 - DNA, 125 bp, Homo sapiens
agccccaaccagacatctgtgtacttctgtgccagcagtgatggacaggggaatatggctacaccttcggttcggggaccaggttaaccgttgtagaggacctgaacaaggtgttcccacccgag

SEQ ID NO: 506775 - DNA, 444 bp, Homo sapiens
gctggttagtccacgctagatgcctactgagcgatgctcgtgggccgcgagcagcgctgtgctgccggtgagaaggaccgtggaggtgctggtggtgcgcgcttcgctcaatcaatgaaaccacgaggacgttgtcgccgcatatgaaatgccacgaacactttgcatggcgcgcgaagcatcctgtacgtgtgcgcgcccagaggatggtccaatcgcgtctgcggtgccgagacggataccacacgcgcgtagcacgctgtgctacgtgtgtgcgccacttgcacgtatgcatagacgtcatggtatgctgacgagcccagttcgcgcccaagcggctttcgctgaggcaggttgaccacaggattggcgtcctggtctagtccttggtgcgcgcgggacctgtggacgctagggggagaggcggcggcccaagggtgcgcc

SEQ ID NO: 506776 - DNA, 110 bp, Homo sapiens
  misc_feature (25)..(25): n is a, c, g, or t
  misc_feature (27)..(27): n is a, c, g, or t
  misc_feature (30)..(30): n is a, c, g, or t
  misc_feature (32)..(32): n is a, c, g, or t
agcatatatctctgcagcgttggtncngananggatactatggctacaccttcggttcggggaccaggttaaccgttgtagaggacctgaacaaggtgttcccacccgag

SEQ ID NO: 506777 - DNA, 236 bp, Homo sapiens
agtaccaagatgattaataactccaatgctgggccttcacgtcgaggatcgctcacgtacaggcgcctgctggaaggcgaggacgcagagtctactatagtcgcattgcggcgtgtaatgtctgtgctcatgcacctcccttggacgacgtcgttgagctgggaacaccctgcgtcaggctcccggccagtgactggcagtgtctgcaggaacccacgctctgcaaggaacccact

SEQ ID NO: 506778 - DNA, 100 bp, Homo sapiens
  misc_feature (27)..(27): n is a, c, g, or t
ctctgtgccagcagcttaatggggggnggatggctacaccttcggttcggggaccaggttaaccgttgtagaggacctgaacaaggtgttcccacccgag

SEQ ID NO: 506779 - DNA, 132 bp, Homo sapiens
  misc_feature (44)..(44): n is a, c, g, or t
  misc_feature (53)..(53): n is a, c, g, or t
  misc_feature (55)..(55): n is a, c, g, or t
gccagcaccaaccagacatctatgtacctctgtgccagcagttntagtacggngnggaatcagccccagcattttggtgatgggactcgactctccatcctagaggacctgaacaaggtgttcccacccgag

SEQ ID NO: 506780 - DNA, 1023 bp, Homo sapiens
  misc_feature (222)..(222): n is a, c, g, or t
gcataccattgtgtctttatacgtgtactagaacaattattttaatgagttcattatggtgaaggcattaaagtattctgaggaataagatttagggctctggtctactggggcaaactaaagttcagtgcacaggatattctgcagttaacgtcacatagataaaggttatatgtaagaaagttcaggctgtgaattttttcaaggagacatatcttctcntagaatttgctaatgttgagacaatggttaaataaagcaatagagtctagtttcatgccaatttggcaattaataagtttaaattaagaaaacaaaggaaaggcttcaatttgggccccattcaaatggattgcgcatgggtattaaaacagaaccattagttggcggcccactatttaatcaccacactagtggggaataatcaactttaagtgcaacggcacgactaaaacaacacaccacgggcactgacgtttccaaatggtcccctacctggtaacggggaccattgggcatttgcacccgcctgggggaaaccccaatttacatctacatccaagccacaaaagcttaattcgacccacacgtgaaccccaggcacaagtaacccaaaaaaaccaacacgggcgaattgttattcttccaacgttccatacagggggtggggcgaaaatccggaaaaacaaaaatggcaaggaacaacacccggttggggacccagcacagggggcaacacggtgcgcgcacaaaccaattttccaaacagaacaacccccgggtggtgggcccccctgaggttcatgagttggaaggcgtttcggacccggcggggaacgatgggcggaggacggggggacattaaggcacattttcaaggggcagggatataattaaccccttaaaagtgggttgatacaccaggaaccggaaggtttacaattggggagataggcaactgagcaaccaaagcccaaaaacacggttgttgacacccacagtgggtaacttaacacgcgatta

SEQ ID NO: 506781 - DNA, 119 bp, Homo sapiens
gacagcagcttctacatctgcagtgctagacgggacggaataggaatcagccccagcattttggtgatgggactcgactctccatcctagaggacctgaacaaggtgttcccacccgag

SEQ ID NO: 506782 - DNA, 134 bp, Homo sapiens
gtgacttagaggatccgtctagctcgccagtgtaagacacttccacactcttcctgggccagacagacacgcattctcatctctttaggccaggctcaggtattccacagtccttccttcgttaagatacctca

SEQ ID NO: 506783 - DNA, 126 bp, Homo sapiens
agccccaaccagacatctgtgtacttctgtgccagcagtgatggacaggggaatcacccctccactttgggaatgggaccaggctcactgtgactagaggacctgaacaaggtgttcccacccgag

SEQ ID NO: 506784 - DNA, 353 bp, Homo sapiens
tcatccccggttctgggtaacatagctctataaaaaaattcaaaaattagccagccatggtggcgcatgcctgtagtactagtaccagctactcaggaggcggaggcaggagaattgcttgaccccaacagttaagactacagcaagctatgactgtgccactgtacactaacctgggcaacagagcaagaccttgtctctttaaaaaaaaaaagggaaaagaaaaactagttgtgctcagtgccttataatcccaacacttcaggaggccaaggttgagaggactcacttgaacccgaggagtgggagacctgtgccgtggaaaacattagcaaggaccttcattcttacag

SEQ ID NO: 506785 - DNA, 108 bp, Homo sapiens
ttctacatctgcagtcccgttcctttaaggggggactatggctacaccttcggttcggggaccaggttaaccgttgtagaggacctgaacaaggtgttcccacccgag

SEQ ID NO: 506786 - DNA, 252 bp, Homo sapiens
tctagaggctccccgctcacaactggcacagcgagacctccgtagccgaccatgtcgtctgtgtcccgtgtacacaccctcttctggaggtgggtgcggtctggggcttcatagcattcgcctactcggtgaagtctagggacagagaagatggtgggcagacgtgaccgggggcccagtgcctatgcctccacgcgccaattgcctgcaacatctggggcccgtgtttctggtgttcttccacaatagaaa

SEQ ID NO: 506787 - DNA, 106 bp, Homo sapiens
ctttgcgccagcagccccggaccgggatggggtcgatggctacaccttcggttcggggaccaggttaaccgttgtagaggacctgaacaaggtgttcccacccgag

SEQ ID NO: 506788 - DNA, 126 bp, Homo sapiens
  misc_feature (44)..(44): n is a, c, g, or t
  misc_feature (53)..(53): n is a, c, g, or t
  misc_feature (55)..(55): n is a, c, g, or t
gccagcaccaaccagacatctatgtacctctgtgccagcagttntagtacggngnatggctacaccttcggttcggggaccaggttaaccgttgtagaggacctgaacaaggtgttcccacccgag

SEQ ID NO: 506789 - DNA, 148 bp, Homo sapiens
  misc_feature (17)..(17): n is a, c, g, or t
  misc_feature (40)..(40): n is a, c, g, or t
  misc_feature (46)..(46): n is a, c, g, or t
  misc_feature (60)..(60): n is a, c, g, or t
atgaacggatacaggtncggcaggcccgagcgtcaggtcntgctancgcgtcggacagcncgacgtcttgcccggcagccattcgaggttgccgtgcttgccgagatggatgaccgcgtcgatgtgatacgcatcacgcagccagaaa

SEQ ID NO: 506790 - DNA, 791 bp, Homo sapiens
cgcggacaatgaccacaagatgctggacgcaagcgcaggcaacgccatctatatctggcctaaccacactgccccctgtgcatgtcattaaggctgctctgctcaactttgatgatgtttgcggtcagcaaggatggcatggaaaagctactgaccatgatgcccacggaggaagagcggcagaagattgaggaagcccagtggccagaccctgacatacccctgggcccagtcgagaacttcctgatgactcttgcctccattggcggcctcgttgtcgtctactactctgggccttcaagctggactatgacagcatggaagcgggaaattgctgacggccatgtgtctgacctggaaagtgggtatggaacagctggtacagaatgccaccttccgctgattcctggctaccctcctagcggatgggcgaacttcctcaagtggctcccagagcagtcggctttgagctgagctacctggaaaaggtgtcagaggtgagaggacaccgagtgcgtcgacggtcacatggtacacccattcttcgtgcatccctagtgtcgtccaggacctcggcctgaggtccgctgaaccttctaattcaggaaaatcccgtgcaccgtgacccgtctgagccaagggatggaccttttggaaacagcgtggactgaagaaccctggggcatgcgttggaaacgcccgagaaacccagggggcaacgcccggaaggggaacagaagccgcttggaggggaagccccttggggcccagaacggccattggaagcctgg

SEQ ID NO: 506791 - DNA, 320 bp, Homo sapiens
ccttaccgtatcctacggctgtacgtgcagtgctgcgatctcggcctgcactgcaatgctccgccgtcccgtgttcacaccattctcctgcctcagcgctccgccggttcctcggactacaggcgcctgccaccacgcccggctaatttttgtatttccatcacagatagagtttcaccattttggcccaggctggtctcaagcctctgagctccggttatccgcccaccttggcctcccaaagttgctttgaatcccaggacgtgagcctctgctgcccggccctattctctccttttctcgcataccgtagggacagt

SEQ ID NO: 506792 - DNA, 81 bp, Homo sapiens
  misc_feature (8)..(8): n is a, c, g, or t
  misc_feature (21)..(21): n is a, c, g, or t
  misc_feature (53)..(53): n is a, c, g, or t
  misc_feature (65)..(65): n is a, c, g, or t
cgcccagnaaaattgaggcancagtgaactgtgatcatattactgcactccancgtgagtgacanagtgaaaccttgtatc

SEQ ID NO: 506793 - DNA, 598 bp, Homo sapiens
  misc_feature (357)..(357): n is a, c, g, or t
gacatggcgcttgccagactgtgtatggagagaccgctagcggtgaaccagcgcgggtttatcggactggggggtcgtgcagatctcgctggatctagtgtccaggggaagtctcgagtgatggtctgatgccgtggtccgcgccgggcatggggtgtcccgagaaaggagccaggacgtcggtagagatgctttggcatggaatcgaaccagcccatggtgcttatcgaaaggtgtgccgtcactgcggagctcgagtaaggtctgtcgatgcgtcgacatcacaaggggtctaccaaggcgcgtgtgcattaccattgcactcacgcgaggagcggtgaagaagggtgatacgangatcaaggcacagaccttggctaggcgagcatggctggggggcgcaggcggattgcatgcttctgggcaacgggtagttgggctcggccaaagtccgaatcgtactgaggctgtcgaaactagaggcacacgcgatcgtctggtaggcgagcatgcgctcgcaagacgtgcgttgcgcgaaaccactggtgggtgatcggtcagccacaaggggccgtgggggggcatgttcgcatggggc

SEQ ID NO: 506794 - DNA, 327 bp, Homo sapiens
  misc_feature (2)..(2): n is a, c, g, or t
  misc_feature (41)..(41): n is a, c, g, or t
tncacactggccggcacggtgtactggactccattgatggngaagtttatgtcggacaggctgctgatggcggagcagctgaccaccatgtcgccatctgagttctcgctggctccgatgtcgctctggatgttggcaatgattctggttggtccggtcagcagagagttgccggtgtcaacaatggcctggcagccctcagcgcaggcgatggcctctccgttcatggtgatgctgtccacggcgatctgccagtaaccctcgacggtaacaggcacccagatcagacttccagtgtggagagaggcagtgcaccagtgtggagag

SEQ ID NO: 506795 - DNA, 97 bp, Homo sapiens
ggatttgctggtgcagtacaactaggcttaatagggacatgtaaagatactgatttaccttgacacttggagaacgtgaagaatcaccgaaaaaaaa

SEQ ID NO: 506796 - DNA, 436 bp, Homo sapiens
tgatgaacgaaactaaagacatgcgaataactagaaatgtatctgtgtctataacgcgtaagattaatattgttaaaatgccccgtattaatcaaagcaatctacagattttatgccatccatatcaaaacttcaatgacattttttacagaaatagaacaacccgacaattggtatggaactatagaagatgctgaatagccaaagtaatcttgagcaaaaagaataaagggggaggcgtcacattacctgattttaaaatctactataaaattatagtagtcaaaacaactttatactagcataaaaacagacaaatagactaatggaacagaacagaaagcccagaaataaatccacacatttacagtcaattgatgtttgacaaaggtgccaagaacacacaatggggaaaggacagtctctttgataaatg

SEQ ID NO: 506797 - DNA, 639 bp, Homo sapiens
aagcagtggtatcaacgcagactgcccattacggccggggggggacaaaaaaaaaaaaaaaaaaaaaaaaaaaatggggggcgcgccccgggcccctcggaaaaagcttttatataaacacacattgcgcgtgtgtgggcgcgcgcgggggcccacgagagggtataagggagaacacgtggggcacaaaggcgcgggttccacaaggaaaaccgcgcggggccagagaaacaagggggcgggagaatttccacaccacaatataaaaacacgcgcgcgcgcgggggcacaaccgcgagggcgtttgctggaaacaaatatcccaaagggggagttctctgagggagagctctcatatatagagcgaggaatctctatatatcaagagagggggagactctccaagagcgcagagagcctcgcagaatatatctcaaatattatagcgccccgcggcccgggggtgtgaaaagaaaaaatgataaaatagcaatttataaatgaaaatacataaacaaatacaaaacaagacaaaaaaaaaatctaacaccaacaaacaagtaaaagaaaaacacaaaaaaaaaaacaaacaacaattatcatcacagcaaaatacataacacaaaaaaagtcgacact

SEQ ID NO: 506798 - DNA, 149 bp, Homo sapiens
accttgagctcatgaaacccatggctgttctcccatttacttaggccattagcttcaccgatctcctctgtcgccgccccgttcctggcttcaccgtattcatcagttggcagagaacagggcagacacctgcgccacaaagtcacatc

SEQ ID NO: 506799 - DNA, 235 bp, Homo sapiens
tgtttgcagccggctgcaaacttgtgcagctgctgaggatacggaaattaataaaacaaaaatgtggctgggcacagaggctcacgcctacaatcccagcactttgggaggccgaggcaggaggatcaccaggtcaggagttcaagaccagcctgaccaacacggtgaaacaccatctctactaaaaatacaaaaattagttggacgtggtggcgcgtgcctgtaatcccagcta

SEQ ID NO: 506800 - DNA, 290 bp, Homo sapiens
ggtcgaaatggaccgtgcgttcccaactcgatctgcgttaatactttggtaagtatttctcacagctgttgttatcaaagcagaaccggttattaaaacaagtgttctcattgttcaattcccaactaagagtgagaacatgcggtgtttggtttctatccttgcgatagtttgctcagaatgatgggttctagcttcatccatgtccctacaaaggacatgaactcatcctttttatggctgctaatattccatggggtataattgccaaatttctaatccagctacat

SEQ ID NO: 506801 - DNA, 668 bp, Homo sapiens
ccggcaattcgccataaggacgttttcttctttctcatcaagagagtgagtcatattttatcttgtgataaatttgcagcctaatctcaatcgcacactaacagatcgcaaaggcaagtgccaccagataaatcggccccatcccttcttttcgctacattgtataaagtaagacagaagtagagaagagtaatcagcaagagcaacaaaaatcaaagacagaaagcacctccgctgcacgggaacccaaaggtacgcttacactcaaaccgtggtgggacaacttggaatgtgaagggtgttgtgggagagggagaagggggaagagaagaaacaagatgacaatccaccgctgctgcttaattcgtaacacaccttaacttatacatttatcttgatctgttcgggggagttgtaggtaggtagtgttgttggcaggcgtgccagcaccgggcatgggggtccttgaggtgtagttgttaggaatttgttacaccagacggccaccgcgcaccccgctacgcaccacccgctcgcctcactaattacagataccgaagagatcaaatagttgcacgagtgtagtcgggatgcaggcacatcatttatcacggggaagcgtaagcattcgttggtctgcgttactcgtgctcattatgttgatggtg

SEQ ID NO: 506802 - DNA, 1264 bp, Homo sapiens
ctgatggatggacttgggggcacccgcgtcgtgcctcctgggttgtggaggagtcgcccgttgccgccactgcctgtgcttcatgtagtgatagatgctcgccagcgtctcccgcgtgctgtctgtgctgcttctctagaatgctcggcagcagatgtgcttgggtagacatccgcgtgaaagttgtttgccaaagtgatcgcttacatttgaaattaaagaatatgttgaccttcaccggctggaagaaggccctcctgtcacaacagtgctcaccgagtggaggatgggctcaatatactgacaggatgatagcagactgtatcgtccgaatggagtttgaaagcagatcacggcatgtagtaaacagtaacaattgattcgtggtggctgtcacgttgctagtgattggtcagtgaagtcttgctgtcgtgcggcctgcgaggcccggcatcaacgcccaacagagccatctcatcactagcctaccgggactcacggcttattctttcacccgcgggccctttcctgtcctgacgcatcacttctcgccagagctttactagcgaccgaaaagcggcggtctgttgctgcaccgtggcacactcgtgcaggatcgcatgcaccttgtgtcgccaatgaccttctcagccggcgggcatggcatcggtgggagcgcaggtgcccctgggcgctgggacttgctctagcctgtacagtatacatggccccccgatgaggccctgccctgactctactagtggcgactggtgcctgctcaacccacgggccagaatactgtcgcagcgctttaacccacatgggcaaggctctcggtcgggacagaattccacccccttcgcaacatcctgcgattcttggttagcacgcacatcactcccgcgatcggcctttggcgaacccgtcctcgtctggcagccgcacgccggcccagcccactcactcgcatcaactaaccacacgacgcaaccgccgcaacgccaacaatatacccctgggggcctgacacacttgggccttgcgagaatgggccataaccccttgaagaccactcacgcaaaaaggcaaaacaaagaggcaccacccacgccagcgcacgtacacagacaacacacccaagcacaacgggcaaccccacccaagcaatcagagaacagcagcacaaaccataaacccgacaacccacgcaaccccaaaaaccgcacacaaccataggcaaccacgcacacggagcaccgaccac

SEQ ID NO: 506803 - DNA, 1222 bp, Homo sapiens
  misc_feature (444)..(444): n is a, c, g, or t
  misc_feature (812)..(812): n is a, c, g, or t
ggggaagatggcggatgacaaggattctctgcctagagcttaaggacctggcatttctcaagaagccagctggaacagccgtgcagcggcgatgttaggaagcacgaagtcgaacaagtggaagtgggccacgggatggcatcgactgttgtgcctccccgatgttctcaatgggattcctggctggtctatgttggtggaccatagagcttgatgggctatcagctagctatttgtgcgcttttagacctggttggggtcacctggcaactagtggcactctaatgctggctcacggcgatatttccttgtagtcccaaccgtggaagcaagacatttaacgggactgatttgtcaggattgcctacgacaatgcgggtccctgaactagactcataggtgccatgtggaaacgagtgcagagtatgtagccatgtctctagncttcattcaaagttgagaggcacatcttatgtcctgtcattttcccgctcaagaacatggtctactcaccaattttgggacgtagtccttccaaaactttatttccttagacccatcccatttccagttcccttttggtctcatcccccattgtactctggtcgatgcacttcgctgtgcaacaatgtaatgatttccttgcaaggactctttggcaatccgcgcattggggcaatttgcccattttgctttttcaccccctttgttaccccatgaagaccttttccccaatggaggcgcaacattcccgtcgcggctccgacacgggatcatggtcagcggcggtttactaaaacgggattctcaanccctaaggtgcgccgcctttaaacttacttgttcccacaacgtcggctccttgtactcttgtggtggcgtgagtatttagggattacggcattggccccttccttggacttgccctttcagcgtggatttacctccctgcctttgagtccaaacctaggttttcgcccatcgggggtcttttgctttcgccttattgcctggaggggaagagccatggggggcgttcgccaaattatggttctgtttgcaacgtttttggttccccctctgagagatatccggtttggtttcatggtcgagagtttctcggccttggcttggtgcggacctcggtgttaaagccgctagggcccccgaaaggaggggtttgcgtcttggctgcgtagagcgggtacattgcaccgcattg

SEQ ID NO: 506804 - DNA, 893 bp, Homo sapiens
cagctaccttaaagatgccgggatccgcagcgaaggtgctcggagttgtcagagaggatcgatgagcttcgtggagaccctgaagcggggtgtgtggtgccgcgcatgctccgagtgaaatggctcgtgtgagaccctagtgtgttgctgcgccagatcatcactggaccacctgcgtggatgcaactgctgggtggtgatgcttgacttgtgatggcttgactcctgcatgatgatgtgttgcatgtgatgtgattgactgtgcctgctcatgcccctccgatgaccacctgtgtgtgcaacattgtgttgctggatgagtgctcaagattatcctgtggatgtgatgtatgtgcagactccatgtgacagcagctgacgagatgtgatcagcaggagtccctgcacaaacttgtttgacatcctggatggcctaaacgaggatttccagcttccattatgcccaactccagtccaacatcatttgagtgctgattaatgatgctgctagtggacgctggctgtgttgacaattggaagaacattgcagcccagagctctggagcacattcactccacatgagtgtgatcatgaccatttggcttctcccgaacagtagaggccttcctcaaagaggcttgccgaaaggagcgaaactccatgtcattgtagcccgagtgtgctccctttctggccagtggtccttgaaattggctgtgcattttgttcccaaggcgtggtatgagaccactgtcatgatggatgctgcaatatgtgcagtattgtcacgaggcaccaggtggatagtgggcacgagacgtctgtccattgggcttgatgtgtaggagaacattggcatgggacgaaccataccccttgttcaccttccaat

SEQ ID NO: 506805 - DNA, 147 bp, Homo sapiens
tcaattaaatgattcatggttccatacacatattaaagttaaccatcaaccaccagcccatcatactctttcacccatcagcaccaatcctacctccatcgctaaccccactaaaacactcaccaagacctcaacccctgaccccca

SEQ ID NO: 506806 - DNA, 137 bp, Homo sapiens
ctagcaggatccctttagacactctggggctaggtatagatcccaggagaacccgtgtctacaaacctcactctgggcaaaactggacccagactggggttttggggatgcttgatggtaatgaggcaagtggctgc

SEQ ID NO: 506807 - DNA, 734 bp, Homo sapiens
  misc_feature (90)..(91): n is a, c, g, or t
  misc_feature (93)..(93): n is a, c, g, or t
  misc_feature (126)..(127): n is a, c, g, or t
  misc_feature (131)..(131): n is a, c, g, or t
  misc_feature (150)..(150): n is a, c, g, or t
  misc_feature (167)..(167): n is a, c, g, or t
  misc_feature (170)..(170): n is a, c, g, or t
  misc_feature (177)..(177): n is a, c, g, or t
  misc_feature (184)..(184): n is a, c, g, or t
  misc_feature (201)..(201): n is a, c, g, or t
  misc_feature (205)..(205): n is a, c, g, or t
  misc_feature (214)..(214): n is a, c, g, or t
  misc_feature (216)..(216): n is a, c, g, or t
  misc_feature (221)..(221): n is a, c, g, or t
  misc_feature (241)..(241): n is a, c, g, or t
  misc_feature (243)..(243): n is a, c, g, or t
gagtgcggcggggcgcgcgagcggcgccagctcggggcagcggaacccagagaagctgagggggcggtagcggcggcgacggcgacggannanatcccgcgcgtgtgcccagcctcttcccgccgnnagcngcccttttcctccctcccnttacgtccccgagtgcnggnagtaccngcctccnttcccagaccgcgcggntttncctccagancntctcnggcgcgggtgagccctattncnccagaggcaggtggtgctcgaccctgataacccaaagtgcggaaacatgctggactaagacatcatcatctgtcacatggtgggcacacatgtcacttgaagcttcagagcaagcaatgtaaaccaacaagaatgaaccacaagtccatcaacatctcgagtcttcatatggaaacctcaacacacgctctggtgaagaaactcagatgtggagaccatcttctctaagtatggccgtgtggccggctgtttcggtgcaccagggcctatgccttgtgtcagtcactccattgagcgcatgccggggaagcttgtgttgggcaaacaatgcgcggttgcggccgggcagaccctggaactccacttggctgggaagctaaggctgagagaccagggtcaagagaggcttggctttacagggtaccttgacagatcacggagattacaggctcgaacggcctgccgcaacagggcttaaccggtactggggg

SEQ ID NO: 506808 - DNA, 129 bp, Homo sapiens
ccggtacccaacgctgctcacaccgtgggctgttacttgctttgagttgaagcggtttgcatttacgcctgtaaatgtattcattcttaatttattccttaagagtttttgtttatgtgagagcgttgg

SEQ ID NO: 506809 - DNA, 135 bp, Homo sapiens
gacagacagccggaccccaggctcacgcaatttctcatgctcagcctcctgagtagctggaattacaggtgcctgctaccatgcccagctaattttgtattttttttttagtagagatgggggtccggctgtctg

SEQ ID NO: 506810 - DNA, 1033 bp, Homo sapiens
  misc_feature (113)..(113): n is a, c, g, or t
  misc_feature (373)..(373): n is a, c, g, or t
  misc_feature (479)..(479): n is a, c, g, or t
  misc_feature (985)..(985): n is a, c, g, or t
  misc_feature (1009)..(1009): n is a, c, g, or t
gccttacttgtatgtttgaatacttcctagccttccctgtaggcaatagtccaacacagttcggtgcgagagattacctatgtgatttctatccgtcatagtatatgatcctnggaagttgcgaagtgtcgagttgtctcgtaaccgttgtgtgctcactagagtggtggacagaacatccttatgcctacacatagtgactttgtgtagatcgtaaggccacaacgtatggtaatatctcccattatattggcttgtgagtatctattggtccccttctcttcccaaccgtttgagattgctcgactatttgggtgggtatagctctgctctaatgcgcttggttgcatctctgaaacgctctataagctcntccaggtatatcgctccctatttatttcatcgaaaagttagttcccaaactttttgtagactctaaaagcaagctgcacaaatgtgtaccattttctgtgatccangcatgcacatccgtccatgtgtctcttttcgaaatgctctttggccctaggagatcggacccaacctatgagtgactgctctattttaatttcgagactttcgattttcaaatgacgttgtgtacgagtgattcctattacgcccaagtctcgttgctttcacccgtcttttttatctaccccctattgacgtattgtgtcaccgtttgtccggggcacttggcaaccccgtagatgtagatacgtttttggcttcgaacccggcagcgttgcaggcaaatactttttattccgtcttttcctacctggctatccccgaatgtggcgttttactgctcgtttctcccaccccggtaagggtcagcccgcaataatgtaatgacgctgttggaaaagcgccttccaagacgaggtcaagaaatgaccggttacagtgggacatatgtcctccgtactaagagtaaaacaacaatcttttcttagaacgaagagcgttagggattttntttgcagaagaggggtcttttccncccttgggtggcccttaggcctgg

SEQ ID NO: 506811 - DNA, 462 bp, Homo sapiens
cagtccaatgtcctggcaacaggagggggccccagtgatcgacacatttgcatttggaatgtgtgctctggggcctgtttgagtgccgtggatgcccattcccaggtgtggtccatcctttggtttccccattacaaggaggtcatttcaggccatggctttgcccagaaccagctagttatttggaaggaccccaccatggccaaggtgggtgaactcaaaggtcccccatcccgggtcctgagtttggccatgagcccagatggggccccagtggcatccgcagcagcagatgagaccctgagggtatggcgctgttttgagttgggccctgggcggcggcgggagcgggagaaggccagtgcagccaaaagcagcctcatcccccaaggcatccgctgaagaccaacccctccccccagttgttttttatttttttaataaagtcatgtttcccttcca

SEQ ID NO: 506812 - DNA, 202 bp, Homo sapiens
agcggagattgagaggcagccacagccaccccaaaaggggtggcagagccctgcctgtggacagggccggagtcatcggcccgcatggcccatcttccacaggtctcccccagccgatagtgatggaggcactggacgaggctgaagggctccaggactcacagagagagatgccgccaccccctcctccctcgccgccctc

SEQ ID NO: 506813 - DNA, 1672 bp, Homo sapiens
  misc_feature (978)..(978): n is a, c, g, or t
  misc_feature (1253)..(1253): n is a, c, g, or t
  misc_feature (1273)..(1273): n is a, c, g, or t
  misc_feature (1421)..(1421): n is a, c, g, or t
gtctcgtcagcgagggtagtatcacaaaacaaatgggtgggagcatattgagtgactcgtctgctcgttgctgcacgcgagagtgggagacccgctggggtgtctacaaccaacacccgcgcaggatagtggggtgacgcacaccaccgttggggccaccggaagatacagccggtttacaccccgcggggagataaaaaacttcctgtggtgcgcagaatggcgccccctcattggagagccctttgtggatagaaaagcctctccttttcctcggggggggaacccaaaatatgtggggggcttcttcaaaagaggtcgccaaagaagaaaggggtggtcctgtctgcaacagggggaaaggtttgccgcgttgtcgggcgcgaccaacgaggttgttgccttgtggggttgcaagcagagcccgaaaaagaaaaggggcgcccccccccccccagagtgggggagaagcagccaagcaccttgggctgttattcaaacacatgggccttcacaagaggttgggattgttattccgccttggcagaccaccatgccccgacggggccccgccaaaaaataaaaatgcgcgccctcggcggcctttaatggtcccccgccgtggcttaatatgtgggggattttgccgccaacaccaccccacgggcgttctcaacaccactattgggacaaacatatggcaacaacaagttgtttttgtcctcgtgaagagtcttgctgaaaacaggggagatataacagaagttttggatttcccgccgcgcgctgttgtctttgggttataaaaaaaaagcttctggggagaaagaatagtggggcctccctcagaaaattatgtcttctggggagaaagttgtctctggggtgagattagcctcgggccccactctggggtgtgagaaaaaatggggtgtctcccttcgggtcaacaaaggccccccacagagtgtgtgtgtntgtgagagagaggctgtgtctctcacagagacttcattgtcccacaccgtcttttgggggggtgtctgcctctttgcgtcgtggtgtttctgttgagatatattgagagacgacacagacgacacagtgtctgtcggggtgtggggtgtgtgtcactgtcacacagagtcacagtgtgggacgacacacagagaagggcctctgtctctgagagagtctctggggcacacagggtgtcacacacacacagtgtctgctgactccacaagagaaanggctctcacagagagagggngtcataaattgagaataattaattccctcaaattaacctcggccacacccacacacttcttataatcacacagtgggtgggagaagagacacggtgtctcacgagaactcgttttgtgttgcacacattgggcgcacatttataagtnttatagtgaagtataaaagagactcggtgtaaatgagtaacacaatgcactccgtaaaaacctctcacgagaaggagaaaggaggaaatgtttttgtggagccacactcttggtgtttctctttttggcgtggtgggcacgtttgtaaagttaattagtgttttaaaaatcagtacatttttaatgggaacaacttgacccaaaatcttgtcaccagaattttgagaccccattaaaaaagttaaatgaga

SEQ ID NO: 506814 - DNA, 336 bp, Homo sapiens
  misc_feature (63)..(63): n is a, c, g, or t
  misc_feature (234)..(234): n is a, c, g, or t
  misc_feature (286)..(286): n is a, c, g, or t
  misc_feature (302)..(302): n is a, c, g, or t
atatcagactccaagttcttcagcttttggactcttggacttacaccagtgttttgccagggntcttagatcttcggccacaaactgaaggctgcactgtcagcttccctacttttgaggtttttggactcagactggcttccttgctgctcagcttgcagacggcctattgtggggacttcaccttgtgatcatggaagtaggaagtgattatccacattccataggaaggangaagcggcttcaggaatgggtctcatctccagggggagctgtccctcttctnggatctctggggcaantccagttcacaggcaccctttcttcctcctaggc

SEQ ID NO: 506815 - DNA, 130 bp, Homo sapiens
  misc_feature (47)..(47): n is a, c, g, or t
  misc_feature (70)..(70): n is a, c, g, or t
  misc_feature (81)..(81): n is a, c, g, or t
  misc_feature (100)..(100): n is a, c, g, or t
  misc_feature (105)..(105): n is a, c, g, or t
  misc_feature (108)..(108): n is a, c, g, or t
  misc_feature (117)..(117): n is a, c, g, or t
ctagccctagcccctagagcctagctacctagctagggactctcctncccctagccctagccactctctntagctactaangagcccactagcgccatangctcnacnctctaaccnctcctgggctact

SEQ ID NO: 506816 - DNA, 281 bp, Homo sapiens
ggatctgggccatacattgaattccttgagccctgggatcatggctttgatccaactgcatccagcctaggctgctgacgtttgacaccagggcagtaaagagtgcccttttgtatcttaaaccaaaaaatgaggcctgggggtgggggaggggggaaagggtgggaaaaaccaaaatagggcctgcagcatctactactctgttttccctattcagaacttggaactaaagtatttaaaaaaactgattttaaatgcaaattaaagggcagatattctca

SEQ ID NO: 506817 - DNA, 438 bp, Homo sapiens
  misc_feature (31)..(31): n is a, c, g, or t
  misc_feature (222)..(222): n is a, c, g, or t
ccgcaacactcccctaccaccttgtggacgnttgccctggcgcgggcgattctcagccagtgcatgtatttcctcgccgggttcctttccgaaacataatcccgggaaatttcgactccgggagggggatggggcggtgggacggggcggacacgacaaccggggacgcagattttaacccggatcatagacgaaaagaacttcccctttttctgacgcgcnggggcgggagaatgaacggagggatgttcagtctatccggagggatgcatgtcgagaggaaatggtcctcctcggagccaaatttttattaatccacaagccccacccaagccggggccgcccctcctgggcgaagcagcgcccgcgagccggcgatcgggaggcgccaggagcccggaatctcacaatcgcgcgggctcggagtccgggcggccc

SEQ ID NO: 506818 - DNA, 355 bp, Homo sapiens
ccccggccagggttttttttttccccccccgggttgttccccaaatggggggggggggggggccgcccccattttttaaaaaaacccctttcccttggccctgggcccccaagtttttccctttaaaccaagacccgggcttttccccccccccctttttcgggggccccttaattaacttccccccccccccgccgggcccccggtttggaaaagggggggggggaaggggaaaggggggggcccccccccccccaaagggcccccctttttggggccccccccttaaaggggggggggggggggggggcccccaggttttttttttttggggcaaaaaaggtgttttgcccca

SEQ ID NO: 506819 - DNA, 102 bp, Homo sapiens
tgtgccagcagttactctgcggcgtcgggtcatggctacaccttcggttcggggaccaggttaaccgttgtagaggacctgaacaaggtgttcccacccgag

SEQ ID NO: 506820 - DNA, 749 bp, Homo sapiens
  misc_feature (67)..(67): n is a, c, g, or t
  misc_feature (269)..(269): n is a, c, g, or t
  misc_feature (628)..(629): n is a, c, g, or t
  misc_feature (631)..(631): n is a, c, g, or t
  misc_feature (633)..(633): n is a, c, g, or t
  misc_feature (639)..(640): n is a, c, g, or t
  misc_feature (646)..(646): n is a, c, g, or t
  misc_feature (657)..(657): n is a, c, g, or t
  misc_feature (660)..(661): n is a, c, g, or t
  misc_feature (663)..(663): n is a, c, g, or t
  misc_feature (683)..(683): n is a, c, g, or t
  misc_feature (685)..(685): n is a, c, g, or t
  misc_feature (692)..(692): n is a, c, g, or t
gggcttccggtgcctggctccgtttcctgcttttggttcttacagtagtcggcgtaggccttagatnttttactgtctcctgaagaatttaacacaaacatgggatatcagaccaaatcatacaatttatatcaacaatatgaatgacaaaattaacaacaggacagaaatgaagagatccctatatgcccgtgttttctacagttagggtcatgtggtggacatgtgtggctttaaagaccatgaagatgcagggggcaggcctttgntcatatttaagtgaactgggctcatccacaaatgccttgaagacagctacaaggattctccattttatggtaaaccaatgcgaatacagtatgcaaaaacagattcggatataatatcaaaaatgcgtggaacttttgctgacaaagaacaacgaacacccgacaacgaaaaaaagccaaaaatgtgggaacagactgcaaacaaccaaaaacaaaaagcctggccagggaactccaaattcagctaatacgccaagggaaattcaacaccaaatcctcaggttcctgattaccctccaaatatattttattctcttaataactttaccagaagagactacattgagatgatgttatcnnangnctgttnnaatccngttcccctggnttnnanggaagtaccgtctggtaccngnggaggcntgacattgcttgtcgtcgactttgacacaatgatgggggtgttggagttgcagggtg

SEQ ID NO: 506821 - DNA, 292 bp, Homo sapiens
atatgctgttaatcacccccgaaatgaagtggcaggcttcacactttctggtcagaaccacggcgcacaaaaacaaaaacttgggcaagcactcacaatattagatattcattaaaaaagtatatatagggcgggcaccgtggctcacacctgtaatcccagcactttgggaggcccaggtgggcagatcacttgagctcaggagttcgagaccagcctgggcaacatggcgaaaacccatctctacaaaaaattaaaaaaattagctgggcgtggtggctgcttgggagac

SEQ ID NO: 506822 - DNA, 104 bp, Homo sapiens
ccctggcgattcgcgtgcatgttggctcctcagcgtcgccgctatgaagaaagtgttcaacagctccggctggagccggactaaccgcgtaaaagttcccaggc

SEQ ID NO: 506823 - DNA, 95 bp, Homo sapiens
ttctgtgccgcggggagaccagtcatggctacaccttcggttcggggaccaggttaaccgttgtagaggacctgaacaaggtgttcccacccgag

SEQ ID NO: 506824 - DNA, 131 bp, Homo sapiens
agccccaaccagacatctgtgtacttctgtgccagcagtgatggacaggggaatggaatcagccccagcattttggtgatgggactcgactctccatcctagaggacctgaacaaggtgttcccacccgag

SEQ ID NO: 506825 - DNA, 109 bp, Homo sapiens
ctttttacaactgatgttcgttaaagccaccaaccacacgcacccattgcggtgcgggcgttaccgccacctgccgcttgagcatgtccatggcatcggccagcggtgg

SEQ ID NO: 506826 - DNA, 130 bp, Homo sapiens
tccagtccacggagtcaggggacacagcactgtatttctgtgccagcagcgacaggctcacccctccactttgggaatgggaccaggctcactgtgactagaggacctgaacaaggtgttcccacccgag

SEQ ID NO: 506827 - DNA, 236 bp, Homo sapiens
gttttctaatgcccccctgaagtttaaatttgtggcccaaacaatgtaagcaaggggtttgtttttttaaattgatttgtaatttgaaaatactgaacaactcctattcccctttttggtaaacccaatttttgggtttgggaaaaaaccattccagcttaatgcctttaattttaatgccaacaaaattggggggaatcaaattttaaaaaaaaaaaaatttggcccccccttta

SEQ ID NO: 506828 - DNA, 114 bp, Homo sapiens
gacagcagcttctacatctgcagtgctagacgggacggaatacacccctccactttgggaatgggaccaggctcactgtgactagaggacctgaacaaggtgttcccacccgag

SEQ ID NO: 506829 - DNA, 1061 bp, Homo sapiens
gaagttcctcatggtacccattctagatcgtaatggctttgctactgcttggcgaacaacagaattctatgctatataaaaatactcactggcccgaagcgtttgtatgcccctactagggctagtacgagccattcgctgacgccattaaaagttctacatcgaaggaggctcctaaagacacgtcagaagtcatagacaatcgagcccctcgacagtcatccgccctcgtatcctttaggcgtctaagctatcgagtcttgttctagatagtggaaccggacacttacccaattagggccaatcgcacgccgtgtgtcagagtcgtcaaggctgagcgccttgctctattgtaattctatatccacgcgtgttatgcgaaatggcggttgtgacttccattcgatatgatcttggtgtcgcatcattggatcgtggtgtacgtggcactattcggaagcaagtcgtgagacaacgcgaatcaccagaggacgtgtctcatacgtgaaagctactccgcgtatgatccgttgagttttgacataatcaggaatgactgtaaatgaggatgtgactcccgttcatgaccgtcctcacaccccttagtcaagattcaacaagtaaatagcatcctgagttaagtcgctaagcaatcactggatgccgttgttcgcgttggatactcgaatcttagtctctccagtgtaccaagaattacccgagcaacgaatgtcgcgactgtacggaaacgtttgagcagaaaacgagcaaatcccgagagctacctctcaatggggttcacgatacgatgtatgtcgagggactcttcggcactattcttcatatgccgaatgtggtgaacctgataataaataaattggcctctggcatatgagacttcctaggaagcaaatttgaggcactgtccttgtgatctacacaacattgttcgtcacgcatgacctttgttttacctccggttgtttgaattcgacgattgcccgtttcgctagaacagtctcacggccttgaagaatgtacatccggttttttagatgtcc

SEQ ID NO: 506830 - DNA, 110 bp, Homo sapiens
aacaatgctgagagtgtacctcctgaggatctttcctgtgccagagaggtggggctggatgtctccatctcgtctcttctctatgtacatctcgatctcttctctatgta

SEQ ID NO: 506831 - DNA, 404 bp, Homo sapiens
atgaggatgtcatcattgaagtgaatggggtgaatgtgctacatgaaccctatgagaaggtggtggatagaatccagagcagagggaagaatgtcacacttctagcctgtggaaagaaggcctatgattatttccaagctaagtccctatcgttgcctccctggctgatccacttgacacccttccagattctaaagaaggaatagaggcggagtcaaaccatgactcgcacatggctgaacgggcccacagtacagcctcacattcttcttccaattctgaggatacagagatgtgatgagaacatgtaatagcttgggctgatgatttgatagctgttactgggtatttaataggaatcctttctcagggtgagttgtgacctgtttactgtctctatagtg

SEQ ID NO: 506832 - DNA, 108 bp, Homo sapiens
tgcgccagcagccaagaaaccgacatcgtctggaatcagccccagcattttggtgatgggactcgactctccatcctagaggacctgaacaaggtgttcccacccgag

SEQ ID NO: 506833 - DNA, 199 bp, Homo sapiens
cctttttgggaatgcaagccgatccacctcctgacataggagaactgattctgacgaaatgcctggaggaggggaatatttaaaaataaaattggtgacacatattttctacattccccaagccccccccccaaaatcctcatgtttatgcttcattttttgaaaaataacaattaaaacaggcagctgtaatggggta

SEQ ID NO: 506834 - DNA, 105 bp, Homo sapiens
ctctgtgccagtagtggccggctcttcaggaatcagccccagcattttggtgatgggactcgactctccatcctagaggacctgaacaaggtgttcccacccgag

SEQ ID NO: 506835 - DNA, 109 bp, Homo sapiens
tgcgccagcagcttgctccccggcgggggggataattcacccctccactttgggaatgggaccaggctcactgtgactagaggacctgaacaaggtgttcccacccgag

SEQ ID NO: 506836 - DNA, 451 bp, Homo sapiens
  misc_feature (4)..(5): n is a, c, g, or t
  misc_feature (90)..(90): n is a, c, g, or t
  misc_feature (101)..(101): n is a, c, g, or t
  misc_feature (196)..(196): n is a, c, g, or t
  misc_feature (223)..(223): n is a, c, g, or t
  misc_feature (279)..(279): n is a, c, g, or t
  misc_feature (288)..(288): n is a, c, g, or t
  misc_feature (312)..(312): n is a, c, g, or t
  misc_feature (396)..(396): n is a, c, g, or t
  misc_feature (406)..(406): n is a, c, g, or t
  misc_feature (436)..(436): n is a, c, g, or t
  misc_feature (446)..(446): n is a, c, g, or t
tttnnccctttttcttgaggtcgagactcactctgtcatcacccaggcaatggtgcaatcccggctcactacaacctccacctcccaggntcaagtgattntcctgcctcggccttccaagtagctgggatcacaggcacctgccaccatgcccggctaattctgtatttttagtagagacggggtatcaccatgntgtccaggctggtcttgaactcccganctcaggtgatccacctgccttggcctcctaaaacgctaggattacaggtgtgagcnaccacaccngacctgaatggttattttttaganttacaactatacaagtatttactatgtagttgaatctgggaaacttctatatctgtgggcacacagatacattcatttgacatnacagtagtgngctttcataaaattggttggaaaattttgncaccttttgnttttt

SEQ ID NO: 506837 - DNA, 103 bp, Homo sapiens
tacttctgtgccgggcgacaggaccataattcacccctccactttgggaatgggaccaggctcactgtgactagaggacctgaacaaggtgttcccacccgag

SEQ ID NO: 506838 - DNA, 415 bp, Homo sapiens
aaacgggaagtgtgataaggagcgtcgatctcataccggcgattcgggtctcatcaggagtgaagtccacatcggggatggagatctgaggagcattatagtcgactgggcatcttaaatacggagccttacaactttcctgcgggtccctcaatatccaaatcaggagcatcagtgtccacactgggtccagacacatcaatgtcagcctggggcagattcacatccacttcagggacctctgcggggaagccaggcatactgaacttgggcattttcatctggggcattttcaggtgccaatctgggtcgtgaacctccacatctggggcatcaatgtccactttgggccctttaatgtcaacatctggcactttcatttcaccttctaccttgggcacagacactggcaggt

SEQ ID NO: 506839 - DNA, 369 bp, Homo sapiens
ctacatgtccacataatgcaagcatagggtgttgactgactgtaagctcggtctgaatgtatagtctcagagacaagcatgattcgtctcaacgagcgctagtatgacaagaattgcacagtgttctatagtgattgagataatgttctattgaacagtgagcttggttcctggtgccacattctgagagtctgtgacaacctgtagtttatgccagagagtccacgtacttcattcaagtgatggtctggaaagcgcatctaaggcacaagtcgaccgcctagagtgaagaggtgctatgggttcccccatattgatggtgagcaagagtcacatatcgcgtgtaggtataatatgactaaagctttc

SEQ ID NO: 506840 - DNA, 650 bp, Homo sapiens
  misc_feature (6)..(6): n is a, c, g, or t
  misc_feature (11)..(11): n is a, c, g, or t
  misc_feature (20)..(20): n is a, c, g, or t
  misc_feature (32)..(32): n is a, c, g, or t
  misc_feature (44)..(44): n is a, c, g, or t
  misc_feature (55)..(55): n is a, c, g, or t
  misc_feature (65)..(66): n is a, c, g, or t
  misc_feature (72)..(73): n is a, c, g, or t
  misc_feature (88)..(88): n is a, c, g, or t
  misc_feature (95)..(95): n is a, c, g, or t
  misc_feature (97)..(97): n is a, c, g, or t
  misc_feature (102)..(102): n is a, c, g, or t
  misc_feature (108)..(108): n is a, c, g, or t
  misc_feature (130)..(130): n is a, c, g, or t
  misc_feature (133)..(133): n is a, c, g, or t
  misc_feature (137)..(137): n is a, c, g, or t
  misc_feature (142)..(142): n is a, c, g, or t
  misc_feature (147)..(147): n is a, c, g, or t
  misc_feature (172)..(172): n is a, c, g, or t
  misc_feature (182)..(183): n is a, c, g, or t
  misc_feature (185)..(185): n is a, c, g, or t
  misc_feature (200)..(201): n is a, c, g, or t
  misc_feature (214)..(214): n is a, c, g, or t
  misc_feature (231)..(231): n is a, c, g, or t
  misc_feature (260)..(260): n is a, c, g, or t
  misc_feature (264)..(264): n is a, c, g, or t
  misc_feature (267)..(267): n is a, c, g, or t
  misc_feature (282)..(282): n is a, c, g, or t
  misc_feature (288)..(288): n is a, c, g, or t
  misc_feature (293)..(293): n is a, c, g, or t
  misc_feature (312)..(312): n is a, c, g, or t
  misc_feature (329)..(329): n is a, c, g, or t
  misc_feature (371)..(371): n is a, c, g, or t
  misc_feature (374)..(374): n is a, c, g, or t
  misc_feature (390)..(390): n is a, c, g, or t
  misc_feature (394)..(394): n is a, c, g, or t
  misc_feature (401)..(401): n is a, c, g, or t
  misc_feature (407)..(407): n is a, c, g, or t
  misc_feature (414)..(414): n is a, c, g, or t
  misc_feature (430)..(430): n is a, c, g, or t
  misc_feature (438)..(438): n is a, c, g, or t
  misc_feature (449)..(449): n is a, c, g, or t
  misc_feature (451)..(451): n is a, c, g, or t
  misc_feature (475)..(475): n is a, c, g, or t
  misc_feature (479)..(479): n is a, c, g, or t
  misc_feature (496)..(496): n is a, c, g, or t
  misc_feature (504)..(504): n is a, c, g, or t
  misc_feature (562)..(562): n is a, c, g, or t
  misc_feature (648)..(648): n is a, c, g, or t
tctcanttaanttttttaangggtctcaaaantctgtgaaaaanttttggtcaanttgtttccannaaaaannactgattttaaaaanaaaaaantnaaaantgccanacgcaaaaaaaaaaaccaaagnggnccanaaaanattcncctttccttctgaaggttttacgangcattgttannantaaccagttttttannacaaaacttaaanggccaattgaaaaaaanagttctgagaccgttcttccaccactgantaanagngggggggcagggatnaggganaaaantcatttagccttctgagcnttctgggcagacttggngaccttgccagccccagcagccttcttgtccactgctttganganacccaccgcaactgtntgtntcaaaanacgaanagcaaancgacccaaaggggganagtctganaagccctcaananaaatgggcttgccaggaaccaaanaaanaatggcagcctcaccanaattcaanaatttagggccatcttccagctttttaccagaacggcgatcaatcttttccttcagcncagcaaacttgcatgcaatgtgagcgcgtgtggcaatccaatacaggggcatagccggcgcttatttggcctggatggttcagganaa

SEQ ID NO: 506841 - DNA, 2618 bp, Homo sapiens
gcgcgtcgggagctacgtagggcagagaagtcatggcttctccgtccaaaggcaatgacttgttttcgcccgacgaggagggcccagcagtggtggccggaccaggcccggggctggggggcgccgcgggggccgcggaggagcgccgcgtcaaggtctccagcctgcccttcagcgtggaggcgctcatgtccgacaagaagccgcccaaggagtcgcccgctgtgcctcccgaaggcgcctcggccggggcccacctgcggccactgctgctgtcggggcaccgcgctcgggaagcgcacagccccgggccgctggtgaagcccttcgagaccgcctcggtcaagtcgggaaattcagaagatggagcggcgtggatgcaggaacccggccgatattcgccgccgccaagacatatgagccctaccacctgcaccctgaggaaacacaagaccaatcggaagccgcgcacgccctttaccacatcccagctcctcgccctggagcgcaagttccgtcagaaacagtacctctccattgcagagcgtgcagagttctccagctctctgaacctcacagagacccaggtcaaaatctggttccagaaccgaagcgccaaggcgaaaagactgcaggaggcggaactggaaaagctgaaaatggctgcaaaacctatgctaccctccagcttcagtctccccttccccatcagctcgcccctgcaggcagcgtccatatacgcagcatcctacccgttccatagacctgtgcttcccatcccgcccgtgggactctatgccacgccagtgggatatggcatgtaccacctgtcctaaggaagaccagatcaatagactccatgatggatgcttgtttcaaagggtttcctctccctctccacaaaggcatagccagccagtactcctgcgctgctaagccctcgacgttgcaccccaccccctctaacggctagctgacagggccacaccacatagctgaaatttcgttctgtaggcggaggcaccaagccctgcttttcttggtgtaacttccagagtccccccttttttcccttgcacaaaagcttggctctgatggtttttttggcatgatgtatatatatatatacgaaaaatactacagaccctttttatcagcagacgtaaaaattcaaattattttaaaaggcaaaatttatatacatatgtgctttttttctatatctcaccttcccaaaaagacacatgtgtaagtccatttgttgtattttcttaaagagggagacaaattcggaggagcgccgcgtcaaggtctccagcctgcccttcagcgtggaggcgctcatgtccgatttgcaaaaatgtgctaaagtcaatgatttttaccgggattattgacttctgcttatacaagaagccgcccaaggagtcgcccgctgtgcctcccgaaggcgcctcggccggcctgcggaaaaacaaaagaaaacagacacaatgcagcagccagaaaatattagatatggagagattatggccactgctgctgaccggccacggcgtccgggaagcgcacagccccgggccgctggtgatcaaagtgaacccacatcatatttctgcattttacttgcattaaaagaaacctctttataagcccttcgagaccgcctcggtcaagtcgggaaattcagaagatggagcggcgtggatgctacatacgttgttcctatctcccgcccacgcccacacatatttttaaagtttttaggaacccggccgatattcgccgccgccaagacatatgagccctaccacctgcaccctgacctttttaagaatatttttgtaagaccaatacctgggatgagaagaatccgtagactgccggaaacacaagaccaatcggaagccgcgcacgccctttaccacatcccagctcctcgccctggaggtgaggtagaaaaattagaaatacttcctaattcttctcaaggctgttggtaactttggagcgcaagttccgtcagaaacagtacctctccattgcagagcgtgcagagttctctatttcagataattggagagtaaaatgttaaaacctgtgagaggattgtacagctctctgaacctcacagacccaggtcaaaaggttctgagaaatactaggtacattcatcctcacagattgcaaaggtgctttgggtgggggtttagtaattttctgcttaaaaaatgagtatcttgtaaccattacctatatctaaatattcttgaacaattagtagatccagaaagaaaaaaaaaatatgcttctctgtgtgtgtacctgttgtatgtcctaacttattagaaaaattttatatctttttacatgtggggggcagaaggtaaagcatgtttgacttgtgaaaatgggatgtcaaacagccataagttccctggtattcaccttcctgtccatctgtcccctccatcggtatacctttatccctttgaaagggtgcttgtacaatttgatatattttattgaagagttatctcttattctgaattaaattaagcatttgttttattctgaattaaattaagcatttgttttattgcagtaaagtttgtcca

SEQ ID NO: 506842 - DNA, 483 bp, Homo sapiens
tgccaacgagcttgacccaatgtcgagccatgatgtactctggggagcttcattgtctgagcaagagaacgtcctcagacccagcgtggcaaggtggcgtccatagcctccattcgtatgagaagccggctttgctgaagaagggatccagccacacctcctcggttttcttttttgcaataaaacgtttagaaacgaagagaacaatcaatggtgaagcaatagaagccagggagccgggacgtccttacagaatgtttcccgccccgagggggcgcacaccaaggcagttggccatccctcgacgctcttgcttggtaccccagtggtcgcccttgagtatgcgtctccgaattagtagacgacgatgccaggagaccattcttgtcaccaacacctttctacaagtatggagacacgcgcgtaggcccgcgggaacgatgtatgcggcccgcaaggatggcacacacgcttagactctga

SEQ ID NO: 506843 - DNA, 231 bp, Homo sapiens
accctcgtccactagaaagggaggcagtacagttttgattgtttagccatttagtggtgctttgttatggcagctggcataaatcgaatacatcatccaagggccatggtttcacccattcatctactccccgtaaaaaaaatcagcataaccagcacaaccactaccatcaccatcatcaccatcaccactaccaccatcaccaccattaccagccttgccctttctggt

SEQ ID NO: 506844 - DNA, 749 bp, Homo sapiens
agcttcaataccctggatattaaagtctcactgtggaccggtagaagaaaacacagctcttttgaatagtcacagtaatacttccccttaagctccatttaaaacaatagcttgttaaataacagatcaccagattttgaccatttaaaacaatagcttgttaaataacagatcaccagattttgaccatttaaaacaatagcttgttaaataacagatcaccagattttgaccatttaaaacaatagcttgttaaataacagatcaccagattttgaccctcgctgcacaatagaatcacctggaaagcttttcagaaataacaatgcctaggcccccgcccaaccaattgaatcagaatttctggggggtggaagttgagcatccatgttttccaagagatttctagatgattctaataggcagctggcatgaagaaccagtgctctcaatgaactgaataccatgtttcttgagaacctgaaacaggcgccgcatgcataaaacaagcccagggaactgagactcactcggctgactctaaacagtgctctgccactagcacaggactccaccctcaaggtggcgtccccgaaggtctcccagaaggcctcacccctttcccagcgccaccacccatacctcctcagaggaagtctcagcactgaaaaacggcttgttgaataagcagaaccaattatgtggacatgtatcatctctttgtagatgttaattaagcggccgcaagc

SEQ ID NO: 506845 - DNA, 798 bp, Homo sapiens
cgccggaggaggagacccattctataccaacacctattctgattggtacggtcaccctgaagttaatattcttatcctaccaggcttcgagaagtaactctcgccgatacttgtacactgtactacatccgagaagaaaaaaacgaaccattctggatacataggtatggtctagagctagtgatagtcaattgggttcctagggttctatcgtgtgagcacaccatatatttacgagtaggaatagactgtagacacactgagcatatttcacctccgcgtaccataatcatctgtcgtatccccaccggagtcgaaagtagtttagctgactcgccacactccacggaagcaatatgaaatgatctgctgcagtgctctgagccctaggattcatctttcttttcaccgtaggtggcctgactggcatatgtattgagcaaacatcggatcacatagaggatcgtactacactgacacagtactacgtagtagctcacttccacttatgtcctatccaagtaggacgctgtactctgtgccatcataggaggctgtcatatcgactcgatttcgcccggatgtactcagtgtctacagcctaagtatcgaagaccatgacgccgaaaatccattctcactagtcgatattcatcggcgtaaatctaacctttcttcccacgaagactttctcggctatccaggaatgcccgaagttactcggactatcccgatgcatacaccgaattgaagatctatcatctgaaggggtcattcattggtctaacagccgaatac

SEQ ID NO: 506846 - DNA, 313 bp, Homo sapiens
gctcaagttgatcctcaaagtatgtaactcaataaagatgcattctcttctaatataaagtttccatggttaatacagaaatcgtccaggggtgggggttcaggccagtaatctcagcactggggaggctgaggtagaaggggaggtgctggtgagtggaccaggcttcgggaaccagcaagttttacagtagtgggggaagataaactaagggggagattggcccggattctttttcccggttctcaacagtatggcggattcttctacggtagaccacagctcaggtagtagaagtgaaaatctcaagggg

SEQ ID NO: 506847 - DNA, 306 bp, Homo sapiens
  misc_feature (38)..(38): n is a, c, g, or t
tgtccagagtgtggaaagggatttagtcgtagagcagntctttaaattcactgtaggatccataccggtggaaaaccatataattgcccggaatgtggtaagggcttcactcaggctgcacattttcacatccatcagagagtccacactggcgagaaaccctataaatgtgaggaatgtggtaaaggctttagtcggccttcaagtcttcaggcccatcagggagttcaactggagagaagtcatacatatgtactgtatgtgggaaaggctttactctgagttcaaatcttcaagcccatcaga

SEQ ID NO: 506848 - DNA, 150 bp, Homo sapiens
cccttctcaataaaaatgtacgcttgctgacacatgcaggcatgaggcggtcctgcttcttggtcaaggagactttataaggcacttaatggacttgctaaaaccatgaacttgtcctgtccatgccacgagtatgttcgggggtaccga

SEQ ID NO: 506849 - DNA, 454 bp, Homo sapiens
ataacttggagtgtttccgaaggataagaaaaccttccatgaatgggggtaacacggaatgaaactcctcagtggcccaattcgtgccgcgttccccgttgggcccggcaacactggggttgtatgcgtctggaaccctgtgatagtcttcggcttgccagcctggtccaccacatccactgcctggtccacacggacagactctggcaatggccgcagctcctcatcaaacgttaccgagcattcggggctgcattgcgagccaccagcccatacaatacatagtgtgatttgcctagaataatgtttcgaacatccaggaaagagacaagcacagtgagcagtccagccacggccatccttgctcataagctgccggtcgctgtggtaggggcagagggtaagggtgcccttccctatatgtgtcaggccctgtgctcatgcgcaccatgaa

SEQ ID NO: 506850 - DNA, 327 bp, Homo sapiens
agtagagacagggtttcaccgtgttagccaggatggtctcgatctcctgacctcgtgatccgctcgcctctttctcccaaagtgctgggattacaggcgtgagccaccattcctttctgacactggttttaagaacttccttgaggtctgctttatttatcaagggttctaagttaactttgcaaaagttacaaaacagattaatagttgttagcttatgctaactcactactggcctatctttaagtaaagggctacctgttttggaactctgcctttcctcctcagagctctgtatcacatagaaatggcttccttgtataaagc

SEQ ID NO: 506851 - DNA, 206 bp, Homo sapiens
ggtagacgtaagagaaaggaaggtcgtgtatggcgtacaggagcgtcgttgttcaggcgtcagcccaggacgcggtagtcagcagcgccggtaccccgcagcccgaaggaggttacgatgggataaaagcggcggttaagatcccgtatcgccgggcaaaaaggaggaggcgcggcaagacggtgaggcaagtctgagccgcacgg

SEQ ID NO: 506852 - DNA, 900 bp, Homo sapiens
ggtatctaggaactgatcgacgtgcagagaggccaaggaaagtgcgcatgaggaagagagacctcatatggaccattgtcgtcattggtacaccgtgtatccggcgcaagtccacgattacttcggccatctgatctatacattcgcggagcggatagacctagaaggcaacccactgtggagagacacacttcgggcaggcaaggcggagcgcggggcatggaaggaattggaaggcaagacgagggcatccatttcaaggatagttggtctccgagctcctcggggcataccccactagagctggctagacacggtagataaccgctgtgtgataacttcaccataaggagtaactcctgcgctgtgctgtgacaacatctttggtaaggcaccgcaaggccacactgtctaccctatctgatagatcatatctctacgtatgatttgggcacccctaagtgtgaatccaagctaccagaagagggctccctaagtcaagaaattagaaacccacctcgattatattcgaaaggggggatcgaggtctatctataaggtccatggaggcgattggaaaggccttagatctctttggaactcctcgattgtaagcaataggttttgccgcttggttttcgaggataggaacatttccctcgaagatgaacttcgtgaattaattcgttactccagacgtaacactcgagagccgagggaacgcgcctgtatgaaaaggcctagttgaaacccaaccctaaggtgggccctggtttagacacctatcttggtgaagatccgatcgggaaaaattcattaccaattaacctgggaaccaggctttgttgtttaaaaccacccgaggactgcggtgggtttcctggcttgttacccacacaa

SEQ ID NO: 506853 - DNA, 1002 bp, Homo sapiens
  misc_feature (898)..(898): n is a, c, g, or t
taaagggtgggcttttattccccggggtccaaaagggggaaagaaaacccgcggggggccccccccccccccacaggaaaaaaaaaacctcttaaaaattcccaaggggggggaccaacagagggggaaggggggggcacaaagggcccacactcatacacaagtaaacccacaataaaaacaagtcaatcagagagaaataataaaaacacatactgcattacatacaaattacacacaaaacacagaggaatcaaccaccccccgcgagggatgaagctgggaaacaggaggcggcccaaccccctttagaaaaagaggtgggcggcatccataagaggccacagggcagcatctccctggtacaacaggtcctccacaatatagtgggacatggaactatcaaaacacaccaaacagagtggcgacaaacaaaaacctctcgctggcccaaatgagaaacagcggggggggaagatcacggcctcaacaccgcgaggtggtgctaaccaccatcaccgcgggccacaattattagaaacgtccagagaccacggccacaaaaagagacaaaaacaaccgaaacacagacaaacagaaccacaaagcaaggcgacgaccaaaccccacgtattagaccgcccacacaatagtcttctgctcaacaaggcggggtcccgaaaaacacttatatggcccgctaaaaacccttcggtcgcgacaaacaaagaagggcgccaaacctaaaccaaccctcgtgctgtgcaaaccccactcttgcggaacaaggtcacacgaacgcccaataatgaccccctatccacggatatttcgccacgagaaacacaagctatccataccaataagggaggcggaccagaaggacacctactcacanctgttgaacgcacaactggtgcgcccacacactgtatttgtaacgatcaggtctacccccaataggaaagtctggtatgagactctccaataactatgcccagc

SEQ ID NO: 506854 - DNA, 803 bp, Homo sapiens
gtatgaacaattccggcatggggcgacctcggactcaggaaccccaacgctcgcgagcagtgaatgtctaaatattcaccagctcaaggtgaactactatactcaatcttcgatccaacaaacgagatacattacaggaacaaagtaactcctataggcataacatgcgcatatccatatttcttaaaagtccaatatcaaacaatatgggtgaacgaggaccctcggatcctgcttgagttcataggacatctccctagatgagtgcagactgggtcattaaaaggttcctctcttgtgcaaatcgatgttacaaagtccctatctggtgactcatgagattcagaccagtatgtataaccagagtccgggtatgcccactcctacttctgagttgctcgccgtgagaatggaacaagcagaactaaggatcttactcctgcaaatgggcctttccctcgtcaatggagtatcatctccaactctagttattctacacctcatagataatatatcgaaaaccatccagacacctaactcattcaaaggcaatagccctggccgtaagcctaaccgactaacattactggggggccgacgcgaactcatgcgagactaagtgaaagcgccaccggaggcaactaatcaaaccatggggcttccctctaggctggtcatctctcacaatttcaaaatgcgcacgggctatcctagaggtcgctgcgccttaagccaagcctccgtggccacactggaagtgagcccgggctggcggagagcgaaaaaaaaccgcgcccgggaaa

SEQ ID NO: 506855 - DNA, 815 bp, Homo sapiens
  misc_feature (129)..(129): n is a, c, g, or t
  misc_feature (177)..(177): n is a, c, g, or t
  misc_feature (179)..(179): n is a, c, g, or t
  misc_feature (181)..(181): n is a, c, g, or t
cttgattattggcagttaacaataaaatgttattagatcactggtgcttctgtgtggggttgagttttttatgatatcttctgttagacccataagggaggctgtgagttgttttctacatccttggantatataagatcctcttttaaaattatattttatataagcacatgaaantngnatgaaataatgagttgacataggaattacctacatattttggctgtacatttagtgcacaaaatatcccttttttgaatgccaaatggccaagtgtgaaaaccaatatttgttaaagctggagcagaagtcggtatcatcatcatagagtaaacttctggcatatgtgaagatatgaaatgttatccctgaagttattataatttattctcagaaatattagtaatcttattttaagagtaggacattatagtgcagtaatgataattttctcagtgctgcctgttgctagattgttcctatgattgctgtcatgcacatacagacactaaattgagggtcactttccactgaagttagtggaatacaaaataggtggaggaactttcttcctctaacgtctttatatgtgtctgtgtttatatatacgtgtatgtatataaatatgtatacacatatataatatctggagcaaaaatgattatgttgtaagaacttttggaggttttcctcctcgtaaaattccgaagtggtagagttaacattctgcttttaatttatctacaaaaacatgtgaagaatccccaaataagattttctcatagaagattcatggattttgagaataagaaaaa

SEQ ID NO: 506856 - DNA, 887 bp, Homo sapiens
gagactgcactggcgttttacagagctaacaatcctactgacaaagcagataattggaatttctagatacaatatggttccatgtgaagctggacagtatatcagtacaattacagtgcttcgtgttctgaaagagacaaaggcgtttaatccccgaaggaggaagtgagatatgccaggtgtctttggctacatggcatccgtgacatgtgtgcgtgcaagatcgcaaggaatgtattaacagttgactcttatcactctttcttacacttattcagaagcacaggaagggcactgagtagccagttccaggatatgatgggagtcagcaactaagtgcttccttcgaaggttgtgatttgggggaaaatgcatatatccctatcttcgtcaagaggagaagaatattgtgagcaataagtatgaaggcttgatattttaaagtgaattattgttttctcacagtaatgttttttcagcgttaaactttgagagaaccaagtgcagctgttatcataggaacgctcatatgcctagactagaatatagtgatgattattcagatacctatgactgaagagtgggagtacctatttaagaataaaggcgctggtgtgtttaacatatgcaggcattgggtgcagcttaatttccatgaatttcctttccagattatgaactcttcatacttgcaagcatgaatctggacatgtttttcaaaatgggtggtcaagggtgatttgtcacagtctacgggcagaaagtcttacccggtatgggctcggacgaactggggtgtttcctataagaaaagagattaaagccaggggagaggggcaaccaaaagtcagagaagctttcaatgtgcgcgagggagtacacgagga

SEQ ID NO: 506857 - DNA, 1245 bp, Homo sapiens
cattcatcccggtcacttttgtgttacatggacgtggcacgctggttgcgacgaggtggagctggtgggcagggtttgatcccagtgacctggtgcaactggacgtgtgtagcttggcagcagctgtggcatgtgtgagtgaccccatcttgcctgggcagtgtgagtcaccttaccctccccaggactcgcttccccagccttctgaaagaactggacggtttactgtggactctgaaggtgctgtgcagtgggacgaatgcacgatcacaccatcccatgcatgatgggtgcacgcgactgtggtgtgcatgtgaagactgttatgcaaatgtgttgactcttccttcttcgagtgtgtgagatgcctggaaggaactttgctgacaactgtgtctttgggtgtgtggtctacttgtgtggccctgatctccaatgtgcatggagacatcgactgcaatgatgtgcgcaaggtggattggtgatgtcacttgtgggtgctgtgcccactgctggtcacctgtgtcccatgtcaaaccagattggcgagtgattgggtaacgcccccatagtgtcacctagtgtcgtccaactgaaacactgctgggacccaattgtggcacgtggatggaacagtcatgtgaaccacgactgtgggaggtcccgcacaaggccttgaccaaacacgtacaaagcgccatgtacgaaaaagtctccaagtatcttacgtcacgccatgggccaccaagcgtgcgccactggccttcctgagccagctgcgctttacccttccatgggccctatctgcccgggatgcccttcgcacagtgcgccttggcaagcaccgctggcgaaacgaacagggacaagttgcttctggggggcagcttggccagttaacgcgacagatcaaccaagatgatggggcagaacaacgggccaacagcggcaagtgcgtggggccccacggtggcagcaatttcgcgtgcaagataccggaattgctttggcttggcgacatcagcgccatgctgatacgcccttgtccaaaggaaggaaaccttgacgtggccacaggttcctgggttcctggacgaataggggcccaatacgtcgacggtttgcctacccttgttatggccatacaacctgttcacgccccatgtggggcatggcatcgtaacagatgacacagcgataccaatcgcgattccaagggcaatagggctgagaccagaaataggg

SEQ ID NO: 506858 - DNA, 153 bp, Homo sapiens
  misc_feature (84)..(84): n is a, c, g, or t
ccgtatagacgacagaagggaggggaggggagggtgaaaagacacagaaaagaaaaaatgaaaagaaaagaagcagtcctcttnaacagggtgcaagacatcctagaaaggcaaacgatttgtgagacgaaaggaagggcagtacgagacgag

SEQ ID NO: 506859 - DNA, 106 bp, Homo sapiens
gaaccctctaaatcccttgtaaatttaactgtagtccaaagaggacagctctttggacctaggaaaaaccttgtagagagagtaaaaattttacaccatagtaggc

SEQ ID NO: 506860 - DNA, 766 bp, Homo sapiens
ggcacgaaatctcacagacagcgtctgacaacctacgaggacagacaaactaaagcaccatgcattttgacacgaccaaaggccttgaggggggcacacatggcttctacgatggaatcagccagcggcacagaacaggacagagatgaacgaagcaccaatcaaccaagaccatgcaccagatccaggttctagaccacaacgtatcctcatggctttgaggccaagacgatccaaggatcttgacacaaatgctgaacctggcaaaatctcacaagacaggaagcagggccattctcagaaggaaactaaagctcacattggagcgggcacaaccagaccgacatttcctacagcatctgtgaacacgtgtgcaaagcagcactgaaagagcaagaagacgtcaaattggagggacaattcataatgctacattactcccttggacctttcccacagagttcccataagaataacccttcctacgggataaacgggcaacgggacgattcaccgtgcaacgagaacaccgaccgattgactgacacacacaataggtaaacgcttcaatacttggccactgggccacactctaaccacgcgttcgacaacaaatgtacttttgcacaagacactgggctggcacaggtcaccaagttcctggtctttcccaactacccctctgggccaatccaaggatggagtataaaacgaggtacccgggcacgtaccacagcctcccatggatgagctggccaaacaacgt

SEQ ID NO: 506861 - DNA, 491 bp, Homo sapiens
tgatctagaggacctcccagaggcacaggaggcagaggcgcagggaggcagatgacaaggggggtcttaagaatccccaattcagcttactcgattcaccaagtttcgctctaaggatgtgctgcctttaaaacagagtaggtcgaagtctttttacaagtcgccatgctagctttcagtgaatgtaaataacacgggtacgtgttcatgatgcagcaattcagatgaactacataaaagccctagcagccaagtcaggggctgttcacccttgaattcaggccaagaactagaaagagccagccttgggaatgctgaatttaccaacctaaatacgaagtggcacagcagcctcccagagccagcacagcaccagctagcccccaagggggctggtacccgggacggccaccagagctggctttcagaggcccaggcactctctacagagaatatgtgctggcggtaccgggaacccaaccctccagatg

SEQ ID NO: 506862 - DNA, 1314 bp, Homo sapiens
  misc_feature (336)..(336): n is a, c, g, or t
  misc_feature (406)..(406): n is a, c, g, or t
  misc_feature (480)..(480): n is a, c, g, or t
  misc_feature (482)..(482): n is a, c, g, or t
  misc_feature (488)..(488): n is a, c, g, or t
  misc_feature (494)..(494): n is a, c, g, or t
  misc_feature (550)..(550): n is a, c, g, or t
  misc_feature (791)..(791): n is a, c, g, or t
  misc_feature (1061)..(1061): n is a, c, g, or t
tgccaggcgcagtggctcactctatactgcaagcactttggcgaggccaaagcaagctgatcttgagtccaggagttcgaaactggcctgttcaacatggtgaaaccctgactctactaaaactacaaaaattagccgggtgtggtggtgcattcctgcagtcccagctactcaggaggctgaggcatgagaatcacttgaacccgggagctggagattacagtgagctgagattgtgccacatgcactccagcctgggtgacagagtaaaactctgtctcaaaaataataaaatcaaatactacacaatttattaagaaatagtcattatctttnagttggaacataaacttattcctgatcaagataatttgacatccttttattgtttaataacttacatgtngcttccttcatttttctcaaaaaatactctttatactaacattgctgtgattaagaaatggaaggaaaagtgtnanagtgtncagttntcactctgatggaaaatggtatggtcaaacctacagttgaatttggatggctcccnaatatatcatagttgtcattgccactgctatgaaaattacacttattcttttgtcatttcaaatttctcgaactcaatctattacacactgtatgtatagtgacatgccaactaaattagcaaatgacattttttaagtaaacttatgttttatttcttattttaataagtaatcctttcaaaagacattctgtacatgaactccaactcagaagggaatggaatgtggaaaaaaagaaanaaaacctgagtaacttttcctaaaaaagtctagctgttctcagtttgtggcaccaaatggggagcagggaatgttccagtcgcaactggctaattagcccaaccctaatttgttgataataataatgataaataataatgctagctaacacttactgagcaaatactaggtactatgtgaaatcattttcttgtattaactcacttaatcttcacagcaacccatgaggctggtactggttttatccccatgttatggatgaggtaactnaagtataaaaagattaggttactttcctcttgtcaactagagctgggattagaagctagtaatctcattttacactctgtgctcctgattataacactgttctagatccctttcttatgattaaggtacagcagtgttgctggagaatgctgacagctcagtcttcaaggatgtcccatactcccagcactttgtatcttgtgataaatgctataaataatggagtcatgaaccaaaaggtatgagaacccag

SEQ ID NO: 506863 - DNA, 769 bp, Homo sapiens
aaggaggctgctccaggagcacagacgtgcatctttggcttcagtcgtgtcccataccactgaggaaccctgaggtcccgtgccgacggagaacgtggaaagattactactttgtaaccaggtaggtgatgcacgcgtgacatagcagccctggcgactgtcatctgaggcatgccgagttctcgggggaagcctgtatggcacgagcaatggtggcggtgcaggccgtgcagggccatgaagccgtgtctgtgtgcgggacgtggaccctgcggggttgtgcggaacattcaatggccatgcgatctggggcccatctagcggactctcttgtgcacgctcgccttcatctgcagcgtgcttggcatggcagtggtgcttgctggcagtcgccatgcgacgtgcaaccaccgaggtagacgacctggtgcaagtcggctgtgcttgcttgtcccatgtgctctgacatggatgatgcagcaggggagcccggcctgtctcgaatgtgtgtcatcatttagatcgactagtcctggaacctatgcctatcgtccaccgaagcgtgcaatggaggcgctctctgaagggaggatctagaatagctcaaacggacctggcgcctgaggcttgcgtgtctcgttctcggcatcgccggggccatatccggaccagggcagcaggattgagccaatccccttggctggcgatacggcagtctgtgcccttgggcagcatgtggagtgggggaaattgttgccctgtggttggc

SEQ ID NO: 506864 - DNA, 205 bp, Homo sapiens
aggatcccccccctatccatgcatgaggtcttcgccacgcacgattggcctgtcttggctcactaacacgtatacctatgccggacttctgtgctcctccgagaggaggtgagggtgttgctcaggctgtggcctcttgggagggacaggaggcctccctgtttcccctctggtctgggctctgggagaatgcaatgatcccaga

SEQ ID NO: 506865 - DNA, 376 bp, Homo sapiens
ttaatcatttttactaattctaaaaatcagctctagcctgcttcataattttcaaggctttgcttgatctggtgaagctttctctcatcaaaactttgcagccttttagcccggcaggattttctccttattaggaaaatcaaaatgtgggtgaagatcaaaggctcagttaaccacctgtgttgtaacagtgatgtcagtcccttgattgtctttaaaaagttaatgtttccaaaaaaaattttttataatccgaccaacatgatttgctgaggacccatgcgcttttgtaaaatttaacctttggggtttttttgaaaaaaaatataaacaaatattgctttatttgaaaccaatttaaaaatgctgcctttta

SEQ ID NO: 506866 - DNA, 1195 bp, Homo sapiens
agcggagtagtgggccggaccgctgatgcatgcctgcgtcgcacatgttgggccgggcgcgtcctacgcagcagccgacgagccgggctgtgaggtgccaacgacggtttcccggccgcgtgagggccaagcggcgcggtggccggccgccgatgggagcgctcgtggaccatcctgggcggcacggacgtcccctacagggaggcccgggctgacagactgacgcgagtctgccagtgggcactccgtaactaggaggatcctaggagcgtggccgtgagagtgcgtccgactgattgacatcaggaaaggcgtatcgagacggcacaacggtgtactcgcaaggttggtcgaccgcaaggagcaatgaataacaccaggacttaatcacacagcacgatttgctgtagagaagaatactcttaccgtgagcgtggggccgagggatactactgtaacgctgcctgttcgtgcactgattgttagggagcgggagcaagacttgaacgaatgcgtctcattgagcaccggcgcaaaggggctcgaatcaaggggagcaagagaaaactagagagcgcattgcgtccagtgggccaatgaaaaagactggtgacccaagagtgaggatagagagcttcgttggggacatttccgagaccttttcaagaccatttccgggaatagcaccccccgtactgggaagagaggtccattctcgggggggaagagattgcctttttgagcagcagcgttcgagaatggaccgctcctatctatggcaatggaagcgccatactactatgatatcgacccttggggggctcccacttgcttgcgaggtagctttgcgacgtacaaccgggggagttccctcgcgaggaccttctatgggcccccgcatttacttttctaactcgtaagtgcattttccctgtccaatttccccactgggcgcgaccattcaccggaagttttactttacccttcacgttcaattcagttacacttcacctatagcaagggtaccctgtatgcgggccgttgggctgagccctatgggttcgcgacgagacgaggatatgtcagcaaacagatcattagccccacagcggtgtggggtcaccaaagggtagcggcacaggcacatttccatcccagcacaggccagtgaaattacacttgtgagcgaaacggg

SEQ ID NO: 506867 - DNA, 1030 bp, Homo sapiens
ctttttttaagggaaagagtcccatatgccgggtgaacacccctgtcaaaggtatttttttaaaagccgccacaagtggttttagacggtagctcccctcttttcagggaatttcccgccgaattcttccagtctgagtgggaataaccccagcccagatttaaagcggttatataaaaagtgtgattcttgtgagaaacgccggggggttccacaaccacgtagcaagcttaatgtggtggttctccccccgcgccccccttatgtggtcgcccagagattttaatgggttaattttcccacccacacacttcttttagtaacactgcccccagagaagaattccttcttggtccaaatttaacccttcacccggaatttcttcccgttttctcgcgggaggccattcttataatatccgctgtggataaaatatccccctctcccctttgaatagcccattagagggagagaatcttctctctaaatttgtgatggggcaatagtggacccaccctgggagataagatggactttagcccctaatagataacatctctggttgtggtaaattgtctgccgtagaccagagattgggggaccacacaaattctctgtgtgccctatagtaaagtttatactctcgctttatgtcttctacatcttgacacttctcatatgaggatattatctcccccccctttagccacagagcgtactttagatttataggtgatatttcttgtgccacgaaaaattaatatttatatttccacgacacatttagcgccccaggatttcttcctcacattaagtgggctctcaaccttattttaaaaccacaaacattattcttctctcaaccactatttcatcaataggaccaccggggattttttctgggtttgtttaccccccccaaagggtagaggccttgtgaccattccccatccaaaatttttttaggtggtgggaaattggggattttccaagttttttttttaaaataaaataaaaaaatttcttgtga

SEQ ID NO: 506868 - DNA, 255 bp, Homo sapiens
ctccgaaaggataaaatctctgtggctgcagtccaccgtctccagtggctactgcggtgccagtggctgtcggcagcggcttaggcctgggtggaggaagcagctactcctagtgctagtggtcttggcgttggatggtggctgtcagttcccagcagtggcagagccattggggagtggccttcagctactgttggagagcggcagcttccacccatcgacgtacaccacctacctctctcgctctcagcagga

SEQ ID NO: 506869 - DNA, 684 bp, Homo sapiens
taggtgaaaaagccagcttgacttttattgctcttgtggggcagggggctcagagagctctgtgtggggcgggctccgcttccttcttcaccatcacaggcttctggctgcgcaggatggcgctggccctgtcggatggctgccatgcgcaggtcggggcggataactatgtatctatgcggatacatgttgtactagatagctagctagagccgtaggcgcagagactattcttagtatgataggtaggtcccgcacataggaggtaggcaggtttaccgctaggccggatactccgcttaatgaccaccagagaaacctttgccgtcggctagccggttaccacgcccacagttcttgcggtgaatcagtccgtatgtagcggaaggaattgcgggccttacaagattattagggctacagtagctagtaggtctgctaattacctctatgatcaggaaatctggagcagttccgcacgaccatccatatgcaaatgtcgcaaacatggcggcggttccctttctgcagctgggacctgaccttacagcgcctcggatccaggcgccatggagccctccaggaagttctttcgtttgggggaaacctggaagattaaccgggcggaaacagagtctgggggagctaattggaatcttaaacgcggcaagtgcgggcgaaaat

SEQ ID NO: 506870 - DNA, 204 bp, Homo sapiens
cgtgtccttttttagcacagctttgtgggttgattttttttcttttcttttttggtacatttttaattgccagtttaagagtgactcgtaagagaatctcagcattgtgcacgataagagaatgtgtcagtatttcagggttctacattttatctgtaaaatgtgactttttttttttttcatccacacagcagctacaaggtg

SEQ ID NO: 506871 - DNA, 117 bp, Homo sapiens
ttaacgatggtcatacaagattcttcatatacagtcaactattcgctagagatataacttggaacttgacaaaaaaaatttttttttctctgagatgaagtctcgctctgtctctca

SEQ ID NO: 506872 - DNA, 148 bp, Homo sapiens
cgtactgcggcagtgtatgaggtgctgcaggcacgtggcccaggagctgcagaaagtgcaggtgagctacaggcgagcatagcgcccgcgtaagttggggagctccagggcctgagtggcacagcgtggaacgaggagctgcgccctg

SEQ ID NO: 506873 - DNA, 186 bp, Homo sapiens
  misc_feature (22)..(22): n is a, c, g, or t
  misc_feature (24)..(24): n is a, c, g, or t
  misc_feature (107)..(107): n is a, c, g, or t
  misc_feature (146)..(146): n is a, c, g, or t
  misc_feature (163)..(163): n is a, c, g, or t
tacacagggtctggcctccctntnttacccaggctggagtgcaatggcgccatcatggctcactgcatccttgaactcctgggctcaagcaatcctcctgcttcagnctcccaaatagctgggacaacggtgtgtgccaacatgtntagccaattattttttntagagacagggtttctccatgtt

SEQ ID NO: 506874 - DNA, 302 bp, Homo sapiens
gtattaacgaggaagtcaggccattacggtagggcatgtaatcaactaggacaaaggtcattaactgaggatatacggatacatagggcaaaagttagtatccgtgcttgtatgatacagagcacgagtcaaaattccgtctgataatcaagtagttgagaggacataaaaaccacagtttaggccttctgaagtcaaccataataacttcttagctgttccttagtttttgggacttgctctagaaattcactgggtttcttataaagggcaaatgcagtagagatcattctctagcaatg

SEQ ID NO: 506875 - DNA, 834 bp, Homo sapiens
gaagcggacgtggcccgtgcgattgacactgcgcgccgtgagaagcatttgtcctccaaatgtgatcaactcctaggtgttgtcacggctcatctgtgaggtgctgatgagcgagtgggactgcctacacgggcgtgcttagcatagagatcgaacgagaagttgtcgcccatgcaatggtgcggagtggcttcaagcagaccttctctgcgcagtgacacacatgcgctattgagtcctcagtgctggacgccaagggtgttgcatctcgatccccttgctattgctctagggcgcgcataatagccctttgtattgctgcgcattgttgtgccatgtgccgtgtagttcagcgtgtgccatggacttgggcgcgcctagagcttgaaatccgtgttcataggggctcgccatctggaacgtgatgcattccacgaggaattggcctacatcgtagtctttggacctggcggactcatgcgtcccatcataacttttcctgtgaagaatcatgagtattccccccggtcagctgccgtacgtgccttcctgcaaaagctgctggccgtcatggactggtgcgtgtagtccgtacctaagagaagtgcgtggtgattttacacctcagtgtccattactcttggaacctggtgagtcttctaatgctcgttatggcgtctgcgtcctaagcagtatttcactaccactttgatcggctcgggagctggagcagccatatacctttcattttctgccatcaacacacgaagaaaaacttatccaagcacctttatgactggggcccaaagggcaagtagctttgaagagtgggtt

SEQ ID NO: 506876 - DNA, 100 bp, Homo sapiens
ttattgtaatgcctctgcatttattctgttgcctcactgtacttgaagatgcgtaatatatatttatctgtggtatcagtgataaaatgatacctttctg

SEQ ID NO: 506877 - DNA, 111 bp, Homo sapiens
gcagaagttttccttcctccgccttcctctccctctcctggtgtacactcagccatttcagacgtcaaatttgtttattgttatattaacgagggagtctcgccctcatcg

SEQ ID NO: 506878 - DNA, 187 bp, Homo sapiens
acatgccttgtgcactccagcctgggtgactagagtgagacccgagtctctaaaaataaaataataataataataaaataaaattaagtgattgattcaacttcctaatttgatgtccaatgatagaataaaaataacaatagaaaaatagagaattagtcataaaagttcacaaatttcagcttct

SEQ ID NO: 506879 - DNA, 531 bp, Homo sapiens
ttctaaacatccaagtcagcagtggtgagacttggctctttcaaaatctgtaaggctaaacaattagttactttcttattcctaagagactgggcttgatttttggaacctccaaagagcgatcataacccagggtggcacccaagtggggaatgcctgatctcagacacgtcatttcagtcaaaccaagaactggttttgacctcttatttcctcctttcatcatcacagtgcaccaagaaaatccagacctatctcagttctgccaagctgtccggagagggtacacatggcattattttctcatatctgtcccctttttaaggtccaggctgcaaagagcagtcatttgagggagattgcttatcccactgttaaatatgtctaacttctctttaaataaattaatacatgagacactcaaagcactaacaatgataggcacatattaagtcttggttagtcactgtaactcttattcttactattagccaccaagattgtcactgtttgcagactgagacctcatct

SEQ ID NO: 506880 - DNA, 219 bp, Homo sapiens
tctagcgggcctaattactgccgtggcgccagctctgaaattacgatggtatattctgcatggtgttgatagctttcgtgccatagcctaccattgtaaactctaccctaaagactgggatggatacagaagtagacccactttcacttcgcagtctcctcccctactctgcccctaagctaggtctagtacctgtctctccctatagttccagcagga

SEQ ID NO: 506881 - DNA, 2249 bp, Homo sapiens
  misc_feature (18)..(19): n is a, c, g, or t
  misc_feature (34)..(34): n is a, c, g, or t
gaagccaagccgcagctnngaagcctgagcggcngaactcggcagctccaacccaactcggcttaactccgcctcaccgagcccagtccaagactctgtgctccctaggtttgcaacagctctctgatcatcttcttcaattcctgctaggatgccgtggcaagcatttcgcagatttggtcaaaagctggtacgcagacgtacactggagtcaggcatggctgagactcgccttgccagatgcctaagcaccctggatttagtggccctgggtgtgggcagcacattgggtgcaggcgtgtatgtcctagctggcgaggtggccaaagataaagcagggccatccattgtgatctgctttttggtggctgccctgtcttctgtgttggctgggctgtgctatgcggagtttggtgcccgggttccccgttctggttcggcatatctctacagctatgtcactgtgggtgaactctgggccttcaccactggctggaacctcatcctctcctatgtcattggtacagccagtgtggcccgggcctggagctctgcttttgacaacctgattgggaaccacatctctaagactctgcaggggtccattgcactgcacgtgccccatgtccttgcagaatatccagatttctttgctttgggcctcgtgttgctgctcactggattgttggctctcggggctagtgagtcggccctggttaccaaagtgttcacaggcgtgaaccttttggttcttgggttcgtcatgatctctggcttcgttaagggggacgtgcacaactggaagctcacagaagaggactacgaattggccatggctgaactcaatgacacctatagcttgggtcctctgggctctggaggatttgtgcctttcggcttcgagggaattctccgtggagcagcgacctgtttctatgcatttgttggtttcgactgtattgctaccactggagaagaagcccagaatccccagcgttccatcccgatgggcattgtgatctcactgtctgtctgctttttggcgtattttgctgtctcttctgcactcaccctgatgatgccttactaccagcttcagcctgagagccctttgcctgaggcatttctctacattggatgggctcctgcccgctatgttgtggctgttggctccctctgtgctctttctaccagcctcctgggctccatgttccccatgcctcgggtgatctacgcgatggcagaggatggcctcctgttccgtgtacttgctcggatccacaccggcacacgcaccccaatcatagccaccgtggtctctggcattattgcagcattcatggcattcctcttcaaactcactgatcttgtggacctcatgtcaattgggaccctgcttgcttactccctggtgtcgatttgtgttctcatcctcaggtatcaacctgatcaggagacaaagactggggaagaagtggagttgcaggaggaggcaataactactgaatcagagaagttgaccctatggggactatttttcccactcaactccatccccactccactctctggccaaattgtctatgtttgttcctcattgcttgctgttctgctgactgctctttgcctggtgctggcccagtggtcagttccattgctttctggagacctgctgtggactgcagtggttgtgctgctcctgctgctcattattgggatcattgtggtcatctggagacagccacagagttccactccccttcactttaaggtgcctgctttgcctctcctcccactaatgagcatctttgtgaatatttaccttatgatgcagatgacagctggtacctgggcccgatttggggtctggatgctgattggctttgctatctacttcggctatgggatccagcacagcctggaagagattaagagtaaccaaccctcacgcaagtctagagccaaaactgtagaccttgatcccggcactctctatgtccactcagtttgacatcgtcacacctaaatgctgtctggtcccctgcacaataatggagagtactcctgaccccagtgacagctagccctcccctgtgatggtggtggtggatactaatacagttctgtacgatgtgaaggatgtgtctttgctatttcttgtctattttaacccgtctgcttctaaatgatgtctagctgcttaccaactttaaaaaatgatattaaaagaaagtagaaaaataaaaaaa

SEQ ID NO: 506882 - DNA, 840 bp, Homo sapiens
  misc_feature (18)..(19): n is a, c, g, or t
  misc_feature (34)..(34): n is a, c, g, or t
gaagccaagccgcagctnngaagcctgagcggcngaactcggcagctccaacccaactcggcttaactccgcctcaccgagcccagtccaagactctgtgctccctaggtttgcaacagctctctggatgccgtggcaagcatttcgcagatttggtcaaaagctggtacgcagacgtacactggagtcaggcatggctgagactcgccttgccagatgcctaagcaccctggatttagtggccctgggtgtgggcagcacattgggtgcaggcgtgtatgtcctagctggcgaggtggccaaagataaagcagggccatccattgtgatctgctttttggtggctgccctgtcttctgtgttggctgggctgtgctatgcggagtttggtgcccgggttccccgttctggttcggcatatctctacagctatgtcactgtgggtgaactctgggccttcaccactggctggaacctcatcctctcctatgtcattggtacagccagtgtggcccgggcctggagctctgcttttgacaacctgattgggaaccacatctctaagactctgcaggggtccattgcactgcacgtgccccatgtccttgcagaatatccagatttctttgctttgggcctcgtgttgctgctcactggattgttggctctcggggctagtgagtcggccctggttaccaaagtgttcacaggcgtgaaccttttggttcttgggttcgtcatgatctctggcttcgtagggacgtgccatggagttccgggggctccattgcgcgcgactcttcgcgctttgtggccctgaccggggctctgctcggtaaa

SEQ ID NO: 506883 - DNA, 319 bp, Homo sapiens
ttattctgagccatcaatgtaagccgctgtcttcactgctcaggtgattatcctgaaaccatccaggccaaataagcgccggctatgcccctgtattggattagccacacggactcacatatgcatgcaaggtatgctagagctgaagtgacaagattgatcgccgtatctggtaaaaaagctgcgaagatggccctcatattcttgaacgtctggatgatgtctgccacttgtttgactactggattcctgtgcaatgcccattgtgtgcttgtagagccttctcagatctatccagcctttgcggtcggctttgtct

SEQ ID NO: 506884 - DNA, 2225 bp, Homo sapiens
  misc_feature (18)..(19): n is a, c, g, or t
  misc_feature (34)..(34): n is a, c, g, or t
gaagccaagccgcagctnngaagcctgagcggcngaactcggcagctccaacccaactcggcttaactccgcctcaccgagcccagtccaagactctgtgctccctaggtttgcaacagctctctggatgccgtggcaagcatttcgcagatttggtcaaaagctggtacgcagacgtacactggagtcaggcatggctgagactcgccttgccagatgcctaagcaccctggatttagtggccctgggtgtgggcagcacattgggtgcaggcgtgtatgtcctagctggcgaggtggccaaagataaagcagggccatccattgtgatctgctttttggtggctgccctgtcttctgtgttggctgggctgtgctatgcggagtttggtgcccgggttccccgttctggttcggcatatctctacagctatgtcactgtgggtgaactctgggccttcaccactggctggaacctcatcctctcctatgtcattggtacagccagtgtggcccgggcctggagctctgcttttgacaacctgattgggaaccacatctctaagactctgcaggggtccattgcactgcacgtgccccatgtccttgcagaatatccagatttctttgctttgggcctcgtgttgctgctcactggattgttggctctcggggctagtgagtcggccctggttaccaaagtgttcacaggcgtgaaccttttggttcttgggttcgtcatgatctctggcttcgttaagggggacgtgcacaactggaagctcacagaagaggactacgaattggccatggctgaactcaatgacacctatagcttgggtcctctgggctctggaggatttgtgcctttcggcttcgagggaattctccgtggagcagcgacctgtttctatgcatttgttggtttcgactgtattgctaccactggagaagaagcccagaatccccagcgttccatcccgatgggcattgtgatctcactgtctgtctgctttttggcgtattttgctgtctcttctgcactcaccctgatgatgccttactaccagcttcagcctgagagccctttgcctgaggcatttctctacattggatgggctcctgcccgctatgttgtggctgttggctccctctgtgctctttctaccagcctcctgggctccatgttccccatgcctcgggtgatctacgcgatggcagaggatggcctcctgttccgtgtacttgctcggatccacaccggcacacgcaccccaatcatagccaccgtggtctctggcattattgcagcattcatggcattcctcttcaaactcactgatcttgtggacctcatgtcaattgggaccctgcttgcttactccctggtgtcgatttgtgttctcatcctcaggtatcaacctgatcaggagacaaagactggggaagaagtggagttgcaggaggaggcaataactactgaatcagagaagttgaccctatggggactatttttcccactcaactccatccccactccactctctggccaaattgtctatgtttgttcctcattgcttgctgttctgctgactgctctttgcctggtgctggcccagtggtcagttccattgctttctggagacctgctgtggactgcagtggttgtgctgctcctgctgctcattattgggatcattgtggtcatctggagacagccacagagttccactccccttcactttaaggtgcctgctttgcctctcctcccactaatgagcatctttgtgaatatttaccttatgatgcagatgacagctggtacctgggcccgatttggggtctggatgctgattggctttgctatctacttcggctatgggatccagcacagcctggaagagattaagagtaaccaaccctcacgcaagtctagagccaaaactgtagaccttgatcccggcactctctatgtccactcagtttgacatcgtcacacctaaatgctgtctggtcccctgcacaataatggagagtactcctgaccccagtgacagctagccctcccctgtgatggtggtggtggatactaatacagttctgtacgatgtgaaggatgtgtctttgctatttcttgtctattttaacccgtctgcttctaaatgatgtctagctgcttaccaactttaaaaaatgatattaaaagaaagtagaaaaataaaaaaa

SEQ ID NO: 506885 - DNA, 323 bp, Homo sapiens
  misc_feature (109)..(109): n is a, c, g, or t
gaaagcccttggggagactagaaagcaaagctaaaggcaatgcagggtcatatcatgtcatgtcttgtctctcagtcttgaggaattgagaatcctgacctgaggactntgcagctgagagcccactacctccacagcccatctcggccccagccgcataatcccacctgtcacctacccccacctccagtggggcatttctccagacgtcttatggattgggggtttcctcatgggccaggagaggagggaatattctagcgacacacatgtctgggttaagtgcccaatgagggcatgggtgtaggggagctggcctcaga

SEQ ID NO: 506886 - DNA, 334 bp, Homo sapiens
  misc_feature (223)..(223): n is a, c, g, or t
  misc_feature (291)..(291): n is a, c, g, or t
acgagccgagagctcgcaaaaaccatgaccatcgaccaggccatggcctccaccggaaagtcagaatcagccatgcgccgggcagcccacgaaggcggattcacgttcaagagcaagatcgtagatagggagcgggatttgaagctcatcgagcgcctgtcagccctgcgggacgctggagtgtcacgtatcgctgcatgcaggaaggtcgggatctctgacnccctgctgaaccgcctggtagtcgactacgacttcaacttccccaaacggtgggagaagcgagcttgnggcgcttcagcaaccgcccgcaacagcgcaaacgtcaaacctg

SEQ ID NO: 506887 - DNA, 321 bp, Homo sapiens
ctatctctaaaaatatttctaaattgttttaacgctagcacgtttaaaaaaaaatttaacccttcattaatataaataccctggaacacctttacttatcctccaagaatatttataacttccgctctgacactattatttttcctttaataccaaaatttcccaaagggctcacaaatcatggttggcagtgcagccttttcattactggacacattcccattgctaaggccctctgcacagatttttgtttactatcactggcgatcagcccaaactttctcaccccatatttcaacccaccccgatgtgtacaccagg

SEQ ID NO: 506888 - DNA, 825 bp, Homo sapiens
  misc_feature (127)..(127): n is a, c, g, or t
cgggtgggagtgagaagctttggagagctgttataaatagatgtgtcagacagatcaggcattatgcggcttgtaatagggaggagaagcctgatagtactcagtgtattgttggcattcaggtttngggtgagggaagatcctttatatagaacaagatggagagaaacaagaagcgggaggatagttgtttgaagagttcaagttattatgtggatccttgtttaaagaagaggggtctaagcttagcactcgatagggctaaagggtgtataccgtccgatgaggagcaatgggtttattgggactaggtttgaggggtgggatttccacctcctctcagagtcaccatatcagtgagtggtggtagaaacaatactctggcggcatagggataatgggtctgtgtcacaaaacctgtacttggataaggcatggggtgagtagccttcgtgtgtcgtgaccagatggtgtgtttagtcctatagttaagttcaatgcaatgaaagtttaatactcaagtgtgtacttttgttgggataaagtttgtgttgagtacatgtaggctgggtggggtagctcacgcctgtaatgtcagacgtgtgggaggccaaggcaggtggctcatattaggtcagaagttcaaggccagtctggacgacatcgtaataccatgtctctgctaaaaatacaaaaattagtcaggtttggtggcactttggctgtaatcgcggggggcgcagaaggctgagacactagcccccttctagcatgcaaggcttcggttcagtgaaaaaagctagtgtctttgcactgcagcgtgag

SEQ ID NO: 506889 - DNA, 325 bp, Homo sapiens
gcacgaggccaaggatactgattagaaggcatattgaggagtggccgggcatggtggctcacgcttgtaatcccagcactttgggaggccgagacgggcggatcactgaaggtcaagagtttgagactagcctggccaacatggtgaaaccccatcttaactaaaaatacaaaaagtagctgagtgtggtactgtgcacctgtaatcccagctactagggaggctgaggcaggataatctcttgaacctgggatgccgaagcggcagtaagctgagatcacagcactgcaccccaacctgggcaatgtagtgggactccatctca

SEQ ID NO: 506890 - DNA, 263 bp, Homo sapiens
tgacgtaaccactgcaatcccccagaaacccagtgcttgggatgactttgacttatgagatgctgttgttgatggagaaaatgacgacccacgaccaccgagaccacccaaaccgatgtccaaatacaaaacccaaacaccctagttcctccggtagcttatcagatgctgaccttgcggataggcgtatcaggtggagaagtgaaaagagaggcagtgatgtgttgtgcaggcagccaccgcgaaagacaggggacgcggcc

SEQ ID NO: 506891 - DNA, 419 bp, Homo sapiens
ctccggggttcaaatcattctcctgcctcagccggggtgggaaacccaggctgaaatggacacccagggcggaggaggaccctcagatgtccagggttgaagacggtcatgctgtcaaaacataatagccctatctcctcggtccagtctcagcccagccagtcagtccgttcggtcagcagtcccaaggtgcctgcctttgagagtggtacacccagatcagcccagaacagggatccttgtccggacccctctatgcagaacagggagcacagccccatgagggctgtgcctaccgtatcagaccactctcaagcaggggggtggcacaggggcttcagtgacctggggccgcattgagagcaccattgaaacctatgaaaaccccaagaagtacgactccagcgatgggcggccgc

SEQ ID NO: 506892 - DNA, 86 bp, Homo sapiens
cccctctgcttctggtgtgtgacgaggcccccgatgttcttgattttcccagagaagcaaataaacagcgtgaacagccacaaaaa

SEQ ID NO: 506893 - DNA, 110 bp, Homo sapiens
gttcattcattttgatgagcgagatggtgctgtcaaggctatggaagaaatgaatggcaaagacttggagggagaaaatattgaaattgtttttgccaagccaccagatc

SEQ ID NO: 506894 - DNA, 528 bp, Homo sapiens
ccctggcggatacaggtcgtcccgatatatgccaccgttgtaatcgttgtagttctatgtagtgcagatgcctgtcaacatggtgaacccccctctctattatgaatcaatacatagctagttgtcgtggctcatgcctctagtccctggtactcacgaggccgaggacagagcattgcttaaccccaggaggcgggggttgcagagattgtgccactgcacttcagcctgggtgacacagtgatactccatctcaaaaaatactaaataaaagcatttgaacagtataatgtctgtgctttcaatttcaattctaagttacagttttcactaagtttgagtcaactccttgagcataggacatcgtcaggcatgaattgtgaggcagtacattcagcaactatcaggtatcttaagttaactgtcatagaagcagtctgtctccatcctagaatataagacaatatacataatccttagtttgcatggtgctggcttgctatgaatttcaattatctcattcctcat

SEQ ID NO: 506895 - DNA, 1213 bp, Homo sapiens
  misc_feature (1210)..(1210): n is a, c, g, or t
acactgaacggtaggctaataccatcaacatctctggtgttgtataggatgttattttgattggaacaacttgacaaactgaggcgcagtggttcagctctagtgcgcacgagagttcccatggccatgtggtgagtataactgagtctatgtactaatggtctacggcattgctagacgtgtggcatggtcacaattttctgttctgtcgcatcacagttgtaagaactttggatagatgaacgcgcttcgtactcggtatatgagcgccttgcagtagtactagtgtcttattaactttactttgtttaaatcagctcgctgatagagctgatcatatacgattgtgttaaatatagttcctagtgacatagtaaacgatgcgtagttgttcattgtactacgttacaagatgttgaggccgtcaagttctgaaatgtcctgcatatttaaaggcgtagacaatgtaatgagaattttgtaactatttgtatgtcattttgaccagtgtactgctttatggtcaaagctgttgaccatttgttcacttgttctccagtattcgtgatcatgttggtctttcactagaggccattatcctgccactctttgaacaaagcagctggatcttaaaacagcggtaatggcttcttttaccctttgattccctttgggtaactgaagcttagcgtttagaatgtgacttttaaaggggtcgtcctaatggcgtttaaaacaggttgacactccactcttcttgtgaagggcagaattggcactactgcgtgttgacaggtgggcccgcgcgacattccgggaagtactcaacaagacattccccagagataaaggtcttggtggacccagcggaaacaacacaaacaacaacaggggggggggcgccacgaatagacaccccccaggggggcaaatagatgacacccccgtttattcaaaaaggggcccccacatcagtgtgttattaattagagacgaggggcgctacacaatagtcgttcgggaacaagcaacggcgttcgtgtggacgaccgaccatcggttgtatactgaaccccccgatcgtagcgccaaattatataaagacattccttgcggtggttactcctatagataccaggcgcatgatagccgattccatcgagctcagcagcagcaccgacaatgctcataatttagggggggggggagngtg

SEQ ID NO: 506896 - DNA, 153 bp, Homo sapiens
tgcaattcgacggttctccatgttgtcaggatggctcgaactcccgacataggtgatcgctgctcggctccaaagtgctgggatacaggtgtgagcgacgcactcaggctccctgttttgaaggattgacttcctaaagacttggtacgtgag

SEQ ID NO: 506897 - DNA, 130 bp, Homo sapiens
atattctaaacgctttatacttctccacgcttatatacttctcaacgctttatacttctcaacgctttatacttctcaacgctattgaggaagtcataaagcgttgaggaggacagtataaagcgttgag

SEQ ID NO: 506898 - DNA, 214 bp, Homo sapiens
  misc_feature (59)..(59): n is a, c, g, or t
  misc_feature (74)..(74): n is a, c, g, or t
cagtgttgccgagggcctgattgggccaggcactgttctaggccctcagggatctggcnctgatcaaagtttgnaaaacgccgggtgcagtggttcacacctgtaatcccagcattttgggaggccaaggtgggaggattgctttagtccaggagttcaagaccagcctgggtaacatagagagacccagtctctatttcaaatatatttatat

SEQ ID NO: 506899 - DNA, 1412 bp, Homo sapiens
tacttagcagtttaaatgttttaaaaagtccttccacaccctgagatgtgtgtgtatctcacacacacacacacacccaaattttcttctaaaaattttaaggttttgcttttcacatttatctttaattcacctagaagagatttctgtgcctaacgtaaggtaggatctaactttacattttcccatttgaattgccagttgtcccagcagcagcattttactgaacaggtactccttcccacccctaccttcccaactaatttgccatggcacttctttcatataaagtttcatatataattgtctgtgttttgggtctctattctgtttcttgagtccatttatctattcctgagccagaagaataatatgatcataatccttgatgtcatgtacattttttctacttctttggtggtcttggctattcctggccctttgctcttccatataaattttaaaattggcttgtcaagtgctcagataaatcctatgtaacttaatggtctgagctatgtcacagtacttgtactgtacatggaatataggaaatagtttcatatatttatcttatagtcaacctttttattaaactgtcttgttatttctaatatctagtctataggtgattttgagttttctacttgaacactgtttccattatgtatcattgcatagcaaactacctcaatacttagtggcttgaaacaagaaccactgatcatttctcactattttgtgatgtgactgggctcaactgggcagttctttctgctccacatggtgtcaatttgggaagcactggtctagaggcttgaccatgctgcagcactggtctagaggcttgaccatgctgcagcatttaaaaggactaactcacatggctgcagtaagtgctggctgttagctggaagcacaaccaaggctgttaacaggtgtgccttggttctcttccatatggcttctcttttgttttcagtactctgcagtttaattatgatgcatgcaggtgtgaatttctgtttattctgcttgggatgtgttttccttctgggatctgtgaatcggtttctcattatttttgtaaaacctgaagccagttatctcttaaaataccagctctccttggctgggcgtggtggctcacgcctgtaatcccagcactttgggaggccggggcgggtggatcacgaggtcaggaaatcaagaccatcctggctaacacagtgaaaccccgtctctactaaagatacaaaaaaattggccgggcgtggtggcaggcgcctgtagtcccagctactcgggaggctgaggcaggagaatgacgtgaacctgggaggcgaagcttgcagtgagccgaggtcgcaccaccgcactccagcctgggcaacagagcgagactcgtctca

SEQ ID NO: 506900 - DNA, 190 bp, Homo sapiens
aaaagggggcttggggggaattaaccccaaaccttcaaatcaggggggtcccacttgttttgtttccccgggttcccttgggcccccgtttcgttttccttccggggcgaaaggaaaaagggggtccgctttgggggggcccccccccgcccctttttttttttaaaccaacaaaacccttccaagggga

SEQ ID NO: 506901 - DNA, 142 bp, Homo sapiens
agcgtcccacgtgtaagcttctcggacccgttacatcctgggctcaagctgtcgcgccgaagctcgcaatacaacaactgtttctggatggtcactagccgttcttcctctgtctccattgccccagagtggccgggtagga

SEQ ID NO: 506902 - DNA, 129 bp, Homo sapiens
gcggtgcgtctagaggctcccaacatttaggtgtacatacttacgacgacttcgacacacctgttacaacagcggtagtagccaatacatagacggcatgccgtaggtgggcacaggaatgcagtttag

SEQ ID NO: 506903 - DNA, 115 bp, Homo sapiens
cagtgtactcacacaattgacggcgatcggatgatacgatggggctgtggtgaacatgttcagtccacaaggtctgtcgacgcttggagaccatgtgacggtaccttgggagaga

SEQ ID NO: 506904 - DNA, 481 bp, Homo sapiens
gctaaatgatttactgtttagattttaaattatttttgaaaaataacatacaagtataatttatatgtcataaaatactctcattttaagtgtatagtttgttttgataattttgtaaacattcccttgtaatccacactccaatgaagctactgaatatttgcatcactccagaaagttctctgttacacctgtgcaatccattcccctcactcctaatttcaagcaacagtgatatctctgttgccaaaatattgtttgttttgaaagcatggaagtgacaggatgcgctgtggactcttctggatgtgtgttttccgtcagcgggatgctgtaagatttgtccagtgtgtaaggttttgccaaagtggtacactgctccttatttctgaagggagcagcattgaatggatgtaccacaattggttttctatctcctatttttatgagatgaaaaataaaagtcatcacagccctaaca

SEQ ID NO: 506905 - DNA, 767 bp, Homo sapiens
atggaggagtcacttctttttttttgtttttcctttttgagatggtctggctctgtcacccgggcgggattgcagggtgtgcactcatagctcaccacagacctcaacctaggggtcacttctaagtggatgctgtggggtgtggtgcggaaggggtgaggaggtaggattgagtaactgtgctgtcacggctgtgtcctttgtatgacagcctgaaagtgtgacagtgacctaatgtgattggtggtgggatggactgtgatcagtgccgggggagctctctgcaagctggggtccccacctccagtgtgcttcttgctcagaaggttagcgtgtgcagtatgcgaagatgtagcttctgtggacctcgcggtattaaagtgcactttacgtagcccatcagaattccaagatctctagggagctgcatgatacctttcccttgggctcccaatacaccacccaaaaccccttgaacaggaccatcgactgttagtgatgtgctagacgtggactgtctcagtgtccccacgtccctgactctgtctcagaggtggtgtctgctcccccagccccttgacgccaaaaatgagtcccgtgcagccttccagtgagttcagcctctcccgtgggtatgtgtgcgggggcaccgccttgtcacgctccgcatttctttctggggagccctggttcctccctaccagtggctccccttagactctggcgtgtggcctcttcttccattgtctcttgcgccaggctcgcca

SEQ ID NO: 506906 - DNA, 102 bp, Homo sapiens
gtgttacaggtctctggatttataaatagaaaatttatgttggtatgtggttctcctatttgacattttcacacgggagatttaatcatagaatttaagaac

SEQ ID NO: 506907 - DNA, 186 bp, Homo sapiens
ccgctacggacgcactctccattgttactgcagatttctgaacggttttctttcgagcagtaagcatccatgtactatcactggttaacttcatcgtgtgcgtgcattcacaagtgtctagcgcgaaactacgcctcttcagggataccggagctcgtaattctgtaagtcattggtcctatgctt

SEQ ID NO: 506908 - DNA, 233 bp, Homo sapiens
acgctccttcgtttcccatgtgcaccacctgtgtgtcgttgtgcatctccgctgcgtctggacacccgatcccagcatccctgcctgcagtgacttgttcgtgttcagctcgcgtcctgccactgtccgcggtgctccagttggaggctgagtgttcccgggctctgtagctgagtgggcggtgtgcccctggtggcgctgccatgtggaatgacgtgcgctgcaagaactgc

SEQ ID NO: 506909 - DNA, 1092 bp, Homo sapiens
tcgtctgtcggtgttctttataagacacaacacccctcgacacgtgctgccagtgtactatttcgggctgatttactttcgttgatcgtggtgctctctgcgggcaacatgtttgtcgtctcctattggttcccccgcgcgtgttctctttttccgatgtttccgttaggtttttttttattagggcatcacaacaggtgtgttggctcagcgcttctcccgttggcctaaccccaaaggtgggggaagcttttggtatagacttctacgaggtgtctcaaagggttgctcccaaagttcgctgttggttcgtttttgaacggattctccttcggttcccgctggagtccagtgcccttctggctcactgcaacgtccgcctcccaggttcaacgattttcatgcctcgccctccgagtacctgggcccacaggtgtacgacatcatgactggctaatttttgtaaatttaatagagtcggggtttcatcatgttgaactcctgacctcaagtgatctgcccccctcagcctccccaagtgctgggattaccggtgtgagcccccatgcctggccctggtttgctcttaaagtttttaaggatggttgtgaatccccctggccccataataaacttgtaattttatactgcttactataatttttttaaccctgtaaccactttgagaccacccttctgaattcgtcgccacttataacctcgttgtagaattcttaaatgttaccccagcatgattgcccaatgaggggttggaattaaatgcacttaagtagtgaattcaatgtgtttgtttcccacttgattttcccactctaataaaggtttctgtccactcttattacactttgctgtagtaaatggtacttcccagcctctcttttgccccacttttggaatactccccagagtttgggggtgttcatgttttaaacaatgtaagtctgttggcactgaaggaccacttttctacactaatatcgaacctggatacttgaccccacaaaaaactgtttagtgctaatgagcagcaaaatgaatggttccataataaattgatatctgatttaaata

SEQ ID NO: 506910 - DNA, 248 bp, Homo sapiens
  misc_feature (25)..(25): n is a, c, g, or t
ggttttgcctacctgggccttacanaaaattattattattttatggccacctgcccacacccaacaaaggttttcagtggggacagtcttttaatcccatttttggtgcctttggccctgcctgggccagcctgcacccctgtgggggggaaaattactgcaggctttggggcaggttttgctcctttatgggacccgacatttttcagctttttggtattgaaaaaataaacccccctgttttgtga

SEQ ID NO: 506911 - DNA, 112 bp, Homo sapiens
  misc_feature (47)..(47): n is a, c, g, or t
  misc_feature (61)..(61): n is a, c, g, or t
  misc_feature (68)..(69): n is a, c, g, or t
  misc_feature (77)..(77): n is a, c, g, or t
  misc_feature (81)..(81): n is a, c, g, or t
  misc_feature (83)..(83): n is a, c, g, or t
  misc_feature (94)..(94): n is a, c, g, or t
  misc_feature (104)..(104): n is a, c, g, or t
  misc_feature (110)..(110): n is a, c, g, or t
  misc_feature (112)..(112): n is a, c, g, or t
agcataaattgctaaatataaattaactgataagaccaaaaattttnaatgtttaaaatanaatatgnntttttgtnaaantngaacctttgtnacgttttaantttagnan

SEQ ID NO: 506912 - DNA, 220 bp, Homo sapiens
  misc_feature (25)..(25): n is a, c, g, or t
  misc_feature (44)..(45): n is a, c, g, or t
  misc_feature (60)..(60): n is a, c, g, or t
  misc_feature (78)..(78): n is a, c, g, or t
  misc_feature (91)..(92): n is a, c, g, or t
  misc_feature (104)..(104): n is a, c, g, or t
  misc_feature (109)..(109): n is a, c, g, or t
  misc_feature (124)..(124): n is a, c, g, or t
  misc_feature (147)..(147): n is a, c, g, or t
  misc_feature (162)..(163): n is a, c, g, or t
  misc_feature (169)..(170): n is a, c, g, or t
  misc_feature (186)..(186): n is a, c, g, or t
  misc_feature (211)..(211): n is a, c, g, or t
  misc_feature (214)..(215): n is a, c, g, or t
aatagccctggccgtacgcctaacngctaacattactgcaggcnncttactcatgcaccnaattggaagcgccacccnagcaatatcaacnnttaaccttcccnctacncttatcatcttcacnattctaattctactgactatccnagaaatcgtgtcgcnntaatcnnagcctacgttttcacncttctagtaagcctctacctgcacnacnncgcgt

SEQ ID NO: 506913 - DNA, 332 bp, Homo sapiens
ttactgtgtgaatcacacataaaaaatatcttcacagaaacatccaaactggagtttgaccaaacgagggtaccaggtcccagacaagtggacgcagagaattcaccatcacacattatttgggaggaagatagtgactctgattcaacctcaaacccagagggctcagcacaatgtccactgtggtgccagggcgcacaccaacagttagtaacactggcaaacaagctaaatgacacagaacataaaccagaagagcaaaaaacagaggcaaacatagcaacagaagtgagcagacaaagagcagggtgaagtaaacaaatccaaacagt

SEQ ID NO: 506914 - DNA, 1313 bp, Homo sapiens
ggtttgcatccgcctcgcgggaaggaaactccatgttgtaacaaagtttcctccgcgcgcgctcgcctccaagatacgcgagcacagaatgttgcgtaccagagaggacatcgaccagacgacagggagcggaaaataagaaagaggagaagaagacaacacaaagaagacgaaaacgaaacgaaaaccagacgacgaagaactaaaaaagacgaagcaggcgacgaagcaagagagaaggagaaagaaagaaacgatggagaacacacgagacggcgacacggaacaaaggagcgcgagggcgagaggagagagagagaagaacagagagaaatagccaagaacaacgaagagaagacacacaacgaacgcggatggcgagatggggagaggagtgggagaaataacgagacaggagagaaaagcaacaaagcgcaagagggagcaagcagaaagagagacagaggacagaaagacaagaacagacgaagagaagagaacacacgaagaaaaagacgcagagagaagaaggagggagagagaaaagaagaacgagacgaccagagggaaaggagagaggaatcagccaagcacccgcgcggaggacggagaggagcaaccacagacaaagacgcagaggaagcagccagagcgggggggaggacagtgcggaaagagcgaagaagagagggaagggacaggggagagcggagagaaatgaagagcgagaaggcagagagaaagcgagcaggaagggagagcatacgaaggaggcgagaagagcaaaaaaaacgagaaaagacagaaaaaggaaaggacgcgaggcgcaacgcgaacgaacgagtagagacaaagcaacagagaaggcagacacgagtggagtaaggaccaagacagagagacgacggagagaaagagcaggacgagagaggcaggagcggggggagggcggcgaacacacacacgaacacaaaacgagaggaaggaggggggggaggggcaacagcggagacggcagaggcggcccagagaacggagagagaaatgaagacaagagggcggcaggagcaacgagggaggcgagagaaaggaaaaaggaggagacgagacacgaggaagcgcagaggaagacaggaggacgaagccagcgcaggcgccgtgcgcgaggactagaaacaaagaagagagaagagcgaaacagcgaaggagagacacgaagacacacagcaagacagccaccagcaaccagaggcagcgccgagaagagggaggagaggagagggaggaggatcaaggatcggacgacatacgac

SEQ ID NO: 506915 - DNA, 536 bp, Homo sapiens
  misc_feature (2)..(2): n is a, c, g, or t
  misc_feature (56)..(56): n is a, c, g, or t
  misc_feature (85)..(85): n is a, c, g, or t
  misc_feature (141)..(141): n is a, c, g, or t
  misc_feature (347)..(347): n is a, c, g, or t
  misc_feature (397)..(397): n is a, c, g, or t
  misc_feature (405)..(405): n is a, c, g, or t
tntttaaaaaatttggtaattgaggacctttttttttccaccagaatacctttttnccctggagcaccatcctatccagcagttnaggatagtagtccatggggaaaatgtccaggcctataacaaccctagaaacctagnttgtattgaaagttctgtttatatatatatataatgattgtaatgggatcatccttttccttgtctttgaaatatcccatgacatattgttatattaaaaagtaggtggctgggcacaagtagctcatgcctgtaatccccagcccttgggaggctgagacaggaggattgcttgagtccagaagttcaagaccagcttgggcaanatggcgaaacctcatctctacaaaaaataaaaatacaaaaattagctagncgtggcanacaggtatggtcccagctagtcgggaggctgagatgagagaattgcttgagcccaggaagtgaagacttcagttagccttgatcatctactgcactcaaaccctgggtgacagagtgagacactgtctcaa

SEQ ID NO: 506916 - DNA, 227 bp, Homo sapiens
ttaaactaaactaaaactaaactactaaactaaactaaactgctaaactaaggggtttggagggctcctggattattgaacacgtaaaggttcctggagggtggtgcagccagagacggcatggaagctcgtgcacccctcccccatatcttgccctatgcatctcttccttctggctgttaatctgtatccttgtcaatatcaaaaataataaatgggtaaacata

SEQ ID NO: 506917 - DNA, 693 bp, Homo sapiens
ggcgctaatggaacggggcatctcattacggcacgccgtttttctgtggcacgagggcgctcgcggcgcggcgggggggtcttgaaggttaggctaccatgcgtacccagcctagttttttttgcgagcaattcccacctctgtgagggtacgagctcatgaaagcgttgcgaagagcgacaactttacgctcccagcttatatggaccggcgtgaccaccccttgccggaggtggcccatgtcaagcaccctgtctgccagccagaaggcactgaaggagaaggagaaggccttctggagcaccctttccatggatgacaaagccgagatgtatcccattaagttcaaggagagctccgttgagatgaacaggggctcgaacgagtggaagacgggtgcgggcggtgccacgttcttcatcggttccaccgcgctcggcaacatgtggcagaacgcctatgggtccgcgccctctccgtaaagcttttgcccagagcgggcgcccaacccgacccagaggatgctggacatgcaggggaaacccatccagcgctgacccttcctgcgggaactacgaaagaaccagcggcccactccgagatgcggcccgcgctgtaccagcccccgcgcctgcacccccacgcaacccacggccagttaccggaaacctgtacccccacccagtgaccccc

SEQ ID NO: 506918 - DNA, 436 bp, Homo sapiens
gttgcattccggtaccgagcgccgagagcggtttgtctccgtctctggagttgtaggcgagaggtgatcatgtccggtcgcgggaaacagggcggcaaagtgcgagcagaggccaaatcccgctcctcccggcgcggcgctgcagttcccgtgtggcctgagtgcacagactgctgcgcaaagggaactacgcggacgagtgggcgccgggcggatgttacctggcggcggtgttggagtacttacggcggagatcgtggagctggctggcaacgcgcagcgtgacgaacaagaagaccaggataattcccgccacctgcagctcgccatcgcaacgacgaggagttaaacaagctgctgggcaaagtgaccatcgatcagggcggcgtcctgccaacatccaggcagtgctcgtgcccaagaagaaggagagtca

SEQ ID NO: 506919 - DNA, 131 bp, Homo sapiens
tctagaggatccctgggcaagggaagtacagacacacgatttgtcaggatggttttggtgactagaggctcagtggtgggagagatcctgttgaaccgaccaaccagtaacgtggtttggctttgggcgaa

SEQ ID NO: 506920 - DNA, 430 bp, Homo sapiens
cgtcgactgcacagctgtcgccacttgggaggctcagttggtttattcttgtcccccattggaacactgaagttcagcaatttcctcctctcccctctgcctccatctctctctctctctctctctctcctttcttgctgcttctcctttattcctgtcctcggcagtcttccagtcctggagtttctctttgtctctttcgttccctccctccgccttggcatatgattctctctcctctctcctctctgtctttgtatctgtgtctctgtctctcagtctctgtgtgtctgagtgcctctgtgtctccctgtctctgtcccctttttgtccgtccctttgtctctgtccttggcttctctgtccctctttgtgactctgcttcttcctacctcgtgtctgtgtatcccctttcccatctctcgtagac

SEQ ID NO: 506921 - DNA, 199 bp, Homo sapiens
atggcgtctcatagtctagggtcagaacagcaagtagtcactatgctaggtacctgaaagcttacattttcatacccggattatggtctactgtatatcgtttttctgaaatggttagtatacatttaggttagatcaatcagcatatattgggtccggtatttccaggtattagttttagggtgcgctaagcggtaca

SEQ ID NO: 506922 - DNA, 259 bp, Homo sapiens
taaggacagctatgataggcgatataagtatgagctgatgagagtcgtatcatgtataaactgatttagcttacaatatgtcagtttgcgttatgcgaatccaagtaaatgtcctgctagctagtaaggattgttttaaatctgttattttgctatttgcctgttagacatgactgatgacatatctgaaagacaagtatgttgagagttgctggttgtaaaactacgtttgaaatacgttgatctacaaagcgccatg

SEQ ID NO: 506923 - DNA, 188 bp, Homo sapiens
ggaactagctccccgctagccgtcaactactcaggagactacctgtgagatcctggggtgagctgtgattccatatccagtgatatgtgcatttcctgacccacttcttctttattcataattatgtgcaacatttggtcagtgtagaacattgaagcgggtaccgatgcgtcgcaattcgtaactca

SEQ ID NO: 506924 - DNA, 223 bp, Homo sapiens
caactggctgtcacccaagtccacgccattaactacacctggcagtagcatttgtctaattaatcactgcccccttgaagcacagtagaatgtcccttcgcaattaggaggagatctagcttgggggggacagatgggggaaggatgtgcctatcttgaacttgtgtgtgcctccacaggtctggaagtgactcacctggttttcttaaaacaacctgcaaca

SEQ ID NO: 506925 - DNA, 347 bp, Homo sapiens
acaaaaaggacaattccgaacattttgccagcccagcgaccgttctacctccgcctgttgaagcagcacccgtggtcgattcgagctctggacatagcgatccaagctctggacatagcgagtctctctctggacataagagcgttgtgcaggacaccaccctgggtcttaaagaacgcttacaagaattgcttgggcccggtccgcttcccgcgcggatgcccccagaccggatggaagagcttatagtgtccctctgcgacgaacagtttgtaacgctccgcgacctagcgcaggcgttgagtcgctcagacgcatcgttaagaaagcgctatttgaacccgttg

SEQ ID NO: 506926 - DNA, 223 bp, Homo sapiens
gtcgggatcagtctggggacatcagctcttatatattcagttggagcagtggttctaggtctgagtgagtgaacagaatctctaggggcatgtggtaagataatccatactatgtactggtagagttaagagaagagggagagcatgaagataaaccagtacaatccagtcgttcacattaccacttaatctacaagtgattactcccccattttggcttccc

SEQ ID NO: 506927 - DNA, 765 bp, Homo sapiens
gtccgagaggggctcagaatcaggacacgaacgacgattgttggcccagatacaggtcagcgtaaggctcgttgtgggcgcagacagcatgccgaagaacggcccgaggtgcggcccagaagcaggggcatgtaatggccgacgcgtggcccacacatcattgccagatggccgatggtgtgctctaagaaccaagcgttcaaagaagacgtcgatgggggtccggagagccagtggccagcaaggcatgagcgcgggccctcgtagaccaggaactgggaaggcctcacaggagctcagaaaggcaaaaggataactaaaggcctagaggagacccgatgatagcgcacgtggtctcaccatagagggagaagggtgaagcccacgaatgtcaagaggctagaaaaggagagaaagcgtggctcaaggggcaatccaggggcagcaacatgtgaggtcccagaccggagaggccacaagagatcggaaaacgtaggctcccaatttccatgtggcagaactcagtcgcaagagtatccgatggtatgagggtaaatctacaagtgttattcaaacaaagagttatcatagtggtacttactagaacccgaagtgtgcgatatacattagacgcagtttagggcgatcctgcccccagttcgatagcgttgactaacgtgcacgtatataggatctccacacatattgaagagcagatactggtacaatggcagcctgctcatagtgagggataccaaagtacat

SEQ ID NO: 506928 - DNA, 230 bp, Homo sapiens
ggcgcaatgcctatagtcctaactcctcaagtaggctcgaggcacgagaatcacttgaccttgggagtgtggaggttgcagtgagccgagattgtagccactgcactccagtctgggcaacagagcgagactctgtcttaaacaacaaacaaacaaacaaaaacaaccccaaaaaccaaattcctagggccctgttctaagccctcacacgatcagcacaaagggaaaca

SEQ ID NO: 506929 - DNA, 246 bp, Homo sapiens
taaatggtgtctgaaacttgctaatagattatatggagagaacacttacaattccttcctgagtcttggtttccgactcagaaaacatatggtgctgacctggccagtcgtggatctttcagcgatgcctctgaagatgcacggaagaccataaaccacgtgggtcaacaggacagacagaaggaaaaattccgtgaacgtgttcggcttcggggcagttggttgaataacagtgaccgaaacttg

SEQ ID NO: 506930 - DNA, 527 bp, Homo sapiens
  misc_feature (8)..(8): n is a, c, g, or t
  misc_feature (86)..(86): n is a, c, g, or t
  misc_feature (93)..(93): n is a, c, g, or t
  misc_feature (139)..(139): n is a, c, g, or t
  misc_feature (192)..(192): n is a, c, g, or t
  misc_feature (198)..(198): n is a, c, g, or t
  misc_feature (270)..(270): n is a, c, g, or t
  misc_feature (403)..(403): n is a, c, g, or t
  misc_feature (410)..(410): n is a, c, g, or t
  misc_feature (418)..(418): n is a, c, g, or t
  misc_feature (426)..(426): n is a, c, g, or t
  misc_feature (441)..(441): n is a, c, g, or t
  misc_feature (525)..(525): n is a, c, g, or t
aaaaaaantaaaaaaaaaaaaaaatatccagaaaaaaaaaaagtatatatttatgtttcttcttctggttctttttttctcttttngccctgnccctgccttttctgcgggtgtggcttcggtgctctcctgttcgggngcgggctccctgcccgcttcttttccttctttgcttctttttgtttttttgtntttgtntctcctgtggctttctccttcttccctttcctggcggcgtcttcttttccttcggggcgccttttgtctggnttcctctttctccctgtgtcgtctttctctttgtcgttcttctttttctcggcttgctctgtggcgctccttacctctttctgccttttccctgtttctgtttcgttcttcctcgctgttggccccccttggngtggggntgtggtcncgctcccnctctctctctctggngcgttctctttctctgtcccgatcccggtctcgctctctgtctctgtctctctctctttctcggtctttctctcttctggcctnat

SEQ ID NO: 506931 - DNA, 274 bp, Homo sapiens
ccttctcgacatctccatcacagaagaagaatctggatgctttgttgcatcctgcactcacctgccaggctgtgccaggcgtgctcagttgcagacttggaacactcccctccaccactccattgaggctaaaactgaccctgttctattatgtcttccagccttatgaccctgtctctcccaccctaggctgtcctgctttcctcccttcaagcccttgtccagttgaagacaccaaggaggaaaaaggccgagtaacttgcccacattactc

SEQ ID NO: 506932 - DNA, 191 bp, Homo sapiens
ggcggcggcatctcttatcagagtggtcatctgagctctgagaatggcggcctctcttcagagacccaggcctaataaaagagaagacagttagatgctttatggacggcaacattctttaaggattccctccagggtccatgcatatctagtctaaatcaacgatgaggggcaagcagcaataatgctta

SEQ ID NO: 506933 - DNA, 234 bp, Homo sapiens
ggatttgctggtgcagtacaactaggcttaatagggacatggtgaaaccccgtttctactaaaaatacaaaaattagctgggcgtgatggtgtgcgcctgtaatccagctactcaggaggctgagacaggagaattgcttgaacccgagaggtggaggttgcagtgagctgaaatggcgccactgcactccagcctgggcgacagagcaagactccatctcaaataaaccaaaa

SEQ ID NO: 506934 - DNA, 345 bp, Homo sapiens
  misc_feature (181)..(181): n is a, c, g, or t
  misc_feature (265)..(265): n is a, c, g, or t
  misc_feature (323)..(323): n is a, c, g, or t
ggctggagtgcagtggcaagatctcgactcactgcaacctctgcctgccgggttcaagcgattctcctggctcagcctcccaagtagctgggattacagtgtaccacaccaaggaactcccacactctgaatgaacagcccagtgatcaggagctttgaatcaattcttggcacctaacantttgtgaagagtctgctaaactccctctatcagaaatcccagaggactgagaacaggtcatccttggagctgtatctgaatggngtcaggatctggaagcccaagtctccttgtcaatgtctgctttggttcccaaggacanctgtaaattggaagaggggcat

SEQ ID NO: 506935 - DNA, 189 bp, Homo sapiens
tgtgtggcgatctagaggatcccaaacgtcagcactcctgccctctagaacttggccaacaccacatgctgccaacactgaccaataaaaaaaaagggtgggttttttttttttttttttttttttttttttttttttttttttttttttttttttttttttttttttttttttttctctttctcttat

SEQ ID NO: 506936 - DNA, 251 bp, Homo sapiens
accccgcgctccttcctcgcggccgctcggacatatcgcgtccgatcgtgtactccgtgcatccccgctcgtcgtctcgcgcggggatatattctcgcggctacgcctagcgcgctcgcgccaatcggagggcgcgctcgacttcgaccgaccttactggcgattattcgcgcagatctttccgcttaaatctgtagatccgagtcgatgccgaggcacgagtataacaatgagaacgagaatacgtttag

SEQ ID NO: 506937 - DNA, 152 bp, Homo sapiens
atggcactataggcaagatgtaacagcaactctgggttgaggacttcatccttggggaattgttgctgtggggcatttgcctcttgtttatttggctgctgactgtccaagactaattctttagattctgtatttcctgcagggagttgatg

SEQ ID NO: 506938 - DNA, 622 bp, Homo sapiens
cccatctgtcccctctttcttgcccgggttcttctgctatctgtcatcctgtcgtagcgtcttcggttggtccccctttttccctgtttcgcttgaggcatacgcttcgtgattcttcgccacctggtccaccgaggtttcactcatcgtatcgctttcctcatctgtcccaacccgggcggccccactattctccgcaagcccttcgtggctagtttcacagacgacccttcatagcccacctggtctctttcccagtcgccgcatcttcaatgggggggcacgtagggaacgagtccgattactctgaaggctgaggacggacgtcagaggtcaagtgcgtgtggtcgatcctcaggatgtcccacctcccacttctccaaaagtatagatctacgggtagctcaacgttagttcatggtttattattttattagtaattttttgtttttccagtatatgtaggttgtgttttaagaaaggggatagtttaatagtaaaaaaagacaaaagtgtttttaaaataatagctagaccacatactgtgtctgtatatagtcagcttatctcgtgttcaatcgtcctgatctctatataagagcaaggggaaatgctggtactt

SEQ ID NO: 506939 - DNA, 282 bp, Homo sapiens
ttattgcttgggacggcgggtcaggctgcgtactcgtggatgccgtgtgtgaactggcacttgtcccgtacttacaggcaccgttttcctcaaaggggcggccagctccgtcttgtagctggcctggagttgacctggccgcccccgggctgctactgggtgggcagcagccgctcgcccccttccgagaaggagcggctctcggaacagccgcgcctgtctcgcgatcctcagagcgtgtgtgctggctcaccccttgagggctgcttgaggacgctgggt

SEQ ID NO: 506940 - DNA, 204 bp, Homo sapiens
cacccgctgtctgtctgggttacccacgaattcaagcctgcgttcggccagcgtggtgtaacggggcgcctgagatcaagatcacaagcagatcaagagcaagatcaagagcggctcgcttcgcatcgtggtgaccgttgatcgcaaactacccctgctgctcctcctccaacgcctctgccaactcaacggcctacgcgggtg

SEQ ID NO: 506941 - DNA, 920 bp, Homo sapiens
tgtaatcctagcacattgggaggctgaggcaggtggatcacctgaggtcaggagttcgagaccagcctggccaacatggtgaaaccccgtctctactaaaagtacaaaaattagctgggcatggtggcacatgcctgtaatccagctactcgggaggccgaagcacgagaatcacttgaacccaggaggcagaggttgcagtgatctgagatcgcgccactgcactccaccctgggtgacagagcgggactctgtctcaaaagagagagagagattggccaggcacggtggctcacacctgtaatcccagcactttgggaggccgaggcaggtggatcacgaggtcaggagatcgagaccatcctggctaacacggtgaaacctcatctctactaaaaatacaaaaaattagccgggcatggtggcacgcgcctgtactcccagcaactcaggaggctgaggcaggagaatcgcttggaccaggaggccgaggttgccagtgagctgagattgcgccactgactccagctgggcaacgggagcgagactccattttccaaaaatagggagagagagaaattagtgaaagagagggagtataacctaacagatttgataaattctaggttattttaaataaaaggccgtatgtaacaattatggggggatcgatctccaacgtatgacaatatgaggtcctatttcccgcttgccaaatcaatttacattataacacaggcttagacccttctggcttatgtctggacttggactcctgaaacgatcctgggttggcggaacaccgactccactaacgcagttgtatgcggtttcacattccggactcagacgaaaaactctccagacaggttgccctcccgacaccgaattgggcagaacaccgtaaaccgaatgcagac

SEQ ID NO: 506942 - DNA, 121 bp, Homo sapiens
gtgccactttggggatattaattaaccttttaatctcagattgttttcatctataaaaagtatatgttgggtattttgctaggtttttttttttggggggggtttaattaattattttaat

SEQ ID NO: 506943 - DNA, 1227 bp, Homo sapiens
  misc_feature (3)..(3): n is a, c, g, or t
  misc_feature (5)..(5): n is a, c, g, or t
  misc_feature (15)..(15): n is a, c, g, or t
  misc_feature (45)..(45): n is a, c, g, or t
  misc_feature (81)..(81): n is a, c, g, or t
  misc_feature (112)..(112): n is a, c, g, or t
  misc_feature (116)..(116): n is a, c, g, or t
  misc_feature (121)..(121): n is a, c, g, or t
  misc_feature (146)..(146): n is a, c, g, or t
  misc_feature (163)..(163): n is a, c, g, or t
  misc_feature (169)..(169): n is a, c, g, or t
  misc_feature (182)..(182): n is a, c, g, or t
  misc_feature (189)..(189): n is a, c, g, or t
  misc_feature (191)..(191): n is a, c, g, or t
  misc_feature (196)..(196): n is a, c, g, or t
  misc_feature (239)..(239): n is a, c, g, or t
  misc_feature (270)..(270): n is a, c, g, or t
  misc_feature (272)..(272): n is a, c, g, or t
  misc_feature (281)..(281): n is a, c, g, or t
  misc_feature (328)..(328): n is a, c, g, or t
  misc_feature (342)..(342): n is a, c, g, or t
  misc_feature (352)..(352): n is a, c, g, or t
  misc_feature (400)..(400): n is a, c, g, or t
  misc_feature (515)..(515): n is a, c, g, or t
  misc_feature (549)..(549): n is a, c, g, or t
  misc_feature (582)..(582): n is a, c, g, or t
  misc_feature (654)..(654): n is a, c, g, or t
  misc_feature (795)..(795): n is a, c, g, or t
  misc_feature (863)..(863): n is a, c, g, or t
  misc_feature (886)..(886): n is a, c, g, or t
  misc_feature (925)..(925): n is a, c, g, or t
  misc_feature (941)..(941): n is a, c, g, or t
  misc_feature (1022)..(1022): n is a, c, g, or t
  misc_feature (1098)..(1098): n is a, c, g, or t
  misc_feature (1200)..(1200): n is a, c, g, or t
  misc_feature (1227)..(1227): n is a, c, g, or t
gtntnagaattatantctctagttcccgacgtcactgtttcgatnttgtcgtcttcagtcatcttgtctatactatatcgntacgacatctcactgtctctgtgtatgtttngacntcgtngtgctctctctcggtatatcgtacntctctatgacatcatcntctctnctgtgtcagcgcnatctccntntcgangatgacagtgcgtataacgggatgtctagtcctactacgtggncgtctcgctctatctcgcgcacactctgggngngagagatanggcgctatctactatctctgtgtggttgctacatacgatcacactcncacgaccactcgcncactcatatngtgtcgtctctcgcttcgatgtgcgagggcgtgcgagtgaggggcagngcgactacacaaacaccactcgtctcgcggcgtacagggtcgacgttggctacattacaatgaaacgcggtgtgggtcgtgcgtttactctctgtttcgcactaacataccagcncgcgttacgtgtggtgtcgtcacgccacacacanaaagctctacacgtagcgtcttaccacacgcgntactctgcgcggcgcgtcgcggcggcctcgctccgtctgttgtattctgtattatctattcatatgtgtcgntacgccacgacacacttctatcttctgcctttgtgatgcgcgacgagagagacatatatttattgggtgttcatccacacgcgcgtacctcttgtgctttcatttaaatgaggggagagaggggtgcgcgttcctcacganaaggctacccttctccactctagagaagcgcgccgctctcgtttttctatactcgtattataagtcantatactacacgaaacgcggtgangtctttatagatataaacacgcgcgttgtcaacatacanaccgtgcgcgctgcgngtctcgtggtatgtataaaatcacagaagaagtatatgttcttgtttcggcgcggcacctcctctcttcgctcctctgtgntgcgtgtagtacgaaagagacaaactatacacactcttctattgttgaaggcgtatcacccaccacctcaccgccnggtgtgtggcgcgcgcccgctctcgtgaagagatataatacttatatcttccgagagcgggggggcggcgggtcacagcgggtgtcgttctctcgcgccgcngcgtgcgcgagagggatgagcatactn

SEQ ID NO: 506944 - DNA, 117 bp, Homo sapiens
aaaaggcctggccccattctggagaaggcaaagctgccatgagacacagacttcttcctccttgcctcttctggactggcttccttttgagaaattgcacaaagcctagggagatgt

SEQ ID NO: 506945 - DNA, 133 bp, Homo sapiens
ggacacatatgaagaagaaattaattcggtcggacaaacggaaagaggtgagtgtggtggcacccagcgagctcgggtttctccgggggcgggtctgaagccatgatagtaactcctttcttcttatctaggc

SEQ ID NO: 506946 - DNA, 100 bp, Homo sapiens
ttgcatacggaggctcagccgttccatagatgacattgagaattctcacctttcacttggcacacgagccctttcgtgattggccctgtgttcctctcca

SEQ ID NO: 506947 - DNA, 137 bp, Homo sapiens
tctttacttttctgtatattactatgagattctaaataaccaaaaagtgattgggtcgcataaactgtacgtattgtgcttccaaatcactttatggttcataagaaatatcttgatcctcttataggcctccttgg

SEQ ID NO: 506948 - DNA, 222 bp, Homo sapiens
gatcacgaggcatattctgcaatgggtttttcaatcttgcttcatctgccttaagtttatatagagagatcctctacagagatctgagtgatatagggtgtctatatgtgagagtttctctctctatattacacatatattgtaaaatgataatatctaggggagagtagaaagagaactttatggggctctttagagtagagataatattattattaaaaa

SEQ ID NO: 506949 - DNA, 163 bp, Homo sapiens
atcacagctgacacactcgagtcgtatatcagcatagagagctctgaaaattgtcaatagggtcccagaaccatttattaaatagggaatcctttccccatttcttgtgtttctcaggtttgtcaaagatcagatagttgtagatatgtggcatcgataaaca

SEQ ID NO: 506950 - DNA, 1245 bp, Homo sapiens
gagtgccgctgagatcatgtaaggtcctgtgcataatggatgcggatcgtcctcgttctaacaacaggtgtttaaacaatcagcagtcgttgtttcaacctccccccggttttgtgtttctcttctcttgggtctcccccccgagggttttttcctggtgtattcccgcctcccctgcgtgcgtacacgtggttgaaccctggtggcttcgcagggggccccctattctggcttttggaggttttcaaccatggaccgcccaagtgccccaagtggcgaaacaacaagagtctaactcgtttccccgggttatagaaacccctttaaggttgcccccttgtgggcccaaatactcttttccgcgccaaaaggggtgggatcttttaacaccctttgagacccggggaaatttttgccccagagggtttctttttagcccggcttttaaagagaaatttttgggggcccccaaaacagaccgaaataggggtttcacccaaggcggcccacaagtgacacacccccgtagggggagctcttgtggaagattaatttttgtggttctccctgggataaacaggccccccggtgttttggggccttggggggatccccccccggggagctttaccccacaacattggtttatttgagtgtagcgcccccctcccctctttctcggggcagttaattgtgtcccccaatatatagcgcccccttgggtgtgttggcccccccccccggccataatgccatattccccgtcttatcctgcacgcctgcacaccccacatgagattgtggttatatccccaatggccccccgcgagtatttcctcccacattagagcctctttgaagaggaatatatggttaatatgtttctgttgtttttctactatagattggcttctttatatatttgtgtgtggttaatctcgacaccacaaataatttatatttatagaaacacactcggggaattccacgaaaaatggctccccgcggcccgcccgcgagaattttgtgggaccctctttttgcctatttgtataagttggagtattttctctacacattcctgtaacccactttttatggttttttttgtatactatgagaaaatgcccggccgctgtttttaccacacaaagtaaatgtaccacgctgagtttgtaaataccacactaaaatgagaaggccactgcctggccctccccattaaaaatatttgaagaactgtta

SEQ ID NO: 506951 - DNA, 815 bp, Homo sapiens
  misc_feature (8)..(8): n is a, c, g, or t
  misc_feature (75)..(75): n is a, c, g, or t
  misc_feature (101)..(103): n is a, c, g, or t
  misc_feature (105)..(105): n is a, c, g, or t
  misc_feature (109)..(109): n is a, c, g, or t
  misc_feature (130)..(131): n is a, c, g, or t
  misc_feature (159)..(159): n is a, c, g, or t
  misc_feature (167)..(168): n is a, c, g, or t
  misc_feature (176)..(176): n is a, c, g, or t
  misc_feature (179)..(179): n is a, c, g, or t
  misc_feature (195)..(195): n is a, c, g, or t
  misc_feature (207)..(207): n is a, c, g, or t
  misc_feature (222)..(222): n is a, c, g, or t
  misc_feature (224)..(224): n is a, c, g, or t
  misc_feature (229)..(229): n is a, c, g, or t
  misc_feature (232)..(233): n is a, c, g, or t
  misc_feature (256)..(256): n is a, c, g, or t
  misc_feature (260)..(261): n is a, c, g, or t
  misc_feature (305)..(305): n is a, c, g, or t
  misc_feature (337)..(340): n is a, c, g, or t
  misc_feature (342)..(342): n is a, c, g, or t
  misc_feature (358)..(358): n is a, c, g, or t
  misc_feature (361)..(361): n is a, c, g, or t
  misc_feature (366)..(366): n is a, c, g, or t
  misc_feature (392)..(392): n is a, c, g, or t
  misc_feature (401)..(401): n is a, c, g, or t
  misc_feature (407)..(407): n is a, c, g, or t
  misc_feature (418)..(418): n is a, c, g, or t
  misc_feature (425)..(425): n is a, c, g, or t
  misc_feature (431)..(431): n is a, c, g, or t
  misc_feature (439)..(439): n is a, c, g, or t
  misc_feature (443)..(443): n is a, c, g, or t
  misc_feature (464)..(464): n is a, c, g, or t
  misc_feature (489)..(489): n is a, c, g, or t
  misc_feature (496)..(496): n is a, c, g, or t
  misc_feature (507)..(507): n is a, c, g, or t
  misc_feature (510)..(510): n is a, c, g, or t
  misc_feature (539)..(539): n is a, c, g, or t
  misc_feature (541)..(541): n is a, c, g, or t
  misc_feature (544)..(544): n is a, c, g, or t
  misc_feature (715)..(715): n is a, c, g, or t
  misc_feature (745)..(745): n is a, c, g, or t
  misc_feature (805)..(805): n is a, c, g, or t
tcaggggnaaaactgagcaccatagtttacaagtagaaacgcccatgcttgaggacaacagaagttcactaaggntgcacgatttttctgagaagtttttnnncntcgncctcgccctcctcttcctcgnnctccccttgttcgtcggccgtggcgtcntggtattnntggtattnggntaccaggttgtttatnttgtttttggcntcggtgaattccatntngtccntgnnctcgcccgtgtaccagtgcaggngggnnttgcgccggaacatggccgtgaactgctcggagatgcgcttgancagctcctggatggccgtgctgttgccgatgnnnntngccgacatcttcaggncgnggggngggatgttgcacacggccgtttttangttgttggngttttntttcacgattntttgttntttttnttttgttngttntgtttttttttgttcaccttntttatggacatgcggccccggaggntgggagngaccgtgagtnggnggggtggtgcgggttgcaggcggccattntnttnttggtgtgtgaatatctgctgggtgagctcgggcacgtgagcgcccggtactgctggctgccccggctggtcaggggcgcgaagcggggcatgaagaagtgcaggcgagggaagggcacatgttcaccgccagcttgcgcaggtctgcgttcagctggcccgggaagcgcngcaggtggtgacccgctcatggtggccganaccaggtggttgaggtcccgtagtggggggtggtcagcttcagggtgcggaacagatgtnatacaggggc

SEQ ID NO: 506952 - DNA, 560 bp, Homo sapiens
  misc_feature (215)..(215): n is a, c, g, or t
  misc_feature (240)..(240): n is a, c, g, or t
  misc_feature (258)..(258): n is a, c, g, or t
  misc_feature (262)..(262): n is a, c, g, or t
  misc_feature (264)..(264): n is a, c, g, or t
gctgggaacggtgggagccgccgctgtgtgtgagaagctgctgccggtgtcatggcggagctgagtgaggaggcgctgctgtcagtattaccgacgatccgggtccctaaggctggagaccgggtccacaaagacgagtgcgccttctccttcgacacgccggagtctgaggggggcctctacatctgtatgaacacgttctctgggctttgggnaaacagtatgtggagagacatttcnaataacgaccggtcccangcgnangtctacttgccacctccggctggacccggcgcccgaaagagaggaggaccctgctacaggcactggagacccaccccggaagaagcccatcgcgtgctggctattggtgttgaaggcgggtttgaccttacgcgacggagacaacgtccgaattcatgacgaggatgtgaagattgtcagttttgccagattacctggagattgccctgggatggactggggggactgcctgtcgttgtcagatatcgggtgaccagtgcagtgtcaggccctactgtctgtcgtactcacctccc

SEQ ID NO: 506953 - DNA, 118 bp, Homo sapiens
atcgatacgacttttttttttcttttcctttcctttcttttcttttctctttctttctttttctttcttcctttctttcttttcttttctttcctttcttcccttctgtcgtcttctc

SEQ ID NO: 506954 - DNA, 125 bp, Homo sapiens
ttttttaagcacgctgcgaagctggaacgaaagcaatggccctggtgtcaggaactgagagttgtgtggttggcaaagcaacactggtctgtgcagaacccagcagtcctaatggaggtccaaag

SEQ ID NO: 506955 - DNA, 225 bp, Homo sapiens
atcatcatccctgataccaaagctcatcttcttctccttgaaatctttttgggtccacagatttggaggatgtcttgcaactgcggatcaggctgcagctgcggctcagactgcaagtgcgggaagatgtaccctgatctgacggagcagggcagcgccgccgccgaggtcgccgccgtggtcgtcctcggcgtggcgcctgagaacaaggcgggacagttcgag

SEQ ID NO: 506956 - DNA, 115 bp, Homo sapiens
agaatgccacgtgttaggtagaatgtgcttaggcgaggggaaagtacaaaggaaagatttgagaactcgtaatagtaggcacagcatgggagccgtctgacgctgcacggtcaca

SEQ ID NO: 506957 - DNA, 164 bp, Homo sapiens
tccccatacagagtatgactctatctgagacaaaaataaaacttgtgtggctgggcatggtgtctcttgcctgtatcccagcactttgggagactgaggcaggaagatcacataaaccctgaggtttgaaccagccttggcaacatactgatgaccccactctc

SEQ ID NO: 506958 - DNA, 134 bp, Homo sapiens
ttgacccttttttcccagggggcccccccccttttgggggcccccgggttttttcccccccccccccccccccccctggggtttttttttggttttggggggggggaaagaataaaaaaaggggttttttgcca

SEQ ID NO: 506959 - DNA, 853 bp, Homo sapiens
gctagcttgcggctgtgtttatggtcgggcctctgcgttcagctgctccggaaccgtgctcgggtgtatggggccgtaggaaccggctcggggccccgataacgggccgtccccatatgcacccgggctgtcgtgagggtctcccttgatctgaaatggctacctctcggatatgagccagtggtgaaattggtgtcggtgcctatgggacagtgtacaaggccgtgatccccaagtggccatttgtggccctcaagatgtgaatccccaatggaggaggagagtggagcgaggccttgccatcagcgcagttcgggatgtggcttgactgaggctgactggaggcttttgagcatcccaatgttgtccggctgatggacgtttgtgccacattcccgaactggaccgtgaggatcagggtagccctggtgttatgaggcatgtagaccaggcacctaaggccatatcttggacaaggtcacccccaccaggttgcaggcgaagacgatcgaggatctgatgcggccaagatttctagaaggctagatttccttcatgccaattgcactcgttcaaccgagatctgaagccagagaacattctggtgacaagatggtggaacagtcaagctggctgacttggctggccagaatctacagctaccagatggcacttacacccgtggttgtacactctggtaccgagctccgacgttcttctgtagtccaatattcaagcacctgtggactgtggagtgttgactggatctttgcggagatgttcgcgaagctctcttgtggggaatctgagccgaccagtggggaaattcttgactgattggctctcagaggat

SEQ ID NO: 506960 - DNA, 338 bp, Homo sapiens
  misc_feature (213)..(213): n is a, c, g, or t
cgtatcctttatctctccgatttttgccgagtcgtgggtgtaatccagatccttctgtgatcatcctgttgttgcaatgtcggtggcatttggctgataacatggtcgttgccggtattgagagatgaggacttaccagtgggcaagcttcaaggacattcataccaccaccgggaagatcacgagagctgttctgcaagttaacactcctgnctacgctggaccctagtgttcgactggatttagacccccaaagtcttcttttcacgacgacgtacgctggagttgtacccttgttctggaggagacgacgggagtaccgatgctcgacattcgta

SEQ ID NO: 506961 - DNA, 1135 bp, Homo sapiens
atgagctagcgcctagtaacataaacatgctagcttttattccagttctaaccaaaaaaataaaccctcgttccacagaagctgccatcaagtatttcctacacgcaagcaaccgcatccataataccttactaactagctatcctcttcacctcctcatactactccgtgactaatgtaaccataacctaatactaccaatcaattcctccatccatttaataatcataatggctatagcacatacacactaggcaatagcccccatttcacatctctgagttcccagcaggcttacccaaaggccacccactctgcacattccggcccttgctctctctcatcacactgacactacaacctagtcgccgcatactccaagtcactattaccaagatcgtctcgcctacagctacacagcgtatagcgctatctaccgtccacgtactcgtcaactcgtgtataccatgcaatagcccatggccagctccggacgagctgtgactatagacacacacatatggcgcaatacgtaccgccctacgaacctccgtctacggacacttatcctccgcatcctatcgtctaccccgcaagctacttagaggacatgcacacgtcatacttatggcacacgcgtcatccgttaaccagccgtgttatcgccgactcccggccgtacaacgccgcgtctctaccggcgacggttatcggtacatcatattactctctgcaccttaacgtaccctacagtacgttatcacgtgcccgcttaacagtgccttaagacgttacacaccggcaaagattagaccgcggttaacgcagtcaaccggtcccagaaagcacctgtttttacgaatacaacaccttttccacacaaagtatcaacaccaccactgatggtaaatctaccaccgatctagactgccttaacagcctataaattctcattcggcgacacatccctacccgattgtgctaccacctaactacagccgctgccattaaactcgccatacttggtatcacagtaacaacgcaatccctcacctactactatatcaaaccatatcccccaataatatcactcatacttcacgcaattaccacatctcaatatccatccactata

SEQ ID NO: 506962 - DNA, 147 bp, Homo sapiens
  misc_feature (18)..(18): n is a, c, g, or t
  misc_feature (25)..(25): n is a, c, g, or t
gcggtggcggcgcgtgcnccggagncgcgcggccacaaaaagaagaaggctaccccacttacagatgcagaccatgtggggctccggagaactgcttgtagcatggtttctagtgttggcagcagatggtactactgagcatgtcta

SEQ ID NO: 506963 - DNA, 807 bp, Homo sapiens
  misc_feature (83)..(83): n is a, c, g, or t
  misc_feature (90)..(90): n is a, c, g, or t
  misc_feature (111)..(111): n is a, c, g, or t
  misc_feature (114)..(114): n is a, c, g, or t
  misc_feature (116)..(116): n is a, c, g, or t
  misc_feature (123)..(124): n is a, c, g, or t
  misc_feature (129)..(129): n is a, c, g, or t
  misc_feature (131)..(131): n is a, c, g, or t
  misc_feature (137)..(137): n is a, c, g, or t
gctccttgtgacttgtgaaaaccacacctcagccttagggtacaaagagatgtctgcttcccagtcaaacttagcagatccantcaggtnatttggatgggaaagaatctnatntnagcaagnnagaantntattcnaggaatatgggagagctcacaaaattgggctggaagctggcagagtccatctcaatgaggacaggaatcaggacagctctctgagcatgcgtaagcacgaataacccatagacaagttttgtaccaaccattttctatcttttgatttctctcagaaaaccaaaaagtccagagcagagcacggtctgattggcccaactttggtcaaatgcccacctactgctcggggaagggtaaaagcaacctgagggattctcttttcaaggctgtgtccaataggagaggggcagttcctcaaagacgaactcagggcgctgttagcagaatgcacagaaccagtgacaaagggggaaaaacagcagatgccgcatgtacagagtaatcagtcatgttaaactacccctctcttttccatgttgtcctgggtcagacaggggagagcaccagctaacccagccctgttgcgtgggtgcactggcaccggggatgaggtaaaatgggcgcttcagagaacactgggctccttgtcccgaaacagctagccaaggtggtcacacagacctgtggcctggcagagaggagaccggttgggcgtgattctgaccagaatcctgagtggaggatggtcatggtacctgcatacaacaggtcaggccaatttacatctaat

SEQ ID NO: 506964 - DNA, 827 bp, Homo sapiens
tggggtgatgaggaatagtgtaaggagtatgggggtaattatggggggccaaacggaatattagtgggggcattaatatggataatggtggtgatgaaatggatggcccctaaaatagaggagacaccggctagggtgtagcggagaagagggttaggctcatacggaggctccagggtggggagtagttcccgtgctaagggagggtagacgggtcacccggttccggctccggcctccactatagcagatgcgagcaggagtaggagagagggaggtaagagtcagaagcttatgtggtaatgcggggaaacgccatatcgggggcccgattataaggggaactagtcagtggccaaaagcctccgataatgaggggtatactatgacagaagatttttacaaattgcttggcgctggtgacgatacccgctggtaaaatgtggtcgtacctagaaggttgccgggctggcccacgctcggttcgaataaggaggcttaaagctgtgcctaggactcacagtaagggcgccgaaaaacagcgcatcagggtgcccaagcgtctttgcgggtctgtagcagcaacagtccaaccggtctggacgaaccatcagggcgcgcgtgcggccacccaggccccgcacatcgacaacttcgccacgccaatccaaccagaccggcggaagcaccacctcaacccgccccaagggcaatccaccacgcacggcacaatcgcaagaactagattcaaaccggcgggggttcacccgcctaaaccccggcgggaaaaacatgaacccgagacacgcggcccacgccccaccttg

SEQ ID NO: 506965 - DNA, 674 bp, Homo sapiens
cgagggttatcttgggtggatcaaattcaaaagcaaggtgcgaaggatgttgggaccctgtgcgattccgccagttctagagaagaaagttctcggctgatccaattagtgacccaattgtccttgggggaaacataaaagaagcgtgtagttagactttgcaagcccagtctcagaagttgactggggggacggaaaccacgccttggtccagctcattcctgagaaaggcttgttttgggtacgtgtcgtatgagtacacccccaattctttctgaggggcatggtttggtaatctaacactgggctctacctgtggccatttcttgcacgcgcaccgatggttggaccttcaagagtcaaggtctgatgatatgtgcatgggccgaatcttatagtgcagtaattcaatggcggattccgtctgcgtgcacggttacatgcatgtttaacagtgcttggcactaacatatgggttccataagcatgctagatgattagtcatgctcgtggatcgtgcagatgctgctccctaaagtcataaatgcaggaataagattcttgtgatgtaggcagtgttgtatattaagaagtcctggctgcgagtacatagggtgtccgtgaacgtaatgtagggcagaacgtctatggtgagcctgtaatagatagacttc

SEQ ID NO: 506966 - DNA, 213 bp, Homo sapiens
cgacgacattggcaactcatgccccttggaggcatgcaaccatgcagtcctagcctgcaggcgtgggcatccctgaggaacactacataagcgaggctgttggcagatgctcccagctacagaggggaaccgggatgcctgcaccattactgcatgtgtgcacagaaccgatctcccggaggtcgagatcataagcctcctggaggagcagct

SEQ ID NO: 506967 - DNA, 206 bp, Homo sapiens
tctccatgcctggacagcaaacctagactccatctcaaaaaaaaaaaggaaaaagtaaaaattttaaaaattagatgggcttggtgacatgtgcctgtaatcccaggtactagggaagctgaggtaggaggatgacttgagcctgggagtacgaggctgcagtgagctctgatcgcaccattgcactcccagcacaagacacgggc

SEQ ID NO: 506968 - DNA, 356 bp, Homo sapiens
  misc_feature (2)..(2): n is a, c, g, or t
  misc_feature (78)..(78): n is a, c, g, or t
  misc_feature (92)..(92): n is a, c, g, or t
  misc_feature (119)..(119): n is a, c, g, or t
  misc_feature (122)..(122): n is a, c, g, or t
  misc_feature (128)..(130): n is a, c, g, or t
  misc_feature (137)..(137): n is a, c, g, or t
  misc_feature (139)..(140): n is a, c, g, or t
  misc_feature (144)..(144): n is a, c, g, or t
  misc_feature (150)..(150): n is a, c, g, or t
  misc_feature (155)..(155): n is a, c, g, or t
  misc_feature (157)..(157): n is a, c, g, or t
  misc_feature (162)..(162): n is a, c, g, or t
  misc_feature (170)..(170): n is a, c, g, or t
  misc_feature (184)..(185): n is a, c, g, or t
  misc_feature (193)..(193): n is a, c, g, or t
  misc_feature (196)..(196): n is a, c, g, or t
  misc_feature (201)..(201): n is a, c, g, or t
  misc_feature (205)..(205): n is a, c, g, or t
  misc_feature (234)..(234): n is a, c, g, or t
  misc_feature (272)..(272): n is a, c, g, or t
  misc_feature (287)..(287): n is a, c, g, or t
  misc_feature (354)..(354): n is a, c, g, or t
tntctgttattttttttttcccttttgattttttattttttttatataaattttcttcctttcctttgttgtttttcnccccgtttcttggnaacatggaggcaggggttctggtcctncantctccnnncaccctntnntccnaccccnctctntnacccnacattctnccccatcccctccnntccccacnttnctctntccnccaacacacccacttctttcctccacatncaccaaccctcacctctaaaaaccatttcccctcacantcccaaacaaaaccnaaacccaccaaccccatcctccatctcctcccttttctcccctcccttttctcctcaccaatttacntc

SEQ ID NO: 506969 - DNA, 1166 bp, Homo sapiens
cgacaatacctattttacagtatcaaccggatgtaatacacgccgcgcagcggcatagagccagagcaccttaaactgtgccgcggtaatatccagcggagacagatactcgatcaagcaggcgatcttacttctgattaaccatatggattaagcagacccaatggcacatcatttcattgaacagatacgctggtacttttcacattagtagccctggcaagataataagattgcaggggatcaatctagcccaggcaaagctataagatcacatgactgaattgacccgatgcccacgtcaaagcactaacatcgagtatacaagtatctgtcacaatgacgatgcaaggactcagctaacagaagtgaacactataatcctatgtaacaacccatatatacctctacacgcctgataacaccagaatcaccactaggacttacacaaccaaccaacatggttaagaatataggttcaaaagccaatatggaacctggacggcttaggatgagagctaggcttgcccgctctagcattaaccccaaattaacaaaagtgggtcagccgattaacatcaacctacggagcacatgggacacagaggacaaacattgcaagcacagatggacagaaagaggataaatccagctcaaggatacgatatgcactaggccacatcggaagaataaccgataatataagacaccaactcacttgacatgcgatgatgcggataaccaaacaacacacccagggggcacaacgagcggacagacatggagaacaacaaatacgaagggcccaataaccggaaataaacaccgaggcaccagggacaaaactttgccgcgccccgaagccaaaaaccccgaaccgacgctacaaccagacggaaacgaaggcgaacgaccacaatgcacccggaaacgaacaaacagcgagaaaggaaactcaacccgaaaaaccaaaacaaccgcaggccacgcgaccgagacctcggcaacaaacgaaccccagaggacaacaaaacagacccgggcgccagcaacaggaacaggaacaaaaaacgtgcacgaaaccacagacacaacgaacagcagacaaaataccacccggacaccagaagaagactcacacaccaaccacagcgacaagaaaaagg

SEQ ID NO: 506970 - DNA, 381 bp, Homo sapiens
cggatcacttgaggtcagtagtttgagaccagcctggctaacatggtgaaacatcgtctccactaaaaatacaaaaattagctgggtgtgttggtgtatgcctctagtgaaaatgacatagaggcaggacccacaggagcctatttgaacttgtggcctgaaaccaactaggttgattgcatgataaaacaaaatgccaacattctcaatgggatttaaataagaccagtctcataacataatgtctaaatgtgcaggagacaatctaaaattactctgcatgtgaagaatcaggaaatccaacctgcaagagaaaagacaatcaacagccgccaatgccaacatgacacgaaaaccctcaactaattatcagcaaataga

SEQ ID NO: 506971 - DNA, 234 bp, Homo sapiens
tgcacattggaagcctcatgagtgcggctccgccacttgccagagggcacgagtggggatgtacttggccccaatggcatctgtatcagccgcttctcatgccaccactgtctacaaattcatcagcatttaacttcgtgaagccgcacttcttcaagatgtgtatcttctggcggacaggaatacttagaacttgtgcctgcgcaggggttcaatcacatgctccttgtacta

SEQ ID NO: 506972 - DNA, 116 bp, Homo sapiens
cagggtctcagattcacacttgagctacttcaggacccatacaggtaggctctgaatgaaaatgattggcagctcatcatgaaagcctacaactatattatacacgataagtaatt

SEQ ID NO: 506973 - DNA, 394 bp, Homo sapiens
tatttgttttcagttctgtcacccaggctggagtcagtgagccgagatcaagccactgcactccagcctgggcgacagagcgagactgcgtctcaaataaataaggcaacaaggagagtctggatgcagtggctcatgcttgtaatcccagcactttagtaggccaaggcaggcagatcacaaggtcaggagttcaagaccaacctggccaacatagtgaaaccatgtctccattaaaaatataaaaattagccaggcatgatggcccatgcctgtaatcccagctacttgagaggctgaggcacaagaatcacttgaacctgggaggcggaggttgcagtaagccaagattgtgttgctgcactccaacctagggggcaaagcaagcctctca

SEQ ID NO: 506974 - DNA, 207 bp, Homo sapiens
ccggaccgggaagagatgcgttgaatatggaaagctgtattgacgctgaaataaatgaagagagcctacaagtagaagatcatctgttggtctctcagttcactgccagcttatccatacatatggtattctggttgatagaagccaagtaagggcctggccctgcctgctcctagaactgcagcatgtaaataccatatggacaag

SEQ ID NO: 506975 - DNA, 453 bp, Homo sapiens
  misc_feature (182)..(182): n is a, c, g, or t
  misc_feature (206)..(206): n is a, c, g, or t
  misc_feature (222)..(222): n is a, c, g, or t
  misc_feature (264)..(264): n is a, c, g, or t
  misc_feature (309)..(309): n is a, c, g, or t
  misc_feature (332)..(332): n is a, c, g, or t
  misc_feature (344)..(344): n is a, c, g, or t
  misc_feature (359)..(360): n is a, c, g, or t
  misc_feature (389)..(389): n is a, c, g, or t
  misc_feature (445)..(445): n is a, c, g, or t
catcagccctcccctccatttattcctatttttctgtagttaagaatactgtaaaaatgtgactattccttaatatcagaaaagaatgcacaggctgagtcttccggtcaaaagttaaatactgatggaatcaagtattttgtatgaagttctcatttggtatctctaacgctattttgggntttgcatatagtattatagtatgngtatatcactttttgnatagagtaagcaattgaataatttggtagtaaaaataatccncattgactggaactggtatagacatagcttgagtttaaggctccnttttgctcatttctaagacttangaggaaagaatnaatctaaaatggccnnttaaaccattcttccattcagcttgctgnggtaacttaaggaggtttaaactatccttctctttaactgcatgtagttggctgtntgtgttct

SEQ ID NO: 506976 - DNA, 460 bp, Homo sapiens
  misc_feature (183)..(183): n is a, c, g, or t
  misc_feature (230)..(230): n is a, c, g, or t
  misc_feature (401)..(401): n is a, c, g, or t
  misc_feature (419)..(419): n is a, c, g, or t
  misc_feature (428)..(428): n is a, c, g, or t
tttcggcgagcgagcaccttcgacgcggtccggggacccctcgtcgctgtcctcccgacgcggacccggtgccccagcctcgcgctgcccggcaggctcctcgtgtcccactcccggcgcacgcctcccgcgagtcccgggcccctcccgcgcccctcttctcggcgcgcgccagcaatggcncccctgcaggtcctcgcgttcgggcttctgcttgccgcggcgacggngacttttgccgcagctcaggaagaatgtgtctgtgaaaactacaagctggccgtaaactgctttgtgaataataatcgtcaatgccaagtgtacttcagttggtgcacaaaatactgtcatttgctcaaagctggctgccaaatgtttgggtgatgaaggcagaaatgaantggctcaaaacttggggngaagagcanaacctgaagggggcctccaagaacaatgattg

SEQ ID NO: 506977 - DNA, 975 bp, Homo sapiens
cattaccaggtagcctgtcaaaaatactttgagatgatacacaactgtggatgattgtggcttttcatttgaatcatcctaatcagttctatttgtgagagccaacgttacttctaacatggctggtaccagaccataaagacaggaatcctagtccatacctagatacactccgtcaagcccaataccatagctgttccagacaaaccaacggactgcatcatctgctctggcctctttaaattcctctctggaacctggatatggaaggactagaagattactttagtgaagattcttaggcagtatttataacccttatttcctcaatagcctgtttcctgctcttacaagacttttgcctttgcttgttgaacacaagggtatacacatcatgatcaccaaggcttagctgcagctgacacaattacaagctgattgcagccctgaccttcccagctcacgtgatcctcctacctcagcctcccaagtagtcaggaccacaggtgtgcacctcatatccagataatttaattacaatatactaatagtagaggtggggggtctccctatgtagcccaggcagcatctcagacatcctgggactcaatgcgatcctcacaactcagtgtacaagagtgctgtggatcacagtagatgagccaactggttgcctggccattctatacacacgaaaacccactatgagtacaacataccaacactacagagggaatacacaaaacccatacttacaggcaatgacacacaacaatagacaaagcagcgatacgaacgaaaaacaacaagacaacattcccccaaacactaggcgcagtggcaagaaaggcaacaacctacgcacaccccatataagaagtacggcaacacgacacgagcgccacactcaacaccctacccctcgccaataaccaccactcccgcaccacgctcaaccccccccaccaccccacc

SEQ ID NO: 506978 - DNA, 918 bp, Homo sapiens
cggggtactgataggtgtgggtgtcgagccctctggcagagggttaacctgggtcaaatgcacggattctcactctcgatacagaatacgtctctcccgcggtggcacgtctcgcgagggacttgcaattcctgtagccgctcaagtttgtccagtagagttcgagtagaaggccaatgggaggatgaccgccgcaccggcaaccgcggcagctttctcgtgtagaatgcgattgttgcccatatttccccgaagctcttcgactgactcagaaggtctgagtacttgccagattcgagaagatccttgaaggaagtggttccagtaagcgtgcttcccatactgctgcctagcagacctctgattacccgcgatatctggtagtggggaccgctctccggcgagctggtttggcaaagatggaacagcagagaattacaataggaccttgctaatatctgtaagaccggtcagactacatgacagagcatcattggctggagtgtactggcgggaataccagcttctattcactgctaaagcaacaatacattgagcagagccatggcaggaaatttatcataaccggtttgatcgctgtgcaatctgcacatcgtgctgccacacgaggcttcacttcgttatggctggcgctggcgttggcagaactgcagtggttcgtcgcgtattattcaagacaggcgaacactagtctggacttgtatccgacactaaagatgccttaagcatctgcgtcattgccgggaactgcacgggcagtcttttacgataaacataggctgcgtggctgggggctggtggccttctgggggcttggcgtgggcacctctgaaagcaccagtggctcccaacaccccgagacatgcccccaccacaccaccgaccaagggcccaccc

SEQ ID NO: 506979 - DNA, 615 bp, Homo sapiens
  misc_feature (418)..(418): n is a, c, g, or t
  misc_feature (431)..(431): n is a, c, g, or t
  misc_feature (601)..(601): n is a, c, g, or t
agcggagcggtggctccgagaccgcgaggtgggtggagcgggtcttcctggaagggtgcgataaggtcggggcgaggtgcctgggcatgcttctcctccttccgtcgaggagagagatctaatgtggcgtaggagcgggatgtagactagacctgccgaagccagtccgcatgggcacctgcagcctcactgtggcgcgctcggcggagcgcaccaggccagagtagaagtgtgttcaaacgcggggctgcaggtgcgttgggttcccgtggcggtcctgacgagctgcgccatctctacgacccttgccctagacacgaatgcgggtcacggtcccggtgggcgtctggcgagagctgctacgctttcactgcttgatatgatcatactacacattcaccgtggtcttccgcgcgcngtgccgctcaagnaccatgcgtaccggcgagacgcaaaactccgacggcctagggcactatggatgcggtcgcaacaacacggcagaggagcgaaggattagcgtggcagctcgccgaattactcgaggaagactcctaaagactcatgggtagcacacatggtaatggtggaggtaattctntatacccaggcccg

SEQ ID NO: 506980 - DNA, 160 bp, Homo sapiens
ccaggaaggtgcgtcagcatctgcagccgcgtcgacgttgtcggagctccgcggaggacccaggagagccggactaggaccaggccctgggcctcccaacactccccatggagaagctggcggcctctacagagccccaataaacgatcccacagcctca

SEQ ID NO: 506981 - DNA, 569 bp, Homo sapiens
caaactcaataaataaagtcgatccagcagttagggcataaaaagagtgctgtggaaaccatgagatcgccaaacgaagagtctcaaagtaggctgaatcgcgatgctccaaacattgccatagtgtccttattctcacatgcagcttatcaaaataatgcccagtgcagagaaaagttacaggatgtaccatcaattgggtgatagtaaggatgaaagagttgcttccagtaacgatcatgtagacactagtggcacttacactactgactgcagtccagctagagctaaattccagaaaacaggtaaaaccaggaagggtctcacttcctgaagagaatcacacttagaacatggcagcgtctgcattacctatctagatacaatgaactttccagagctcaacgaagtggtcctcaatcttctgcttggcacgtctctctcccagcgtctccaaggcatccagcagggtgtggacagaggcatctcgcccggtttagtagaaccacttaatcagcatcgtgtacaaggtgtccctgtgacccgatgcctcagctatagccaactta

SEQ ID NO: 506982 - DNA, 391 bp, Homo sapiens
tggggtatccacaaaccactcccagctgagggcatgggagacgcgccctgtatgggagcggcccaggggactctgctcagggactccactctgccgtggaagtggaggggctgtgcggtccccccgacctggtcgtcctcccgcccaccccccccagcctgtccataggcacgtggtttctgaccgtggcaaccttgccgcggttcttcaacagtgggtttcatggtggaaacttgcctcctgggctcagccagatcctcccctggtgccagcaagctggagcgctcgctggaagtctgcctgggccacaggcccattcccagacacctgctgcttccaagctcgggaagcattccacggcctgcgctccctgcttcccagccgcggccgc

SEQ ID NO: 506983 - DNA, 179 bp, Homo sapiens
tggtcggcccatctaatattctcatctcactggcagacatatcttcacagtgctggtttagttctcggataggacccagtgctgcatctttgccaaagctgttaggtcacttcctgagtatccatcagtcattctagcaagttgtgctagttcttttagggcgaaatagtaatcctcca

SEQ ID NO: 506984 - DNA, 345 bp, Homo sapiens
  misc_feature (239)..(239): n is a, c, g, or t
gggcccccccccccaattttagggggccccccttttttttttggggggcccccaaggaggggggttttgggggtttttttcccccccccccgtggcccggggttttttttccccccccctggccccggggggggggtccccttggggggggttttgggttcttttccccccccctttttgggggggggggttttttttttttttcccccccccccctttgttttttttttccccccctnccgggccccttttttggggggggggggttctccccagggggggggttttttttttttttttttttttcccccggggggccccttttggggggggggccccccccca

SEQ ID NO: 506985 - DNA, 302 bp, Homo sapiens
aatcgtctgctcgtcaacatgctgattgtcagctcttgcttcggcgaaagcagtaacagggccactcccgatccagcactgattcgaagtagcgggtctggaatcctgccatcagcggagtgttggagcacgtctggtaccattccatgccagccctgttgatctcgctcccaccagcactccgtggcgtccccgaggctctgtggtgtgggcatgcaggcgtagttccattgcctgtcagaaccttccttcttgctgaagatgctcctcacgggcattatcacctgcccctggggacactg

SEQ ID NO: 506986 - DNA, 104 bp, Homo sapiens
cctctcggatgaactgatccgtacgtgtcacatgtagacgcgactacatcgaagtgataggcagacgtcgaatggtcgtcgcgcacgtggcgtcgatcggccga

SEQ ID NO: 506987 - DNA, 401 bp, Homo sapiens
tgaggatgtggcctgtgtgctgcttaacctggcctagaacttgctgcacctgctgttcttttgcttccaccttaacccttagtttatgctaattttctattctcctgcctcagaaggtctccttaggaggccaagcaggctcttacctgcttcaggtgagcaggtaaccaggagggagcggaccacagttgctatcatgtctatgattagtgtttggaaacctgtgcagacctttggctccacttggatgggatagccaagagaacagatatgtggtttttggatcatgatatgtctgaatatttgtgtaaccttatgtattaccatcagtttttatttgttaggcatggttattcttgctcgtattattattattattattattattattattattatta

SEQ ID NO: 506988 - DNA, 419 bp, Homo sapiens
  misc_feature (89)..(89): n is a, c, g, or t
  misc_feature (365)..(365): n is a, c, g, or t
  misc_feature (412)..(412): n is a, c, g, or t
  misc_feature (414)..(415): n is a, c, g, or t
accacaagcactttatgtgaaatgtgttcgcccaacgattaattatgtttattccccgagaagttttaacccagattgtggatgtgtantctggttcagcatatattcacaattacctttgttttttgttttgttgttttggagacaaggtcttgctctgtcaccccaggttggagtgcagtggtgtgatcatagctcactgcagcctcaaactcctcagtaggaaacttcctaccccagcctcccgagtagctgggactagtagcatgcaccactacacatggctaattttgttttttaaattttttctagagacggggtctcattatgttcgcccaggctggtctcaaactcctggcctcagngatcctcgcaccactgcacttcagcctaggtgacacagcgagagtcnanntatc

SEQ ID NO: 506989 - DNA, 501 bp, Homo sapiens
atgctgcaaaactgaaactgtcacttactttaattagtggaattaccattactgaatcatggtcgtaaaaggtgcattcatgtacattaccacttattttaaataaacaccaatgttgaaacaatcaactttgaaaagctgcataagtttttgttttaatccctgattacatttctatttattcacgggggtagcctgaaacattgtattttgagagactaactacggcttaatttcttttttaaaaaaaacaacaacaaacctggtgtaatatagaacaccagaaaagcaagaaaaatgtgtgcttgtcacttatcttcaccatactgtccataagaactctgataaaatatggtactggtgccacattagtattggggaaaacataattcactcatagcacagagcacatggttgaccaacttactactgtgaaatccaaggtgtggactttcacctcagtgctgtattcaggctaccagagcatccccccggaggtcc

SEQ ID NO: 506990 - DNA, 328 bp, Homo sapiens
gttttttttaaaaaaaagggttttttccccccgccccccaaaaagggggacgggggccttttggggggggcccaattttcggggggtccaccggccccctttttttttttgggttttcccccaagggccccccccccccccgggaaaaggggttttttttgggggggggggggcccgggggggcccccccccccggccccgggggggggcgcctggggttttttttttttttttttttttccccccctttttcttttttttttttttttttttttttgggggttttttgttttttttcccccccctatttcccccttttttggtttta

SEQ ID NO: 506991 - DNA, 225 bp, Homo sapiens
gagaaaccttatgaatgtcacgattgtgggaaaaccttcaggaagagctcctatcttacacagcacgtaagaactcatactggagaaaaaccctatgaatgtaacgaggtgttggaaatccttcagcagtagctttatatcttactatagcacaagaggattcatagccagggaggaccctacgagtacagttactatagaaaagaccttatattactctcatag

SEQ ID NO: 506992 - DNA, 138 bp, Homo sapiens
tgctctcgatctcctgaccttgtgatccactcacctcggactcccaaagtgtgggattacaggcgtgagcaccgcgcgcggcacaaagtatccttttaaatatagttgaaaccacaaagggaaatgtggtgtttttgc

SEQ ID NO: 506993 - DNA, 430 bp, Homo sapiens
cttacctaggctggagtgcagtggtgtgatcacagctcactgcagcctccaactcctaggctcaagagatcctactatctcagccttctgagtagctggactacagtgcacaccaccctgcctggctttttaaatttttttagagacaggggcatctcactatgttgcttaggctgttaccacaaatcataatcaaccatgtctccatttcttcatctgtcgcatggatttggtaatacggtatctacttcatagggttgtcatgaggataaaatgacctagtacttctcaagtgcttagaataggcctggcacatggtaaaaactcataattgtggctacttctatgcacccatctaaaaagactggaagaattccttcctccacccctggatttcttgggatagtggttttccaatattcctagtagt

SEQ ID NO: 506994 - DNA, 423 bp, Homo sapiens
  misc_feature (1)..(1): n is a, c, g, or t
  misc_feature (77)..(77): n is a, c, g, or t
  misc_feature (84)..(84): n is a, c, g, or t
  misc_feature (86)..(86): n is a, c, g, or t
  misc_feature (96)..(96): n is a, c, g, or t
  misc_feature (100)..(100): n is a, c, g, or t
  misc_feature (132)..(132): n is a, c, g, or t
  misc_feature (157)..(157): n is a, c, g, or t
  misc_feature (160)..(160): n is a, c, g, or t
  misc_feature (173)..(173): n is a, c, g, or t
  misc_feature (181)..(181): n is a, c, g, or t
  misc_feature (191)..(191): n is a, c, g, or t
  misc_feature (216)..(216): n is a, c, g, or t
  misc_feature (219)..(219): n is a, c, g, or t
  misc_feature (221)..(221): n is a, c, g, or t
  misc_feature (224)..(226): n is a, c, g, or t
  misc_feature (241)..(241): n is a, c, g, or t
  misc_feature (245)..(245): n is a, c, g, or t
  misc_feature (247)..(247): n is a, c, g, or t
  misc_feature (255)..(257): n is a, c, g, or t
  misc_feature (264)..(265): n is a, c, g, or t
  misc_feature (267)..(267): n is a, c, g, or t
  misc_feature (269)..(269): n is a, c, g, or t
  misc_feature (293)..(293): n is a, c, g, or t
  misc_feature (304)..(304): n is a, c, g, or t
  misc_feature (307)..(307): n is a, c, g, or t
  misc_feature (310)..(313): n is a, c, g, or t
  misc_feature (319)..(319): n is a, c, g, or t
  misc_feature (322)..(322): n is a, c, g, or t
  misc_feature (342)..(342): n is a, c, g, or t
  misc_feature (350)..(350): n is a, c, g, or t
  misc_feature (352)..(352): n is a, c, g, or t
  misc_feature (354)..(355): n is a, c, g, or t
  misc_feature (365)..(365): n is a, c, g, or t
  misc_feature (368)..(368): n is a, c, g, or t
  misc_feature (384)..(384): n is a, c, g, or t
  misc_feature (396)..(396): n is a, c, g, or t
  misc_feature (398)..(398): n is a, c, g, or t
  misc_feature (402)..(402): n is a, c, g, or t
ngtgaggatggaagaagatttagaagagtatgatagtattcttagattttttctaagttgccttttctgggtggggnagtttantnttagtgtctntggncatcacatttgaagaatgtttaagttgggggnggcaacgtgaattgcaaacagggcntgnttcagtgactgtntgcctgtngtcccagctnctcgggagtctgtgtgaggccaggngtncnagnnnaccagctagttgctntgtnanttctaggnnncattttnntntntgaaattttgagggttggtttaancgttttctggngcnttnnnntctttnttnttgtgggtttttttactttnccttttgngngnnttattgggtngtnggtcatttatgttgtngtcagttttttncnagtngtaagagcctatttaccatat

SEQ ID NO: 506995 - DNA, 87 bp, Homo sapiens
cccctgggcgccaggtgtttcggggtgcgggtctcgccgaccggggagaaggtcacgcacactggccaggtttatgatgataaagac

SEQ ID NO: 506996 - DNA, 267 bp, Homo sapiens
ccccccccaaagggggggggaggggggggggggttccccccccccccccccgaggggggggggggggggtttttttttttcccccccccttttttttccccccccaaaccggcccccccttttggggggggggggggggcccccttcccccccccccttttttcggggccccccgccggggcccttttttttgttgtgtgtggggggggccccaaaaggggcccccaaaagaagggaaaaaaacccaaaaaaatttttttttattta

SEQ ID NO: 506997 - DNA, 672 bp, Homo sapiens
ctgtcaagcaagatgttgtggcacgagtgagatgatcgacgtcctcggggtgagcaaggcagaggctacaatggggtatcagtcgttgtgacaccaatgaagctgccccaggaagaaccaccagaggtctgcgcaacgtggcctgtataggggcatggcatcctgctcgtgtagccttctctgtggcacgcgctgggcatgcaaaggctaccatctaacgcactgagatcaataagacgatttataagataggacaagggtaccttatcaaggacggtaagctgagtcaagaacaatgcctcgcattgactatgactcgtatctgacaagagcatcaaacctctgggtaggctttgtccactatggtgaagtgaccaatgactttgtcatgctgaaaggctgtgtggtgggaaccaagaaacgggtgctcagcctccgcaagtccttgctggtagcagacgaagcggcgggcctctggacgcaagatagaccttaagtaacattgacaccagctccaagtttggccatgggacgcttccagaccatggaggagaatgaaagcattcatgggagcacgtgaagaaagacacgaatatgcaaaggaaagaaggagcttaattgccaggaacagatatagcagtaggtgggggtactcaataaaagttatatcca

SEQ ID NO: 506998 - DNA, 295 bp, Homo sapiens
gagagagagagactccgtctaaaaaggaaaaaaaaatggatacataatgattatatatataactggggtacgtgtgatattttgatataggtatacagtgcgcaatgctgaagtcaaggtgattgggatacccatcaccttaaacatttatctttgtgctggaaacattacagttctcttctagctattttgaaatatatgataaattgttaactgtaatttcccctactatactgtgaaatactagagctaactgtttctgtccagttgtatgtttgtatccattaaccaactt

SEQ ID NO: 506999 - DNA, 155 bp, Homo sapiens
  misc_feature (42)..(42): n is a, c, g, or t
gatgcctcgtgtttgttagccttggcttatctcaataaccantagttctaacaaagtgctgaggtacaagtgtaagaggttgtgttcctggttcgccttttcgtttcctggaattgtttcttagatcttagagactttctctctttggtctaaag

SEQ ID NO: 507000 - DNA, 1499 bp, Homo sapiens
  misc_feature (392)..(392): n is a, c, g, or t
  misc_feature (398)..(398): n is a, c, g, or t
  misc_feature (525)..(525): n is a, c, g, or t
  misc_feature (562)..(562): n is a, c, g, or t
  misc_feature (697)..(697): n is a, c, g, or t
  misc_feature (738)..(738): n is a, c, g, or t
  misc_feature (826)..(826): n is a, c, g, or t
  misc_feature (883)..(883): n is a, c, g, or t
  misc_feature (982)..(982): n is a, c, g, or t
  misc_feature (1077)..(1077): n is a, c, g, or t
  misc_feature (1103)..(1103): n is a, c, g, or t
  misc_feature (1136)..(1136): n is a, c, g, or t
  misc_feature (1140)..(1140): n is a, c, g, or t
  misc_feature (1329)..(1329): n is a, c, g, or t
  misc_feature (1391)..(1391): n is a, c, g, or t
  misc_feature (1445)..(1445): n is a, c, g, or t
tctctgtgctgggccgtcagaatcccgtggtggattatggcgtggcaagtcttggtccagggaacacccaagacagtgggttatggtgggccactgtgtgccgttggcccgcagctaactcctaaacagttggttggtgggacccacaggggtcaatggggcagatggggcaaggtcattcatgtgacacgatccgtaacctgtgacaaggggtccatgtggagtcattcggcgatcatgtgggacgcgtgtctccagacagagacatcatataaatgggagccgacacacacaccacaaggatgagggtatcatagcacacctggatctacatctcacaggcagagtcacacatattacacaggcaggcacacacatcttcactgtcacanacaccntgtggacacactgtcacgcacccgatgtcgcgcgcagtcttcagtcattatagcaatatacacacgcgcacggtgacagtcacaatatatccctggtgatactcccagaggcaatacccgggacccnctatcccccgacacagtattggcgtggtgtccatttntccatcttcacaaggagggtgtttcatcggcgtcgagagcctggtcccacgttgtggacagagcgccatccttgtcaataatcgatcaatcaagagtcaatacattctcgacagcccgcttatctattgggtgtncctagtcacacaagttttgcagctccgcttgtgactaccangtggcgtcaagcccgtagtagacaggagcactgctattatttaaaggaaaccacagggtattcccgcagatactctatatataatatnataatcttctacaaccagcttattatttgtattccggttggtggccgttacactttnttacataccaggcaaaccacacagagtattagtatgtggggcaacccgggtttcattgggtcatgacacaaccccctttgacaaggtacaattttacanatccgttatcattatagccgcacagggatatattacgacacaggtatcttaagcagcgctcactttaaagtgggtttgtactatgtgggaaggcntcagcgaccaaatatcaacttagggngaacctagtcgagccacaggataatagagtgcncgangagactggtaacgattcacacacacacacactttacaagtggtggtgcttttcccgaggaggacaccatttctctacacacactcccttgtataccacacgaggggtattaaattcgagtgagggattaaggaaacagccaaacacttacaccactgtttccgctatattaacgacaccagttggtcgntctacggtgctacgagcctatgagacacaaccatgtggttgcacaaccaccaatctggtacngtaacatcattaacgacgacaattaactcctgcgacatgtgatggtagtgtacnacactcttgttcacatgacacatatactgagcgagctctatgtcagcacgtccc

SEQ ID NO: 507001 - DNA, 293 bp, Homo sapiens
  misc_feature (44)..(44): n is a, c, g, or t
  misc_feature (54)..(54): n is a, c, g, or t
  misc_feature (73)..(73): n is a, c, g, or t
  misc_feature (84)..(85): n is a, c, g, or t
  misc_feature (109)..(109): n is a, c, g, or t
  misc_feature (122)..(122): n is a, c, g, or t
tgtctgatcacgaaccctgtttcctgttaagatgtttatcaatnacaatttttncccagcacgacatggaccntcatcagtaanntctagtttcaccctggccttgtgntctcactctgccnctttgctgttgtgatattttactgcctttgaagcatgtgacccactccctattcgtacacccctccccttttgaaacccctaataaaaacttgctggttttgtggctcaaggggcatcaaggaacctgccaacatgtgatgtcacccccagagacccagctgtaaaatttc

SEQ ID NO: 507002 - DNA, 1804 bp, Homo sapiens
  misc_feature (1)..(1): n is a, c, g, or t
  misc_feature (405)..(405): n is a, c, g, or t
  misc_feature (914)..(914): n is a, c, g, or t
ngcatctatcatgagtgggcgatcaacacaatgagttgtctgtctcgtcactttgtgatgagatatcatttctcgtgcgtgcctggtgggaattcctctctaggtgtgggtgtggggtgagcctcgatttttttcttatcgggggatgggtgcccgctatcacacagatcgtttttgggtgacttggctcattagtggtacgggtcctccacatgtcacaaatggggggcggcctccccctggtgtgttctatcgggggcacacacctctgttgtgtcgtctcttcttcacgagggaccacaacttctttctcccgcacggagcgttgtttcgtactgaatcttttgtttttgaagtcccgcccctttgtctccacatgttgttggttctgtctcccccttcggngatactgggggtgtgattcctccaattctccctcacttcctcctgtggtggggggacaacacctcctgtggtgtcacaaatgacgtgtggtgcacacgaagcgccgcctggggaggtaggtagatgtacgccaccgtgttttatcattgtcatgtcggcggggattgtcgttgttgtccaagaggggacactctggtgtctctcgcccgtaaggccgctgcttgtggttggccgacgggaagcacaccaacaggccctcttttgtttggggcgacctacatgggaccaaccatcttttgggggtagacatcacaaacgggagggtttgagctcccccggggcgtgtacccccttgtggttaattttgggactacctgtaatattggtcccccccaccggggagattttttatagggaattaataagcgcgtggttgcgaacaacccacaagggggtctcccgccccacgttgtgactccgccgaagaggagccgcgccaccgtgggggngccacaacaccaacaacttgggggtatatacctacgcgtaggtctatctgctcttttgtgtgggcccttattatggagaaattgttgggaagtttttcccccttaatgatggtggcctatagttgtgttgtctggagttctaatctcttgggggggttttttgtataacaaatcggaggtttgtgaaataataaagccttctcgtgacacacactgtgtagacgctcttattatagaagaggcgggggagacccacacatatattgtttagaacaacatctgtctggcgaagttttgtcacggaggttatagagagctttttctctgtgtgtttgtgtctctctctcttcagagaagagcactgtagatcagcagtgttatagtgtttattttttcacggcgctcgctctctctgtttgggagtgggggggccccctcgggctctcttctttgtcgccccctctgttgggtgtggggggcctctcccccctctttgttttttggggcctttacacagggtcacactccacaggagaagaaaaatgagaggccttttctcccacatctttaatagtggcgtttccacaggcggagaaatgtgcacacctgggtatcacgcgcacacatatgggcacatgaggaggtctatagagagagaagtatgtgagcccggacacacagggcacgaagtaaggtcccctccactggccctgaatcctcctttggttcccagggctggcctttgcaagaagctgagttataaccaagtgttgtggctgtttcacatgggagaagagagctggggccccgagggaccttgagtcagaaatgttgcccagaaaaagtatttcctcccacccaaacatttccaattaaacccttttagttga

SEQ ID NO: 507003 - DNA, 1104 bp, Homo sapiens
gagtaacagcgggagctacagcggggacgcgagcggggcggtgacggctcgtgggaggtggtctcagtcttgggacaaactgctgggcacccggtcggtctgctgctgaaaggtggttcatgtaccttgctccagagttgtgcttagcgatggccgtggaaatccaggcggtcgccacgcgactcgacagcataagtccagcaatctcggcaaaacactggacatcattcaatgacaggatagaaagtaattcgacacgtgaatgactgggctcaccagtacgcgactccccactattgccaagacatggtaaccccgataccatgcgaagttcttcccaaaattccaatgaggttctccccacagccaaccaaattcaagtgccttcgcaacaacaatttgccgcgtgcctattacttggccggcctcaggacaaccctcccactacttattgcagtgcgcatggcatggcccctggacacacggggcacgcccttaagagccctcctatagaacggggttcacgggacatcctggggacacggttggcgaattctccgtctttatcgtcgccatgtgctcctcggggcacatccggttacatctgggcctcccgctgcattggtccccttgggtgcagagcacaccgttccgattaacgcgagaaacttctggaagtccaaccatctttaacaactcgaagcctttcacgtgcacaattggaactatccacaacatcaaaagcgccacagtcggttccacgcggcacaacgtgtgccaccgaagttgccacaaagacagcgtctacttagggtcagctcccaagggggaacgacagttaccaatgggcatctagcagtatcgctcgaggcgagcgcatctggtcgaatagtcaggtgatcgacttaggtggcgctagacaagaaaacgcgccccgtttctttccatcgtgccccaatttcccctttggctaggagcagagcacgcctttggtcgtgagccccacttgcttgtggtaacccccccaaggaggggacgtgtcataatgatctcaacgagttaaacggtcctcagtagatggacacaatctcaggacaacattgc

SEQ ID NO: 507004 - DNA, 436 bp, Homo sapiens
ttcaacacattagttcaatatcaatcaagtcacacaatactttctgtgtcaactgtctgcctagtgcactctatcatattgtgctattgatgatccacgttttagagtggtccctgtgacatgagagtcaatgcctcttgtgttcaaaacagaggaataatcccaaagttcttccgcagatgaactccattccagtaaatggtagatacatagaaattacagtaagccagacacttaaaaggacagccaagaagtcttccgacagtttattagaaagaatgtagacgtgtaaaaacactccccggcgtgtcatgaagataagtagaggttttcagcccgggtataagctgaatcgcaaataggaaatagaaaatccaatagtgtattagacattttccactcattagccagactgacggggcaaatagaaatcagg

SEQ ID NO: 507005 - DNA, 321 bp, Homo sapiens
  misc_feature (30)..(30): n is a, c, g, or t
  misc_feature (34)..(34): n is a, c, g, or t
  misc_feature (52)..(52): n is a, c, g, or t
  misc_feature (72)..(72): n is a, c, g, or t
  misc_feature (76)..(77): n is a, c, g, or t
  misc_feature (118)..(118): n is a, c, g, or t
  misc_feature (188)..(188): n is a, c, g, or t
acagacaaatggagaaacgggacaacttgnccancgtttcactgtaccagcncctgtagtgataatactcantatnntgtgtgtgatggctggtattattggaacgatcctcttaatntcttacagtattcgccgactgataaaggcatgaggatgtggcctgcatgctgcctgatcttgcctagaanccggctgcacctgctgttctcttgtttatgcaaactggctgcacctgctattcctttgcttatgcccctacccctggctatcctaattcccttttctcctgcctcactattactgtattctctacttctaaat

SEQ ID NO: 507006 - DNA, 102 bp, Homo sapiens
ggtgagctgcataggggcaggtactgctggggcatcatatcaaaggtcaggaactgaggtgcaggtgaggccgtacaccggatgctgtagtccagctccggt

SEQ ID NO: 507007 - DNA, 900 bp, Homo sapiens
agcgggtggagacagccgagcctgcggaaggcaggtggcggcggcacctgcgcatcagcggctggggcagtgttatggtagctgcgtgacttgcgtgtctgagcagtagcggcccacgggtgcccgcgcctggctgcctcgtggcgtgtccgcgtgcacgaatggtgcggacccacgtcgcgtgctcccaagacggctcgagggaccgtagtgagcgccgttcgggcctcgtgccttcgctcgcgcagaggcagggcggagcctcaaggaggggcaagacgatggtagcgtagagccaagatgtcgttttgtggttgctggaccgttcggcgagccagaagcattgttggccccccctttcggatactgcagcgacgcctctgtctgcgccttctatatgtttctttatgagtgcatgagactgaggggtagttcttgtgcctgcatccgacgctttgctacttgaagcgcaagaccatagttccgtgtccacccgaaaaggaaaagcctgggggcctaatgcatagggcccggcgtccccaaaggactggaaaccgggcccggaaagtaagaccaacttataagcgataagtgcctttcggaaattggtgcccctttcccaagagggggccaagtgctgggtaacgaaaaggggctgtggggaaattcttaccaccaccctgtcaaacatcacctaccagggtggtggcacttgtactccctgtagtttggcatttcgccttgcatcaattggaacgcgatggattgaatcaactctttgggaggaaagggagttggggtccaaagggaaccccaaaggaaaaacgggcccaatcggcctccagccaacccttgggtcttcccccccggggggggcccataagggaaaaacaattttcc

SEQ ID NO: 507008 - DNA, 120 bp, Homo sapiens
  misc_feature (44)..(45): n is a, c, g, or t
cccgtgtgcggacacgtaataggagtcctgagatgtagcagaanncgtgggaatgatcctcagtgtgctcacggggctgctgttcggcagcgatggctactacgtgtacgtgtccggcca

SEQ ID NO: 507009 - DNA, 211 bp, Homo sapiens
tacatataaatcagctcgtaccctcggatagggcaagatgggtcaccagcactgtactggagctacccgtcgaaaattcggaccaggtttctcgctcttgtcgtgtctgtcaaaccggcacggtctgatccggaaatatggcctcaatatgtgccgccgtgtttccgtcagtacgcgacggatatcggtttcattaagttgagacttatga

SEQ ID NO: 507010 - DNA, 177 bp, Homo sapiens
tgccctatgagacatcagttagagtgctccctctcctggtatacatgaagcatacaataccaccaaaactaaaaagttgaagaagtatgagttgtaattgacatattttcacattttccgtttttaaatataaagaactttatacttcgtatattaatatctaagtgctgtcattat

SEQ ID NO: 507011 - DNA, 323 bp, Homo sapiens
tgaggattcgggagtgcaggcagaggcgagattcatcaacccagagacgaccaggtacagaacaggctggtgacaacgggacatccctctcaccgcaggctagagagaggccctgggatacgagcaagaggttgctgtgtctagatgatttctatgggctgtgttttaccacagtgtttgtccttggaaaccatgcctggagtgccttctctggccccgagataagagcagatctccagtggagcactgtgggttccaggtcagggctcaaggctcatctcaagcctccacccttttcttccacgggataccggagctcgaac

SEQ ID NO: 507012 - DNA, 167 bp, Homo sapiens
  misc_feature (17)..(17): n is a, c, g, or t
gactggagctgtatacnatgctcatagggatagtacagcaggggtaggctatgtgtatgtcagcgggttgagaatgagtgtgaggcgtattattccatagtccgcctaggtttttaagagtactgcggtcagtactattgaccagcgatgggggcttcgacattggg

SEQ ID NO: 507013 - DNA, 436 bp, Homo sapiens
cacagtggctcacatctgtaattccagcactttgggaggccaaggcaagcggatcacaaggtcaagagttcaacgccagcctggccaacatagtgaaaccccgtctctactaaaaatacaaaaattagccgggtgtggtggcacacgcctgtagtctcagctattcgggaggctgaggcgggagaatcacttgaacccaggaggtggaggttgcagtgagccaagattgtgtcactgcactccagcctgggttacagagtgagactccatctcaattaaaaacacacacacacacacacacacacacacacacacacacacacaaataacaatattagaaagacaatacatgaacaaaatgaaaacaaagaaacaaataatagcaaatcttagagcggaagaatataatgactgaacctaattcaatagagatttc

SEQ ID NO: 507014 - DNA, 496 bp, Homo sapiens
  misc_feature (5)..(5): n is a, c, g, or t
  misc_feature (7)..(7): n is a, c, g, or t
  misc_feature (9)..(9): n is a, c, g, or t
  misc_feature (196)..(196): n is a, c, g, or t
aattngncnttggccgggcacggaggctcacgtctgtaatcccaacactttgggaggccgaggcgggcggatcacaaggtcaggagacagagaccatcctggctaacacagtgaaaccccatctccaccaaaaatacaaacaaattagctgggcgtggtggcaggtgcctgtactctcagctactcaggaggctgnggcagctgaatggcatgaacccaggaggcagagattgcagtgagccgagatggcaccactgccctccagcctgggcgacagagctggactccgtctctaaaacataaataaataaaaatatttaaagagtattgtcactttaaagaatacaatggctgggcgcggtggctcacgcctgtaataccagcgctttgggaggctgaggcgggcagattgcctgaagtcaagatttcgagaccagcctgaccaacatggtgaaaccccgtctctactaaaaatacaaaaattcgctgggcatgg

SEQ ID NO: 507015 - DNA, 114 bp, Homo sapiens
tcgactcagaggatccccatttaggtctgttgctaggcgatgagctgttataattatgcctcatacggatagtacaaggaacgggtaggctatgtgttttgtcaggcggttgag

SEQ ID NO: 507016 - DNA, 745 bp, Homo sapiens
gtgctgtgagaatgatgtttgtagattaataatccttttgtttagaattacaaaatagtttttaaatatgtctgagaaaagccaaagttaatgcaacctagtggaaactgtaagaccatttgagtatgtttgttttattgatgcatttggatttgttgtttgatggaatttgagccaaaaaaaaaatacgcaggctttcctatttctacaactgatggtacttatgcattttgtaccagtggaactttttatactggagattaaaaaaaaaattggaaattttgggggctggctcgggtggggccccttgacaattgactggatttcaagttggattccgggtggactggatggatggatggatagaaagaaagtggcttttctttggagaattaaaaacttggcttgatttctttttttcccttgcttatatctagcattagaattttggtcttaaaataacacgcggtaagtttcacttttaatccgggtatggtgcagttacacaataaggtactcacgatttagaagtactcagtcactttaacgtggataactgttttagtaaaaccttaaggggtctgcttatgggctgttagatcacagtttttctgattcttctgtcctcattgtgaactataacccgtgtcgttgaaacagtcaaactttattttcgactgtctgtcatcgtcggtgatgccagtttggcttctgtctccaatattaaaccattttccttattaaa

SEQ ID NO: 507017 - DNA, 230 bp, Homo sapiens
tcccccaaaaacacctggggccaaaaaaagggctggggggggtcacaagtggggggaaaaaagcttcgtggggaccgttcaggggggtaaaaaaagttttttgtgggagatacacccgagttagggggaaattgtgtttgtgggtttcaaaaaaaaccccaatttctccagaagtgaaattctccgaagagggtggaacataaccttatacccattgggaaacccggtgg

SEQ ID NO: 507018 - DNA, 1190 bp, Homo sapiens
tcgtttcgtccatgcgacgtgcgtcgctgcctcagccctggcgtcctggggcgattcgcgagctgtcctcgggtgagcctactgccttgtcgcgtcccttgatggctctcttctcgtagacattctgcctattttacctcatgcagtcgtctgagtctacacttgatccgacggcagggttgccgaggagaatgccctctagtgtctaaagctcaccggggtcccgcacccactgagacagagcttaggcaaacataacctcttctctgtttcaccaagcagtccatatgcaaaatcctgtaatttgggcagttcagaattatgatcgacacgggaaacagttggattactcgcaattgtgagatgtcgccgcaagagagtagttacccccattagcttggcttgcgctttccccactagagcgcatggacaattttgccaaacggccaacgggcaatttccccaggttaccttttgcgtttcgccaccttttgtcctgtcaacgctggcttcccaaagggggaattcggtgggagggtcttgcccatagcaaatgtggtggttgtccaacacgggaacgtctcccatcttcccatttttgcgactcctgccaggttccaaaagttgtgcccaaccagacacttcgctacagttactgaagcggaacgtaactccctttattggagttagatgcacccattttcaaattgccccaagctgaggggcgatctcccattgcgcatttacccgcaaatttaaagcctctggcctcccttatgcccacaatttgtcaaactgtttatcatatctcccaaggtctgctcctagcacatgttaactttgcccctcgtctcacatcacctctcttatcaagcccccccagagtgcatttaattccccaacgcctcctcaatatcctcccgttataatgctcacaaaatatcccccctttatcacaaatttgcctcgcgccaacctcttacacactctttctccaaccatgtccccggcgacacaactctcccgacatattaactgacattgtctgttgccccatatatgtgctgtgtctctccccctataccacacatcactactacccccctccggatttcattagtaaccctgcctatacgttgataacgcattcttccccccattttataagattttcaccaccaattctttgc

SEQ ID NO: 507019 - DNA, 945 bp, Homo sapiens
  misc_feature (13)..(13): n is a, c, g, or t
  misc_feature (28)..(28): n is a, c, g, or t
  misc_feature (33)..(33): n is a, c, g, or t
  misc_feature (59)..(59): n is a, c, g, or t
  misc_feature (71)..(71): n is a, c, g, or t
  misc_feature (79)..(79): n is a, c, g, or t
  misc_feature (83)..(83): n is a, c, g, or t
  misc_feature (121)..(121): n is a, c, g, or t
  misc_feature (129)..(129): n is a, c, g, or t
  misc_feature (195)..(195): n is a, c, g, or t
  misc_feature (249)..(249): n is a, c, g, or t
  misc_feature (340)..(340): n is a, c, g, or t
  misc_feature (410)..(410): n is a, c, g, or t
  misc_feature (414)..(414): n is a, c, g, or t
  misc_feature (435)..(435): n is a, c, g, or t
  misc_feature (453)..(453): n is a, c, g, or t
  misc_feature (459)..(459): n is a, c, g, or t
  misc_feature (473)..(473): n is a, c, g, or t
  misc_feature (481)..(481): n is a, c, g, or t
  misc_feature (483)..(484): n is a, c, g, or t
  misc_feature (502)..(502): n is a, c, g, or t
  misc_feature (639)..(639): n is a, c, g, or t
  misc_feature (667)..(667): n is a, c, g, or t
  misc_feature (685)..(685): n is a, c, g, or t
  misc_feature (694)..(694): n is a, c, g, or t
  misc_feature (748)..(748): n is a, c, g, or t
  misc_feature (773)..(773): n is a, c, g, or t
catctctgcccgnaggtgcaacccaacngcaantgatcaatattgaccagattcggaanaaactcccgganctccccantttnacccgaaaaaagcttgtccaacagtatgggatgctgcnggaacacngcttcactttgctgaacgaagtcggccaactgaagttcttccaaaatgtgataaaagaaactaggnagagccaaaaaaggtgactagttgggtcctcaacacttttctgggctatttaangcaacagaacctcgctgtcagtgagagtcctgtcacaccctctgcactcgctgagcttcttgacctgctgaacagcagcacaatttcttcntcggcagctaaacaggtgtttgagggactgtggaagagggaaggcaacactccagggcagattgtttcancaangccgcttgcactgatgcaggnccagggggcactggcgcngctctnccactctctgatgnaggcccancnncaagtgataatggatgtnaagaaaaaaaacaccagagctataaataaaatgattgggttggtccggaaagcgactaaaagccgagcagatccagtcatgataaaggagatcctggagaagaagctgtcattgtgagatgtttgggatccccttgnccaagggacaacaacaaacagtgcagcntgactgggaacaggatcntgtgaaagntgatgcccatgtgccctgagagctgcctttcaatccctgtccccaagccacagntatggcattaatgtcaccagtgttntcaccctctaggccctgtgcctggaggtgcctccacagccgaccagcagccaccccgcctgcttcatccacatcaggagggtccggtgaggctgcagcagtggttaaggagtaacaccttcttgtattaaggaattttaaactaaataaaatgtatgttggagatactgtta

SEQ ID NO: 507020 - DNA, 677 bp, Homo sapiens
agcgggcgacgacccgcggccgttgctgcccgggtactggggtctctgcctgagcgcgcaggctgccgtggactccacccgccccggagcctggtgctcgtctgtggactcgtcatggcgaccgacagagggctttccacctgctggtgtgcggcgcgtctggctgcaccggacaattcgtgaccgagaaggtggcaccggtagcatgtggacccggagcggagctcccgcctgccctggagtccatggccgggaccgactccccgtgccagaagctgtaaccgagggtgctgtcaggaagagtctggcacctgaagacttgggaaagaccaagcatgtgtcattctgcaaggttgagacatcatcaatctagtgaatattgcctaagtccagtccgtcgcttgattgacattggctttaaacaggcaactagttgtcctcaattgcgttggaccatatcggttttactggaagaaccttgtatctagaacatgcatgtattgacaaagtggtggccagttgtagtcgacatcaggttggataacctcagtgactggaactaatgcaactgaaggtactcactgagaaagctgcaagactgagaggggttaatatcattggaagacagtcggctttatgaacttccattccagcagatctgcgaagtaatatatacc

SEQ ID NO: 507021 - DNA, 109 bp, Homo sapiens
gtctggctgctggctcttgagcgcgtgaggaatggatctcctgcctgcgtgtgccgtgcggcccccgctatacatcggggagccctgctactgcatgttttcgactatg

SEQ ID NO: 507022 - DNA, 381 bp, Homo sapiens
acaaaacttgtaatccctactatcttctgtatagatacatacatctgattacaccattctcaactcctcatagatgctctactcttgtatacactgccagtatacaccttcctctccaagccatcacagctgatatctcctggtgctatccccaaaacttgtcatccctactatcttctgtctcagtcatactctgattcaccatactcaactactcatagatgctctactctggaacgtgcacttaccagagtagctgaattataagcacccaacaccacgtcgggctaatttaagtatattaagtagagacaggatttcaccatgttgcccaggctgtactccaactcctgacttcaagtgatccaaccacctcggact

SEQ ID NO: 507023 - DNA, 238 bp, Homo sapiens
cataagtaccacaaaccataccaggtgagcgtctacgctcaatctcttcttccctaggtcaaagcccatatcatcagatgtgtcacggatgggtactgattggcagaaattaatcagctaccaatgagagcccacggaactaagtagggtcccaagaaaaaaaacgggagctataacacagagctgagctactgccaaagatcatacctcaaaccttaagtagagggtaaatatgggg

SEQ ID NO: 507024 - DNA, 321 bp, Homo sapiens
atccagtgatacactgctatagctatggaagctgcagaagcgttagagggggctatactcattacaagggatatgaccttgggcgcatcccaaaatacatccgacaagcgcaaatgacttccagcgttgcctgtctttgtactttcttcattaccaccttagccgcaagtcatctgctttatcatggaccaccagtgtgcggccaatgatgcaatggtctcctgagagtgagatcacagaatcttcaataggcacatcggccacaccatctttgtcagcagtcacattgcaacacgtctcacattgcaacacggtctctca

SEQ ID NO: 507025 - DNA, 598 bp, Homo sapiens
gcgccccctactactactaaattcgcggccggtcgacgcgtgatggccgcgggctctcgagaacatgatccctggctctactggcgctgcaaggctgtgggcaaggtcatccctgagcggagcgggaagctcagtggcatggcttccgtgtccccactgccaacgtgtcagtggtggacctgagggggggtctagaaaaacgtgccagatatgatgacatcaagaaggtggtgaagcaggcgtcggaggggcgcctcaaggggatcctggggtacagtgagcgccaggtgggctcctctgacttcaacagcgagacccactcctccacgtgcgacggtgcgggtggcattggcctcaacgaccaagttttgaagctcatttcgcggtatgacaacgaattttggctaccgaaacagggtggtggaactcatgggccacatggcctgcaaggagtaagacgcctggacaacgagcccaagcaggagcacaagaggaagagagaaaacctcactgctggggagtcctgcaacagtcattccggaccacactggatctccctcctcagagttttcatgtagaccccttaaaagggaagggg

SEQ ID NO: 507026 - DNA, 170 bp, Homo sapiens
gtgggctaagtgcttatagacaagaaaaaaaaaagtgtgctagaaccaattatcatcatcatcatcttcgttcttcatcttcatcttcttcatcttcctcctcctcctcatcctcttcatcttcctcatcttcctcctcttccttcttttacttgcttttttttagcctt

SEQ ID NO: 507027 - DNA, 595 bp, Homo sapiens
gagtcagtatacacaaaagattgaaatgaatacatgcatgtatcagtaagcaaggcttaatcttcacgtagtgcttggatatcgacaaggtatccaaatgcgtgcaaggttttaaataaattgcagagaaaacagggtcttgccagcttcaattttcttgtaagtgagatccaccgacagggagcgaaagaaaactgatccatgattcctttcatattattggtctctgcattaaagtatttttttttcttcccagaatgatgacaacttaatcctgtgtgctcttgagaatgtgctgctggtcagtgcttgctgttggatagactttggccataactatggtttttcccaaaggcccgcatgctttctccagcttctggtggcaatctcacattggggacagtaaaactagaagacatgtcggtgagtccccatagccgtggcggcaggtcactaaaatactcgtggctcaaggcagcctgtgccgacagtctgttcttgggggaacatggtaggagctgggaggccaggtcctctgcatggttcacatagctgagctttttccatgcttgtctaaggttttaagagctgtaca

SEQ ID NO: 507028 - DNA, 1990 bp, Homo sapiens
agcactgtccctcggagtccgagacttccacctgggtcgtgtccaaggccccggcgactccccggactcggggtgccgggccaacctccccgccgaggcccacccgccgtcgctatggcgtgcagtttgcagaagctgtttgctgtggaagaggagtttgaagatgaggatttcttgtctgctgtggaggatgcagagaaccggtttactggctcactgcctgtgaatgctgggcgcctgagacctgtctcttctaggccacaggagactgtgcaggcacagtcctccaggctgctgctgttacaccccactgctccctcagaggctttgggcctgccagacttggacctctgcctccctgcctccagcacgcccagtgctgacagccgtccatcatgcataggagcagctcccctaaggcctgtctctacttccaactgccttaacagttcccactcagcaactccactgggaagtctgtccgcaacgctccactgttcaagcacttcagcctctccaagctgctagagggaccattcagagcagccctcaaaatcgtttcccttgtcagccattccagtctccaagttcctggttaagtggcaaagctcatttacccagacctcgaactcccaactcaagctgttctactccctcaaggactagctctggattatttcctcggatacccttacaacagcagcaagttggtggctttgaggggcctgaacaagacgaatttgataaagtcctggcaagcatggagttggaggagcctggcatggagctggaatgtggagtcagcagtgaggccataccaatcctgcctgcccagcagcgggagggttcagtattggctaaaaaagcccgggtagttgatctgagtggatcttgccagaaggggcctgtgcctgccatccacaaagcgggtatcatgtccgcccaggatgagtctctagatcctgtcatccaatgtaggactccacgaccccccttgagacctggtgctgtgggtcaccttcctgttccaaccacctggtgcagctagtcactgctgccagccggacaccccagcagcccacccatccctccacccgagccaaaactcgccgtttccctggcccagctgggatcctgcctcaccaggcagccctgaagcagcttcctaggaacaaggtccccaacatggcggtgatgatcaagtccctgactcggagcacaatggacgccagtgtggttttcaaggaccccacggattggagtgttttctccttcacttcgaaatcactacctcaacgtgacacccaacaacctggtccatatttacagcccggattctggggatgggagcttcctcaagccatctcagcccttccccaaggattcagggagcttccagcatgatgtggctgcaaagcccgaggaaggcttcagaacagcacagaacctagaggcagaggcgtcccctgaggaagaactcccagaagcagatgacctggatggactcctgagtgagcttcctgaagacttcttctgtgggaccagtagttgagactgccccaacgcaggacaacccaccatgagcaggcagctctgggcacgtgtctggtcacatccaagggggagaagaaggccttcctttgccgttggcaccagaatccggccggagactggctctccagccaacaagaaaggcctgtcacccttgccttgggtgtccctctcctgcctcagcttaattttagaggatattgggcctggttttcttgtcccttcataccctagtccctggacagctgaggagatgaaaggagccacaccacaacaatggcggcctgcccctccacacaggggagaagcacgctcaggcttcctctgctttgtctcttcagacctgtggttgctctgctcatccatgcccaaggttcccaggtgcaggacagaggtgtggcctattgtaccttgttctgaaataaagcatctcctgctt

SEQ ID NO: 507029 - DNA, 805 bp, Homo sapiens
  misc_feature (3)..(3): n is a, c, g, or t
  misc_feature (122)..(122): n is a, c, g, or t
  misc_feature (131)..(131): n is a, c, g, or t
  misc_feature (138)..(138): n is a, c, g, or t
  misc_feature (148)..(148): n is a, c, g, or t
  misc_feature (153)..(153): n is a, c, g, or t
  misc_feature (156)..(156): n is a, c, g, or t
  misc_feature (160)..(160): n is a, c, g, or t
  misc_feature (164)..(164): n is a, c, g, or t
  misc_feature (182)..(182): n is a, c, g, or t
  misc_feature (206)..(206): n is a, c, g, or t
  misc_feature (260)..(260): n is a, c, g, or t
  misc_feature (268)..(268): n is a, c, g, or t
  misc_feature (296)..(296): n is a, c, g, or t
  misc_feature (303)..(303): n is a, c, g, or t
  misc_feature (319)..(319): n is a, c, g, or t
  misc_feature (325)..(325): n is a, c, g, or t
  misc_feature (343)..(343): n is a, c, g, or t
  misc_feature (360)..(360): n is a, c, g, or t
  misc_feature (374)..(374): n is a, c, g, or t
  misc_feature (378)..(378): n is a, c, g, or t
  misc_feature (382)..(383): n is a, c, g, or t
  misc_feature (420)..(420): n is a, c, g, or t
  misc_feature (437)..(437): n is a, c, g, or t
  misc_feature (523)..(523): n is a, c, g, or t
  misc_feature (763)..(763): n is a, c, g, or t
canacttttaaaaaatgcctttttatcacaatggttcacaatggtgcatttttttttactttttattttcatttcaatagtttttggggtacaggtggtttttagttagatggataaattcnacacttganctcagcnaaaaggctgngaagnganggangganaagcgctttagtagcganttccgagattttagggcacctggnacctgagcagtatacaatgtacccaatagggagtcttttgtccctcacctcccncccaaggnccacccccccaaatccccaaagcccatnggatcantcccatgcccttgcanccccantgcgtagcccccacttanaagggacaatatacganattggggtttccantccngaannacttcacttagaataatggcatcgcagctccatccanggggcggcaaaagacantattttattcccttatatggctgaaggattccaggggggagatataccacattttccttatccacccattggtgtgaggggcactnatgtgggtttcatatctttgcaattgcctattgtgctgctataaatatgcacgtgtatttgtctttttcatataatgacttcttttccttaggtagatacccaataatgggattgctggatccaatggtagttctacacttagttctttaaggaatctccatattttttcaatagtggttgtactaatttacattcccaccagcaatgtaaaactgttcccttttcaccacatccatgcnaacatctattgtcttttgatttttaaattatcaccatttttg

SEQ ID NO: 507030 - DNA, 498 bp, Homo sapiens
ccatgtgctctgctcattaaacttttttcagctagaagtatatggacctatggggaaagtcattcatgttttgaaaaaatatctaaaggaatattaaaaccagaacttaatttatatgaagtttgattttttaaaaaatacctgaattattattgcctgccctggctagttttatatcaacttgatacaagctagagtcatttggggagagggactctgaattgagaaaatccctccatcagattggcttatgggcaaacctgtagtacatttttcttgattcatgattgatatgggagggtccagcccacagtgggtggtgtcacccctgggcaggtgatcctgggttcagtaagaaagactgagcaagccatggggagcaagccactaagtagcactcctctgtggcctctgcattaacttctgccgtgatttctctcagtgacaaactgtgatgttgaactgtaagctgaaataaaccttcttcttcccaaaaaa

SEQ ID NO: 507031 - DNA, 312 bp, Homo sapiens
ggcaccatgccagttatggaaaatattgagcccactttcgtgatcactgttcgctgtgtgtcccgagggcactaactcagagtgtcctttgactccttcatcagtgtgtcacccggccaattcgctgagctcactttctcctctctctctctctccctctccctgtctttctctttcattcttttctacctggccctggtctatcccaacataaaggcaataattcattacctcattaatggatctgtcctatttctttttaaacagttctttatgttagccatgaaatctagctggggctgtgtggtttct

SEQ ID NO: 507032 - DNA, 285 bp, Homo sapiens
cggtgttggtagagtagatggagataatgaaacagaattgataaaacctgtgaggctgagtggctaaatatctcccttttatatcaatacgaaagtctcagccaggcatggtggctcacgcctgcaatcccaacaccttgggaggtcgaggtgggtgggtcacctgaggtcaggagttcaagaccttcctggccaaatggcgaaacctcatctctactaaaaaaatacaaaatcagccgggcgtgatggtgggcacctgtaatcccagatactcaggaggctgag

SEQ ID NO: 507033 - DNA, 234 bp, Homo sapiens
cagatgtcataaggagtctgtctcttctgagctatctcatctatatttgacagtctgaataattaaaagccatttaaatttttttccttaccttttcatttgcatgtggatcaaccatcgctttattggctgagatatgcacatattgtagccaggtaatttgagagaaatatgaagaactgaggaggaacaaataaaacagaagcgaatctaaccaaaaccttcatgtgtgcc

SEQ ID NO: 507034 - DNA, 316 bp, Homo sapiens
cacgagggtggcggcagcggtggttaggggatgtaacggtcgcccgcctccggtgtgacgatggcagtcgtagggtccggaggctatgcgctgaacgatgcatgggagaaactgccctctgtcatggcgggagttccggcgcggagggagaagtcctccccgccacccgccccaccaatctgcctacggggacggatgcgactctcgaccgtctccgaagagacggtgcacaaccggatgtcactcgataaggtgcttggcatcacagcccagaacagcagtggcctaacctgtgaccccggcataggacatgtgg

SEQ ID NO: 507035 - DNA, 133 bp, Homo sapiens
cggatgtagtgcagatgtctctgcggatgataatggtcctctgcatcttcatcttggtcaccacgcccagcagaggatccgccctcgaatggaccacttaccagtgaagggacatttcttgtcaatgttcgtg

SEQ ID NO: 507036 - DNA, 343 bp, Homo sapiens
  misc_feature (2)..(2): n is a, c, g, or t
  misc_feature (67)..(67): n is a, c, g, or t
  misc_feature (109)..(109): n is a, c, g, or t
  misc_feature (115)..(115): n is a, c, g, or t
  misc_feature (118)..(118): n is a, c, g, or t
  misc_feature (162)..(162): n is a, c, g, or t
  misc_feature (274)..(274): n is a, c, g, or t
  misc_feature (290)..(290): n is a, c, g, or t
anggaccctgggcgtgattctccctccctggcacagacggagacccgagtgaccccggggtccggtngggcgtggggaatggacccatagacccgggacgagcggcggnacccangcntggccagcttcagccaccttgggagacgcatgcagctgccgctnttgacagacaagaccaaggctcggctgggcccaccccagatccggcctgagcgccttccgcgttgctcggcctcaaggcgttgagtcaccaagggcaagtcccgttgacttngtccttcagggtcttncggcctttggcacattaatctttcagaacccggtttttttggacgacgagttg

SEQ ID NO: 507037 - DNA, 348 bp, Homo sapiens
aaacctcatgggccccggaccctttattttgccctgttggtgttgaccagcccggcaaccacgctccttggcaacctgtttttttggcgggaactgcagaaggcccccctttccctggccaagggctggcagctttttttggcagcgctaacccagggtgtgttggagccccccccctacggggccctgttttttcccctgctgtccctgggcctctacccctgctggctgcttttttggaatgtgtttttttggaaataaaatttccctgtccgggttgggacaaaaactccccaaggacccccttttccctccttttggggaaataaataagtttttttttcacca

SEQ ID NO: 507038 - DNA, 234 bp, Homo sapiens
attggcccagaattttgcagattaggaaattgaggcccacaaattaagtcacttgcatcatggacagcccatctaaatgtgtgagaacaaatactccaccctgtgcacctctcctccagagcttctaaagaaattttcaaagaaattcaacaccattctaagcactcctatcatccctcagctcagccaaaccgatgctttctaagccggtactgaatttctgtgcccctttca

SEQ ID NO: 507039 - DNA, 779 bp, Homo sapiens
  misc_feature (37)..(37): n is a, c, g, or t
gtccgcgtctgcggctgcgttccccgaaagacgaggntgcgcccggattccggtccgcagggagaccgaagggcacagctccccgcgccgcgcacgccgcccgagcccggagtgcggacacccccgggatgcttgcgccccagaggacccgcgccccaagcccccaggccagccccaggcccacccggagcatgctgcctgcaggccatgaaagggcctcgagctggcgctgctggccgtcctgcatgtgctcggcgcccgctcatggccctgtggatgccaaggactgcacccatgagcacacaaactaccagaccattgcaaccccaagagcaaggtgccagccgcccgacaacggtgtgatgccagatgtccgaatcacccggatcccagcagacagccggaagcgatccaactcgggtgcacaccagatgtgtgccttcctcctgctgcactttcgctcaagacgaccactttcagcctcagacctatctgatgcggcgctccacatctaacctctgcggaatctcctaaacggtcagaccagtgggactggctgccgacaaagggattcacggcccacatcgggagcaggcaacggagccacggcacaggcccccatgggagcccatgtgccgagggagtgcatccatggcttccagacatggagggacttgaccactccctctgcggcctggggccctgaatggtctccctccattcccaacggtgccttcctgagcttgctcccccttaacccatgtggtgcccactctcca

SEQ ID NO: 507040 - DNA, 188 bp, Homo sapiens
cagtgtgacttagaggatcccccccgactagcctgacagggccccaaacagctgcgtaggctgccctggctccagacagcccggtggcccgaggacccattaagctaggcagggacggagcccctcgagttttgggcagcactggcttgaaggctgtcgggctagtcgggggggtacggagctcgaat

SEQ ID NO: 507041 - DNA, 1147 bp, Homo sapiens
actctagacgctaggacgtcgtctaccggagtagctgtgtcccacagggatccagccatagacataaggcccgctttaggtgactactcatagtcatacagacttgtgtaccaaggtacaatgccacggttggtatcaccgtgatctcgtgccagttgtaccgatgccttgttgatatgagaggactctcacgtgatggagtaacacaggtaagtgaagacgaacgaagagagcgtgtggatacttgacagtagaggctttaggagcttgcccttctcaagtgtggaaataccggtcggacacagtgcagtgacgcgtacacgcatattctgatctcaagaaaatatgtcttcatagtccctcgtagccaggaacagattatgaagacgagttcgtctgtgtaccaacgctgctcgtgacacgcgcaatcgagcacataccctatcgaagtcataagtaacgtaggtagtttgacgaaaagcacaacacattaccttctggccattgtggacgtttggaccgtataagctagtagaccaatatcacaaccacgcgtgtaacagactagcaaatcaagtatatcaacgctgcaaacctataacggacgcaccagcattggtggcagatggtccctcatcagagcaatagatggtacgatacactccaataagggatgatctctagagactggattggacgcccaacttgagattataagcaatagcgtatatacgtaagcaccatggatatccagtacagttcgtcactagatcttctgagtgttctcggtcgaacgcacatcatcaatgacaactacgaacggtacacaacgatttaaacacgctgtctcagcacacaccataagaacagcagagtcaatagaaagccagactcaataatgacaagtggaacccactagacatgcagcatcccacacgatgtccccagttaccccattccttcgcatagcgtatccgcctacagtagtggagatcgcacatacctcgctcgctactatcggcaagctatcaaaaaatatagagtcgaacattgtttagcagatagggacatacatcactaacactattatcacagtcagtataacaggcgtatcggccatcgtgaactggagatctacgaaccggag

SEQ ID NO: 507042 - DNA, 644 bp, Homo sapiens
gctacctggaatccattgttaagttaattttgtcagttccataggtctttgttatcatctcaaagtgcgtggccagtattattctatcaggagtcatacttctccaaaaacttaacaagcaataggtataaggttttaaaaagggaaaatgcaaagtaaattaataagcttagtttgtataaaagttttgagtcatggactaggcttaaaggctactacttgaataaatcaagtagtaggattgtgggaaatcctactgtgggaaatttaggtaggacttgtaaccatgtggcctgttttctccttttgtgtttatggatctcaactttcccagaggaatatacccaggtacagcatgtagtattagcaatagctacagacatctccttattagccaatagttaatattgagcaattttgtcatctaatatcttatgactggatttaatgaaagcagagagtgatcaatcattgtactggggatgatgccaaagtcacctactaggtggactaaaggatctccttgcttgggtgtggtggttcatgcctatattcctaactctttgggatcccaaggcaggaggatcacttgaggtcaggagttcaagaccagcctgggcaatatagtgagatcctgtctctac

SEQ ID NO: 507043 - DNA, 251 bp, Homo sapiens
taatctgtgatcacatttgcagccccaactcaccaacttgaaaaaaacctgagatgtcagcactaactgtcataatggttgcaagctgaagccggttggtgaaaaccttcctgagtgaattaaaatcctgactgcgggccctcgaggggaaagaagatgtgggtgaaactgggaactagccatgatttatacaggcagtgaaaagaccataacttagaatttttttttaaataaagagttttagtaatcta

SEQ ID NO: 507044 - DNA, 372 bp, Homo sapiens
gcacgagaaataaattgcattttgtgcggattgtatgagaatctttgttgctgagaagcattgataactttgaagtagtccctccagtccaacgccttggagctttctggcttgaaaggctgtttatattcatctctttcggtgggctgtcgcatgggtgaagataatgaaacattttgtaaggatgaatcagcagcgatcggcatttcatcgtcactgttgttctcatcgtcatctgtccgtcccaagatattctcctcatgttgagtagggtgttcatgactccattcgactttctcacgttctttcatctcctgtataacttctttaaccccgctctggtcgatgaaaaggcctctttcttgttgtttc

SEQ ID NO: 507045 - DNA, 896 bp, Homo sapiens
ggaactagctggcggaatcatgggggaaaggagtagcctgtggagctggactctagtgctggttcgtagctccctctcgcctactcctggtcgatctgatagagtggaggccggagtaggaacaggttggacacgagtctacactcggcttgagtggggaacatgatctccgcatccttggaagccctccgtagagctaatcattgttgcatccttatcagcgctaggcaggatgtctgctcctatctgtgagtggcgcgcgcatcgctgtatccgtcgctagcaagtgatgaagataaaatcgcctgcaataagctgttagcaaaagctcctcttgcggtcgtgaggccggatccgtaaatcacgaggaagtgccctacttctcttgcttaatactcatcggcacggccgtatgcatgatcgcgtgtcatataatagctatgctagagcagaccagtagaggctcaattagccagcctatctttcggagccctgtccggagtgggggcgaccgccatgtcgtatacacaaaaaccatagttgctggagtattgttcgggtcaggcctttgaaaagtttatgattcttattccgaccaggcttcggggataactctctcatatgtgtaatctttactagttccgtagagaaaaataagaacccatttggggatacgtagcgtatgggtccggagcttatgacttttccacggtgggctatcactacgggttatccggtggaagacggccgttatactttcccggtaggcattagacggttgacacactaacaatatttccacttccgttaccatggtatcggctgtcctccgggtcccatattaagtggtctggcccaccccgggcgcaatttcacggcttgccgggcgtgggcca

SEQ ID NO: 507046 - DNA, 626 bp, Homo sapiens
gcctgtggcttaatgacgtgggtcaccattatttcccttctttatctctttagctcggctgattccaggggtgtgtttcgtagagatgcacaccagagggaggttgctcatcggtttaaagattcgccggaagacaattctgatgcctctgcgttgagtgcctttgctcagtatctatagcagtgcgcatttgaagatcatgtatggttagtgaatgcagcatctgcatgtgcacaagcatgcgttgctgatgagtcagctgctaatcgtgacagatcacttcataccctatgtgtagacaaagtatgcacagttgcaacttttcgtgacacctatggtgccatggcagactgctgcgccacctctacggattgatcagaccagaggatgatgtgatgtgcactggtctatatgacgatgcagaggcactcttgcatccatacttagatgagactgccagacgacatccttacttagatgtccaggaacacactctctttgataatgggaatcaagctggtgttacagaatgttgccaagctgctgatgctgcctgcctgtagtcaagctcgatgaactccgccatgaagggaaggcttcgtctgccagtgactgaggggcgcgtc

SEQ ID NO: 507047 - DNA, 429 bp, Homo sapiens
tcagaggatcccgggccgggatgacgtgtcagtagtcgctgggattggagaccagcttataggatttataaagtatagtttttatccttggtgcatttcattttctcccatcttagatgaaccacggttttaaaatagtcctcttaagagatggtagatggattacaaaagggccctatttctctaccccggcctggatccatagtcttggcaatgtgacttggtttccctacctctggaatatgggtgggattcatgactggctttgaacaatagaaggtgttagaagtgatgtggaacctgcatctcaaaaagtctttcaggtttccattctttctggggaacaagcccagtgctgggccatctaacctccaacctgtttactagtggactgtagacacaagcatgaatgcatgagatgaaccagcc

SEQ ID NO: 507048 - DNA, 200 bp, Homo sapiens
gaggcggacgagggaccggctcaacgaaggttatctggtgagctgacatggcatgaaacattgatgacgatcattgtccacagtggctattgggcgggcttgccaggttgtgaccatgtctgtgtgtgtggctgttcgtccgatctctgtcttgcctccagtgctctgacatgcctccgttcttggtggtgttcttgcct

SEQ ID NO: 507049 - DNA, 487 bp, Homo sapiens
ttttgggacggaaaataattcacacatttggttacacataaaggaaaaaacaaaataaaacaaaaagcaaaaaaaaaaaaaaaaaaaaaaaaaaaaaaaaaaaaaaaacaaaaacataaaaaaaaaaaaagaggcgggggccgggttcctttgtccgggtgttgctccccgttcttcgcgtgcgaagtacggtcccgcacgccgggccggctcttttttttattagactaagccacgtggccgccctgccttgttttcataacaaataaacagggagtcgcggaggggccacgcactgctttctcgttgcgtttcgtcctgtggtgacgcgcaccacccactttggctttgtgcggtctcggtagatcatgtgcgggagactcccctcatttagcgtgagcttttctactcttcctcgtggtcagtactattttgatgctggtagtgcggtgtcgttgcgacgacccacgcagtcttgtggatcgga

SEQ ID NO: 507050 - DNA, 527 bp, Homo sapiens
  misc_feature (57)..(57): n is a, c, g, or t
  misc_feature (202)..(202): n is a, c, g, or t
agatcccccaccccggttttctggttgtcctcaccacaggtgctcttggccttcttntttctcttggcgtttcttttccccctttcacaagggggcctccccttttttttaaaattaggccccgggggttaaggggggggttgcccccccccccatcacccctcccctggagggggggccccggggttgtattttttttaanggttttttcaaaacccctttttatttttaaccccccaaaaagggggggacccccgctggggttttaaacccaggttttttgttttttttttatccccgttttggttttttttaaaaaaaaaattcccaggggctcccccattgttccccggttaattggggcctgggcccagaaaaaccctttccttcctccccccccccccccggcaggaaacagggggggggtgggtccccccccttttttatatttaatccccccggcaaaaaattttttggaaaaatttccaaggaccaggggggcccaaaaaaattttggtttcccccta

SEQ ID NO: 507051 - DNA, 449 bp, Homo sapiens
  misc_feature (57)..(57): n is a, c, g, or t
atatgtatgagtcgccactctcctgtgtccttctcagttctccccaacctccccttntccctagtttataagacaggagaaaaggagaaagcaaaaagttgaaaggaaacagaagtaagataaatagctagacgaccttggcaccaccacctggccctggtggctaaaataataataatattattaacccctgaccaaaactattggtgttatctgtaaattccagacactgtatgagaaaatactgtaaaactttttgttctgttagctgatgtatgtagcccccagtcatgtttctcacgcttacttgatctattatgactttttcatgtagaccccttagagttgctaacccttaaaagggctaagaatttctttttcggggagctcggctcttaagacacgagtctgccaatgctcccggccgaataaaaaacctcttccttctt

SEQ ID NO: 507052 - DNA, 1044 bp, Homo sapiens
cccgttgcctgggggcagattctgcttgtctcctcacttcttatggtatattgggggcttggtctcgcccaattctgggaacccttgggaccacccagtttgtatcctgagggcccggacacccaagctcacagcactggtgccctcggggttctctccagccgtgctccccaccttctctttatgtgggattgggttgaagacaggtgctgtctgtgtccggatgctcctcgccaacataccgccagagatgctttgggggtgtgcccatggcgggcccactacttggagctcaggcagccaaacgcccctgtgccacccggggcccgaggggcctgtgccggttcgccataccgcgcccaacaaatggtgctcaacacttggcccgagacccccggccagatcgcgtgaccgcggcccagcccaagttgccccggtgacacaacctgctggttccaaggttagccccggctgccacaaagcttttttcgggtccaacctgtcccccaggaaggaaggggtccgtgcctccgcaggccctgcccggccttttttccgaccctcagcgtcgtttgcacatgagtgaccacgcgcctgggtggaactttggccccggcacaacacacttggtgctcacaccacagctggttcggccttcacaggtgaacctccctccccacacggcatacctgctttccgcggtggaaagaggcacgcttttctgtccttcccacgaaggcactcccttttccctctcttgaggcacgatcggagcccctgggaggtttggaaactgccctcccagccttatggaccccggacccggtggcccggggcggcctcttggccccctgaccgctggctgagaccaggcccctggggccggggttttggggcgtggacaaggctggcagtaagtggacaaactgctcccctggctaaggccctgccctgccctcagcaccgaggtgcctggcacaagcctgcacactcctccccacattttaataaatggtcgcaaactaaacaacgaggaaaaaaaat

SEQ ID NO: 507053 - DNA, 180 bp, Homo sapiens
ggcattacactcttctggccctaataaatccattttaattcataattgccagaggaaagaagaaatatttgagtaagacgtgtagtttccctttaaagtcattttttaatccagcaaattgcaaagccaggccaggcacggtggctgacacctgtaatccccgcacgttgagaagcttga

SEQ ID NO: 507054 - DNA, 865 bp, Homo sapiens
caggagttccagaccaggctgggctcacacttgacaaagccccatctctacaaaaaaaaaaaaaaaaaaaacccaaatgtgggggcttgcttttgtagcccagctatttggcgcgcggctgaatttgggacggaatttactttgaaccccgaagaaggttggaaggcttgcaagttgaacacgaagaatctcgccctcccttgaaccctcgggttcttgggccaacagcaattagcagcaccctgtggcctgaaacattacaatctcgaatctaaattaacccctcaccctataacacagcgttgttgacattatctttgttacagttgtggaacaccccagacagttttctgtgcagcacaaacattccttatgtgcttacaatttctcatctcctgtatgtgaaattgtggcgtctcattctcatgtgttcctatacccaggccttacaacacccacgtagggcctatgtgcagcccaggtggacagggaaaacagcaagtctcaggccacacacacacatttgtgtttctccggaaaactgtggacttctcttctgtgacaggccctgtgaactctccctgtgaagacctgtgcgtgccattgtgttcacccctgtgaaaaaccccgagcctttttatctcccaacttcaggccttctctgtggccgaaactacagatgttgtggtgtgtcaacgctccttgggaactctccctgttgctctccaaaaagaggactaggcgatcttcacgcaagtttaggacacccttcccgaggtttccccgaggccctcttccttaggtgtggcccagtggggctttctacactaggggccaccgaaggcacctttttcctccccttgaa

SEQ ID NO: 507055 - DNA, 288 bp, Homo sapiens
tacgtgtctggactgggtggactggactccgtgggtgacgtggactgggctggctggactggactggactggaccggaccggactggactggactggactgtgtgacctggactgggtgacgtggactcgactgtgttgtcctcgactggactgacgttgggtcgtgctggactgcggtgtggcgtactgacactggactggactgacgtggactggactggagtgcacaaccattgtccgagacttcggaggactcctctacgacgtcgaccctgcaggcactgcaa

SEQ ID NO: 507056 - DNA, 90 bp, Homo sapiens
tatctctgtgccagcagccaggcgtcaaggactagcgaccctctagatacgcagtatttcggcccaggcacccggctgacagtgctcgag

SEQ ID NO: 507057 - DNA, 214 bp, Homo sapiens
gcacaggcggcgacatgcacacggtgctgcctggccacgggggcgctggcctcaggtttcaccggccccatgtcgctgggtgggcggcacgaaggcctggttggaggcagccaccccgaggacggtctcgaaggcagcaccagcctcatgcacaaccacggggccctcccaagccagccaggaacccttcctgacctgtcttggcctcccgact

SEQ ID NO: 507058 - DNA, 144 bp, Homo sapiens
gtcactctcatatctgcacaatgctaatctacatgactatctagaaatcgttgtcgccttaatccaagcctacgttttcacacttctagtaagcctctacctgggttaggtctacctgggttaggtctacctgggttaggtcta

SEQ ID NO: 507059 - DNA, 168 bp, Homo sapiens
agttaaaggaaacaataaagaaattactggccagtgctaacttggagaggtcacatgaaacagatttgcaaaaaggtctatgaaattatcctgctatgatttactgaagcaaagattcataaaaccacctgtaaagagctaattcctgagatagaggcagagagatga

SEQ ID NO: 507060 - DNA, 136 bp, Homo sapiens
  misc_feature (99)..(99): n is a, c, g, or t
gcatcgaggcactgaaacaccagctctgagaactctgctcatatccggggatgtggcttgtgttcacaaggaggacttacttagatcagggacatgttncttggcaataaggtgcagctgctgtccgtgctctgtg

SEQ ID NO: 507061 - DNA, 286 bp, Homo sapiens
aaaaacaccgaagcggacaatatagtactgcaacctctaagacggtaacaacatatgagaaatttagtggagggaccactctttccgagttgatgttggaaaatgaagaaaccagaccgccagactaagcctgaaacacaatttcactatgaaaaaagggtaacaaatgtcccatcagagcgagaggagttaaaaatgtggcatcgggagagtatcagattgcggtgtttgcaaacaccgcaatctgactaacattcttggcactcagagcccagggtctaccctg

SEQ ID NO: 507062 - DNA, 768 bp, Homo sapiens
tacttttccacagggcaggactttggtgactaatcaaccatctggcaatgttgaattcatttctgtgcaaagcccacctacagtgagtggtcttaccaaaaatccagtatccttgccatccttgccaaatcccactaaaccaaacaacgttccttctgtgcccagtcctagtattcaaaggaaccctactgccagtgctgcaccattgggaacaacacttgctgtgcaggctgttccaacagcacactctattgtacaagccacaaggacttctttacccacagtgggcccatcaggactctatagtccatcaactaatcgaggtcctatacagatgaaaattccaatttctgcatttagtacttcgtctgctgcagaacagaacagcaataccaccccaagaattgaaaaccagacaaacaaaacaatagatgcttctgtcagtaagaaagcagctgatagcacatcacagtgtggaaaagccactggcagtgattcaagtggtgtcattgatctcacaatggatgatgaagagagtggagcttcacaagaccccaaaaaactaaatcacactcctgtatcaaccatgagttcttctcagcctgtgtcacgacgcattgcacccatacaaccagcaccgcttttaaccatctgggtgccacaaggggaccatcttagacacatacatttactacctacagctccactaccgtgaatttaaaaatcggccagtactcagggacccaaggttcctttaccagggctccc

SEQ ID NO: 507063 - DNA, 139 bp, Homo sapiens
tggagtgcccacctgggagacagaccccacctccttgggtagtgacagtgaacaaaaaactgtgaacaggctgggcttctggaggtggggcgaggcagccgactgtattaaagtaacgcaataaacgcattatcaccca

SEQ ID NO: 507064 - DNA, 552 bp, Homo sapiens
  misc_feature (484)..(484): n is a, c, g, or t
  misc_feature (488)..(488): n is a, c, g, or t
tacttttccacagggcaggactttggtgactaatcaaccatctggcaatgttgaattcatttctgtgcaaagcccacctacagtgagtggtcttaccaaaaatccagtatccttgccatccttgccaaatcccactaaaccaaacaacgttccttctgtgcccagtcctagtattcaaaggaaccctactgccagtgctgcaccattgggaacaacacttgctgtgcaggctgttccaacagcacactctattgtacaagccacaaggacttctttacccacagtgggcccatcaggactctatagtccatcaactaatcgaggtcctatacagatgaaaattccaatttctgcatttagtacttcgtctgctgcagaacagaacagcaataccaccccaagaattgaaaaccagacaaacaaaacaatagatgcttctgtcagtaagaaagcagctgatagcacatcacagcatccacccaanccancagtatcaccaggaaaaactgtcaatgatgtcaacagcaataataacatgtcttacagaaatgc

SEQ ID NO: 507065 - DNA, 140 bp, Homo sapiens
ccgacggagcggtgacacggacccagcagggtcacgcgggaggagactcgtggacacccactctgctggctgccaccggtgtagcagaggggggctcggtcgccccctcccacatcagtctccagacccttgtggcttca

SEQ ID NO: 507066 - DNA, 869 bp, Homo sapiens
agctgaaattgaaaagtgtaccaatggtgcctcctgcgaatcaagtatcttatagccttaggaataagccagattgaccatattgatgaaaaggcctttgagaactgctagacttgatctgcgagctggctcattctagatcacagagccgttctacgaaaactccaagcatcaaagggagagttttcgtctagaattgaaacaactgaagaagctgcatataaaccacgaagaacctgacagagtctgtgggcccacttcccaaatctctggaggatctgcagacttacgtcataagcaagatcgactaagctgggctcttcttgaaggacttggtaatacctgaccttcatccatctccagcgacataacggctgaaagaggatgctgtttgcagctgctttgtaaacggtcttagaatcactcgaagtaccgttgacttgagcttcaatcgagatagccagactgccttcgtggtctccctgtctctcttctaactctctacttagacgacaataagatcagcaacatccctgatgagtatttcaagcgtttgaatgctattgctagtatctgcgtatatctcgacaacgaactggctgatagtggaatacctggaaagttctttgcaatgtgtcatcccctggttgagctggatctgtccttataacaaagcttagaaaagataccgacttgtcaatgagaaaccttgaaaagtatttacctggaggtcaatcaagttgaagaagtttggaccttaagagcttctgcaagatctttggagccatttatcctactccaagatccaggcatatgcgattaggattggaatcgcattccgaaaacaggtcttccaccggattttttga

SEQ ID NO: 507067 - DNA, 135 bp, Homo sapiens
tgcataggctgacagcgctccaaacagcgcatgctatggttgaccatttggaatcgtccccagggcactgtgggcctgtgattcatcatcggccaacattatcattgtctcatcctgcatccatatgcttgccag

SEQ ID NO: 507068 - DNA, 680 bp, Homo sapiens
ggggggtatagaattttaatgcaatgaaaagcaaagtaattctgcaggagacagctgtaggatgacatgtacatcgcttctgcgtccatcctacttaaacgacctagtcagcgtatttaaatcgtgtggaaccattttctggctatgcttggaaggtgctgtgcgcgggcagtgtgtgtagtgtgtagaaacgacgcgaagacgacactgactgtcacgtctacaacgtccgcacgcggacaaggaagaatcgaataacgggcacagcgcgaagtgcggacgcatgcggagaaacagcacagaactcctacccgcacccgagtgcgtagcgggagaccaggcagcccccccaacaccgcacacaccaccgagagagccaggcataacggggcgagagacacacccaacagccgagcaacatagagagacgtcaagataccgtccgccacccgggcgagaaggcagtagagaaacgaacagccaggggcgctacaccgaaacggggacgacgatgtcaaagcacaggggcacccacgcgagccgaaaacttacgtcacctaacgcggcgacaaaaccaaaagccaagtatcgccccgcacacggggcaccaactcgcgcaagcgtgggccccccccaagcggcacaacacataacacatacagggaggaacacaagcaacc

SEQ ID NO: 507069 - DNA, 519 bp, Homo sapiens
tcagtaacttcagcgtgacgccaaacaccgtcatgttgcgcgcgatctcgctgcctctgctgccgggaagcagcacaaggatgggcggcgaggcatcgcgtcgtttctgttcgtcgccgttcggccgcaacgcttcaagattttccaatagtggatggccaacataggtacagggcggaccgcccagtctgcgatgcacctccggctcgaacggcaacaccgccatcaggcgatccacataggcgcgcatcgccttggcgcggcgcggacgccagacccacacggtcggcgatacataattgacgatcggaattgacgggtcgcgcttgcgaacgcgcttggcgacgcgctgcgtaaaatccgggctgtcgatgatgaccagaatatccggccgttccctcagcacggtttcggtcgcctcccggatgcgcgccagaatcatcggcagcttcagcgggatcgcaaccagtccgatgattgccaatggctcgattggaaacagcgaggccagcccttcct

SEQ ID NO: 507070 - DNA, 155 bp, Homo sapiens
ggggtttttaaaaaaaaccccccccccccccgggggtgggtataggccgccttttttggggtcccttggttggtttttcccaaggggagggggaaaatcggggtccagggggggggttgcggggcccttcccctaaaaatgggggggggctccca

SEQ ID NO: 507071 - DNA, 363 bp, Homo sapiens
tttttttttgagacagagtcttcctttgtcaccaggctggaatgcagtggcaagatctcagctcagtgcaacctccacctcccggattcaagcgattctcccgcctcagcctcccgagtagctgggactacaggcgcgtgccaccatgcccagttaatttttgtatctttagtagagacggggtttcaccctgttggccaggatggtctccatctcttgacctcgtgatcagcccgcctcggcctcccaaagtgctgggattacaggcatgagccaccatacttggccaagtaatacctttcttaccacatctctaaatattcaaatcctatctgtctttaagacccaactcaatgttatatc

SEQ ID NO: 507072 - DNA, 186 bp, Homo sapiens
ggtcctaggcactgctttgtagagtgagcacacagtgaagtcggtttaatagtggatactaccgcctctgaaggtgatttagccagagacaattcagtgagcaagcgccaaggattcaaaacgcctcccttccatatccttgttctgcacctgccattaatatttcagaaaacatcggccgggcac

SEQ ID NO: 507073 - DNA, 112 bp, Homo sapiens
gagctacatatacaatcgagctctgtacccttgtttttataaccctgcacaatgtgcagaggtttaatgaccacaactgacctctctttccctcgtaagacataacctgcgg

SEQ ID NO: 507074 - DNA, 251 bp, Homo sapiens
ttacaggcacccgggtactggctggagagcagccgggtgggggagcatccgggcagccgagggctgagtgccacaaagcccacaggtgcaccccttccctgaagcagaggtgaggttggggggctgagtccccgacagcgttgtctcttgggtccccagactgtggcagaacctactccgtgtcagctgttgaagaccgactacgaccagtacgcgctgctgtacaagccagggcagcaagggcccctgca

SEQ ID NO: 507075 - DNA, 1190 bp, Homo sapiens
ggtacaggatgtgttgcagagtcgagggtgaggtcgccaggccctgcggtgggctgtatgtgtgttgtctggatggtgcaggtccggggtgagttcgccaggccctgcggtgagctggatgtgtggtgtctggatgctgcaggtccggggtgagttcgccaggccctcggtgagctggatatgcggtgtccccgtgtccgaatggtgcaggtccagggtgaggtcgccaggcccttggtgggctggatgtgccgtgtccggatggtgcaggtctggggtgaggtcgccaggcccttggtgagctggatgtgcggtgtccggatggtgcaggtccggggtgaggtcaccaggccctcggtgatctggatgtggcatgtccttctcgtaataacggaggtaggcatgtgtaaccaggcacgcccagcagcaagccgtcctagccgatagagtgacgacatcctgaggccacagatcaccatgccaccttgcgctgatagacgtgcgtacagtacaatcccgacgctgcctccacgcgtcctcacactcacactgtacacaggaggcacccacgttcacacaacatgcacccacggagacatacatcttacacatacccgcgaaaggcaaggttgtcattggaacgccaaaagattgaaaaagacgatatcgcgcaatccaagcacaccgccactttgcacagcacgtggctgtgccagcattgcagaggcaagcgttggtcgggggaaatgaaataagagttcaagggcagacaatcgaggacagaccatgtgaccacgaccccatgccggcaacgcgtcaccagaaacacccacggcagcacccccccggagcccgctgcacgccaacctagcgcggcccggacgagggcgcaaccacatagggaccacaacggcacgcacggagacaaccccacagcaccacggctaccacgagcaaaacgacacaagacccgggcacacagacgagcgagacacccacaacgaccgaccgggatgaaaaggcaacccggccacacaagacgaagcacacaacccacaaagaagacggcacacgagcacaaccagacccccccggcacaataccactgggacccgcccccacaggaacgcaccgaggcccccggcaacagaccacgcccacacgagcggacccggccacagcaccaagac

SEQ ID NO: 507076 - DNA, 536 bp, Homo sapiens
  misc_feature (50)..(50): n is a, c, g, or t
  misc_feature (156)..(156): n is a, c, g, or t
  misc_feature (176)..(177): n is a, c, g, or t
  misc_feature (179)..(179): n is a, c, g, or t
  misc_feature (198)..(198): n is a, c, g, or t
  misc_feature (223)..(223): n is a, c, g, or t
  misc_feature (232)..(232): n is a, c, g, or t
  misc_feature (303)..(303): n is a, c, g, or t
  misc_feature (405)..(405): n is a, c, g, or t
  misc_feature (491)..(491): n is a, c, g, or t
  misc_feature (522)..(522): n is a, c, g, or t
aggcacgagcatgttatgttgccaggttggctcatgagatcttgccttanctcccaaagtgcatgggattacagatgtgagacactgcacccaaaccccaccacatttttttttcctttttctttttttgagacagtcttactccgttgcccaggntggagtgtagtggcatgatnncnggctcacatgcaacctccncctcccagggttcaagcaattctcntgccatcgncatcccgagtagctgggattgcaggggcctgccaccacacccgactaattttcgtatttttagtagagacnggggtttctccatgttggccaggctgttcttgaactcctgacctcaggtgctccacctgcgttggcttcccagagtgctgggatgcaggagtgagcactgcnctggctgatccagcacttttcaaatgatgccgctcaaagccgtgacttggcctactttgaacagcaaacttgttgctgctgttgtnacctgaaggctctcaaatgccagcttcaagnagggtgtaattggc

SEQ ID NO: 507077 - DNA, 191 bp, Homo sapiens
cattcgtcttacaatgcacccgcaaattcactacgccttgtgaacgaggtgcactggaaatacgctgacgaaaactatttactcagggaagactctatctgaaaagccatgcagaaagagatatttgcctataaaaatatattaataacgtcttaggctgggcacggtagttcacacctgtaatcccagga

SEQ ID NO: 507078 - DNA, 147 bp, Homo sapiens
  misc_feature (16)..(16): n is a, c, g, or t
ggcccttccaaggagnacatcactctgatcagttacagatagcatgttctggaagcatctgcaggtgagtagatccagcagagttccttcccaccaactctagaaggaaagggacttatcagagttgaccctgagcctttggtaagg

SEQ ID NO: 507079 - DNA, 836 bp, Homo sapiens
  misc_feature (391)..(391): n is a, c, g, or t
  misc_feature (573)..(573): n is a, c, g, or t
  misc_feature (576)..(576): n is a, c, g, or t
agcggagggcgcagccaggctcgaccgccgcgccttaggcgggtgcggagggcgccagggacgggagggagcccgggttgccaaggcgcggagccgggctgcagtgggctagtgctggtgagcacctccaggaatttaccgcgtaggcgcggattaaacttggacgggaagaccaggactctcgggcttccgcgtccgcccggcagctagcgctccgcgggactgggaactctgcagccggtcccggtgtgattgctgccgccttgggagcagcctccggcgcggccgccgagttccaatggcccattggaaccttttgctaggttttggacgcttagcagaactttgacatcgctggaggcgtggagccctgttgcactcgaataatggnctctctttgagatgatcacgtctagggaacactggaaaatgctggattcacagtgcccctttgccttcgaaaaacttttacattggctttaagtactttatttggaggatgattctgtgatcttatctacactgttcacaaggcagcacttacacaggcccagaaccatggtcatgtaggantcnttcctggggaaacaaaagtccgctaacctggactttaggtgtatctggtgggacatggattaatagcaacacttaacgaattattgttaaggaacgattcattgccttggggcccgtacagtccttatgatatatgacaactgagagaatacggcgtggcaaaaccaacaaagtcctgcacatccagggcgaaggtactcattcaagggccctcaacattggcagacacttcccccacgggaccagtagctctgcgccac

SEQ ID NO: 507080 - DNA, 826 bp, Homo sapiens
ccttttattctctctctcttttttcttacttctttgcttgtttttatttttctctccctccctaactccctccctccatccatcctttcctcccttcctcccttgtttccttccatccattctccttccttgttttcctccttccttccttgtttttctctctctttctttccttttagggtacataatgagaatactttttccacaaaatcatttgacaataatttttctctatccgttcatgccaacatttatacagctagcttcaactgttcagttctctcatttttacatttcggaaattcgtcgtatcacttcgccccgtctcaaatctgtcccgtatatataacaactatttacatggccactgaagtcaaaatcataacaaggtgatgcattcgaccgcactcccagcttccatggtagatttcttgttcctcttttctccctgacactacaggtaacaatattctcgtcagttcacttgagctgtttcactctgtccgtcatagcagagtatgtactcgtccctatttcaatgccatactccactctcctcattctgactatcggccccatacatctcactcctcttatatcctcctgtgcaccccacccccccccccacccccccacccaccctatcgcacccccgccccccacaaaacccacaccacccccccctcggaccgagccccaacgtaacacacaggccacacggcgtccagacacacccggccaccaccagccgcactcccccaacaacccccggcccccacacctcacaccacagcgaccgcgacaacggccaccacaccccgcctat

SEQ ID NO: 507081 - DNA, 245 bp, Homo sapiens
  misc_feature (152)..(152): n is a, c, g, or t
  misc_feature (171)..(171): n is a, c, g, or t
cacgaggaaaatacaaaaattagctaggcgtgggagcgggcgtctgtaatcccagctacttgggaggctgaggcaggagaatcatttgaacccaggaggtggaagttgcagtgagctcagatcgcaccattgcactccagcctgggtaacangaatgaaactccatctcanaaaaaaagaaaaagaaaagaaagaaagaaaaccaaggtccctctccctctccctctccccacggtctccctctc

SEQ ID NO: 507082 - DNA, 304 bp, Homo sapiens
gtccggcatctagtgcagggtgtgatctcggctcatgcaactgtgtacctcccagtttcaagtgattctccgtgcttcagtctcccgagtagctgggattacaggctgggccattatgcctggctgcttgcttttgtttgtttgttggtttgtttgttttgagacgagtctcgctctgttgccaggctggagtgcaggggcatgatcttggctcactgcaacctccgactccctggttcaagcgattctcctgcctcagcctcccgagtagctgagattacaggcatttaaaaactttttaggc

SEQ ID NO: 507083 - DNA, 461 bp, Homo sapiens
  misc_feature (245)..(245): n is a, c, g, or t
aactgctcacaggtctttattcactaatggggtaacattttccctttcccaggctgcctttcactgagggttccaccgagctagtgtcctcttgtcagagggaaggtcctggtggccaggtttgcagaaggacttcatccctttctgggagttgctggtctttgttgtcagaaagaagatagggagggacacaggccatcaatactcagagctccacgatatccccagctgggaccgcagggtangtagggactgggggtatccccagcctcagcagcctgagggcttcaggaatcaggctcccgggatagcgccagagaagcagctctgggcaagggctcctgagtggtggcagggcttcgggaaaagtcacaggggggctgcagtaggggtggtcattatgtaggctgagtcgggagaaatgggtggccatgttctcctcagacaggaactgcttgtgt

SEQ ID NO: 507084 - DNA, 108 bp, Homo sapiens
gcggccgcctactactactactgctcgaattcaagcttctaacgatgtacggggacatgttaacccctccactctttctttcaataaaacgcagttgcaaacaaaaaa

SEQ ID NO: 507085 - DNA, 371 bp, Homo sapiens
tgactcactttaataacccgtctctcaaaatgagtccactagcatggtagaagcagtgaatacattcatgaggacagagccctcatgaccacttcttaaaggtatcctctcaactcttgtattcgaagattaaattttcttgtatgtttaagttctttgtagactctggatattagccctttgtcaggtggacagattgcaaaaattttctcccattctgtaggtagcctgttcactctgtatgatcgtttcttttgctgtgcagaagctctttagtttaattagattccgtttgtcaattttggctttggttgccattgcttttggtgttttagacatgaagtctgccctgcctatgtcctgaatgctat

SEQ ID NO: 507086 - DNA, 308 bp, Homo sapiens
gtcgactaaaaagcagtgaggggtggctgggcgtggtggctaatgcctgtaatcccagcattctgggaggctgacgtgggtggatcacttgaggtcatgagttaagaccagcctggccaacatggtgaaacccgtctctactaaaagtacaaaaattaactgggtgtggtggtgcacgcctgtaatcccagctatttgggaggctgagccaggagaattgcttgaacccaggaggcagaggttacagtaagccgagatcgcaccacagcctaggtcacagagcgagactccccatctaaagaaaaaaa

SEQ ID NO: 507087 - DNA, 238 bp, Homo sapiens
  misc_feature (207)..(207): n is a, c, g, or t
cctggccagattttcttttaatgaacaaacattttttttttaagagacagggtcttcttccatcgcccgggcaggagtgcagtggtgccatcatggcttgtggtagccttgagctcttgggctcaagcagtcctttcacctcagcctcccgagtagctgggactacagacgtgcaccaccatacctggttaactttttaatttaaanttttgtagagatggggtctcgttctgttgtc

SEQ ID NO: 507088 - DNA, 311 bp, Homo sapiens
agtaacaagatcaaaagcccaaaaggcctcttctacctagacccttacaaaaaccctctataaaaacaattcttgggtgaaggagaaaatactaacagaaagcacagaacatctaggaaacagagctaaaaaacactacatataaaaactaactggttatagattcaagcagcgtacagaggaaaatagtggccataagaaattatgttaattacaaaaaagaacaactaattaagtatctaactctgggatccaataataaagaataaactgtaattacagaatgccggatacaatgaaactgaaaacat

SEQ ID NO: 507089 - DNA, 102 bp, Homo sapiens
tgtgtgtagcaacaataaggaagggtccccaggttggggagagcccctagtgttgagaacaataatgaacgattattgattatgaacaagtgttaaagacag

SEQ ID NO: 507090 - DNA, 636 bp, Homo sapiens
  misc_feature (366)..(366): n is a, c, g, or t
agggtttctccatgttcgtcaggctggtctcgaattcccgacctcaggtgactgcccaccttggcctcccaaagtgctgggattacaggcatgagcaccatgcccggcctctttttttattcttgatattggttatttgtgctgtattatttcctcccccttgataatcttatcagagacttataaaacataatgggatctaaggtatatttgttttctatttcatcatatttgctcatctttaatattttctttctttaggttggttccttgagatgtatccctagctaattaatttgcagtttttcttttctaatataagcactaaaagctagcaacttctcctaggaagtctttaattgcatntgacaaatttcaatgtatgtagtactttcatgaacatccagatcaaaatgtcttctagttttatgatttatagttgagtatttatttatttagaagtgtatttcttacctttcaagcatatagcccttgcctttaaaattttacaaacgtctgtatccctaaacaatactgtaacattgtgttatcacacatggcttttaaaatctccataaatgtatgtaggtatataggatttatcctgatgtatttttagtgatgggactgtttttt

SEQ ID NO: 507091 - DNA, 206 bp, Homo sapiens
tttgtccactcttgaaggggacggtctccagaatgatgcttgctctggtgctgtggtttgaggactccaaggaagactttctgcttgcttcttgaagaggccacttactttcacagtcagcacacagtcctcaacctgctccgagaggtggtttgacaatatcacctgtatggagagtggctgtttcacaacggctgctcctagaa

SEQ ID NO: 507092 - DNA, 325 bp, Homo sapiens
agacgatcgtgatctgtgccgagggtgatctgtgtctcatcccgctaaaaggcacaaatttctggacaacaggtcacagaccaaaaactaaagtgcatcagtcaaactgaacattctatctactggcccgagatctctgggttgacacttacctaactggtgtccagttggtagacagactaaaatgcactgaaggactattaggattgctgcctcctaagttatcacagcctcgctctgttgatgtgaatgaggaactgcttggttgttaaaggagattttgctccctgctgccccaaacaggtccttatctaggtttgctccc

SEQ ID NO: 507093 - DNA, 897 bp, Homo sapiens
ggcgcattctgccattgtcacttggaagtgtttgccaccaggtctgtggtttctaataagcgcccctattttcacacccccgctgcgcgccccggttttcctgccgctccccgtgggggtgaaaaatcttttctgccacggttttcaaaaagctctctggggagccccgcgtcgtctcgcccaccggtcaccacgacctgtttgggcaacacactggcagtcggacactcgttcgggttgccggtcacatgtactccaccgacaggcccatatctcggcgttgcccgaaacaaccccccgctttctcgttgccacgccccccgctctcctcgtagtaaatgtcgtgcacgcccgccctgttttagcctgacttcgtctcgcccaccttgagtgggccccccccccaatgcaggcgtgtttcacgcctttgtccgccaggggggtcaccacattcgcagcaagcccgccaaggatgctggaccatggcaggggtctctggaacaacactcttcttgggtggaatctttgaaaaaggtaccgccttcccgggtattgggccctcccccgttgcgtggcgtgctacaacttcacccacgcggccgagtcccagtctcctctcttttcaaagctatatccccatgttccccaaaatttctggaacccccccactgcccataacactagtctagaattgccttctgcggcccaacacacatgttatttatagtcttcttctagcacccccctcgctgatgtatgaaccccctctgcactccctggagctaaagaaaatatgtccccaaattcactagtattattcaagccacaacttccacactaggcatcaaaacaaaagacaccacaaagacccacctaaaacccttcgcccacaagaca

SEQ ID NO: 507094 - DNA, 467 bp, Homo sapiens
  misc_feature (230)..(230): n is a, c, g, or t
aattgcgcaagacagaacagttcatcgcaaggtagccaaaggaaggaaatcatttgaaagactctcctcctgcagccccgcctctgccccagcgcccccagccctccgcccctccacgttctcacctgccgccgtggacccggcaggactgaggtcggaaggaggcgggcagagcggcctggtcatcttcgaaagagaagtggtcgcccagaaagtcggggcgggagaanagctgaatctggaggcagagaggggagatgaggggaaggaggacgatggagtggggccgagaacagcggggaggggaaaggtctgaaatgaggggagagacgtgagcccagcggctccctgcggagtccctgccttacctttgagacgaagtgcagatcgtgctccccgacctgaaggtagggaccgaatcgagaattagggagggtgccggcccctagccttgtcttctctaggtt

SEQ ID NO: 507095 - DNA, 537 bp, Homo sapiens
ataaactgacgtgatttcttgttctgttttgaatacacactgctctagtccttcaagaagcccatcacgtattttcaccatataatctgtaggcactttttctgcaatgttaatgtcttcactattaggatcacctttgattcagaaccgttcagctatttcaccatgggttgatgaacaactggagacccatcatcgatgttaaaaacttcaacatccacttcttccagcttactgacggactctgaaggtatattttttacatatataaggaggtcagacatcatttttttttctcacttgacatagggattccttccaagtcaccaccttgtttatcatcatcactgaacatagttgcaggccagaggttgtgctggacattcagaactgtgtctttagtcaccgtgttctagttgttggcaacagcatatggcatccttcatgctaaacttgttttggaaaccttctgtgccatgccctgttcactgctgctaacatgctattccaataaagtttttatatttactcattaaa

SEQ ID NO: 507096 - DNA, 123 bp, Homo sapiens
gcctcgaccgctctcctctcggctctttctcatgaaagagtttcttgaacctcctttttttgatttaaccaccttggtgttaattggccccgggaaaacgggccaagatttactttgggggaa

SEQ ID NO: 507097 - DNA, 1169 bp, Homo sapiens
ttttttttttgggccatatttttatttactacttttactataaacttatacaatactaatgctaccaaaaaaatatttttttttaatatttaactggtcaaaaaatgttgttatagtggtttataatacaatgggcactattgttttattatttttatttcaatattgggtttggctttatcaccttatttcaaacccatttaaccaggtgaaatgttttacttgtgtgtggattaatttaaaaatttattctatttgtgcatttatttaaccaattaaacaattctccaaacaaatttaattaagaatttaacccatgtgttcaaattatttagttatttcaaaaagatgtgggatttgtgcaagaaaattgatttattattaaaattatttgcaggccaattttcaggttttactttgtgcccaattaggatttctcacgcatttgtgcttatttttgtgggaagagaacatctttattaagaactattccttttgagattttccttgagaggggctatttaagtgtggccaacaatctcaaacgttcaaatatccagcccccaggggtttcctatgaaagcggcccctgggtattccactgagttaccactggaggagatatccctttaagagatctttagattttagcgcgcttggcctgtgttccccctctgtgttttttttcacattttttgttgtgcaacaagggagagactttttcccaagggcccattttttccaagaagttcccaaaaggagcggacaaacacgaacaaacatctaggggacacctattttcacaatattccagttctgggtgcaacccaggggtgttttttctcttaaacagatgcttaattttgctgggaattggccccataaacttttcccaggggcacacacccaaacgatattttcacatcggtggttgttcgttcggacccctttttcccgagggtatccactaccggtttccctaaccctttgcgacacttttttcgcacaaaggctgctctcgcattgtggcatttccctgtgttgttgattttaccccacgttgtgttcgttcctcttcccccgcctatcttttagcacccccccccctctgtggtgctctgtcccgcgggggccacacccatttttaccaacggtgtggtgtttaaaga

SEQ ID NO: 507098 - DNA, 1162 bp, Homo sapiens
  misc_feature (260)..(260): n is a, c, g, or t
gagtgcggaccccgcgtgaccgcacctgcgggctgaccctgcatggtggactgcggcgctgcggggcccgcccgttctcctcgtctcctggctgctgtgtcgtgccggatgagcgttgtcccacaggcaaggcaggtgtgcccctgatgaacacgagcatgcttcgtgaggtatgtgccgtggccctcgtttgggaagatgcgctgtgacgtgcgtagcgtgcacttggggcggaggcttgcggacgatcctaggatcgnctggtgactacccgtagtctggagctctacagtgctgtgatacatacttgaagaagtattcccaccaaaccttggcaccctgacggagtgcgaagggccaagtagatcaggtgcgcgtcgtagcataacctggtgctcctatccgcgcaccttgaggcgccacgaggtcgttacacttccacgcagcgtcgacttctctaccaaggggacaggctttcctatgcgtccctagagctgtgggcgaactcggggtgcctcccagggcgcgttgccttatttttgaggatgcgacccacacactcaacgtatctgcatgcgttttcccttccattttccaccgctttggaaattccgttttcattatcacctccggcttcgggtgtccgtcggagctttggattcgcctcgagtggcgtcttcggggcgcgttgggttggggattgctccgtggcgggccagaacaaaagcaggccaccggtatccaactgcctttcgtgttgctcgtagcgagttccctgcgccttgcacgaagtcgtgcaggcttgtgaggtccatcgagcctggccgcttaatagcttcgtgttaccagtaccggggcttttcgcgtggggccggattcggcgtaattgcctgcgattgggggctgctccgtcggggatcttgcccattcgtgacggtcgcttgtcgccaccgaagcgctccacgcctgtgctcctgctgtgggcgaggagtgcccaccttccggtttcctcgcgtggctttccctgttagtcctccattttgacgcgccccgggtgctgggggcccgtggggccccgacgtgcttcagcggtctaatccatggggccaaaattttctgttggctaccgattccttggggggccccaagttggtgggccgtg

SEQ ID NO: 507099 - DNA, 964 bp, Homo sapiens
tccgagaccctcccctatagttgccctgtcttcactccggcgcgaacgccgcaggtttcgcttttttctccagcgctatggaagtacgcgactgcctattctccaccctgtcgtcgtggtaacgagatcctcatccaaaggcgtgagcgtctgtattcaactatgaggaaagcgctccgaactctgttgtgtttgccttcgctggtctgggttgaaaaatgcacaactgtgtacgtggcgcttgttctgccctgacaggcacttatcatcgtcctcgcgacatgcgctacaattgctcgcccaatgccccgaggatgtggccgaaagttctgggtccacgtcgagctctagggacacgtaccactgacaatgcggacatggcttagagacaatgcgacggtccacagtagactatatagagatcaggatactccacgtccatggcccatccaagcgctagcagagtccgtagctgacaccgacaactacggtcgagacaaatggatgtacgagcccacgcaggacaggtgccacaagacagagcgtttgacaatcgagcaccaggggacatgatggcaacactgtcaccaggagcgcgcaggacagctgtcccagatgagatgctgagagatgcggcttctttggaaataaaacttcaaccaagacggatttggggaaaatttcgtacttcaaggctagaagataccctatataaagacccagtacagtgctgtggctcatgcttgtaatcccagcactcttgggaggccgaggcaggcgcatcacaaggtgcaggagatcgagaccgtcctggccaacatggtgaaatcccacgtctcatactaaaaatacaaaaattagcttggtgtggtggcacgtgcctgtaatcccagctactcaggaggctgaggcaggagagtcaccttgaagccagggaggaagagcttgcagtgatccgatggag

SEQ ID NO: 507100 - DNA, 292 bp, Homo sapiens
  misc_feature (52)..(52): n is a, c, g, or t
  misc_feature (290)..(290): n is a, c, g, or t
gcagccaagcagatggggctgtacctatgagagtgtgtcacccgtgggtgangtgtgcagtgatcagatgttgagtttggaagctcttttcctcttggtattgaatagagtcccactgtctggatgcaccccgctgacccacccactcaccgactgcagggcgtcccggttgctgccaggtgaaataggggcggggacaatccaggggacatctttcccagcatgcatgaaccagaaataacaccagcgtgttttgaggaagaaacggtgaaggaaattccaccctgggntg

SEQ ID NO: 507101 - DNA, 373 bp, Homo sapiens
gcgctagcagaatagtgactgacaccaggatggacatgagcgtgtctaactgctgtgctgcggggactaaggattttagtcaagtaaatgaacagcacgtcccaggcagcccttcactgctcgggtcacaggtgacgactccatgctgtagtgtcccaccgtaaaggtcggctctgctgccgacatccccatcaacatctcagaggcggatctcagcctgctgacggccactgtggtcccgccctcgggccgggaggagccctgtttgctgaagcggctgcgtaatggccacgtggggatttcattcgtgccccaggagacgggggagcacctggtgcatgtgaagaaaaatggccagcacgtgggcagcagc

SEQ ID NO: 507102 - DNA, 436 bp, Homo sapiens
gagactcctagtgcagccctctcggcagttacatgaagttccagacttaaacagtcttatgtatacagcatgcttcgggctggtcaggagctcactgcagtcacagctctttcacatcacacagttgcttactggttagctctgccctattcaagacaatcggttccattccttatttagacagcagtaaagagacaattggccaacaaaaccagcctgaccaacaaggtgaaaccgtcgctactaacaatgcaaaacttagctgggcatggtggcaggtgcctgtagtcccagctacttaggaggctgagacaggagaatcgcttgaacccgggaggtggaggttgcagtgagctgagatcatgctactgctctccggcctgggcgacgagcgactctctgtcttacaaacaccaaaacaaaacaccctcagcag

SEQ ID NO: 507103 - DNA, 768 bp, Homo sapiens
  misc_feature (22)..(22): n is a, c, g, or t
  misc_feature (30)..(30): n is a, c, g, or t
  misc_feature (33)..(34): n is a, c, g, or t
  misc_feature (40)..(40): n is a, c, g, or t
  misc_feature (43)..(43): n is a, c, g, or t
  misc_feature (114)..(114): n is a, c, g, or t
tattctctgtgccacgtgggangccgtganaanntgtaanatncaggattggccaagtccatcggggtgtccaacttcacccgcagccagctggagatgatcctcgacaaccanggtctcaagtacaagcctgtctgcaaccaggtggaatgtcatccttacttcaaccagagaaactgctggatttctgcaagtcaaaagacattgttctggttgcctatagtgctctgggatcccaccgagaagaaccatgggtggacccgaactccccggtgctcttggaggacccagtcctttgtgccttggcaaaaaagcacaagcgaaccccagccctgattgccctgcgctaccagctacagcgtggggttgtggtcctggccaagagctacaatgagcagcgcatcagacagaacgtgcaggtgtttgaattccagttgacttcagaggagatgaaagccatagatggcctaaacagaaatgtgcgatatttgacccttgatatttttgctggcccccctaattatccattttctgatgaatattaacatggagggcattgcatgaggtctgccagaaggccctgcgtgtggatggtgacacagaggatggctctatgctggtgactggacacatcgcctctggttaaatctctcctgcttggtgatttcagcaagctacagcaaagcccattggccagaaaggaaagacaataattttgttttttcattttgaaaaaattaaatgctctctcctaaagattcttcacct

SEQ ID NO: 507104 - DNA, 840 bp, Homo sapiens
gcacgacgccgtgacggcacgcgcgcgcgcgtcacatgagtgatctgcagctggactgtgccttggacctaatgaggcgcctgctccccagcagatcgagaaaaatctcagtgactgatcgactggtccccagtttatgtgaggatctcctgtcttctgttgagcagccactgaccaattggcagagacaaggtgatgggaactggattagcttttgtgtgatacaaagagatggggactcctataggtcaccatggcgtaacaagtatgaccctcccttggcaggatggtggccatgccgtcagcgtcggctgagaaagctggaggtggaagccaacagatgcctttgaccagtatcgagacctgtattttgaaggtggcgatctcatctgtctacctctgggatctggatcatggctttgctggagtgatcctcataaagaaggctggagatggttcaaagaagatcgaaaggctgctggggattccatccacgtggtagaagtgcaggagaaactccagctgggcggaccgcccattacacagttgacctccacggtgatgctgtggctgcggaccaaggcaaatctggctctggcacccatgaacctcggaggcggcttaccagacagatggaggaaggatgaaacctgtgccgtgaccttgtccccaaatatagtcaacatcgggcgctggttacaggaccatgggaacagtaacactcagacgtacggctgaacggcacatctacttttggaaaacgaaggatatcgtcaatgggtgaggtctgtgcgacttttgcagacaatcagcaccaagaggtctgacgattgacctgtg

SEQ ID NO: 507105 - DNA, 800 bp, Homo sapiens
  misc_feature (22)..(22): n is a, c, g, or t
  misc_feature (30)..(30): n is a, c, g, or t
  misc_feature (33)..(34): n is a, c, g, or t
  misc_feature (40)..(40): n is a, c, g, or t
  misc_feature (43)..(43): n is a, c, g, or t
  misc_feature (114)..(114): n is a, c, g, or t
tattctctgtgccacgtgggangccgtganaanntgtaanatncaggattggccaagtccatcggggtgtccaacttcacccgcagccagctggagatgatcctcgacaaccanggtctcaagtacaagcctgtctgcaaccaggtggaatgtcatccttacttcaaccagagaaactgctggatttctgcaagtcaaaagacattgttctggttgcctatagtgctctgggatcccaccgagaagaaccatgggtggacccgaactccccggtgctcttggaggacccagtcctttgtgccttggcaaaaaagcacaagcgaaccccagccctgattgccctgcgctaccagctacagcgtggggttgtggtcctggccaagagctacaatgagcagcgcatcagacagaacgtgcaggtgtttgaattccagttgacttcagaggagatgaaagccatagatggcctaaacagaaatgtgcgatatttgacccttgatatttttgctggcccccctaattatccattttctgatgaatattaacatggagggcattgcatgaggtctgccagaaggccctgcgtgtggatggtgacacagaggatggctctatgctggtgactggacacatcgcctctggttaaatctctcctgcttggtgatttcagcaagctacagcaaagcccattggccagaaaggaaagacaataattttgttttttcattttgaaaaaattaaatgctctctcctaaagattcttcaccttaaaaaaacaacccacaacacacataacaaac

SEQ ID NO: 507106 - DNA, 168 bp, Homo sapiens
tatcagcacaacccctgacccctgagttccctagtgcacttgtctcatcctagaacacctttcttttacttgacagtagctccaattaaaaagtgagctcctgtgccacctaggcaccaagtggtgcctgctgctggattatattacagggcctcgggtggtgggcag

SEQ ID NO: 507107 - DNA, 265 bp, Homo sapiens
gcggtacatggtttgcagcgataactggtttgcagctggtactggtattgccagggtctgctagttctgaggacactggtggctgtgctatgtgtggccatcctccatgtcccgtccctgtagctgctctgtttagacagcggacagacgctcacgcccaggggatgtcctcacgctgtcgccgcgcggtttcccttcgcagatgtgtatactcatgataggtcagaaagtgtatccgctacaataaagttctggttctaactaa

SEQ ID NO: 507108 - DNA, 519 bp, Homo sapiens
  misc_feature (95)..(95): n is a, c, g, or t
gtttgaacatttcactttgtgtgttttatgtgttaagttccaggcaggggaatagaattaaattattctttattttgaaaatacagatatgatanagtcacattcattaaacaaagaaacacagattctagagcagtcagaaaatgaacttcttaacatctacactagcggcagcttcctagaaatcactgcactacccgctagtaacggagtcattgccattcagagtgtgcatttttttttctctttccagttttgctggcccccctaattatccattttctgatgaatattaacatggagggcattgcatgaggtctgccagaaggccctgcgtgtggatggtgacacagaggatggctctatgctggtgactggacacatcgcctctggttaaatctctcctgcttggcgacttcagtaagctacagctaagcccatcggccggaaaagaaagacaataattttgttttttcattttgaaaaaattaaatgctctctcctaaagattcttcacct

SEQ ID NO: 507109 - DNA, 768 bp, Homo sapiens
  misc_feature (22)..(22): n is a, c, g, or t
  misc_feature (30)..(30): n is a, c, g, or t
  misc_feature (33)..(34): n is a, c, g, or t
  misc_feature (40)..(40): n is a, c, g, or t
  misc_feature (43)..(43): n is a, c, g, or t
  misc_feature (114)..(114): n is a, c, g, or t
tattctctgtgccacgtgggangccgtganaanntgtaanatncaggattggccaagtccatcggggtgtccaacttcacccgcagccagctggagatgatcctcgacaaccanggtctcaagtacaagcctgtctgcaaccaggtggaatgtcatccttacttcaaccagagaaactgctggatttctgcaagtcaaaagacattgttctggttgcctatagtgctctgggatcccaccgagaagaaccatgggtggacccgaactccccggtgctcttggaggacccagtcctttgtgccttggcaaaaaagcacaagcgaaccccagccctgattgccctgcgctaccagctacagcgtggggttgtggtcctggccaagagctacaatgagcagcgcatcagacagaacgtgcaggtgtttgaattccagttgacttcagaggagatgaaagccatagatggcctaaacagaaatgtgcgatcttttacagtagagtgttttcggcctccctcgaaatatggtgttctcactgaatattaacatggagggcattgcatgaggtctgccagaaggccctgcgtgtggatggtgacacagaggatggctctatgctggtgactggacacatcgcctctggttaaatctctcctgcttggtgatttcagcaagctacagcaaagcccattggccagaaaggaaagacaataattttgttttttcattttgaaaaaattaaatgctctctcctaaagattcttcacct

SEQ ID NO: 507110 - DNA, 683 bp, Homo sapiens
taaaatacagggggggggttttaaacacccagaaaaaaaatatccaaaggggtcgaaaaggcagtgaaaaaaaaagtagggtgtggactgtattttacagtggacgcagtgatatcactcgtgtgtaactaggtgggcaaaattttataaggtgacccttttcaaataaggggaattttttttacatcagatagagaaataattgtgaacagagtttaaagtaaccctacttatgagggaccgtgaaaaatatttgtggaaatagaaattttatatataataatcaaaaaaaagaacagaaagagtggaggtaattaaataagtgtgtatgcccgaagaggagtggatgcaaaaaacacacacaggggcgccactcagagcaacacacacaataggcgacgtgagcgcccacccaagaaagcagcagaggagaaaagcacggaaaatcaagacatcccaaaagcgggggcaagagaaacacataaatcacaaaaacaaggcagagcttcaaaaaaacacaccaattgtgagtggaaaacacaaaggaatgaggggagcaaatatccccaccacaggggccacagtgaggagatcacaaacaaacagacaaagaacgacaaaaggggagagacgggccgcaagaggagaagacacaccgaggggcgcaaaaagagaaagagacc

SEQ ID NO: 507111 - DNA, 138 bp, Homo sapiens
taggctagtacctacgagggctatagtaggcagatatagaagagtatagcaatcgagcgataaaaggtactgatagtacgtacggcagataggagctatagattataaactataacgcctacataagaggataagtaa

SEQ ID NO: 507112 - DNA, 906 bp, Homo sapiens
aaagatgaaggagaaagagcagagtagactgacccctaaagtcgtgaaacgccgtgtctgagtttctgcggcaatctggtttcgtcgaatctacgtggtgccaaatgcccggggggccctcccgctaaagatggctacgccctcatagtcctcgaaactttctagtgttcagggcctctaagagcctttcctgtgcccctaattggttcctctgcggggcatttcctaattcttacagtgcggtgttaatttgcacttttctagctaacagggcgcgctgaagttaatggaaacctatccagcccccctttttaatggggggctcttttctcccactccaccctgctaggcatttagagttcaacagccaacgtttgtttacagcaaaaaatactagtcatgctcaagggcctccccttccctgaattattccccccgtggaacaggtccaaccatttgagcgaaactctaacctacggggcacgacgagatggatggtgtggcggttgaaaagcgcggcgggagcacaaggtgttgttatggatgggacacacgcgcaaagtgcagacaaggttactagtaggcactcaagagagaaagactaaattatgaccacttcagtgcagagtctacaaactggagccgcatttaaatcaaacgggagaaacgggatatccagcctttcagtggctggcttcgcctctctactcccggtggttttccatctaagagatgctttccacgcacccgcccggcgtgatagaaagggcaggaacacggcggtcctctgctggccacaatatatgtaagtctccctagtggtgataatattcgctttccaaacactccaactttttaacttatgcccccggttaaaaaaaattttataaacaacccaacatgaca

SEQ ID NO: 507113 - DNA, 459 bp, Homo sapiens
agtgatgacaagccacccctttgggtagaggtataaaaaaattaatctacccttaattccagaacctgatccccaccaaggtttaggcagatcgtgttttcaaaaggatagtttcaaccccgcccagccccgccccagcccctgctcaggtctgagtatggctgggagtcgggggccacaggcctctagctgtgctgctcaagagactggatcagggtagctacaagtggccgggccttgcctttgggattctacctgttcctaatttggtgtggggtgcggggtccctggccccttttccacactcctcctccgacagcagctccctgggcagtggcctggtctcaccgtgtgcagccttgtggtttatgcttaaatgtacattttccttcgcagatgtgtatactcatgataggtcagaaagtgtatccgctacaataaagttctggttctaactaa

SEQ ID NO: 507114 - DNA, 1131 bp, Homo sapiens
gagcctgcgtgaggagctgtgcgaggagttcctggcgcacgcccgcggccggctggagaaggagctgagaaacctggatgtgcctgagctggtggccctcacctccgtgctccctgacgtgttagatgttcacctgaccatggaggcagttgtgcttctgtgtggcgtgcctctgccagtgtgtgctggcgtgcctaccaggagctgttttgcgtgcccatgggcccagcatggtgccgatgaagctggctggccttctgcccgtgcatgctgggcatgcctgctatttttgcgctggtgtggagcgtgctggctggctgcagtgatgcagggtggtgggtgacaactcacttgctggtgctgggctgctcggacctggttccacctgtgcgctttgcgtggctccctgtgggccctgctggccgctgcctgggctccgcaggacgctgccacgggaggatcgtggaactgagttggcccgcgagcgcctgggccaccaacttgcagggtctccggggcgagcttccttgggctgccttgacagactgtcccgcagggcggctggccagcacctcggcgttggctgggaacggaggggccctggcctgggacgagtttgcatggacaagtgtggtcagctccatccttgaggccaccattaagggcgtctctgggcagcaagttgcaaccttttcaccggcacaaggagggtgtccttctccaaacaaagcactacttccggggtgagttctgcagtcaggggttgtccgtgacgtgcctcatccgggggcttcgtccactctatgtgccagaagggtcagagattctgagagtggccttcggagagggggcgtgcaaaccactgggctgactgagtgacacaccgctcttgctggctcagtagacgggcacaattacgaaattacctacatctcactgtgtgtacacgagcttgagacccgacaagaccaggagagcacttatacacatcgtgtgttagccggtcacagccgggtgtgaacccaaaataaggtgaggactggaaacaaagctccaagcggtagtcaggagtaactcgacccaatgtagcactgacgagtgaaaacccaccgcagtgcttcaaaggagaca

SEQ ID NO: 507115 - DNA, 9638 bp, Homo sapiens
gcgcgagttaacaagcacaagccctggctggagcccacctaccacggcatagtcacagagaacgacaacaccgtgctcctcgaccccccactgatcgcgctggataaagatgcgcctctgcgatttgcaggtgagatttgtggatttaaaattcacgggcagaatgtcccctttgatgcagtggtagtggataaatccactggtgagggagtcattcgctccaaagagaaactggactgtgagctgcagaaagactattcattcaccatccaggcctatgattgtgggaagggacctgatggcaccaacgtgaaaaagtctcataaagcaactgttcatattcaggtgaacgacgtgaatgagtacgcgcccgtgttcaaggagaagtcctacaaagccacggtcatcgaggggaagcagtacgacagcattttgagggtggaggccgtggatgccgactgctcccctcagttcagccagatttgcagctacgaaatcatcactccagacgtgccctttactgttgacaaagatggttatataaaaaacacagagaaattaaactacgggaaagaacatcaatataagctgaccgtcactgcctatgactgtgggaagaaaagagccacagaagatgttttggtgaagatcagcattaagcccacctgcacccctgggtggcaaggatggaacaacaggattgagtatgagccgggcaccggcgcgttggccgtctttccaaatatccacctggagacatgtgacgagccagtcgcctcagtacaggccacagtggagctagaaaccagccacatagggaaaggctgcgaccgagacacctactcagagaagtccctccaccggctctgtggtgcggccgcgggcactgccgagctgctgccatccccgagtggatccctcaactggaccatgggcctgcccaccgacaatggccacgacagcgaccaggtgtttgagttcaacggcacccaggcagtgaggatcccggatggcgtcgtgtcggtcagccccaaagagccgttcaccatctcggtgtggatgagacatgggccattcggcaggaagaaggagacaattctttgcagttctgataaaacagatatgaatcggcaccactactccctctatgtccacgggtgccggctgatcttcctcttccgtcaggatccttctgaggagaagaaatacagacctgcagagttccactggaagttgaatcaggtctgtgatgaggaatggcaccactacgtcctcaatgtagaattcccgagtgtgactctctatgtggatggcacgtcccacgagcccttctctgtgactgaggattacccgctccatccatccaagatagaaactcagctcgtggtgggggcttgctggcaagagttttcaggagttgaaaatgacaatgaaactgagcctgtgactgtggcctctgcaggtggcgacctgcacatgacccagtttttccgaggcaatctggctggcttaactctccgttccgggaaactcgcggataagaaggtgatcgactgtctgtatacctgcaaggaggggctggacctgcaggtcctcgaagacagtggcagaggcgtgcagatccaagcacaccccagccagttggtattgaccttggagggagaagacctcggggaattggataaggccatgcagcacatctcgtacctgaactcccggcagttccccacgcccggaattcgcagactcaaaatcaccagcacaatcaagtgttttaacgaggccacctgcatttcggtccccccggtagatggctacgtgatggttttacagcccgaggagcccaagatcagcctgagtggcgtccaccattttgcccgagcagcttctgaatttgaaagctcagaaggggtgttccttttccctgagcttcgcatcatcagcaccatcacgagagaagtggagcctgaaggggacggggctgaggaccccacagttcaagaatcactggtgtccgaggagatcgtgcacgacctggatacctgtgaggtcacggtggagggagaggagctgaaccacgagcaggagagcctggaggtggacatggcccgcctgcagcagaagggcattgaagtgagcagctctgaactgggcatgaccttcacaggcgtggacaccatggccagctacgaggaggttttgcacctgctgcgctatcggaactggcatgccaggtccttgcttgaccggaagtttaagctcatctgctcagagctgaatggccgctacatcagcaacgaatttaaggtggaggtgaatgtaatccacacggccaaccccatggaacacgccaaccacatggctgcccagccacagttcgtgcacccggaacaccgctcctttgttgacctgtcaggccacaacctggccaacccccacccgttcgcagtcgtccccagcactgcgacagttgtgatcgtggtgtgcgtcagcttcctggtgttcatgattatcctgggggtatttcggatccgggccgcacatcggcggaccatgcgggatcaggacaccgggaaggagaacgagatggactgggacgactctgccctgaccatcaccgtcaaccccatggagacctatgaggaccagcacagcagtgaggaggaggaggaagaggaagaggaagaggaaagcgaggacggcgaagaagaggatgacatcaccagcgccgagtcggagagcagcgaggaggaggagggggagcagggcgacccccagaacgcaacccggcagcagcagctggagtgggatgactccaccctcagctactgacccgtgcccccggccacctcggtttctgctttcgaagactctgctgccatccgttctcccagtcccaagggtccacgatgtacaaagtcatttcggccagtaggtgtgcagacccctccccgccacgatcgtcgctgtgcttggtgtgtaggaccctaggctccccgcccaccctctgcctggtcgcgctcttcagtcccacgaggagctgacacgtcctctctggccgccatccggctcgcacaggggcctcccagcgcctcaggccccgcgtttgtgtctggagtctccccccggggagaggacactggcccctcgcactccagaaaagccatgccagctgggctcgttgacaaagggtaaaacatgctcactcccacccggtaatcatttttttctttttttaaaaaaagtttttattttttccaaactagtgcatgtataaataatggcaggatggggggtactgtgtagatgattaactgactttttaatattttgtaaataaatcggattccttgtgtcctttgtgctagtgtaacccgggactggaatgtaaagtgaagttcggagctctgagcacgggctcttcccgccgggtcctccctccccagaccccagagggagaggcccaccccgcccagccccgccccagcccctgctcaggtctgagtatggctgggagtcgggggccacaggcctctagctgtgctgctcaagagactggatcagggtagctacaagtggccgggccttgcctttgggattctacctgttcctaatttggtgtggggtgcggggtccctggccccttttccacactcctcctccgacagcagctccctgggcagtggcctggtctcaccgtgtgcagccttgtggtttatgcttaaatgtacattttcctgctggtaaaaggagaaactgagaggtgtcctgcagaccggctgaccactccttttggagacggcaggaggcctgagcgatccgtactcagaacgtccaggagagacgcatggcccgaagtcaaagtgctggaattttccaaaacagcctgttctctcctctctcctccccagagcaccccctgccatcaggggggttgaaatccctctcccccaggagccctgctgctttgcttggtggtagggcaggagagcaaacaaacagtcatggtctaaaacccacatagcactttgctcttagttacatgtaaaattttagatttctaaaacaggtgggcaatcattttgaatactgttctgtgaccctgactgctagttctgaggacactggtggctgtgctatgtgtggccatcctccatgtcccgtccctgtagctgctctgtttagacagcggacagacgctcacgcccaggggatgtcctcacgctgtcgccgcgcggtttcccttcgcagatgtgtatactcatgataggtcagaaagtgtatccgctacaataaagttctggttctaactaactccagccggagcggggtttgtcttctctcctgttttggttttaaacctacactcccttgtttctttttgagccgagaacataaaagaacataaaaaggctttttctttcttttcatctgcctttacttctcatttcaaggtttcacagagtgctggtctcaacccacatcagtgatacttaactaacttgccttccccagacagaaacatgaaatgacttaaaaaaatagaaaatattcttctcgccaggcacacaagactgtacacccaaaaccagaaacgctgtggctttgcaaagtgtgctcccacacccgcgcacacaggcgcacttaaataaataacgcgcacgcacggctttccccatttcgaaacaggcagacggtctagtgagtttcagcacttgctgggaacaggcgtgtggccagggaggtgccccgcgggtggcaatgactactgacggacccctggtgaatcagaacagagctggcacctgagccgctgagcgggcggctacttctggctctgttgagttttggaagacctttgagaaatcaacagcatcaccgggcaggtcctgagtccatggcctgatatgttaggatcacctgtgggctgctaaaagcccacagtcctagccccatctgcagagttagttggcttctgaaggctgggagaagccctagaacctgcatttctaaagctgctcaaatccaggcctttggaggcttaagactaagcctgcaccatttcaaactaagtatagtcagagagaaagatcccagcacgccccctcgttctcacacttctggtacctcagcactctcacagcaggttcccaaaggtgatggttctggaagagttctggcctcatccttttgttaaaacctgctttcagaggtggcttagacaatggcagagtgggccgggcgcggtggctcatgcctgtaatcccagcactttgggaggctcaggcgggtggatcacctgaggtcaggagttcgagaccagcccagccaacatggtgaaacccccgtctctactaaaatacaaaaattagctgggtacggtggtgcacacctgtaatcccagctactcaggaggctgaggcagaagaatcacttgaacctgggaggcggaggttacagtgagccaagattgcaccactgcactccagcctgggcaacagaggaagaccccatctcaaaaaaaaaaaaaaagatttttgagataatggcagagtattagcttctgacctgcttttgccttcatgcgtgaccggggtgagctacatgaggcccagatctctttaacacgtcctgaggaccagcgtagattctcctttatggggctgggcctgatctccccagccgtagaggtgtggtgagtcatctattattttcttacctgcaaacaaaatcactttacagtagagaaagatgagggaattctcgtacccaagacccacttgaaaagtggagagcaagcatccctgaatctagagggtaccccggctgcctcggggagctgccagaactcagtctagggaggatacacagggtgggtcgcacgaggatcgaggcatcctgtcggacagtaggcaccaggtgaccgccaggcgccaggacccaggcagtctggcgggaggcctgggaagaaggttccctcgggaggagaacagtctttgctgggcccagatccaccagctggaagacttggggtgacaatcctcagccgagagccaggtgcagcctcggggggcccagcaccgccgctgcatgaaggaggcgtttccgtttatggctgtttagctccttaaactatttcaagtcataaataaataaccagtgtaaacaaaaggcagccatgtcggttctttcccgttaggtgcagttcaggctcttcagcccctttaggaccaatgtgcttggtccccacgacccgcagccgcctcctcttgggcccagggctgggaggagccactactgcctgttgtctttggacacgttgtgggccagccagttcactttggttttccagctctcacggagggcttcgttaaacttcactcggaagtgcttcagtgcctcctcctctgttttccccagtgccagggagtccttgagatactggatgtctttggagcagctgagctcaggcaggcctgccgcccgcatcagggcaaagaggtggaggaagagaagcccgtggcgccgcaggatggtgtaggccctttcacagtagccccggaaccgttcaaatttctcactattattagtcttcccctgctgaatcacatggacaaagtcgtaggtgaggatgaatgggacacgctcgcggttgattccaaacttggtcttgaaattccccagaaagtggccaaaatcaatgtggaacagctgcccactctctcggatcatgatgttgtcgctgtgccgatcgccaatgcccagcacatatgtggccacacaatagccagcacaggagagggtgaactcctcaatggctcgatccagggcctcccccgggttcttggacttcagccagttgagcagggcatccttgttgaaggcggctgtggctgccatgttgctcttgttgagttggatgttggcgatggtgtctgaacggagtaccacctcaatgaggcctgtgcggtccccggtggggaggcagccatagggggtcatcctcaggtccagcccctcctgcttccacaggacgtccatgagctggatcatctgcagggtcagcatgtcctgccggaggtcatccccgttcttaaagatgatgcccacgctgccgccgctgcctgcctcctcgttgctgtacatgatccacaggggcttcatcttggagtccatgaaggtgcactgctccacgcagacttcagccagcagggtgctggggtcgagtggggactgcaggtgggagagggcctctaggtaggcctcctgccgcatgcacaagtgcatcagctccttggtctggggcttgggggtcttctgagagctcagcttgacgaagtcattcagggccttcagtttgctcagtgcttccccctgcttcatcagcaccttcatgtggtgggtgctgcccctgcagtaggcctccaggatgaggccgaagcgcagggccaccgacggcacgtgcatctcggagcggaggtgccagaaaaggaagtggccgatcttgcggttggccagggcccggtccagcaggaatttggtcagctcgcagtccaggtaggactcgtacttgagcacctgcaccagctgcagcaggtactggaacagctcatcgtccgtcagtttccgcagcgacttgatggcgaaggagcctacgtggcaatcggggaagctgaagtctagcagctccagggcgctcaggacgggcagctccggccaggagcacagcaggtagagcatctgggccacatcctcatgcttgttccacttggtgaccagcagcagccgggctagcgcctccgggaagtgctcctggacttcatgccgcagcttccacaccaggtccttctcgtgctcatacagctccccagacccccgccgctccaggatttcccgcagctgcagctgctcctcctcggtgacatgcacacactcgctgtgtcgccccagctccaagatcttctccagggcggggtagtacacggggtgcggggccacctcgggcaggcagatgagcagggcagcggcgctatccgtgttggggttactgcgcacagtgcccgtggggttcagcagctcgcccttctcatctgggacggagggccacatgtagaggcagcgttccccggtcttaagctggtccttgtagtcaaacagcatgaggttggcccaggcaatggggcagtccgccttcttggacttcttcttggtggagcgagccttcttggctttctcgatcacggcgtacagcgcaaagcagagacgggccatgcggggcaggtcgcagatgttgatgtcgaactccagccgctgcttccacacgggctccgagcacacgctcacctccgagctggacaccgtcttgcacagcatctcgttgccgtggaaaagcccggcctgcaccaccagcttcatccgctcgtcggcgttcactttgctgccctggatgagctcgatgcggaacggctgctccagggaccacagggacacagaggaaggcttcttcgcaggaatgggaggtggtttggcacgcggtttctggacctggggggcagggttgctctgctcatcccgcatggcgaggatggaggaggaatggaccatggtcaggtgaggggtcaacccactgtgcaggcagctgcagatgtactggaactggcagagcgggtagctgccatacaggtactcatgcctgccgttcacctgcagcgtgtagtcttccggctgctccaccagcggctgccggaacactgtggccttcttccgcagggcacaggccatcagcgccagcggcacgtccttggtggacacctggaaggtgaagctctcctcgctgccctcaaacttaacgttgaccagaagggcccggttcgggagccgcagggtaccaggcccccaggtttgagccgagggctccagctgcagggggaaactgtactgcagccaggcctcccagcccagctgctgccggcgggcggccgcctcctcgcagaattggcacatcttggcgcgaaagtcgttcacttctgggtcgcacaaggagtcaaactcgtggaggcctttgccgatgaggaggctgatctgtgagttgatgagcttcttcacgcggtcgccctcacgggccaccaggcgcaggacgggcaggaagggctgcacgtcacacagacgccgttgctcgtcctccagctcttgctgctccgctgtctggttgatgcaggtgaacacataggcctcggggccactgagcatgtggaagagcggctcatactgggcgcggtgccacagcagctgcttgatggtgctgaggttggcattgcgggacacagggaagttcaggtagacccctgtgggcagcaggaagtcaaccacaacgctctgattctcctccttggtccagaattccatggggcagtccaccccagggggcatcctgcgttgttacttcccagatgacagttgtcctctctggaatagtccaagaaagaccagcaaagccccctccgcctggcagattaaagatgctttagaatcaatgagtgtcatcccgccctggcctgactccttatcgtcccggcgcagctggcagggctgggcggctctgctcgcggccgctcgtgccgaattcgctgggcgcgaga

SEQ ID NO: 507116 - DNA, 307 bp, Homo sapiens
caaaggcttagaagtagaatattcctggcttaagatccctgtagtaaccataaggatatataagaaaagacacagcacaggcgtgtgtaaggtaaaacatcctaaagtatagaaggaaactagctttggaaacaaagtatgtcctccacatctcttatcttctcccccattgtatctgtatagatgtaaatatctactatcgtaaacctttctttgaattcattactaccttttaaatgtaaaactcagttttaagttccagaaagtaatttttttataaaagtttggtaaaatggagtggtatctg

SEQ ID NO: 507117 - DNA, 442 bp, Homo sapiens
ccacctgtcctcccaagcatacgcatacgtttgctacctattctgacactgagccggcagtgctcattccggtttatgcaggcaagcgtgccgtgactatggctctcactgctgatcggaacgcagtgaacgctcatgcggaccggctgaacccgaggtggaactcagattgaagttactctggacgttgccgccaacggtatacttagcgtcactggtgtgaacggcactgcctgaccagagacccatgttactctgactaatgaccctgaccgtgcgaacgtggcatacttagtaggtatggaccaagaggcttgtatgaacggatctgcgaaggataagctgagggtcactgtgaactacaggaattgacttgactgctatgagttgaacatgaaagagactgacgaagatgacactatggagctgctagattatcgat

SEQ ID NO: 507118 - DNA, 776 bp, Homo sapiens
  misc_feature (19)..(19): n is a, c, g, or t
  misc_feature (705)..(705): n is a, c, g, or t
  misc_feature (756)..(756): n is a, c, g, or t
  misc_feature (761)..(761): n is a, c, g, or t
ctagaataaccactttagnagaagaacataaatgatctgatggagctgaaaaacacagcacgagaccttcgtgaagcatacagaagtatcaatagctgaatcgatcaagcagaagaaaggatatcagagattgaagatcaacttaatgacataaagtgtgacgtcaagattagagaaaaaaagaatgaaaaggaacgaacaaagcctccaagaaatatgggactatgtgaaaagaccaaacctatgtttaattgatgtacctgaaagtgctggggagaatagaaccaagtttgaaaacactcttaggatattatccaggagaacttccccaacctagcaagacaggccaatattcaaatcagtaaatacagagaacaccacaaagatactcctcgagaagagcaaccccaagacacataatcatcagattcaccaaggatgaaatgaagaaaaaaatgttaagggcagccagagagaaaggtcggtttactcacaaagggaagcccattaaactaatagcagatttgtctgctgaaaccctacaagccagaatagagtggggggccaatatttaacattcttaaagaaaagaattttcagcccagaatttcatatccagccaaactaagcttcattagcaaagaagaaataaaatcctgagagacaagcaaatgctgagcgattttgtcaacaacaggcctggcntacaagagctccagaagggaacacttaacacctttaagggaaaaccaattncaagncactggaaaaacctt

SEQ ID NO: 507119 - DNA, 9581 bp, Homo sapiens
gcgcgagttaacaagcacaagccctggctggagcccacctaccacggcatagtcacagagaacgacaacaccgtgctcctcgaccccccactgatcgcgctggataaagatgcgcctctgcgatttgcaggtgagatttgtggatttaaaattcacgggcagaatgtcccctttgatgcagtggtagtggataaatccactggtgagggagtcattcgctccaaagagaaactggactgtgagctgcagaaagactattcattcaccatccaggcctatgattgtgggaagggacctgatggcaccaacgtgaaaaagtctcataaagcaactgttcatattcaggtgaacgacgtgaatgagtacgcgcccgtgttcaaggagaagtcctacaaagccacggtcatcgaggggaagcagtacgacagcattttgagggtggaggccgtggatgccgactgctcccctcagttcagccagatttgcagctacgaaatcatcactccagacgtgccctttactgttgacaaagatggttatataaaaaacacagagaaattaaactacgggaaagaacatcaatataagctgaccgtcactgcctatgactgtgggaagaaaagagccacagaagatgttttggtgaagatcagcattaagcccacctgcacccctgggtggcaaggatggaacaacaggattgagtatgagccgggcaccggcgcgttggccgtctttccaaatatccacctggagacatgtgacgagccagtcgcctcagtacaggccacagtggagctagaaaccagccacatagggaaaggctgcgaccgagacacctactcagagaagtccctccaccggctctgtggtgcggccgcgggcactgccgagctgctgccatccccgagtggatccctcaactggaccatgggcctgcccaccgacaatggccacgacagcgaccaggtgtttgagttcaacggcacccaggcagtgaggatcccggatggcgtcgtgtcggtcagccccaaagagccgttcaccatctcggtgtggatgagacatgggccattcggcaggaagaaggagacaattctttgcagttctgataaaacagatatgaatcggcaccactactccctctatgtccacgggtgccggctgatcttcctcttccgtcaggatccttctgaggagaagaaatacagacctgcagagttccactggaagttgaatcaggtctgtgatgaggaatggcaccactacgtcctcaatgtagaattcccgagtgtgactctctatgtggatggcacgtcccacgagcccttctctgtgactgaggattacccgctccatccatccaagatagaaactcagctcgtggtgggggcttgctggcaaggtggcgacctgcacatgacccagtttttccgaggcaatctggctggcttaactctccgttccgggaaactcgcggataagaaggtgatcgactgtctgtatacctgcaaggaggggctggacctgcaggtcctcgaagacagtggcagaggcgtgcagatccaagcacaccccagccagttggtattgaccttggagggagaagacctcggggaattggataaggccatgcagcacatctcgtacctgaactcccggcagttccccacgcccggaattcgcagactcaaaatcaccagcacaatcaagtgttttaacgaggccacctgcatttcggtccccccggtagatggctacgtgatggttttacagcccgaggagcccaagatcagcctgagtggcgtccaccattttgcccgagcagcttctgaatttgaaagctcagaaggggtgttccttttccctgagcttcgcatcatcagcaccatcacgagagaagtggagcctgaaggggacggggctgaggaccccacagttcaagaatcactggtgtccgaggagatcgtgcacgacctggatacctgtgaggtcacggtggagggagaggagctgaaccacgagcaggagagcctggaggtggacatggcccgcctgcagcagaagggcattgaagtgagcagctctgaactgggcatgaccttcacaggcgtggacaccatggccagctacgaggaggttttgcacctgctgcgctatcggaactggcatgccaggtccttgcttgaccggaagtttaagctcatctgctcagagctgaatggccgctacatcagcaacgaatttaaggtggaggtgaatgtaatccacacggccaaccccatggaacacgccaaccacatggctgcccagccacagttcgtgcacccggaacaccgctcctttgttgacctgtcaggccacaacctggccaacccccacccgttcgcagtcgtccccagcactgcgacagttgtgatcgtggtgtgcgtcagcttcctggtgttcatgattatcctgggggtatttcggatccgggccgcacatcggcggaccatgcgggatcaggacaccgggaaggagaacgagatggactgggacgactctgccctgaccatcaccgtcaaccccatggagacctatgaggaccagcacagcagtgaggaggaggaggaagaggaagaggaagaggaaagcgaggacggcgaagaagaggatgacatcaccagcgccgagtcggagagcagcgaggaggaggagggggagcagggcgacccccagaacgcaacccggcagcagcagctggagtgggatgactccaccctcagctactgacccgtgcccccggccacctcggtttctgctttcgaagactctgctgccatccgttctcccagtcccaagggtccacgatgtacaaagtcatttcggccagtaggtgtgcagacccctccccgccacgatcgtcgctgtgcttggtgtgtaggaccctaggctccccgcccaccctctgcctggtcgcgctcttcagtcccacgaggagctgacacgtcctctctggccgccatccggctcgcacaggggcctcccagcgcctcaggccccgcgtttgtgtctggagtctccccccggggagaggacactggcccctcgcactccagaaaagccatgccagctgggctcgttgacaaagggtaaaacatgctcactcccacccggtaatcatttttttctttttttaaaaaaagtttttattttttccaaactagtgcatgtataaataatggcaggatggggggtactgtgtagatgattaactgactttttaatattttgtaaataaatcggattccttgtgtcctttgtgctagtgtaacccgggactggaatgtaaagtgaagttcggagctctgagcacgggctcttcccgccgggtcctccctccccagaccccagagggagaggcccaccccgcccagccccgccccagcccctgctcaggtctgagtatggctgggagtcgggggccacaggcctctagctgtgctgctcaagagactggatcagggtagctacaagtggccgggccttgcctttgggattctacctgttcctaatttggtgtggggtgcggggtccctggccccttttccacactcctcctccgacagcagctccctgggcagtggcctggtctcaccgtgtgcagccttgtggtttatgcttaaatgtacattttcctgctggtaaaaggagaaactgagaggtgtcctgcagaccggctgaccactccttttggagacggcaggaggcctgagcgatccgtactcagaacgtccaggagagacgcatggcccgaagtcaaagtgctggaattttccaaaacagcctgttctctcctctctcctccccagagcaccccctgccatcaggggggttgaaatccctctcccccaggagccctgctgctttgcttggtggtagggcaggagagcaaacaaacagtcatggtctaaaacccacatagcactttgctcttagttacatgtaaaattttagatttctaaaacaggtgggcaatcattttgaatactgttctgtgaccctgactgctagttctgaggacactggtggctgtgctatgtgtggccatcctccatgtcccgtccctgtagctgctctgtttagacagcggacagacgctcacgcccaggggatgtcctcacgctgtcgccgcgcggtttcccttcgcagatgtgtatactcatgataggtcagaaagtgtatccgctacaataaagttctggttctaactaactccagccggagcggggtttgtcttctctcctgttttggttttaaacctacactcccttgtttctttttgagccgagaacataaaagaacataaaaaggctttttctttcttttcatctgcctttacttctcatttcaaggtttcacagagtgctggtctcaacccacatcagtgatacttaactaacttgccttccccagacagaaacatgaaatgacttaaaaaaatagaaaatattcttctcgccaggcacacaagactgtacacccaaaaccagaaacgctgtggctttgcaaagtgtgctcccacacccgcgcacacaggcgcacttaaataaataacgcgcacgcacggctttccccatttcgaaacaggcagacggtctagtgagtttcagcacttgctgggaacaggcgtgtggccagggaggtgccccgcgggtggcaatgactactgacggacccctggtgaatcagaacagagctggcacctgagccgctgagcgggcggctacttctggctctgttgagttttggaagacctttgagaaatcaacagcatcaccgggcaggtcctgagtccatggcctgatatgttaggatcacctgtgggctgctaaaagcccacagtcctagccccatctgcagagttagttggcttctgaaggctgggagaagccctagaacctgcatttctaaagctgctcaaatccaggcctttggaggcttaagactaagcctgcaccatttcaaactaagtatagtcagagagaaagatcccagcacgccccctcgttctcacacttctggtacctcagcactctcacagcaggttcccaaaggtgatggttctggaagagttctggcctcatccttttgttaaaacctgctttcagaggtggcttagacaatggcagagtgggccgggcgcggtggctcatgcctgtaatcccagcactttgggaggctcaggcgggtggatcacctgaggtcaggagttcgagaccagcccagccaacatggtgaaacccccgtctctactaaaatacaaaaattagctgggtacggtggtgcacacctgtaatcccagctactcaggaggctgaggcagaagaatcacttgaacctgggaggcggaggttacagtgagccaagattgcaccactgcactccagcctgggcaacagaggaagaccccatctcaaaaaaaaaaaaaaagatttttgagataatggcagagtattagcttctgacctgcttttgccttcatgcgtgaccggggtgagctacatgaggcccagatctctttaacacgtcctgaggaccagcgtagattctcctttatggggctgggcctgatctccccagccgtagaggtgtggtgagtcatctattattttcttacctgcaaacaaaatcactttacagtagagaaagatgagggaattctcgtacccaagacccacttgaaaagtggagagcaagcatccctgaatctagagggtaccccggctgcctcggggagctgccagaactcagtctagggaggatacacagggtgggtcgcacgaggatcgaggcatcctgtcggacagtaggcaccaggtgaccgccaggcgccaggacccaggcagtctggcgggaggcctgggaagaaggttccctcgggaggagaacagtctttgctgggcccagatccaccagctggaagacttggggtgacaatcctcagccgagagccaggtgcagcctcggggggcccagcaccgccgctgcatgaaggaggcgtttccgtttatggctgtttagctccttaaactatttcaagtcataaataaataaccagtgtaaacaaaaggcagccatgtcggttctttcccgttaggtgcagttcaggctcttcagcccctttaggaccaatgtgcttggtccccacgacccgcagccgcctcctcttgggcccagggctgggaggagccactactgcctgttgtctttggacacgttgtgggccagccagttcactttggttttccagctctcacggagggcttcgttaaacttcactcggaagtgcttcagtgcctcctcctctgttttccccagtgccagggagtccttgagatactggatgtctttggagcagctgagctcaggcaggcctgccgcccgcatcagggcaaagaggtggaggaagagaagcccgtggcgccgcaggatggtgtaggccctttcacagtagccccggaaccgttcaaatttctcactattattagtcttcccctgctgaatcacatggacaaagtcgtaggtgaggatgaatgggacacgctcgcggttgattccaaacttggtcttgaaattccccagaaagtggccaaaatcaatgtggaacagctgcccactctctcggatcatgatgttgtcgctgtgccgatcgccaatgcccagcacatatgtggccacacaatagccagcacaggagagggtgaactcctcaatggctcgatccagggcctcccccgggttcttggacttcagccagttgagcagggcatccttgttgaaggcggctgtggctgccatgttgctcttgttgagttggatgttggcgatggtgtctgaacggagtaccacctcaatgaggcctgtgcggtccccggtggggaggcagccatagggggtcatcctcaggtccagcccctcctgcttccacaggacgtccatgagctggatcatctgcagggtcagcatgtcctgccggaggtcatccccgttcttaaagatgatgcccacgctgccgccgctgcctgcctcctcgttgctgtacatgatccacaggggcttcatcttggagtccatgaaggtgcactgctccacgcagacttcagccagcagggtgctggggtcgagtggggactgcaggtgggagagggcctctaggtaggcctcctgccgcatgcacaagtgcatcagctccttggtctggggcttgggggtcttctgagagctcagcttgacgaagtcattcagggccttcagtttgctcagtgcttccccctgcttcatcagcaccttcatgtggtgggtgctgcccctgcagtaggcctccaggatgaggccgaagcgcagggccaccgacggcacgtgcatctcggagcggaggtgccagaaaaggaagtggccgatcttgcggttggccagggcccggtccagcaggaatttggtcagctcgcagtccaggtaggactcgtacttgagcacctgcaccagctgcagcaggtactggaacagctcatcgtccgtcagtttccgcagcgacttgatggcgaaggagcctacgtggcaatcggggaagctgaagtctagcagctccagggcgctcaggacgggcagctccggccaggagcacagcaggtagagcatctgggccacatcctcatgcttgttccacttggtgaccagcagcagccgggctagcgcctccgggaagtgctcctggacttcatgccgcagcttccacaccaggtccttctcgtgctcatacagctccccagacccccgccgctccaggatttcccgcagctgcagctgctcctcctcggtgacatgcacacactcgctgtgtcgccccagctccaagatcttctccagggcggggtagtacacggggtgcggggccacctcgggcaggcagatgagcagggcagcggcgctatccgtgttggggttactgcgcacagtgcccgtggggttcagcagctcgcccttctcatctgggacggagggccacatgtagaggcagcgttccccggtcttaagctggtccttgtagtcaaacagcatgaggttggcccaggcaatggggcagtccgccttcttggacttcttcttggtggagcgagccttcttggctttctcgatcacggcgtacagcgcaaagcagagacgggccatgcggggcaggtcgcagatgttgatgtcgaactccagccgctgcttccacacgggctccgagcacacgctcacctccgagctggacaccgtcttgcacagcatctcgttgccgtggaaaagcccggcctgcaccaccagcttcatccgctcgtcggcgttcactttgctgccctggatgagctcgatgcggaacggctgctccagggaccacagggacacagaggaaggcttcttcgcaggaatgggaggtggtttggcacgcggtttctggacctggggggcagggttgctctgctcatcccgcatggcgaggatggaggaggaatggaccatggtcaggtgaggggtcaacccactgtgcaggcagctgcagatgtactggaactggcagagcgggtagctgccatacaggtactcatgcctgccgttcacctgcagcgtgtagtcttccggctgctccaccagcggctgccggaacactgtggccttcttccgcagggcacaggccatcagcgccagcggcacgtccttggtggacacctggaaggtgaagctctcctcgctgccctcaaacttaacgttgaccagaagggcccggttcgggagccgcagggtaccaggcccccaggtttgagccgagggctccagctgcagggggaaactgtactgcagccaggcctcccagcccagctgctgccggcgggcggccgcctcctcgcagaattggcacatcttggcgcgaaagtcgttcacttctgggtcgcacaaggagtcaaactcgtggaggcctttgccgatgaggaggctgatctgtgagttgatgagcttcttcacgcggtcgccctcacgggccaccaggcgcaggacgggcaggaagggctgcacgtcacacagacgccgttgctcgtcctccagctcttgctgctccgctgtctggttgatgcaggtgaacacataggcctcggggccactgagcatgtggaagagcggctcatactgggcgcggtgccacagcagctgcttgatggtgctgaggttggcattgcgggacacagggaagttcaggtagacccctgtgggcagcaggaagtcaaccacaacgctctgattctcctccttggtccagaattccatggggcagtccaccccagggggcatcctgcgttgttacttcccagatgacagttgtcctctctggaatagtccaagaaagaccagcaaagccccctccgcctggcagattaaagatgctttagaatcaatgagtgtcatcccgccctggcctgactccttatcgtcccggcgcagctggcagggctgggcggctctgctcgcggccgctcgtgccgaattcgctgggcgcgaga

SEQ ID NO: 507120 - DNA, 9602 bp, Homo sapiens
gcgcgagttaacaagcacaagccctggctggagcccacctaccacggcatagtcacagagaacgacaacaccgtgctcctcgaccccccactgatcgcgctggataaagatgcgcctctgcgatttgcaggtgagatttgtggatttaaaattcacgggcagaatgtcccctttgatgcagtggtagtggataaatccactggtgagggagtcattcgctccaaagagaaactggactgtgagctgcagaaagactattcattcaccatccaggcctatgattgtgggaagggacctgatggcaccaacgtgaaaaagtctcataaagcaactgttcatattcaggtgaacgacgtgaatgagtacgcgcccgtgttcaaggagaagtcctacaaagccacggtcatcgaggggaagcagtacgacagcattttgagggtggaggccgtggatgccgactgctcccctcagttcagccagatttgcagctacgaaatcatcactccagacgtgccctttactgttgacaaagatggttatataaaaaacacagagaaattaaactacgggaaagaacatcaatataagctgaccgtcactgcctatgactgtgggaagaaaagagccacagaagatgttttggtgaagatcagcattaagcccacctgcacccctgggtggcaaggatggaacaacaggattgagtatgagccgggcaccggcgcgttggccgtctttccaaatatccacctggagacatgtgacgagccagtcgcctcagtacaggccacagtggagctagaaaccagccacatagggaaaggctgcgaccgagacacctactcagagaagtccctccaccggctctgtggtgcggccgcgggcactgccgagctgctgccatccccgagtggatccctcaactggaccatgggcctgcccaccgacaatggccacgacagcgaccaggtgtttgagttcaacggcacccaggcagtgaggatcccggatggcgtcgtgtcggtcagccccaaagagccgttcaccatctcggtgtggatgagacatgggccattcggcaggaagaaggagacaattctttgcagttctgataaaacagatatgaatcggcaccactactccctctatgtccacgggtgccggctgatcttcctcttccgtcaggatccttctgaggagaagaaatacagacctgcagagttccactggaagttgaatcaggtctgtgatgaggaatggcaccactacgtcctcaatgtagaattcccgagtgtgactctctatgtggatggcacgtcccacgagcccttctctgtgactgaggattacccgctccatccatccaagatagaaactcagctcgtggtgggggcttgctggcaagagttttcaggagttgaaaatgacaatgaaactgagcctgtgactgtggcctctgcaggtggcgacctgcacatgacccagtttttccgaggcaatctggctggcttaactctccgttccgggaaactcgcggataagaaggtgatcgactgtctgtatacctgcaaggaggggctggacctgcaggtcctcgaagacagtggcagaggcgtgcagatccaagcacaccccagccagttggtattgaccttggagggagaagacctcggggaattggataaggccatgcagcacatctcgtacctgaactcccggcagttccccacgcccggaattcgcagactcaaaatcaccagcacaatcaagtgttttaacgaggccacctgcatttcggtccccccggtagatggctacgtgatggttttacagcccgaggagcccaagatcagcctgagtggcgtccaccattttgcccgagcagcttctgaatttgaaagctcagaaggggtgttccttttccctgagcttcgcatcatcagcaccatcacgagagaagtggagcctgaaggggacggggctgaggaccccacagttcaagaatcactggtgtccgaggagatcgtgcacgacctggatacctgtgaggtcacggtggagggagaggagctgaaccacgagcaggagagcctggaggtggacatggcccgcctgcagcagaagggcattgaagtgagcagctctgaactgggcatgaccttcacaggcgtggacaccatggccagctacgaggaggttttgcacctgctgcgctatcggaactggcatgccaggtccttgcttgaccggaagtttaagctcatctgctcagagctgaatggccgctacatcagcaacgaatttaaggtggaggtgaatgtaatccacacggccaaccccatggaacacgccaaccacatggctgcccagccacagttcgtgcacccggaacaccgctcctttgttgacctgtcaggccacaacctggccaacccccacccgttcgcagtcgtccccagcactgcgacagttgtgatcgtggtgtgcgtcagcttcctggtgttcatgattatcctgggggtatttcggatccgggccgcacatcggcggaccatgcgggatcaggacaccgggaaggagaacgagatggactgggacgactctgccctgaccatcaccgtcaaccccatggagacctatgaggaccagcacagcagtgaggaggaggaggaagaggaagaggaagaggaaagcgaggacggcgaagaagaggatgacatcaccagcgccgagtcggagagcagcgaggaggaggagggggagcagggcgacccccagaacgcaacccggcagcagcagctggagtgggatgactccaccctcagctactgacccgtgccccccatccgttctcccagtcccaagggtccacgatgtacaaagtcatttcggccagtaggtgtgcagacccctccccgccacgatcgtcgctgtgcttggtgtgtaggaccctaggctccccgcccaccctctgcctggtcgcgctcttcagtcccacgaggagctgacacgtcctctctggccgccatccggctcgcacaggggcctcccagcgcctcaggccccgcgtttgtgtctggagtctccccccggggagaggacactggcccctcgcactccagaaaagccatgccagctgggctcgttgacaaagggtaaaacatgctcactcccacccggtaatcatttttttctttttttaaaaaaagtttttattttttccaaactagtgcatgtataaataatggcaggatggggggtactgtgtagatgattaactgactttttaatattttgtaaataaatcggattccttgtgtcctttgtgctagtgtaacccgggactggaatgtaaagtgaagttcggagctctgagcacgggctcttcccgccgggtcctccctccccagaccccagagggagaggcccaccccgcccagccccgccccagcccctgctcaggtctgagtatggctgggagtcgggggccacaggcctctagctgtgctgctcaagagactggatcagggtagctacaagtggccgggccttgcctttgggattctacctgttcctaatttggtgtggggtgcggggtccctggccccttttccacactcctcctccgacagcagctccctgggcagtggcctggtctcaccgtgtgcagccttgtggtttatgcttaaatgtacattttcctgctggtaaaaggagaaactgagaggtgtcctgcagaccggctgaccactccttttggagacggcaggaggcctgagcgatccgtactcagaacgtccaggagagacgcatggcccgaagtcaaagtgctggaattttccaaaacagcctgttctctcctctctcctccccagagcaccccctgccatcaggggggttgaaatccctctcccccaggagccctgctgctttgcttggtggtagggcaggagagcaaacaaacagtcatggtctaaaacccacatagcactttgctcttagttacatgtaaaattttagatttctaaaacaggtgggcaatcattttgaatactgttctgtgaccctgactgctagttctgaggacactggtggctgtgctatgtgtggccatcctccatgtcccgtccctgtagctgctctgtttagacagcggacagacgctcacgcccaggggatgtcctcacgctgtcgccgcgcggtttcccttcgcagatgtgtatactcatgataggtcagaaagtgtatccgctacaataaagttctggttctaactaactccagccggagcggggtttgtcttctctcctgttttggttttaaacctacactcccttgtttctttttgagccgagaacataaaagaacataaaaaggctttttctttcttttcatctgcctttacttctcatttcaaggtttcacagagtgctggtctcaacccacatcagtgatacttaactaacttgccttccccagacagaaacatgaaatgacttaaaaaaatagaaaatattcttctcgccaggcacacaagactgtacacccaaaaccagaaacgctgtggctttgcaaagtgtgctcccacacccgcgcacacaggcgcacttaaataaataacgcgcacgcacggctttccccatttcgaaacaggcagacggtctagtgagtttcagcacttgctgggaacaggcgtgtggccagggaggtgccccgcgggtggcaatgactactgacggacccctggtgaatcagaacagagctggcacctgagccgctgagcgggcggctacttctggctctgttgagttttggaagacctttgagaaatcaacagcatcaccgggcaggtcctgagtccatggcctgatatgttaggatcacctgtgggctgctaaaagcccacagtcctagccccatctgcagagttagttggcttctgaaggctgggagaagccctagaacctgcatttctaaagctgctcaaatccaggcctttggaggcttaagactaagcctgcaccatttcaaactaagtatagtcagagagaaagatcccagcacgccccctcgttctcacacttctggtacctcagcactctcacagcaggttcccaaaggtgatggttctggaagagttctggcctcatccttttgttaaaacctgctttcagaggtggcttagacaatggcagagtgggccgggcgcggtggctcatgcctgtaatcccagcactttgggaggctcaggcgggtggatcacctgaggtcaggagttcgagaccagcccagccaacatggtgaaacccccgtctctactaaaatacaaaaattagctgggtacggtggtgcacacctgtaatcccagctactcaggaggctgaggcagaagaatcacttgaacctgggaggcggaggttacagtgagccaagattgcaccactgcactccagcctgggcaacagaggaagaccccatctcaaaaaaaaaaaaaaagatttttgagataatggcagagtattagcttctgacctgcttttgccttcatgcgtgaccggggtgagctacatgaggcccagatctctttaacacgtcctgaggaccagcgtagattctcctttatggggctgggcctgatctccccagccgtagaggtgtggtgagtcatctattattttcttacctgcaaacaaaatcactttacagtagagaaagatgagggaattctcgtacccaagacccacttgaaaagtggagagcaagcatccctgaatctagagggtaccccggctgcctcggggagctgccagaactcagtctagggaggatacacagggtgggtcgcacgaggatcgaggcatcctgtcggacagtaggcaccaggtgaccgccaggcgccaggacccaggcagtctggcgggaggcctgggaagaaggttccctcgggaggagaacagtctttgctgggcccagatccaccagctggaagacttggggtgacaatcctcagccgagagccaggtgcagcctcggggggcccagcaccgccgctgcatgaaggaggcgtttccgtttatggctgtttagctccttaaactatttcaagtcataaataaataaccagtgtaaacaaaaggcagccatgtcggttctttcccgttaggtgcagttcaggctcttcagcccctttaggaccaatgtgcttggtccccacgacccgcagccgcctcctcttgggcccagggctgggaggagccactactgcctgttgtctttggacacgttgtgggccagccagttcactttggttttccagctctcacggagggcttcgttaaacttcactcggaagtgcttcagtgcctcctcctctgttttccccagtgccagggagtccttgagatactggatgtctttggagcagctgagctcaggcaggcctgccgcccgcatcagggcaaagaggtggaggaagagaagcccgtggcgccgcaggatggtgtaggccctttcacagtagccccggaaccgttcaaatttctcactattattagtcttcccctgctgaatcacatggacaaagtcgtaggtgaggatgaatgggacacgctcgcggttgattccaaacttggtcttgaaattccccagaaagtggccaaaatcaatgtggaacagctgcccactctctcggatcatgatgttgtcgctgtgccgatcgccaatgcccagcacatatgtggccacacaatagccagcacaggagagggtgaactcctcaatggctcgatccagggcctcccccgggttcttggacttcagccagttgagcagggcatccttgttgaaggcggctgtggctgccatgttgctcttgttgagttggatgttggcgatggtgtctgaacggagtaccacctcaatgaggcctgtgcggtccccggtggggaggcagccatagggggtcatcctcaggtccagcccctcctgcttccacaggacgtccatgagctggatcatctgcagggtcagcatgtcctgccggaggtcatccccgttcttaaagatgatgcccacgctgccgccgctgcctgcctcctcgttgctgtacatgatccacaggggcttcatcttggagtccatgaaggtgcactgctccacgcagacttcagccagcagggtgctggggtcgagtggggactgcaggtgggagagggcctctaggtaggcctcctgccgcatgcacaagtgcatcagctccttggtctggggcttgggggtcttctgagagctcagcttgacgaagtcattcagggccttcagtttgctcagtgcttccccctgcttcatcagcaccttcatgtggtgggtgctgcccctgcagtaggcctccaggatgaggccgaagcgcagggccaccgacggcacgtgcatctcggagcggaggtgccagaaaaggaagtggccgatcttgcggttggccagggcccggtccagcaggaatttggtcagctcgcagtccaggtaggactcgtacttgagcacctgcaccagctgcagcaggtactggaacagctcatcgtccgtcagtttccgcagcgacttgatggcgaaggagcctacgtggcaatcggggaagctgaagtctagcagctccagggcgctcaggacgggcagctccggccaggagcacagcaggtagagcatctgggccacatcctcatgcttgttccacttggtgaccagcagcagccgggctagcgcctccgggaagtgctcctggacttcatgccgcagcttccacaccaggtccttctcgtgctcatacagctccccagacccccgccgctccaggatttcccgcagctgcagctgctcctcctcggtgacatgcacacactcgctgtgtcgccccagctccaagatcttctccagggcggggtagtacacggggtgcggggccacctcgggcaggcagatgagcagggcagcggcgctatccgtgttggggttactgcgcacagtgcccgtggggttcagcagctcgcccttctcatctgggacggagggccacatgtagaggcagcgttccccggtcttaagctggtccttgtagtcaaacagcatgaggttggcccaggcaatggggcagtccgccttcttggacttcttcttggtggagcgagccttcttggctttctcgatcacggcgtacagcgcaaagcagagacgggccatgcggggcaggtcgcagatgttgatgtcgaactccagccgctgcttccacacgggctccgagcacacgctcacctccgagctggacaccgtcttgcacagcatctcgttgccgtggaaaagcccggcctgcaccaccagcttcatccgctcgtcggcgttcactttgctgccctggatgagctcgatgcggaacggctgctccagggaccacagggacacagaggaaggcttcttcgcaggaatgggaggtggtttggcacgcggtttctggacctggggggcagggttgctctgctcatcccgcatggcgaggatggaggaggaatggaccatggtcaggtgaggggtcaacccactgtgcaggcagctgcagatgtactggaactggcagagcgggtagctgccatacaggtactcatgcctgccgttcacctgcagcgtgtagtcttccggctgctccaccagcggctgccggaacactgtggccttcttccgcagggcacaggccatcagcgccagcggcacgtccttggtggacacctggaaggtgaagctctcctcgctgccctcaaacttaacgttgaccagaagggcccggttcgggagccgcagggtaccaggcccccaggtttgagccgagggctccagctgcagggggaaactgtactgcagccaggcctcccagcccagctgctgccggcgggcggccgcctcctcgcagaattggcacatcttggcgcgaaagtcgttcacttctgggtcgcacaaggagtcaaactcgtggaggcctttgccgatgaggaggctgatctgtgagttgatgagcttcttcacgcggtcgccctcacgggccaccaggcgcaggacgggcaggaagggctgcacgtcacacagacgccgttgctcgtcctccagctcttgctgctccgctgtctggttgatgcaggtgaacacataggcctcggggccactgagcatgtggaagagcggctcatactgggcgcggtgccacagcagctgcttgatggtgctgaggttggcattgcgggacacagggaagttcaggtagacccctgtgggcagcaggaagtcaaccacaacgctctgattctcctccttggtccagaattccatggggcagtccaccccagggggcatcctgcgttgttacttcccagatgacagttgtcctctctggaatagtccaagaaagaccagcaaagccccctccgcctggcagattaaagatgctttagaatcaatgagtgtcatcccgccctggcctgactccttatcgtcccggcgcagctggcagggctgggcggctctgctcgcggccgctcgtgccgaattcgctgggcgcgaga

SEQ ID NO: 507121 - DNA, 9423 bp, Homo sapiens
gcgcgagttaacaagcacaagccctggctggagcccacctaccacggcatagtcacagagaacgacaacaccgtgctcctcgaccccccactgatcgcgctggataaagatgcgcctctgcgatttgcaggtgaacgacgtgaatgagtacgcgcccgtgttcaaggagaagtcctacaaagccacggtcatcgaggggaagcagtacgacagcattttgagggtggaggccgtggatgccgactgctcccctcagttcagccagatttgcagctacgaaatcatcactccagacgtgccctttactgttgacaaagatggttatataaaaaacacagagaaattaaactacgggaaagaacatcaatataagctgaccgtcactgcctatgactgtgggaagaaaagagccacagaagatgttttggtgaagatcagcattaagcccacctgcacccctgggtggcaaggatggaacaacaggattgagtatgagccgggcaccggcgcgttggccgtctttccaaatatccacctggagacatgtgacgagccagtcgcctcagtacaggccacagtggagctagaaaccagccacatagggaaaggctgcgaccgagacacctactcagagaagtccctccaccggctctgtggtgcggccgcgggcactgccgagctgctgccatccccgagtggatccctcaactggaccatgggcctgcccaccgacaatggccacgacagcgaccaggtgtttgagttcaacggcacccaggcagtgaggatcccggatggcgtcgtgtcggtcagccccaaagagccgttcaccatctcggtgtggatgagacatgggccattcggcaggaagaaggagacaattctttgcagttctgataaaacagatatgaatcggcaccactactccctctatgtccacgggtgccggctgatcttcctcttccgtcaggatccttctgaggagaagaaatacagacctgcagagttccactggaagttgaatcaggtctgtgatgaggaatggcaccactacgtcctcaatgtagaattcccgagtgtgactctctatgtggatggcacgtcccacgagcccttctctgtgactgaggattacccgctccatccatccaagatagaaactcagctcgtggtgggggcttgctggcaagagttttcaggagttgaaaatgacaatgaaactgagcctgtgactgtggcctctgcaggtggcgacctgcacatgacccagtttttccgaggcaatctggctggcttaactctccgttccgggaaactcgcggataagaaggtgatcgactgtctgtatacctgcaaggaggggctggacctgcaggtcctcgaagacagtggcagaggcgtgcagatccaagcacaccccagccagttggtattgaccttggagggagaagacctcggggaattggataaggccatgcagcacatctcgtacctgaactcccggcagttccccacgcccggaattcgcagactcaaaatcaccagcacaatcaagtgttttaacgaggccacctgcatttcggtccccccggtagatggctacgtgatggttttacagcccgaggagcccaagatcagcctgagtggcgtccaccattttgcccgagcagcttctgaatttgaaagctcagaaggggtgttccttttccctgagcttcgcatcatcagcaccatcacgagagaagtggagcctgaaggggacggggctgaggaccccacagttcaagaatcactggtgtccgaggagatcgtgcacgacctggatacctgtgaggtcacggtggagggagaggagctgaaccacgagcaggagagcctggaggtggacatggcccgcctgcagcagaagggcattgaagtgagcagctctgaactgggcatgaccttcacaggcgtggacaccatggccagctacgaggaggttttgcacctgctgcgctatcggaactggcatgccaggtccttgcttgaccggaagtttaagctcatctgctcagagctgaatggccgctacatcagcaacgaatttaaggtggaggtgaatgtaatccacacggccaaccccatggaacacgccaaccacatggctgcccagccacagttcgtgcacccggaacaccgctcctttgttgacctgtcaggccacaacctggccaacccccacccgttcgcagtcgtccccagcactgcgacagttgtgatcgtggtgtgcgtcagcttcctggtgttcatgattatcctgggggtatttcggatccgggccgcacatcggcggaccatgcgggatcaggacaccgggaaggagaacgagatggactgggacgactctgccctgaccatcaccgtcaaccccatggagacctatgaggaccagcacagcagtgaggaggaggaggaagaggaagaggaagaggaaagcgaggacggcgaagaagaggatgacatcaccagcgccgagtcggagagcagcgaggaggaggagggggagcagggcgacccccagaacgcaacccggcagcagcagctggagtgggatgactccaccctcagctactgacccgtgcccccggccacctcggtttctgctttcgaagactctgctgccatccgttctcccagtcccaagggtccacgatgtacaaagtcatttcggccagtaggtgtgcagacccctccccgccacgatcgtcgctgtgcttggtgtgtaggaccctaggctccccgcccaccctctgcctggtcgcgctcttcagtcccacgaggagctgacacgtcctctctggccgccatccggctcgcacaggggcctcccagcgcctcaggccccgcgtttgtgtctggagtctccccccggggagaggacactggcccctcgcactccagaaaagccatgccagctgggctcgttgacaaagggtaaaacatgctcactcccacccggtaatcatttttttctttttttaaaaaaagtttttattttttccaaactagtgcatgtataaataatggcaggatggggggtactgtgtagatgattaactgactttttaatattttgtaaataaatcggattccttgtgtcctttgtgctagtgtaacccgggactggaatgtaaagtgaagttcggagctctgagcacgggctcttcccgccgggtcctccctccccagaccccagagggagaggcccaccccgcccagccccgccccagcccctgctcaggtctgagtatggctgggagtcgggggccacaggcctctagctgtgctgctcaagagactggatcagggtagctacaagtggccgggccttgcctttgggattctacctgttcctaatttggtgtggggtgcggggtccctggccccttttccacactcctcctccgacagcagctccctgggcagtggcctggtctcaccgtgtgcagccttgtggtttatgcttaaatgtacattttcctgctggtaaaaggagaaactgagaggtgtcctgcagaccggctgaccactccttttggagacggcaggaggcctgagcgatccgtactcagaacgtccaggagagacgcatggcccgaagtcaaagtgctggaattttccaaaacagcctgttctctcctctctcctccccagagcaccccctgccatcaggggggttgaaatccctctcccccaggagccctgctgctttgcttggtggtagggcaggagagcaaacaaacagtcatggtctaaaacccacatagcactttgctcttagttacatgtaaaattttagatttctaaaacaggtgggcaatcattttgaatactgttctgtgaccctgactgctagttctgaggacactggtggctgtgctatgtgtggccatcctccatgtcccgtccctgtagctgctctgtttagacagcggacagacgctcacgcccaggggatgtcctcacgctgtcgccgcgcggtttcccttcgcagatgtgtatactcatgataggtcagaaagtgtatccgctacaataaagttctggttctaactaactccagccggagcggggtttgtcttctctcctgttttggttttaaacctacactcccttgtttctttttgagccgagaacataaaagaacataaaaaggctttttctttcttttcatctgcctttacttctcatttcaaggtttcacagagtgctggtctcaacccacatcagtgatacttaactaacttgccttccccagacagaaacatgaaatgacttaaaaaaatagaaaatattcttctcgccaggcacacaagactgtacacccaaaaccagaaacgctgtggctttgcaaagtgtgctcccacacccgcgcacacaggcgcacttaaataaataacgcgcacgcacggctttccccatttcgaaacaggcagacggtctagtgagtttcagcacttgctgggaacaggcgtgtggccagggaggtgccccgcgggtggcaatgactactgacggacccctggtgaatcagaacagagctggcacctgagccgctgagcgggcggctacttctggctctgttgagttttggaagacctttgagaaatcaacagcatcaccgggcaggtcctgagtccatggcctgatatgttaggatcacctgtgggctgctaaaagcccacagtcctagccccatctgcagagttagttggcttctgaaggctgggagaagccctagaacctgcatttctaaagctgctcaaatccaggcctttggaggcttaagactaagcctgcaccatttcaaactaagtatagtcagagagaaagatcccagcacgccccctcgttctcacacttctggtacctcagcactctcacagcaggttcccaaaggtgatggttctggaagagttctggcctcatccttttgttaaaacctgctttcagaggtggcttagacaatggcagagtgggccgggcgcggtggctcatgcctgtaatcccagcactttgggaggctcaggcgggtggatcacctgaggtcaggagttcgagaccagcccagccaacatggtgaaacccccgtctctactaaaatacaaaaattagctgggtacggtggtgcacacctgtaatcccagctactcaggaggctgaggcagaagaatcacttgaacctgggaggcggaggttacagtgagccaagattgcaccactgcactccagcctgggcaacagaggaagaccccatctcaaaaaaaaaaaaaaagatttttgagataatggcagagtattagcttctgacctgcttttgccttcatgcgtgaccggggtgagctacatgaggcccagatctctttaacacgtcctgaggaccagcgtagattctcctttatggggctgggcctgatctccccagccgtagaggtgtggtgagtcatctattattttcttacctgcaaacaaaatcactttacagtagagaaagatgagggaattctcgtacccaagacccacttgaaaagtggagagcaagcatccctgaatctagagggtaccccggctgcctcggggagctgccagaactcagtctagggaggatacacagggtgggtcgcacgaggatcgaggcatcctgtcggacagtaggcaccaggtgaccgccaggcgccaggacccaggcagtctggcgggaggcctgggaagaaggttccctcgggaggagaacagtctttgctgggcccagatccaccagctggaagacttggggtgacaatcctcagccgagagccaggtgcagcctcggggggcccagcaccgccgctgcatgaaggaggcgtttccgtttatggctgtttagctccttaaactatttcaagtcataaataaataaccagtgtaaacaaaaggcagccatgtcggttctttcccgttaggtgcagttcaggctcttcagcccctttaggaccaatgtgcttggtccccacgacccgcagccgcctcctcttgggcccagggctgggaggagccactactgcctgttgtctttggacacgttgtgggccagccagttcactttggttttccagctctcacggagggcttcgttaaacttcactcggaagtgcttcagtgcctcctcctctgttttccccagtgccagggagtccttgagatactggatgtctttggagcagctgagctcaggcaggcctgccgcccgcatcagggcaaagaggtggaggaagagaagcccgtggcgccgcaggatggtgtaggccctttcacagtagccccggaaccgttcaaatttctcactattattagtcttcccctgctgaatcacatggacaaagtcgtaggtgaggatgaatgggacacgctcgcggttgattccaaacttggtcttgaaattccccagaaagtggccaaaatcaatgtggaacagctgcccactctctcggatcatgatgttgtcgctgtgccgatcgccaatgcccagcacatatgtggccacacaatagccagcacaggagagggtgaactcctcaatggctcgatccagggcctcccccgggttcttggacttcagccagttgagcagggcatccttgttgaaggcggctgtggctgccatgttgctcttgttgagttggatgttggcgatggtgtctgaacggagtaccacctcaatgaggcctgtgcggtccccggtggggaggcagccatagggggtcatcctcaggtccagcccctcctgcttccacaggacgtccatgagctggatcatctgcagggtcagcatgtcctgccggaggtcatccccgttcttaaagatgatgcccacgctgccgccgctgcctgcctcctcgttgctgtacatgatccacaggggcttcatcttggagtccatgaaggtgcactgctccacgcagacttcagccagcagggtgctggggtcgagtggggactgcaggtgggagagggcctctaggtaggcctcctgccgcatgcacaagtgcatcagctccttggtctggggcttgggggtcttctgagagctcagcttgacgaagtcattcagggccttcagtttgctcagtgcttccccctgcttcatcagcaccttcatgtggtgggtgctgcccctgcagtaggcctccaggatgaggccgaagcgcagggccaccgacggcacgtgcatctcggagcggaggtgccagaaaaggaagtggccgatcttgcggttggccagggcccggtccagcaggaatttggtcagctcgcagtccaggtaggactcgtacttgagcacctgcaccagctgcagcaggtactggaacagctcatcgtccgtcagtttccgcagcgacttgatggcgaaggagcctacgtggcaatcggggaagctgaagtctagcagctccagggcgctcaggacgggcagctccggccaggagcacagcaggtagagcatctgggccacatcctcatgcttgttccacttggtgaccagcagcagccgggctagcgcctccgggaagtgctcctggacttcatgccgcagcttccacaccaggtccttctcgtgctcatacagctccccagacccccgccgctccaggatttcccgcagctgcagctgctcctcctcggtgacatgcacacactcgctgtgtcgccccagctccaagatcttctccagggcggggtagtacacggggtgcggggccacctcgggcaggcagatgagcagggcagcggcgctatccgtgttggggttactgcgcacagtgcccgtggggttcagcagctcgcccttctcatctgggacggagggccacatgtagaggcagcgttccccggtcttaagctggtccttgtagtcaaacagcatgaggttggcccaggcaatggggcagtccgccttcttggacttcttcttggtggagcgagccttcttggctttctcgatcacggcgtacagcgcaaagcagagacgggccatgcggggcaggtcgcagatgttgatgtcgaactccagccgctgcttccacacgggctccgagcacacgctcacctccgagctggacaccgtcttgcacagcatctcgttgccgtggaaaagcccggcctgcaccaccagcttcatccgctcgtcggcgttcactttgctgccctggatgagctcgatgcggaacggctgctccagggaccacagggacacagaggaaggcttcttcgcaggaatgggaggtggtttggcacgcggtttctggacctggggggcagggttgctctgctcatcccgcatggcgaggatggaggaggaatggaccatggtcaggtgaggggtcaacccactgtgcaggcagctgcagatgtactggaactggcagagcgggtagctgccatacaggtactcatgcctgccgttcacctgcagcgtgtagtcttccggctgctccaccagcggctgccggaacactgtggccttcttccgcagggcacaggccatcagcgccagcggcacgtccttggtggacacctggaaggtgaagctctcctcgctgccctcaaacttaacgttgaccagaagggcccggttcgggagccgcagggtaccaggcccccaggtttgagccgagggctccagctgcagggggaaactgtactgcagccaggcctcccagcccagctgctgccggcgggcggccgcctcctcgcagaattggcacatcttggcgcgaaagtcgttcacttctgggtcgcacaaggagtcaaactcgtggaggcctttgccgatgaggaggctgatctgtgagttgatgagcttcttcacgcggtcgccctcacgggccaccaggcgcaggacgggcaggaagggctgcacgtcacacagacgccgttgctcgtcctccagctcttgctgctccgctgtctggttgatgcaggtgaacacataggcctcggggccactgagcatgtggaagagcggctcatactgggcgcggtgccacagcagctgcttgatggtgctgaggttggcattgcgggacacagggaagttcaggtagacccctgtgggcagcaggaagtcaaccacaacgctctgattctcctccttggtccagaattccatggggcagtccaccccagggggcatcctgcgttgttacttcccagatgacagttgtcctctctggaatagtccaagaaagaccagcaaagccccctccgcctggcagattaaagatgctttagaatcaatgagtgtcatcccgccctggcctgactccttatcgtcccggcgcagctggcagggctgggcggctctgctcgcggccgctcgtgccgaattcgctgggcgcgaga

SEQ ID NO: 507122 - DNA, 960 bp, Homo sapiens
ggtcttcaacgccagaggaggtgaaggaagcgctggaaggcggtgctcttctgcctgatgctgagtggacaataatgaacatcatcctggaggagggcaaggagatcctggtgggcgatgtgggtcagactgtcgatgacccctacgccaccttggtcaagatgctgccagataaggactgccggtcgtatgcctctctatgatgcaagaggctatgagaaccagagggagtagcaagaagtgcaggcatctggtgtttatcttctgggtcccccgtagctctgcgtcccctataagagcaagaatgatttatgccagactccaaggacgccatcaagaagaagctgagagggatcaagcatgaattgctaaagcaaaagtgctacgtaggagggtcacaggatcgctgtcgtgcaaccactggctagtagatagctggggtgggcagtgccgtgccatctccctggagggggcaagcctttgtgagccccttctgggccccctgcctggtgtcatctgggcaggccccagcacctgtccttgggggttgcaggctggccccttacctgcctcgtaacggagggggctggggggatcgcagtaggggggaggtgcgatccctttcacccccagtttgggccagtacatgaagcaccaaatccgctggattttttctctgtctcgccctccatgcccttggattgggcttctgggcttcccacaaggtgtttgttgatcgggaggaatgcctgcttggcgtcttgaagcagagccatcgttcccccccgagggggccccatttcgtgaggggtggctgagctcgaacttgctccccgttgcgcaacctgggcttcccccttcgcgcggcgggcccgttctcatcgctgtgagtccgcgtggcgggccatctggcgcccaggattcgcgcggtttcgcgctgtcgggggcccccttccggcg

SEQ ID NO: 507123 - DNA, 916 bp, Homo sapiens
  misc_feature (428)..(428): n is a, c, g, or t
gcgtcgagaccttgttgccatgcagcttgtccctttatatgaaattgtcatgctttacgtcagaggacgtggcatgactgcgtcttccactcgattggatagtgtggatcccgcgcagtggcttcagtgctctctacgcgcctattccgggacgccacaagatacatggaatggacacacatgtagaggatatctcgatggtctgaatctgggcacaccaagcatcgatttacggatagtagctgcgactgcaaagaagcgaagactgccgactgcagcccgtatacatcgggccgttcgcctctgctggcaccgtgtgggagcggagaaatctcttgaatgatccccgtggtcattcgatcgggaatcctgtctggaccgtatccgtgccaagacccattttggcaccatgcatatttcggtggtangggagcgaacgatgcggcaacccgaatggcctggctaggcgaccttatagtcgcctggggatggtactcgcatctcccgtcattgggaccggacatttctcatagaccgatgacttggccaaaataagtcgccgctacatgaagcacggcaacgtgcaagggatgactacgataggccgcacctggagtgcagaaggcgtcctcctatacgtttcccgaaagccagaaggcaagcagaccttctgtgccatgtgaggatcgcatcacccaaggcacggcctgtgtaggaccctccgcgtccaaacaacagaacgcgtgagatgtcatgggcgctccatcaaaacctcaggtgcgctgggtcgcagggccccccagcgcgtccagaagcaatgacttggagctcaccaacgtgtgtccacagtaaaagtagcatcccaagagcgccaaaaagaacagaccctaggggggcggggcgccctgaagaggga

SEQ ID NO: 507124 - DNA, 437 bp, Homo sapiens
  misc_feature (68)..(68): n is a, c, g, or t
  misc_feature (430)..(430): n is a, c, g, or t
gatatatatgtaccatttttcaatccatgtaaacatttagattttacctcattttaaagtcattaaanatcatcccagcaaacaaaaattttcccagaaatttttttccacaattacagttttagtctttaaacccaaaatgaaaaaatttctgccgggcatggtggctcacacctgtaatcccagcactttgggaggtcaaggtgggtggatcacctgaggtcaggagttcggagccagcctggccaacgtggtgaaaccctgtctctaccaaaaatacaaaaattagcccagcgtgatggcccacctgtagtctcagctactcgggagactgaggcagaagaatcatttgaaccccaggaggcagagattgcagtgagccgagatcacgccactgcactccagcctgggtgacagagtgagaccctgnctcaaaa

SEQ ID NO: 507125 - DNA, 800 bp, Homo sapiens
ggatgggcgtgctttccgaatccgagaaggaagccttggggggtcaggccctctatcctcatgtcctggtgaagaattgcgcagtggagttcaacttcggactagagagcagtagccctacgtgttcttgtccgtcaccgggggtttaccgttcatccgagcgacgcttccccttagttgagtcgtatccggggtcaccgtttggaccaaagagcatggcagaatgtgagattctgatgatggtgggcctgctggtgctggcaagaccacagtgggccatcaacacatgcagtcctccgagaggccttccaagaagtacaacatcctgggtaccaatgccatcatggatcagatgcgggtgatgggcctacgccggcagcggaactatgctggtgcgctgggatgtcctgatccagcaggtcaaccagtgcctcaaccggctcatccagattgctagccgcaagaagacgcaactatatcctagatcagacaaatgtttatgggtcagcccagagacgaagaaatgagaccatttgaaggcttccagctgcaaagctatcgtcattggtcccacgtgacgaggacctaaaagaccgaacaataaagcgaatcgacgaggaagggcaggatgtcccaggatcatgcggtcttagaagatgacagccaacttcacgttgccagatgttgggggacttcctggatgaggtactgtgcattgagctgcagcgggaccgaagcggacaaagctagtgaagcagcacaacgaggaaatgccggaagtctgggcaccccctgaaaag

SEQ ID NO: 507126 - DNA, 851 bp, Homo sapiens
tgggaacgccccggcaacatgggccaaactggcagggcccggagcagggcgccttcgtccacagactccctccaggggcacagttacaccacaccagcaccccctttcttggacactggggcaaagggtgtgtaggtcattacaagacaagcctggtcgtggagaagggcaagagaaatgagatgtgtggcacaggagatgtgaaactcacaagaaagggccaaaatcctccatccaggggcaagcgtgcgtgaaccaccaaaggacggccgaagaccctcgtgggagaaagtagaagaggggcacaatacccataataggtcataacactcaccaaaggagaagtgtaattcggggatagaatacctatctttctccacaattccagtgcccgagtgccaagaaatttcccagaggctctatttccaattcaagatatcgtgattccacagatgaacattcatatcgcgcatccccaattgttgcccgatcccctatacatctcgaataaacccgtctcgcaccgtggggagaacatcgtgaccgtggccccaggacaacagtgacatcaatataccaccaaaaatgtgaagataacgtgggggggacaacgtgaagagaggatccccccaatgaggagagaggtgatccataaacacccaaaagaagtgccccctcaccctttgaatgggcagagccccatccaaaaaatcccaaaaatggtgcacaacaccccgtgtggccaaggcctcagtgcccgacaacccttgaaagagataacctacaaaagtaacgtaggaatgaaccaatcaagagaggcaacccttgggtgtggaaaaatgcgaaaaaaa

SEQ ID NO: 507127 - DNA, 220 bp, Homo sapiens
ttgggccggggggggggggggggggcaattaccccttaaaaatggtttttttaccccccacccaaaagcggggaaaaccaatgggaaatggggggggggggggggggaaaaggggccccccccccccccgggggttttttgggtttttttcccttttgggattttttttcccaaccccccaaaggcccttaaaggtttataaaccccggccttttccgga

SEQ ID NO: 507128 - DNA, 452 bp, Homo sapiens
  misc_feature (1)..(1): n is a, c, g, or t
  misc_feature (3)..(3): n is a, c, g, or t
nanttcggcacaggtggaattaaaagttcctgaccttggccgggcgtggtggcttatgcggtaatcccagcactttgggaggctgaggcgggcggatcacctgaggtcagcagtttgagaccagcctggccaacatggtgaaaccttgtctctactaaaaatacagaaattagccaggcatggtggtggacacctgtagtcgtagctactcaggaggccgaggcatgagaatcacttgaagtcgagaggcggaggttgcagtgagctgagatcgcgccactgcactccagcctgggcgacagagcgagatgccatctcaaagaaaaaacaaaaagttcctgaccttttccacacaggtcctcgtggtccgcggacttccagagtggttctagctttctatttaatattcacacagtttttccttattttaagttatggcaaagggtcgtgtg

SEQ ID NO: 507129 - DNA, 322 bp, Homo sapiens
  misc_feature (144)..(144): n is a, c, g, or t
gtgacttagaggattttgacagcatcctaaccagaagacataatgtgaagcaggcctgtgcagagcagtgactcagagcctttcccggcagagggaacgcaatcaaatgctggctgctgcttcctgggaggagagaattcccanaaaggctcttgtcagccccctcttgatagggatcttgcaggggtgtgttgagagattttgtttttccagcccaggatgtgcgggagttacaaaattagacacctctaattcccttgaggttctgtgttcacactttggacgcttgttgcagatgccctatgtgctcccattattctca

SEQ ID NO: 507130 - DNA, 324 bp, Homo sapiens
ttatgagcatgtcaccatacattttctgcattaatttttgaatttatacatattgctttacatttacttaattcttgatcactgaaactttttaacatgtaccctcttaaattttgctcctgagacaaagtgttttacttgcctcagcctatcctgtggcctgagcgggcacctccttcagccttctttcctccaatctctccctcatccaggctgttttccgcaatcccacctcagccattttcccagcctgctatgatgtcaattcagtcccctcctcaaatgcactgttctgggcctcatagctctctgtccagagtccgt

SEQ ID NO: 507131 - DNA, 136 bp, Homo sapiens
tcccaagaatgaggaactgcacctggccaaggattttaaagatgagcttgagtctatatgtggataagtcccttgagataatcaagatcattgaataatcttatagtaacaccttcatccattctactaacagttc

SEQ ID NO: 507132 - DNA, 444 bp, Homo sapiens
ttatcccactattcgactcgaaaatgatgtattcgccctctgctccagagatcggagagatacgtacagggtgagacccgtgaccatgcgaaaggatgatgaggttgaggttgtacgtggacactattagggtcagccacattggcaacaatagtccgacgtttaccggacagaaatattttatctactttgaacgggtgcagcgtgaaaaggctaatggcaccactgtccacgatggcgttcaccccagcataggtagtcttaatgcagaatccttgacagaaggaaattcggcaattattgttgacatgattgtttacagagcaaggccatagaaatagtccttgattttacatgtgctggaaaaaaacattttaaagtaaatactactgcacttgtattgaaaattctaataccatttaaaatgtttctgacatcaaagtg

SEQ ID NO: 507133 - DNA, 389 bp, Homo sapiens
  misc_feature (35)..(35): n is a, c, g, or t
  misc_feature (63)..(63): n is a, c, g, or t
  misc_feature (70)..(70): n is a, c, g, or t
  misc_feature (74)..(74): n is a, c, g, or t
  misc_feature (83)..(83): n is a, c, g, or t
  misc_feature (85)..(85): n is a, c, g, or t
  misc_feature (94)..(94): n is a, c, g, or t
  misc_feature (101)..(101): n is a, c, g, or t
  misc_feature (113)..(113): n is a, c, g, or t
  misc_feature (115)..(115): n is a, c, g, or t
  misc_feature (128)..(128): n is a, c, g, or t
  misc_feature (137)..(137): n is a, c, g, or t
  misc_feature (143)..(143): n is a, c, g, or t
  misc_feature (153)..(153): n is a, c, g, or t
  misc_feature (163)..(163): n is a, c, g, or t
  misc_feature (169)..(169): n is a, c, g, or t
  misc_feature (173)..(173): n is a, c, g, or t
  misc_feature (176)..(176): n is a, c, g, or t
  misc_feature (182)..(182): n is a, c, g, or t
  misc_feature (187)..(187): n is a, c, g, or t
  misc_feature (190)..(190): n is a, c, g, or t
  misc_feature (206)..(206): n is a, c, g, or t
  misc_feature (212)..(212): n is a, c, g, or t
  misc_feature (219)..(219): n is a, c, g, or t
  misc_feature (221)..(221): n is a, c, g, or t
  misc_feature (228)..(228): n is a, c, g, or t
  misc_feature (231)..(231): n is a, c, g, or t
  misc_feature (316)..(316): n is a, c, g, or t
  misc_feature (355)..(355): n is a, c, g, or t
  misc_feature (379)..(379): n is a, c, g, or t
  misc_feature (382)..(382): n is a, c, g, or t
acaggttcgggggggtcttcaaagcagtgggcaanaaggctgctggagctgggaaggtccccnagtttgnccanaaaggtcanangggtaaatnaaaattntccctaaaaccngnccccccccttttnatcaggggngggagnacgggttcanaactggttgnttcaantggnccnttaagnttagnagnaaaagactgggttatnataacnatggctngntaaaccntcngaaggaaaggggaatgttttgggggcccccttgggttttttttttggggggggcaggtttaaggtattaggttttaaaaacaggnctttttaatgggaacaacttggcccaaaatttggcccanaatttttgggcccctttaaaaagnttnatgggga

SEQ ID NO: 507134 - DNA, 381 bp, Homo sapiens
attcaatagcattttccggctatacgcccgaaagcctgagtcgtgtcagtccacttgaacccgagaacatgctcaacatcggagcatggataaagcggatggcaaagtctcttgatttgggggtattttcagccacgccccctgcaacgaatcgcgaagcttgtacaaaatcaacgccctgctccagcgctgctataaagcgcggaatggcttctggatcatctttatcattaccatcgatggtaacgatgccctcataaccctgatcgagcgcaaaggagtaggcgcaacgaagctgtgcactaagttttcctgctgctgtcttgaccaatagcccccgcacgccaagcggcttcaactcgtgcaacttcagggaaccgt

SEQ ID NO: 507135 - DNA, 407 bp, Homo sapiens
aattttcacaatttttttctctccctttctccctctctttctccctctctctctttcttgtgttctttggctctttcttctttctctttctctcttaatctcttctcctttctctctcttatatttttctgatctctcccttcaattatttttcttatatcttttctccccctttcatctcttcttccctttcttcctccttcccttgcttcctctggccttccctccatactttatttctttctcaattgctttctcttccagtttttaatatttccctgactcactttcctttcctctttttctgttaccctctccttttcactctctctcatctccttccctttcatatctctatatctcacatagtaatgttgtgtgctaatacacagcacaacccctcgtgc

SEQ ID NO: 507136 - DNA, 266 bp, Homo sapiens
cgctctgcgagctcgctggagaccgagtcctcggctgcggagtcggcggtcactgctttcggttctggggaccgcgtcagttgcgcttctccctctagatggctgtactaggcctgggggccgtgtggtgtcgtgcgtgcgtgtagcatgatcagcttcccagtgcccgcaggtcggcaattagggtcaggagcagcaatgctattctcagcagggaaaattccacaacgtgtaggtacatgccccacagagagcagcgtcgggta

SEQ ID NO: 507137 - DNA, 392 bp, Homo sapiens
caaattttaataagtattaaagtaaaattttgtcagaaatgcgttttcagtgggatagatggggctgatttatttcaattattttatccatttctaaatattagaaaagatggggttctgcttgattctgttccttttttactttaatattgaaaagtgttgagaaacctcacttacgaatttagtagatggtcattaaaaagtgctttatattagcagtagcacccattcttctaggttgtatgcataaaacaacaaaataatccataatcaaaattattcttaatgctttgtcaggtagcaactggatttgattctcctttcattttcatggaagtggtgacaccttgatttgaaaaagaaccctgaacttaaaataaatgttaaaaaaa

SEQ ID NO: 507138 - DNA, 113 bp, Homo sapiens
gtgccaaggaaaaacgggccagaaaaatgtagatttgatgagacaagttctctccacagtggctgatgtattgaaataaaccaatagatccccaaaccaggaaaaaaaaaaaa

SEQ ID NO: 507139 - DNA, 373 bp, Homo sapiens
tatcccaggtcttagtgtctttcatgcgaggtatccaaagcatctggaatatatgcatacgttcttcataagggtgtacgccctagcaggacctctggaacgaattgcacttctcattgaaactagtaactggccgtcgtcttacattgcctaggcctctaatcatgagatctgggacaaattgactatgtcacaggttgctctccttgtaactcatacctgtctgcttcagcaactgctttgcaatgacatttatttattaattcatgccttaaaaaaataggaagggaagcttttttttttcttttttttttttttcaaccacccttgggggaaaaactttcccggggacctcaaaattccaaaaaggtgg

SEQ ID NO: 507140 - DNA, 954 bp, Homo sapiens
aatcgacaacaacctatttagctgtgccccaaacttttcctccgagccccctaacaacccccctcctaatactaactacctgactcctaccccttcacaatcatggcaagccaacgccacttatccagtgaaccacgtatcaacgaagagaagaactctagcctctctatactaatctccctacaaatctccttaattataacattcacagccacagaacgtaatcatatgtgcatatcctcgttcgagaaccacacttatccccaccttggctatcatcacccgatgaggcaaccagccagaacgcctgaacgcaggcacatacgttccgtatgctacaccctagtaggctcccttcccctactcatcgcactaagttgtgacactcagcaagaagccctaggctcactaaaccatgctactactcaagtctcactgcgccaagaactatcaaagctcctgagaccaagcaagcttaatatgactagcgttacacaatagcttttatagtaaagatacctctttacggactccacttatgactcactagagcccatgtcgaaggccccatcggtggagacaatagtacttgccgcagtactctgtgaaactaggcggctatggtatacatacgcctcacaaatgcattctcaaggcccctgaacaaacaccacatagcctaaccccttccttgggaactattcccctatggagggccttcatgcataacaagctcccatcgggcctagcgaacaaaacagaagcctacaactcggggcaatgcagtaacatcgtagacagagcaggcacaattacgcccacgtaggcaacaagcaaactcattccagagaccccctggacagcttcacaccgccggaaagaaattgagccataatcaggcacaggaaggaacatccacgcaattgacaatacggccaagcaagactcaaataa

SEQ ID NO: 507141 - DNA, 327 bp, Homo sapiens
gggatgtcccctgccctatggtcaagggtgtcctgcctgcctgggtccagggccttagggaaccccatggatccccagacttgtgttctcttggctgaaaaccctgaggtgctcccctctgtgcgtggcccctgagctgggatggtcctccaactgcccccaaggtccgcccctctgtttttgccccccctgtttgcataaaccccctttgctaccatcttgctagtgcgttttcttaaaagataatcttttttccgtaaaaataaattgggctttgccaaagccttttgaaggaaaagaaagaggattaaaaagaattgctggtga

SEQ ID NO: 507142 - DNA, 882 bp, Homo sapiens
ggatgaggtaggaggttggcacaaagtacagatcataaagaccttgctgataacacaatttgcagcaaagaagtcagctaaaatccaccgaaaccaagatgcccacgagggtgacctctggttgtcctcactgctacactcccaacagcgccatgacattttacaaattctatggcaatgtgagaaagttaccctatatggtctaaaaaggggaggcatgaataatccacccctcgtttagcatatcatcaagaaataaccataaaaatggacaaccagcagcccccaggctgctctgtctatggagtagccattcttttattctttcgctttcctattaaacttgctttcactttatgcacctgccctgagttctttcttgcgcaagatccaaaaaccttctcttgggatatggattgggaccactttccaataacaatagtactggaaatcctaaccagagcaatcaggcaagagaaaaaaaaaaagtcatccaaaccgggacacgacatatgtcaaattatgtctcttccctgatgattataatctatattagaaaatcctaaagttctaaccaaaaaggttcctaaaatggattaatgacctcatgtaaagttttcaggattacaaacatcaatgtgcacaacatccagtagcatttcctacccatcaatatgatcagccgggacccaatcaagattgacccttttacggtagtcacccaaaacaattcagtcgtggatctctctaccagggggaattctcgaagggctcccatctgcggagaccctttgccccatgggaattcccgtttggcacaaacaccttgtacgggctcccacagtgtacggtttccacaaccccgataacatcgtttgcgaa

SEQ ID NO: 507143 - DNA, 245 bp, Homo sapiens
cactatgaccagcaccgacacggggacgctcactattgcagcaccgacacggggacgctcactatatgcagcaccaacactggggcaccgatatggagactgctacacaattccagcaccgacacggggacactcactattgcagcaacgacacggggacgcacacaattccagcaccgacggggacgctcacttggtgcctgatcaatagctgaggggatccctctagatgtcgaccctgcatg

SEQ ID NO: 507144 - DNA, 379 bp, Homo sapiens
tccagatctaaactctgcaaacttgtgggaccagacttcagatctagcctagatatatgcccgtgtgcatggaaataaagactccaacggaaggagcctgtaggtgttaaatagtttacatttctatatacaaataatgtgcttacagtgccttagttacagctccctttctgtaactagtaccagggattctgtagtaagtagtgtgttccttaggtaaagtctcttttagctactgaaagggaaatggtctctaaacactggtcactgtagcaggtaaacactactctaacgtggagaaatgagcttcatgctgaggtagtgattgccttagagctgttatttatgctattgaaacttctaaaactaggggggatcc

SEQ ID NO: 507145 - DNA, 212 bp, Homo sapiens
gagagtgccccgacggacgtgaggtcatcctctgcgtgcagcgtgtgtcatctccatctgcgcgggatactggaacagtcgacctgtcagtgcatggcctgtcatatgcgcacatggaacgacgagtgacaaagtacttgtatgggcaagaatcctgacgcaccatagggcatgattaacaaagcaacctttcccttcccgccgtcatcagg

SEQ ID NO: 507146 - DNA, 152 bp, Homo sapiens
gagcctgtgtttaaggtgatttctgacgagaaatattcctcttatttatgccccttacaaactcatgtagaaaaattttgctatgtgtatatttaatacacaaatagatatgtctttatgcagtagagagtttcatttaaaataatatagga

SEQ ID NO: 507147 - DNA, 344 bp, Homo sapiens
  misc_feature (344)..(344): n is a, c, g, or t
gagagagctcgtgtcgagtgtttttttttgggatgctcagaccttatattatttcagctagtgaccaggtcaaaacttcggtatcttactctggtataacctagccaggcctttataattttttctctaccttccttttttcttctgggttgacatttttaggtcagattattaggttttattggacattagcagagtgatgaaaaacagattttttaaaactattcttcagaaattgagtagcgggctgttggcactgtgtatgactgagaactgtgcatacatattactcactgtgggtaatattgagcttccccagacatagatttcactttggtttttcn

SEQ ID NO: 507148 - DNA, 258 bp, Homo sapiens
tgaatcatgacagacaagatgctatccatgcagcctctgcctcggtgcaccctcatcattgaccccctggctgcggggtctcaccttacccggatccccatagccagctggaactctcacactaaccccctgattcctcaccctctgcacgagaacgaagttcttcgtcaccagatctttgctgccccttaccgggacctgccggcctccctttctgccccgagtgtcagcagatcatcagactgcaggccatgcacg

SEQ ID NO: 507149 - DNA, 218 bp, Homo sapiens
ccaccgctggagatccttctgcatttcgcatcagacctgtgtcactgtgtggaagtgctctttcccccacctgtagtaagctggaaaccccaccgtccaagttgggagagcttctgtttccaagttctttggttggagagactctgggaagtttttcaggaatgcgggttggccaatgcagttgattctacaaaacaaacctacccacccttgacgga

SEQ ID NO: 507150 - DNA, 942 bp, Homo sapiens
taaaaggggacgacatttattccttttccaaatgttacagtaaaaccaggtggaagaaaagtggtttagcagttagaaaaaaaaaaaagttacaaattcgtggggtttgggccattaaaaagtttatggacaacacattaaaaaaaaaaaaaaaaaaaaaaaaaaaaaaaaaaaaaaaaaaaaaaaagaaggggggggcgcgccaaagaaaaatccccgcgcggagggggccacacaagctaaagcgcgcgcacccgaggttgttagggaaacagagggggcccccaataaggggggcgatatataataagccgggcgagcgggggcgggggtcttaaacacacgcgggtccgcgaggggaaaacaacggccaacgacgggggaaaccctggtgaggagaaagagaccacctacatcgagtgagggggagggcgcaacaatagtggcggcgaacaacacctcctcacagagacaaaatatatataaaaagcgctctaaatagggggagaaataatatataaaaattcttagaggaggtgtgaataatcaggtgtgttggtaaaaaaagaagcgagagaaaaactcaagtgggtcgcagtggtatgaagaaaaattgtcgacgacatcctcgggagagatatgtagataatatgagagccaaaacatttattatcaccgccggggggggaccatcgtctgctatacaacacaacaaagacgaagcaacagagtaagaggacaataaaacgaaggggcgagaacagagagagagggaaacggagacgcgaggaggggagcgaggagagaagggagaggaggggggggaacaggaaggaggaagagagagaggagggagcggggagagaggggggaaagggagagaggagccacaaaaaacgaaggccgaacaaacgagaagccgacgagcaggaaaggcgcggg

SEQ ID NO: 507151 - DNA, 327 bp, Homo sapiens
  misc_feature (10)..(11): n is a, c, g, or t
  misc_feature (33)..(33): n is a, c, g, or t
  misc_feature (36)..(36): n is a, c, g, or t
  misc_feature (123)..(123): n is a, c, g, or t
  misc_feature (139)..(139): n is a, c, g, or t
  misc_feature (145)..(145): n is a, c, g, or t
  misc_feature (152)..(152): n is a, c, g, or t
  misc_feature (156)..(156): n is a, c, g, or t
  misc_feature (158)..(158): n is a, c, g, or t
  misc_feature (161)..(161): n is a, c, g, or t
  misc_feature (175)..(176): n is a, c, g, or t
  misc_feature (181)..(181): n is a, c, g, or t
  misc_feature (188)..(188): n is a, c, g, or t
  misc_feature (195)..(197): n is a, c, g, or t
  misc_feature (220)..(220): n is a, c, g, or t
  misc_feature (238)..(238): n is a, c, g, or t
  misc_feature (300)..(300): n is a, c, g, or t
  misc_feature (314)..(314): n is a, c, g, or t
atacatacanncgcgtatatacatacgcatgtntgngtacacatatgcgtatgtgtacacgcacatatacgcatgcacgtatatatgtgtatacacacatgcatacatgtatatacgcgcgtntacatatatatacgcntgcgcntacgcangcananacnaagcacgcgtgcgnncacgngcacacncatgcannntacgtatacatgtacgtgcgcgnatgcacacacacacgcgngcatgcgcatacgcgtatatgtgcacgtatgtatgcatatacgcatgtgtatgcacgtatgnacacacgtgcacgnacacatgcacgta

SEQ ID NO: 507152 - DNA, 204 bp, Homo sapiens
ctctagaggatgcctcgaatcgacggtttctcggaagtaattccacgtgccagaccttggtcaaatggtttcccacagcagactggaaaatctgaggatacgagagctgacagaagatggcttcaaaacaggaagccacactttcccaaaagaccaagaaatcttctattggtaatgaagttggagaaaatgacaggctctttg

SEQ ID NO: 507153 - DNA, 167 bp, Homo sapiens
gtgttctaacattagcttccattctggcagctggctacaagatgggtaaagacctactttttatactacttccatatttgactggtgcctggaggcttgagcatactcggaaaatgaattaggttgtttgcagtccccagcttgtgttcacatcgttcagcgtctga

SEQ ID NO: 507154 - DNA, 415 bp, Homo sapiens
  misc_feature (311)..(311): n is a, c, g, or t
ttattaaggaaatcataaggaagagaaaatatatttactgtttattaagtggaagttggtcacatcaccgtaatggttttcatccttatcttcttcccattgagtaggcttagggggtaggaggaagaggacggttggtcttgttatttcagggatggccaaggaggaagaaaatttgcctgtaagtggatctggacagttcacactggtggtattctcagctgtaaatggaattaactcttgacacatggataaacctcgcattatgctaaacgaaagaagccagacacatacagagacaggcacattantggctgtgtagggtagagctgggcatgaagattaattgcagtgagcatgagggagctggcatgttggcaagcatcagttcccagctacatcggagactgaggcg

SEQ ID NO: 507155 - DNA, 138 bp, Homo sapiens
ggtgttctgagtaatcgttagcgttttaggcgtacgggcacggactatatggttgaactgacgtacggctgactggtttcgactaactaacctacgtactggggactaccggggtgtacggtcgtgcctatgttggta

SEQ ID NO: 507156 - DNA, 123 bp, Homo sapiens
tacttgacctgagtccctcacacggagcccagtggccccatgatattaatgacccaggaaacttcgtttctctgctctcaacatagtaggaactcggtcagagtgtggggtacctgagctcga

SEQ ID NO: 507157 - DNA, 958 bp, Homo sapiens
  misc_feature (681)..(681): n is a, c, g, or t
ggactgtctcagtggagctggagtcatctcaggactcatgaggtccttgaacatttagatcggcatgtgcattcactcgaaggtgctctctgatgacatgaagaagctgagggcccgaatgcagctaggccatagtaaagattttactagataaagatgcaagatatgactagatactacttacgcgtacggtgtgactggttgatgtcgagcctggcagaagctggaggactgactgtcgaagagggttatctggatacagtggtggctgattatgaggagcatcatcactagagctcacatccgtcgtacattgaaaaagaatacgagatggatccacgagatagtccagagggcaacacgatcaccacgtgctggcaggatgtagaagagactcccgacaaaccggagagatgaccattggagagcagagtcgttatcagttcgaacgaaaggtccaatggaggaatgagtattcccaagggctcgagtagactcgtcgagacgagacttcgacaaggacccatgtgctagtgcaacggggagatcccgtagagatcatgggagttgagagggagaaaaggctgggttgggcccacgtgtgtatgggcaagtgccaagcctggcaagggtctcacgtgcatgggtcaaagagcagcgtttacgcagtaaagtgtatcntggtgcgtgaatgcttactgggtcaagcaagtgcgtacgttatcattgagtcccgtactgtctacgcagtgtttccgttaccgcgaagggcgccaaaagcgggggggggaacaacagggcaagcgaaagctaggactagtcgccaacggaacaagtagctgcttgaaacccccgcaaaatcccttcgaaagatggaaacggatcacttgtagggactcagccctttcggcacctgccccgcagtcacaccagggaccacccagaagcacctggaagc

SEQ ID NO: 507158 - DNA, 173 bp, Homo sapiens
tgctggggatgagtgtgtgagtgtgcgtgtgagtgtgcacgtgtgtgcatgtgtgtgtgcgcttgcgtgtgtgtgtgtgcatgagagtggatgtgtgtgcgcgtgcatgtgagtgttcattaatgtgcatgtgtgagtgtgtgtgcatgcgtgtgtgtgtatgagtgtgtaga

SEQ ID NO: 507159 - DNA, 529 bp, Homo sapiens
cagctgtacggtcgaatcttggatcgcggagtcggccgcaggcagacatgtgacctggtgagctggtggcttaacagcaggctggtggctggaacgcggtgcccagatgtcagttctgccctgtggctgctgcctggaccccggagagcagctacagctgctgccgtccccttctggacaaatggcccacaacatctgagcaggcatctgtggtggccccttgcccaggtttgattgcccacatgcgcgtcttggctcggggcgcaatccttctacagttgccagagttcttttttataacccgcgtggggtttcctttcctaggggcgggggaacccttttttccccctaatgggtttttttgggcgcgtttagggccccccccccccggtttttttccccccccccaaaagggaaaaggcgtggcgcccccctgtgggttttgggcggcggcccaaatttttgtgccccgtggggaggggcggcggggagaatttttgggggcccccccaataattttcccgaaggg

SEQ ID NO: 507160 - DNA, 780 bp, Homo sapiens
gccatttccaaatccctcgtcggggaaagcccatcaagtcggccagcctcgtgattcccaacaaccccgacctctgatccgtgtacttcccacttcgtaacaggaaaatctcccctgttcgttgcgtcgaacttctccgtgtactcgtgatgcacctgatctttggtccatccgtgggtatccatgctatgtcactacaatcactgcttgtgaagcctgccaatcgggtgcctttcctgggtggctagaacttcaggcttcagcctcgaatttccacagacgaagtactttctcttcttgtctgcaggcccaagatggaaactcgtgtttcagaagtcttgcatgcctgtagtgtgccagggccctacctgggccacaccacgaagagcatatgtgcgcaggtgccagcggtgtttgggctgtcgggtgcacacaaagcaagcaccatctgggattggcacagctggcagagccagtgtgatggggtatgtgttgcacttcccagggagaaaacctgtcagaacgtgtgccactacgaggatactcagaacacacccttcccaacggtactgtatgctctagttgttcctgtcctgtcttcactgagcgacaggggcggagaggcctgtcagacattatccttggtcctcgttcagactgcccactgtagtatccacagtgcccgcgttatcgctggttttggcaacctaaaccgtaccttcctaccctggtttagactacacgttacaaacaaggaaaatggcccctcgtgtgaccata

SEQ ID NO: 507161 - DNA, 826 bp, Homo sapiens
ttggggtccacccccacctggctgtggggggtgcgccaccccacacatcacatggtgggtgcggccgccccccgccctcacgtgcctgggccttctcactcctctccgatgagcagagagactccacttcgtgtggtgggcgcgcgcgcgcgtctctctctctctcacacacagtagcatgggtgcgcgccgccggccgtcgcttcgcctcacctgttctctctctctctttggttgtgcgacccacatcagagcagagcgcagggcgcgcgctactactctctctcctcgcggcgttcgtctctccgtccgcgccctcccgctcgcccgcccgcggcgctgagcagagagagcagaactctccccccccccgctcacactcttatactgtctttctctctctctctccagctgacagcatcccatctctgccccccccccctccccccgccagcagcagagcagagcactctctctctctctctctgctatgatatgacaagtattctatggtgcgcccccccccgctccgccgcgcgcgcgaccggggggcctctttcattctcccctctccccgcgcgcgtctcttttcagaaagaagagagaggaactcgtcgttgttctctcctcctccggcggaagacgaaaaaaattcttttcctcctcctcctttctgtttgtctcttcttggttgctccgccctccccccccctcgtttgttcgtcgtggctcccgcgccgctcctccttccccaccacgactgccccccccgcccgcgggggttggtgaagaaaaaaaaaaacccccccccgggggggtggtccca

SEQ ID NO: 507162 - DNA, 285 bp, Homo sapiens
gtggccccactgatcccttatccactcatcactaaggagggtataaatgctatagaaatggaagaagaccaaagagacctgatatctcgagagatcagcaaattcaagacacataattgtcagatacactctcggtgaaatgaaggaaaaaatgttaagggcagccagagagaaaggtcgggttacctacaaagggaagaccatcagactaacagcggaactctcggcagaaaccctacaagccagaagagagtgggtgccaatattcaacattcttaaagaaaa

SEQ ID NO: 507163 - DNA, 443 bp, Homo sapiens
tacccacccagtggtctgttaagatgtctcagatggggctgggcttggtggctcatgcctgtactctcaacactttgggaagcaaaggcaggcagatcacaaggtcaggagttcagcctaaccaacatggtgaaaccgtgtctctactaaaaatacaaaaattagccaggcgtggtggtgcacacctgtaatcccagcactttgggaggccgaggcagacgggtcacttgaggccaggagttcgagaccagcctgggcaatatggcgagactccgtctctactacaaatacaaaagttagcctggcatggtggcgcatgcctgtaatctcagttactcaggaggctgaggcaggagcatcacttcaacccaggaggcagaagctgcagtcagccgaggtggcaccactgcccttcagcctgggcaagactggagactgacatc

SEQ ID NO: 507164 - DNA, 987 bp, Homo sapiens
cgtgttggtgctcactggtgcggccaacagcggtgcctgcaggtgtggcgccggttgtgccccccgccctcgggggggacgctcgtcgctgccgtcgggggtgagctagttttgtcgctggcgacgcggctttaccagcacggcaggttgtgtgcgggtcgtgtcttagttgccgccccgcccgatgagagtgtgctccgtttatggtgggccggtggctggcacacctttgtttgctctggcgattcgtggctccggcggtatcgactgccccgtggggcgtttgacgtgggtcgtctgctccctgcgatgatggtctctaagcggccgtgcggttgagggggcccctcggcttgttgtttgcgccggggcgccgtgccgacatgagtgcccgcgcggtagtgtgaatgcaaggttgggggcgtttaacccccccggtcggcccgctgtgatgagtcggccccggggggcccccggggaatgatagatgggtcctggctaccgcacgtccctcttctgttgcgtagtcatgcatgcgcccccgcgtgcggttttattacccgcgctcgcgagggaagcccccgttctgtctggtgagggtacgctctcggtgacagctccacctctctctctcattgagcaggggcgtgaaggtaacgccttactcctacaccacagtacggtggggggatccgactcgcgggccgaccgatcctcgccgcgaggctgtgtggggtgcgccccggcgtggggtgctgcgggcggacaactactgtttcggggaaggtgcaaccttctcaggcaggcagttgtagaggacctctctcttgagccccggcgacagtatgtttagcaggccccccttcgcagaagtcataggggcgttgcggacgaaagagcttgcgcgccccccccaaagggaccgttcttcattcccccccaacccctggccccaagggaaaaaaacattttgaaaccaacaaaaaa

SEQ ID NO: 507165 - DNA, 1497 bp, Homo sapiens
gagcgtgcgctagaagctattcgatgatggcgcgaggccacagtgatggttagtgtggctgactgtgtcgtagcttgcctgacttaaagagactcctaggtcagtgacctaggtgggttgcgctcactctagtgagctatacatagcgcgcaacggatggacaaagcggacacgtgatagatggcacatcgcaggatgggagagtcctggaagtgacacaggtaaacctgggattgataatgtcaaacacgtttggaaatgccaaaggcgggaacgcattacggacgtaggcatggaagttggaaaggctcacccctgtgcaccatgtgtggtgggctggacaacattccatcacaggaaagtgttcagtgcacacccacgtggaacggaagcagcagaacataagtaaagacacagcgtatacactaaagtaaagccaccatacaaaaaacacagaacgaaggggaccgaataaaacaccaaaaaaagacaaaaaacgacgtgagaatggaataaacaaataacaaccattagcgaaaaacaaagaagcaagagacccaaaaggaaaacaagcagagaaaagacgagaccaaagaggaccaagaaaaaaaacagagcaaaagacatatggatgagcatggaacagaaaacagagagataggggaccacaacaacgatatcacagtacaacgtggccgatagagagaaacaacgtagatatcaggacaaacgaacaggacaacccagagaccacccaattagagacaatatcacggcggacacaagaccacaccccaagacggtagacacaaacagacaatgacaaaacgatgaggggacgcaccagagagggcgaacgacacgacaaaggaaataacgaccacaggaaaagtcacacaacactaagagacgtaggaaccaagcggatgaacaacgagacgaggagagaacaacagcaaacaacagagcagtcggagacaataacgacacaccacaaatagggacgaacacacacaaaacgagacagacggagacaagagaaaaacaaactatatgagcgagaactagagcaaaagaaaaggagaaagaaaaccacaacacagagggcaagacgacgaaggaagggacatcgcagcagtgatgcacacaaacccacacagacagacggcacataacacaaggggacgccccaccaataatccgagcacaaataacaacaacagggaccacaccacaagaagaaagagacacaaccacattaaagacagagcgagcatgaagagcagaaaagagagacgaaagaacacgaagaacaaagagcagacgcagagcggagtaagacagcccacagaagaaagggcaaagagcagaccgcaccacccgacacaaacaacaaccactagtgaggcagacaaacaaaaggtcaccagaaagaaacagaccaaagtaggagagaagaacaaacaacaacatggagcacgaaaaagtgaccacgaa

SEQ ID NO: 507166 - DNA, 926 bp, Homo sapiens
  misc_feature (4)..(4): n is a, c, g, or t
  misc_feature (69)..(69): n is a, c, g, or t
  misc_feature (82)..(82): n is a, c, g, or t
  misc_feature (122)..(122): n is a, c, g, or t
  misc_feature (165)..(165): n is a, c, g, or t
  misc_feature (221)..(221): n is a, c, g, or t
  misc_feature (238)..(238): n is a, c, g, or t
  misc_feature (272)..(272): n is a, c, g, or t
  misc_feature (311)..(311): n is a, c, g, or t
  misc_feature (354)..(354): n is a, c, g, or t
  misc_feature (375)..(375): n is a, c, g, or t
  misc_feature (402)..(402): n is a, c, g, or t
  misc_feature (420)..(420): n is a, c, g, or t
  misc_feature (425)..(425): n is a, c, g, or t
  misc_feature (428)..(428): n is a, c, g, or t
  misc_feature (435)..(436): n is a, c, g, or t
  misc_feature (457)..(457): n is a, c, g, or t
  misc_feature (500)..(500): n is a, c, g, or t
  misc_feature (525)..(526): n is a, c, g, or t
  misc_feature (553)..(553): n is a, c, g, or t
  misc_feature (567)..(567): n is a, c, g, or t
  misc_feature (577)..(577): n is a, c, g, or t
  misc_feature (585)..(586): n is a, c, g, or t
  misc_feature (594)..(594): n is a, c, g, or t
  misc_feature (607)..(607): n is a, c, g, or t
  misc_feature (612)..(612): n is a, c, g, or t
  misc_feature (682)..(684): n is a, c, g, or t
  misc_feature (729)..(729): n is a, c, g, or t
  misc_feature (743)..(744): n is a, c, g, or t
  misc_feature (749)..(749): n is a, c, g, or t
  misc_feature (751)..(751): n is a, c, g, or t
  misc_feature (757)..(757): n is a, c, g, or t
  misc_feature (761)..(762): n is a, c, g, or t
  misc_feature (768)..(768): n is a, c, g, or t
  misc_feature (774)..(774): n is a, c, g, or t
  misc_feature (789)..(789): n is a, c, g, or t
  misc_feature (806)..(807): n is a, c, g, or t
  misc_feature (814)..(815): n is a, c, g, or t
  misc_feature (902)..(902): n is a, c, g, or t
aganttgaagtgggtgtgtgatgggttacgggaggatttgggtaggaggaagagacagatgatggggtntggatttataagntgagggattaagagtgaatttgagattagtataaataganttaaactattggagaaaaagaaaagggaaatggaacagaaagnaaggaaggagattgatgaatatatggctgatgggaaagatgaaggagctcggatcngtgtggaggacattatnagggaagaatacatcgtggaggggatggagatcntggagctgtactgtgagctgatgctggctcggtttggcnttatccagtctatgaaggaactagattctggtctggctgaatntgtgtatacattgatctgggntgctcctcgactccagtcagaagtggntgagttgaaaatagttgntgatnagntctgtgnnaagtatagcaaggaatatggnaagctatgtaggaccaaccagattggaactgtgaatgacaggntaatgcacaagctgagtgtggaagnnccacccaaaatcctggtggagagatanctgattgaaattgnaaagaattanaacgtacnntatgaacntgactctgtggtnatggnagaagctcctcctggggtagagacagatcttattgatgttggattcacagatgatgtgaagaaaggaggnnntggaagaggagggagtggtggcttcacagcaccagttggtggacntgatggaacggtgnnaatgngnatgcgnatgnncatgcntatgcnatctgcaaatacgcntttctcatatccactgnnaaagggnncagtagatgacattaatgctgataagaatatctcttctgcacagattgttggtcctggaccaagccagaagcctctgcaaagcttcnttccagacctgcagataactatga

SEQ ID NO: 507167 - DNA, 363 bp, Homo sapiens
tggatcaagtgctttgcacacaagtgtgaagactgatgctcctaggacccatgtaaaagctaggcaggcacggccgccccttgtaattctacaacattggaggtagagaaatgctagctggctagagtagctgtattggcaggctctgggctcagtgagagatactgcctcagtaattaaagtggagaacaatgggaggcgatactggactgcaatcattctgtccacatgcacattcgtgtgtgtgtgtgtgtgtgtgtgtgtgtgtgtgtgtgtgtgctcgctcgcttgccaggtcttgccccaaatgacacatatccaactgaccccagaccagcccacaaatgagcaagccgtcgacgc

SEQ ID NO: 507168 - DNA, 498 bp, Homo sapiens
tcctgccacaccacatgtgagctcaaagctgattctcctccagtaagaccctgaaatgactctgtcccccgtggacaccttaaatacagcccttcagagggcctgagctgggggcccagctaagccacacagaaactggataaaaaacgttttctggccaggcacggtggctcacacctgtgatcccagcactttgggaggccgaggcaggtggatcacaaagtcaggagttggagaccagcctgaccgacatagtgaaaccccgtctctactaaaaatacaaaaattagccaggtatggtggtgcacgcctgcaatcccagctactcaggaggccgaggcaggagaatcgtccgaacccgggagacagaggctgcagtgagcccagactctgccactgcactccagcctgggtgacagagagagactccatctcaaaaaataaaaacaaacaaatgaaaggtttaagaccttctttgaacctgactgccttactttc

SEQ ID NO: 507169 - DNA, 492 bp, Homo sapiens
  misc_feature (431)..(431): n is a, c, g, or t
  misc_feature (437)..(437): n is a, c, g, or t
agagctgcgtaagatgaatgccagaggatttgtatcttttctaaaggacagcattccagttactgagctttgagtaagtgcaccttttgcccgccatgatcctccctcggaacggttttttttgtctccaatctgacctgtggcctagccatccccttgacttatcagcaaatcttttccagttcaaccaccatccactcactttctccacactgcgacccactcaccttccatttgctccccccctattacagacgcattcttcgccagctctccacgctcccctattcctcatctcaccacccgttacacctcctttatctcgccttttacttagatatttgtagaataatatcctttttcttttcccccccccccctccccctttcccctctctcccccctccttcccttactccacccttatatttntgtgtntttctttttttatattttttcccgctccccccctttctctctcccactcttcccc

SEQ ID NO: 507170 - DNA, 421 bp, Homo sapiens
gtgatagaggatccccatggcatgcagtgaggtaaaatagaggggtctgaattccaacggtccttcagctgaaaaatgcttcactgccaagtgatcttcccagtcatgggtcaagctcttatagaattctccgtactcctcattagtaatatcgtcgggatatcgggtccagatgggcttggttgggttgagctcttactggatcggacggtacttttccttaatcttcgttcttcttcttctacggtcacttctttcaggtaaatccttattggattacttttctggtggttctagctttatcttcccttctggtctcttcctttcccttctcttctcacctcctattctttcctcctcctcctcgatcttcctctccgtttccttggattgctttttggtcctcattacatgccagggg

SEQ ID NO: 507171 - DNA, 339 bp, Homo sapiens
cagttatggtgaatggttgcatggatttgaaaaaatggcaaaagagggtgtggggggaacttcagggtcaaaggaggttaaggttctaaagcacaagttgaaagaagctgatgaaatgcacacattgttacagctagagtgtgaaaaatacaaatccgtccttgcagaaacagaaggaattttacagaagctacatataagtgggggggggggaacaaaataagtggaaagttaaggtcgatgaatcacacaagactattaaacagatgcagtcatcatttacatcttcagaacaagagctagagcgattaagaagcgaaaataaggatattgaaaatc

SEQ ID NO: 507172 - DNA, 359 bp, Homo sapiens
atcagcaggatatccaacatgaaatactgctctgaaccccgttgtcctatggaacaagatagtattgacaggtgataatccgaagctgctgctgaaagatatgaaaacaaaatatattactttgacgatagcactgctctccagggaaacaggaatgtcactttgaccctgtactatggaacgtcgtaccaaatgctggaattctacctactatgtgacaggatcaggacacgtactctagtcccatttccagatacatatgaaataacgaagagttattaaattattctgaatacgaaacaacatatttttatacttaatgaatagtatctcattactctcttcccttacatcttcat

SEQ ID NO: 507173 - DNA, 131 bp, Homo sapiens
actctgacgagttccctcaagcaatccaatttctgcagcacttaagtgcttttcatactcccccatatcgcagcaggtctccaaggtgggaactcggtcagaggtgagaggtgggaactcggtcagaggtg

SEQ ID NO: 507174 - DNA, 1359 bp, Homo sapiens
  misc_feature (546)..(546): n is a, c, g, or t
  misc_feature (843)..(843): n is a, c, g, or t
agcgggtttcctccgcggtcttccgatcggatcgcgtgaactagcttcctgcatgctaggtccatgtgtgctatcactgtatccctaaaggctccgggcttggcccggatgctcaatggtagggagcgaaactacttttacaaggattagaagaggctgttgtatagaatacatactacatgctatgtcgtacggtaggcttgtccgcaataacctagtctgtacagacaatactgggagccacaagtggacaattgcacaccaataactaggcttcatcccaaccaacgctttgcgagaaagctatgatattggctgcacccacaaccggatcgcgagcaaacttcatgtgtatatagctacggacccttcaagaacgatactcccgccaatccgttgcctagcgcatcacattgcactctgtagatcgggcttcgtccaataattgccataggaggtcaaacgaaaagattagagaggagtaggcaacaagagctaattcggtctcataggaatatgtctctgaatggtgagagcgattcatcncatgtgggacatatgtaagacattgaagggaaacgtctcctcgaagggaattttggacaataggttcaatgctttttcacggaaagggctcgggtacgaatatgtgtttcactttgaaagaataaagttccattgtctacggaaaataaaaaggccttccaatttgggatggaattttccgttgtaccctttaaaatgtatctcggatcacttggtcttagtggtgcgtagcagaaatagacaaaaaccctttttcccggaacgtaaataccttcggggatacggagaagcgattcnttaccgaatacctggcttaaacggttttcccgatgaagcccctttcccaaattaatcttggcacgctgaaacatcgcgacagttaattgggggtaaatttgacaaaaggctaattttatcccatggtgggcccacaaaggggtattaatttttggctattcaaagagggcaaattagtcgggttaaaattccttaagtatatcattaaaccgcaattgtaaatttgccgctgggggaccaatgtgtttacctagaggtgggtttaggaaattaaaacgcacttccagggagagattttgaggtgtaaagaaatttccctatgggggccttacattgggttaaattcgaaagattaccggttcctatatcagggtcacctttgcccgatggcgccagtggggagtttaccaaacggagaaggggagaaacccacggaaagcggttgtaattgtgtagaacccatttcctggttgcaaagaagaatttccacaaaaaaatttaggacaaagttggtag

SEQ ID NO: 507175 - DNA, 363 bp, Homo sapiens
  misc_feature (301)..(301): n is a, c, g, or t
ttgttgttgtttggttttggagggttttttagttttgtttgagacagagtctcactctgttgccaggctggagtgcagtggtgagatctcggctcactgcaacctccacctcccgagttcaagtgattgtcctgcctcagcctcccaagtagctgggactactggcaggtgcaccacgcccagctaatgtttgtatttttagtagagacggggtttcaccatgttggccaggctggtctcgaactcctgacctcgcccgccttgcccacccaaagtgctgggattgcaggcgtgacgactngtgcctggcctaatgtccttttcttattggccattgtcctttatatattaataatctggtcg

SEQ ID NO: 507176 - DNA, 695 bp, Homo sapiens
aagccccattaggaaaaaatttaaatggttcctcttcatcgccttaatgtctaaagatcagaaatcgctgagcaaacccgcttttgtttccttcccagaaacaatgcaaaacaacaggtggagatagtctggcctttgccctgctgtgtgtgcctctgaagctcctcctgccaaacgcccgggaaaacagcctcaccccactctttttttttttcctcatttacttggagctttattccttgcatctttggggctactgaccagtggctgctgaggcgacaggggaggacaccagttgttctgttgcctatgacctgcctatttgcctttccataccatcttgccctcgactttgcccgtcttaaagatcactacctgactttggctttaacatttcgtctctttagatctaacctttttgattgggagatgaatagctctctcctatgactttgtcacattacgcactggacggcacatcttcacttttaatcaagatcttctggccacgcatgcagtgggaatgcacacctctgtatttcaacgaattttatatcttctattgatctgtctccttttggagaacagttttgtattcactcactcgcgtcccgtgatgacagactccttattgcctatccacctgctttccatcatttcttattttttagtcatcgatttgtctaaaccattat

SEQ ID NO: 507177 - DNA, 259 bp, Homo sapiens
  misc_feature (164)..(164): n is a, c, g, or t
tttgaaacatggttatatacttcatgcagaagtagcaaactagttactcaggctgcatctggtctcaaacatgttttgtttaatattttcttattagtcttctaatactgaaaaaaaagagtcagtgctttttcctaagaaaggaaacaactgactctttggtngctttggaaaaatctggcacctccaggcgcacatccccacgtggcagcagtgagctggagctaaggcgtggctgtcccctgtagacagtttccag

SEQ ID NO: 507178 - DNA, 329 bp, Homo sapiens
cggcatggggtctgtaccaaaaataaaaaaattagccaggcctgttggcacacccttgtagtcccagctactcaggagggtgagacatgagaatcgcccgaatccagggggcggaggttgcagtgagccaagatcgttgccactgcactccagtctgggcgacagagcaggactcggtgtcaaaaaaaaaaaaaaaaaaaaaaggggccaaaagttttggaaaaccggggaaaaccctttggaaaaagggtttcccgtttggggttttcccaacctaaaaaaaccaagggcccgttttttataaaaccttaaaagggccaaaaaaggaa

SEQ ID NO: 507179 - DNA, 535 bp, Homo sapiens
  misc_feature (2)..(2): n is a, c, g, or t
gngaccattgcctgagccgagtgagcgcgagaacagcccgggcaacgtagggagacctcatctccacaaaaagaaaaaaaaaagttagttagccgaatgtgatggaacatgcctgtagtcccagccatatcagcaggccgaggtgggaagatcacttgagcccgggaggctgaggccgcagcgagccgagactgcaccattgcactccagccggggtgagaataaggttgtgtcataattgattacggtcgttgacttaaacatgtacatagcactgattatctgacagagactgaggaagcagaaacgagtaagacaccactccaggccccaggaatctttcttgagggagattcacatcctcgggaaaccaagatgtataagtgaatgaaggaggtagcagaggggtctgcagtaactgagtaagggtatggagctagaggactaattacctccgggataaatgactttataccaagatttgtatatgagagacgaggtgaggaccactcacaagtagtttgagtgccctgaa

SEQ ID NO: 507180 - DNA, 621 bp, Homo sapiens
  misc_feature (163)..(163): n is a, c, g, or t
  misc_feature (189)..(189): n is a, c, g, or t
  misc_feature (220)..(220): n is a, c, g, or t
  misc_feature (272)..(272): n is a, c, g, or t
  misc_feature (275)..(275): n is a, c, g, or t
  misc_feature (450)..(450): n is a, c, g, or t
  misc_feature (513)..(513): n is a, c, g, or t
tactctattataatagagaggtttaatgattaagaattcggtattaaaaagtggggattaggatgaatttttaaaatatgtaaataaaagaagctaacgtaatatgggttaatttatatgaaatgtttaaaatatataaatttagagaatagttgctaggggntggagggtaggttgggaggtggtgantgctttatgggtgtgagattttcttgggggntgatggaagttttttggaactaggtagaggtggttgtataatattgtaaatnaantagatgatatacaattgtttactttttataaatttcactttaattaaaaaaacaattgttggttgggtgcagtgtttacacttgtaaacccagactttgggaggctgaggtaggtagattatgaggtcaggagatcgagaccatttgggctaatgcagtgaaaacctgtctctantacaaatataaaaaattagctgggcatggtggcacatgcctgtagtcccagctatcgggaggntgaggcagaaggatcccttgaacccaggagagggaggttgcagtgagctgagatcatgccactgcactccagcctgggcaacacagagagactcagcctcaaaataaa

SEQ ID NO: 507181 - DNA, 223 bp, Homo sapiens
  misc_feature (49)..(49): n is a, c, g, or t
ggggggggggggtttttttttcccccccccccccccccagaaaaaaaanccggggggggggggttttttttcccaggaaaccccctggggccacgcccctttttttttcccccttaaaaaaccccggtttttctttggaattttttttttaaaaaaggggtttttttttttttttttccccccccccctttttttaaagggggggggggggtttttgggggga

SEQ ID NO: 507182 - DNA, 158 bp, Homo sapiens
ccccccctaagtttttgggaaaaagtggaaagggcgaaggctcttcttttttctctttctgccctttttcttgctgattttaagcaaagggggggccttttgattgtttttttttcaggtttaacccttattttaataaagttttcaagccaaaatta

SEQ ID NO: 507183 - DNA, 179 bp, Homo sapiens
tggggcctcatgctgtagtcacatggacaagaatggacaggacatggtggatgctgatggcattcttgagctccgtctctgaaagggcctatcccatgcttgtactacctccttctgcaggtagaggatcatgcccttgaggatcccgtggaagctcttccagaccccgcattgcccct

SEQ ID NO: 507184 - DNA, 195 bp, Homo sapiens
gcgcgaattcatcatcctgctgcgcgaattcatcattctgctgcgcgaatacatcatcctgctgcgcgaattcatcattctgctgaattcatcatccgctgcgcgaaatcaacatcctgctatcatgtgcgagcagacgctcctgctccctggatgccagcctctcactgtctgctgtgctttttgccagcccag

SEQ ID NO: 507185 - DNA, 701 bp, Homo sapiens
ggtcccagctgctggggaggctgaagtaggaggatcatttatgcttgggaggtcgaggctgcagtgagtcatgattgtatgactgcactccagcctgggtgacagagcaagaccctgtttcagaaatacgaaagaaccctgggaaaagtgaagtatggctgtaagtctcactggttcagtcctagcaagaagcgagaattccgagatcctccagaaagtcgagcagcacccaccattcaacctcgggccagtgtcttcaggcatttactggggacctgcgagctggcctaatgttggtggccatgtcaagccaggccaatccatgggcgccacagacgagatccgagccagagtcaggcttcggaggccagaagctcagcattaggcccaggcactgattgtggtcagaggggccattacgcaaggtctagcgtaggcccaagaccatagttacccagatcagtgagaagcccctggaaggacagaaatagattggcgatgcatggcagacagggaagggaaacattttcagggacaagacatgtatcacatgtcttacacgatcgcaagtcaggtttcatgtagtccgagtgtcgctgcttgcgtgctccataactagcccagggctgtagcaaacggcttcacagtgatagtccgttcacgccgtgagtcatacctacacgcgcctgtgaacacctcgg

SEQ ID NO: 507186 - DNA, 1774 bp, Homo sapiens
  misc_feature (342)..(343): n is a, c, g, or t
gttcattcgagagtctccttctggagctttgacgcccgtcttccagtgcccgagcaggcatccctagtcgccaggtggagccatgctacgactattctatactatccgttcgagagtccagtcgggggtcgctgtaacgctcgcctagatgtgcacttagtgtaccaggcgggatacaaagtcggaccacactactcagtggtgctgtctcgtagtggagtagcttactcttccaccaatgcattggggattatcatgcaatcgtccgcttcaatgaccggctctactagaatcccatagctacataagactcgcagatcagtgagaagaggtgatggcagnncttacctaccgataggtcgctggacagtgaaagtagagtgtgtggagcgtgtcgagagaaacttacggggggggatcatttctcggttcgccaggacgaatggcttgtctagcactcgatttgcgcgaggcatttgcgcccggagggagaacaggttgcttcagaggtacgactttgtccttaggagagccccatcttccgcttgtggaggtcagtcccaaaatcggaattgcatacatagactaagttggcacttcgaagcaaaataatccgcgggcaagctaggttaggagaccctactaatgggtgtggcacctcttcgtcgacgaaatagggtcgctacttggacaatgatacccactccatgaatagaccacggcaccttggtaagttgccctgcacgacgccagtatggttgctccccgatttcactctagcaagcatgaggaggggccttgtcggttgcacccaatagggggccacaccttgcgtaggtgggaccagaggttccattcccttcaccaccctgaagagatacgcacggtagtgcctggactatggcgaagccaaccccaatttctatggcaggattccacaccttgcgaccgcaaggtgggcagcccctattggtttacattttcatatttggaaagagacgccagctgtagggtcatagacagagcgaaactccacccagaaaccatattatccggctacgatattacgccacacaccttgtgagtaccccgagagggaacgccaagtacattattcctcagtggaggagacacagacggcgacaacagctgggagacagcgcacagaggaatcacccattacatagggtagttagagatcaccaggaccgagtggacgagtaggttacaacaactgggtcgtgaaacggggtaggtcagaccccagtaacgggtgagaagcccacgtgttatagggccctaccgatgataggtgccgcaacacctacagaagagagtcagggatacgtgccacccagaggataaacaatacatagtaagaaaacctagcaacaaacacaagctacacaaacaacgaccgcagacaacaagagccatagaacagagcacagacaacacaggtcgcagataaacaaatgaggacgacacaacaacacaacagcaggacgatgggacgtaatagcatgcagccacgaggcagaggactgacgacacacaacgcgcacgcgaagacaagagtcaacaatccatcgagccaagcaacaaagaagaaggaagacaaagactagaagcaacactagaagcacactccaggcacgcgcgcgcgaacagtacatccctcagacaagaaagacacgataacagtagagacatgccgagctcgtggctaaccatgcaaacacaaacaatgtaatgtactagaaataaagagcag

SEQ ID NO: 507187 - DNA, 782 bp, Homo sapiens
  misc_feature (241)..(241): n is a, c, g, or t
  misc_feature (338)..(338): n is a, c, g, or t
  misc_feature (633)..(633): n is a, c, g, or t
aagacatctaccccagcaaaccctactgatgatgacttgagcagcggctcctccagtgaaaggagcaagcgtcttcagagaggttacatcttgtacaccgttttctactgtacacacccatcccagacggaagactgtccctggaatcaccgaaagcacaggacagatatccctgcgttccagagaccaagaacacattccaccccagttggggggtcccattacctatctcatgtgatcntgaatcagcctggacatctctagcatgaggcagtcataggaagcgtgagacgctaagacatctagacctcatggttcctcataagtgacaaccccanaattcccatcaatgagctgcatcagtcttggacaactccctcaatgagccttgagactttgatcttcttggcagtgtctgcattgccagtgctaagcaggtctggagacgaaggtgctgaggcctaggaagcattagagagtctagatgactcaagcgaggtgagacagagtggcatgcctagtgcgatgcgtaacagcaagtatgcccacagtggtgactctaacgggcagagagcacagactaagctcgtcacggtgacaatggttcgcactcttgggtggaaccaaggcagntcgctcacgaaaacatcgctagaaccagtcttagagtgaccaccgctcgattgagcaccacacggcaacccttgtccagtatatgctcggaccagtggacaccgactttggcgcgtgctaaccaacttatcacccactttactctttgg

SEQ ID NO: 507188 - DNA, 191 bp, Homo sapiens
aaaagtttagatagttgctgtgaactggaccaaggttcagttctcaagaaaaccactctctagtcacagctcaggtgaggccctgcccaggctgagctgcttcagaggcatctgaggccctggactgccagctgaaggcgtataatttttccctccgtgtgccccacctacccgtccatctgacccatctt

SEQ ID NO: 507189 - DNA, 127 bp, Homo sapiens
cctactctcctcgtacagttagagtctgtgtgttatcttgaatgtgtgagacagcttcaccttgaactttgaattatctcagtcatgctgcatagttgtgcattgctcgggatagatcttcgatctt

SEQ ID NO: 507190 - DNA, 593 bp, Homo sapiens
ctagtgagtatgcatctgtgggaagtgccagggctcttcccagaggctaggccagctgtatgctggcctcggctcctccccagcccaagcattacagagcactccaggctgtgccccagctcctgcctccaccctgtctctgaccttggaccagccctgggtctcttgtccttgcaatgacttctgctcacacttggccacgtggccctggacttcagctccctgtagccaccctggcacctcgcctctgtcctccatgtcctgggcctgcactgtctacctggttgtcagggctgacagggagacaggatggcacagggagggcaaaaagtaccttggggaacaagaacttcatacctgcgttcaagtcccagacacatccctttctagcctcaagtgtcccccaaaacgaggttacttactgagccaccatcttctcagctgtaaaagcaagaacagagttagcagaaggcgcgttggtcatgagtgcagatattgctagggctccattcctggttctgccacttcctgtgtgacctcgagcaagttacttaacctacccatgctaacagttccctcaattaaattctaaa

SEQ ID NO: 507191 - DNA, 826 bp, Homo sapiens
attgattgtctgaacttccccagattccagtttccggggaaacctgggatatacactagggaggaactttgcactatgttcataagggaggtagggacggtagctgtcccaggtatattcgagagtccataatggttcgagaaatacgtgtcgtcctattgccaagagcgtagtgattacgacattccgtttcgagttaaggaaaccataaactaatagatgtaatctccgatgtatagggaactgttgaaagatttatcaaaagaagcccaagaggtatttaaagccattcagtctctcaagaccacgagaggtgctacgtaatcttcaggaacttgtactgatttcatgttccaactgaatagaagataagattaaagagctgaaagagatgaaatgtacttatcgttattaattatatccaagatgagatcaatgcaagcttcagtgattatatcccgatatgttttgaagaggcgttgagagaaaacctatgccttaatcttcgataagtgcaactgaatttattcataaacgagcttcaggaagcttctcaagagttacagcagatccatcaatacattatggcccttcgtgaagaatatttgatccaggtatagttggctggacagggaaatattatgaacttgaagaaaagatagtcagtctgatcaagaacctgtgtagtgctcttagggacttccattctgaatatatcgtcagtggctctaactttacttcccaactctcagtcaagttgagccaatttctgcacagaaatattcaggaatattctagcatccttaccgatcccgatggcacaagg

SEQ ID NO: 507192 - DNA, 572 bp, Homo sapiens
taaaactgggtattttatctttgattctccttcagccctcaccccgggttctcatctttctggatcaacatcttttctgtgcctctgtccccttctctcatctcttagctcccctccaaccgggggggcatggggtgtggtggaggaagccacaggcctgagattcatctggctctccttctgggagcccagaggatgggcagacagaaggggggtggtgtctccaaccccccagcactgaggaagaacgggggctcttctcatttcacccctccctttctccccggcccccaggacggggccacttcggggtgtggtgcagtggggccccagatggtgctcacactggagaatgtaagaactacaaacaaaattcctataaaacttaaacttttggtgtctcaaaaaaaaaaacaaaaaaaaacaccacccagggctcctgataagtttttgacccaccgcgcaacagggggggggcgccaactacacctctgtgcgcccacgggggcacgccgcgcaaaccggagcaggaccgaggaagagagacgagctggacgcgcccgagcacggca

SEQ ID NO: 507193 - DNA, 184 bp, Homo sapiens
ctaattggttcttcgatgacgttcgatgacgctgcctttcacaagtcatcactgtgctaaatgcttcacgcctttgcaacaaccccatgcagtagctactgtcaatatctgcattttagggagttcccattgtggctcagtgaaacaaacccaactactattccgtcatcgaagaaccaattag

SEQ ID NO: 507194 - DNA, 443 bp, Homo sapiens
gaagagccctctgctgataacacgccagcgcttctgccactcggacccaaagaagctatgatctgtgcttttcttctccaggtacccttgcgtgatgacgctatccagctcttgagcccctcttaagatgtcttctattccctcgtcctgataatctgaccaaaaggatgcttctgacgtgaggggtgggccgtgagtcccactcagattgtcatcagagccgtcctggccaaggtcacctccttggggctgaaaatcccaacagtacctggatttgatttgctggaaaccccgaagaatgtgggctctctgatcctgtgccccagggctgaggttctcattctgcaagccttctgccaggaagtcttcggtatcttccaggagccaacagatctcctccgggagggcgacagcctgcatttggcgaagcgagtgggcggccg

SEQ ID NO: 507195 - DNA, 183 bp, Homo sapiens
acccttataccactaaactacctagattcttgtcaagcaggtgggaggaagttaaaagataaactaagcttgtgacttctaacacactctgacaaatttatactacagacaaaactagttaagaccctaaacactactacaagtattagaaagtagttttagacagaagtaagactatacgtc

SEQ ID NO: 507196 - DNA, 429 bp, Homo sapiens
cgggtaagtggggagtgcgctgggcaaaaccagcctgtggagtgggaaaggcacctttttgtccaccgggtcgggtttggaaacagaaaggagctgcttccaactagtgacagcaataaacctggctttgccgcttacaaatgtgaaagtaaccccaagaactcccaaatcaaatgcccccttctttttctcgggccaccagatgatcctggtctctttacagatgaagagatggaggcaagttaagttttttattctaagaaggcagggtaagaggtgggcataacaaaacagaacgcacgatattaattggattctaggctaacgggcctagcgcaagacccagccctgttcctcccctgtactgggactctgggctcagttccttcatttgtgaaactcctgcctcctccgggttgcggggtctgc

SEQ ID NO: 507197 - DNA, 119 bp, Homo sapiens
  misc_feature (110)..(112): n is a, c, g, or t
gctaaagcagacttttgtgtaaaaagcaaaggttacatgtgagtattaataaagcgggtaataaataaaagccccccccccccccccccccccccccccccccccccccnnngcccccc

SEQ ID NO: 507198 - DNA, 281 bp, Homo sapiens
gtgatttgattcactccaaatttggctgtcccccgggagtggggtttggccgtaggggctccccggcagcgccaggcaaagtttgagcaccaccccccgcctgcacgcaaagttaggagccagcctccccccccgcctcctcctgccggatcagagtaggcagcccagccagtccccatagttgtcacgcagccagcagggggcccccgcccccccgggcagccccggccctccccctgttttttgggtgattgacccgacccgcgcgggaggggagggca

SEQ ID NO: 507199 - DNA, 348 bp, Homo sapiens
agaggacctccagtcagcgctctgggcatgtggggaattcctaaggatctaagaagagtacaggctgggcacagaggctcacgcctgtaatgccagcactctggtgggccaaggcagggtggatcacttgaggtcaggagttcaagaccagtctgaccaacatggtgaaaccccgtctctactaaaaatacaaaaagttagccgggcgtggtagcattcacctgtaatcccagttacttgggaggctgaggaatgagaattgcttgaacccaggaggtggaggttgtggtcagccaagatcatgtcattgcactacagcctgggcaacagagtgagactccatctctt

SEQ ID NO: 507200 - DNA, 712 bp, Homo sapiens
tttttatatgcagtaacgcgagtgtaagcgccagggggtcgttctaggaacgagactgtaccgattgctcactgaaaagagatggatcccgggtatggaggatatacgtaggtttgataaggacaggatgaagattacgatgacacttgtcaagaacagtctgccaagcaatgagaccattgagcatgagaagcgataagtatcttattaacatccatgaaggatttagtccgatctacgtttgaagatctcaatcttgatgctgagcaagaggcacatgatagatggacacctgctctcgagataactgcgagcctggacattttcggccattgccacaggcctgtggctttttgaatggagatttctataatcgtactggccgatatatccatatttcccacagaatcttgatcgaagttcatgcggctgattaatgactacaccacacgcgctatatacaaactggtcgtccatcgaagtttcacttcgcctaatgatctatttcaccggtctaactataaatttgtatgtatgtcgatatgtgtatactaagaaaatcttaggtggccactacactaagcgatatggtttccgtatattaatctgcgttcatcttttgcagttttagctatcttatctctagatgcctacgagtcttaaagcctactctcttaatgagtgagcggtcctgtatggcgctatatcctcc

SEQ ID NO: 507201 - DNA, 171 bp, Homo sapiens
tggcctctccctcccttcacttctccacctgcgagccggtgtcttgggtgggctagataggatatactgtatgcctgctcttcatgctgctgactcactttatcatagttccatttactttgccttcgttggtgagactgtatcctgtcggactagtcgggggggacggag

SEQ ID NO: 507202 - DNA, 863 bp, Homo sapiens
  misc_feature (263)..(263): n is a, c, g, or t
ggcagttcggtggtcccgcgagtctgtctcttgcataacagacagtgatttgtgactggaacacgatcctggggactctcttctcagcactccgaccgccctccgatttcctctccgccttgcaacctccggtgaccatcttctcggtccatgctcctgcattctggtgacctgccagaatccgttcaggtggttagctccttcttgcaaaaccagaccgatgagtctacccagcattcagtcatgaagtgtattcgcaccgnacgatggatggcgagtccgacgaacattcctggatcaatattgtaccgtgctggacctctctacaccatatcctctctcatgtggcttctagtttcggactcgacgatagatgtggactctggaaggactgtgagctcactgtctattccgcgaagtctggccgaggagatagcgcagagggctacgaagtcgtctcctgaatgatgtcgaaaccagaggtggctatccggcgctctcttccatggacagtcaaagcaagccatgtcgtgactgattgagtggggtaaaaccccatgacgccactgacagctgccactgtgctccctggaggaaaaagtctgcaatctaggcccgtattagggatcttcatgccctgaggttctgctcgcaacggactcgccgatgtcttgtgtacttacctgagacaacttcaactttcgctagattgagggacttttgcacgtttgatccctgaataatgcgtgtgaaccagctctgaaactaacctttcattggggctggggtaggcccgggaaggctaggactttggagccaagttattatactatcgaagaaggttgtcatcttcaatgccccaa

SEQ ID NO: 507203 - DNA, 166 bp, Homo sapiens
gtgggagggttgcttgaacccaggagcttgaggctgcagtgagctgtgatcactgcatttcagcatgggggacaggtagacctgtctcacaattttcttttttactaaattccagactacagttttggattacagatgtaattcagcatgaaaagtttagaacttg

SEQ ID NO: 507204 - DNA, 1484 bp, Homo sapiens
cttatcctgtatctgctcttccttttgtgcggtcgtgggcgggggtgctcgggtttctgtggtgtgttgggtctgtgggctttcttttgtttgggtggtcgtcattttggtgcccgtgttggttctgttcttttgttcgcggtggctgttccctggctcgtttgtttcttggcctcgttgtgtggtttatcttctcgtcctgtgggggtcctttgtgacctgttctttgttcttgtatttttgttctttgtgtttttttgttgtttctccgtttttccttggtgttttcttgtgttttgttggtctgttgttttgttttttttttcagaactaaaaaaaatatttcatttcattctgaataaaaaacagaacagacagaactcttggaaattctgaaaacaatgtcatcgctacagcaaaatttcacagaaatcatcgcagagtggggaccaaggccaggccctgacccgccgtgaaggctgcctctccggggaggggcacgacgcccagtgggccagagaggggcaggcacaggcggtggctgtgcccctctgaccagccctgccgggtctctcgggaccgagctcaaagcccagcccccagcagctgcctcgggactcccaccggggctgggaggggctgcccgtcctcaagacgcccccgtgcgagagcccttcctgctgcggacgctccacatgcccctcttggagtggtagtggtgatagaaattccgcagtcggagccgctccacctccagccctgcctgcaggaccctgtccaggagctcccagtcttcacccccccactggtctcggaactcctccgtgttcattcctccaacccggtcaaagtccgacttgtagatcccaaaaaggccaaagccgttcacctcccagtaaccgtgggggtcccggggcgagctcccgcagctcaggcgcatgaccacgggcgcgaaggccagcctgccctccacgcagtgcttgcggatgccgtccaggatgttgggtgggaagtggatgtgcaggtcgcagaggaacacgatgctgctggcgtcctctaccgcgtccactcccgcctgcagcccggcggagcgctcgaagttcccggttcgtctcaggtactggtaccggggcaggcgcgcggcgcgcagggcccgctccacgtccatatcctcgctctcgaaatccaccaggacgacgctgaaacgcgagtccccggtgcgcgcgtgcagcgcagccatgtccgccaggaactgtgccacccaccgtgcctggtttttcactggcacgatgaagtgaaccatcacgtcctggcgccaggccaggcgcagtggccggcagagctcggggcggccgtcggggcgcacggaggcggcgggagcgggctcgggactttctccgtctgcatcccctacgcgggctcccggcagccgcaggaagacgtactcggacagtcgcaggcggccgcccccgcgctcctgcagc

SEQ ID NO: 507205 - DNA, 404 bp, Homo sapiens
ggatgttcacatcaatcatggaacaggccccgattcagagtgagccccgggatacggctggtgatggctcagacacatgatcagggatatacagaccttactatcccggatggagtgtcgaggagggcgctccagccgcagcatcagtcgagccgcccccgtcagccaccggctgtgaccccggagccagtaaccttgagctctcacacatcagaaccgagttgtaaagtgaacgtcgaccgtccccggagacggcccagtaggagagcagaaggcaagtggacggacgcgtgcccctagcccatgaatcccaggagactctactccgtgtgcccatgctccctagcggtgtcccaagcagcctgaccccaggaagatccaactgcacccaaccagtccttccc

SEQ ID NO: 507206 - DNA, 131 bp, Homo sapiens
agaggatcccctccacactggatatgtggtgacgacaattgtccaccatcatcattcaagtatggtgtatacagcctcccacgctggggtactgggggcatcagcatcagtcacttccagggtggagagag

SEQ ID NO: 507207 - DNA, 207 bp, Homo sapiens
ggggggtcccggggggggggcccttttttcccccgggggcccccaaaaaatttttggcccccccccggggggggggtttttccccctaaaaatgggggccaatccttttttttcccgggggggcccttttggttttttccccccgtttttcccccccccccctttgggggtgggccccctttttccccattttttttggggggggga

SEQ ID NO: 507208 - DNA, 703 bp, Homo sapiens
ggtgactgggtccacagaatgcccgtgtggctcctggaatagcacccctattggaccacttgtggtccccacaaggagaaggaattgaggaaatatagctaatctgaaagttcgcttaaagaggcacacgctctatatacttccaagccacttggcacacaccacggcacttatgaccacgagaagcctgtgagaagttgagaaatggtggagagttcccacactgtgcctggagccacgccttataatggtttctggctccctcggtgaaacgctgtgtgggtaatgccactcggagtgagctctgctctggggtatatggagagagagtcgcgcttgagactacaccccgctgtggaggcccaagtttttataaagagaagcccacaaggagctcacgagattcactgattgaaagaaaatgcacggcacgacctgttatccttaaactagggtttttaatgagcccccacccagccagcactgcacgcttatctgcttgaaaagggtcttgcctcacaccccagctagagtgcacgtggcctcttgaagcttactacacgcctccaaactttctgggctccagtgagtcctcacgccttcccacgtggttctttgtagagctgcctgatggaggtctcactggcacccagaagaatttaaaccgtgtttcccattttaataaatttttgccatccctcca

SEQ ID NO: 507209 - DNA, 212 bp, Homo sapiens
cccccccccccccccccccccagggggggggggggggggcccgtgccctttttggggggggggtttccccccccgttcccggggtttccgggcctttattttggggaccccaaggggggggggggggggcccccttttccccattttgggggggggggggcccggggggccaaagttgggaccccccccttttttgttttttccctccccca

SEQ ID NO: 507210 - DNA, 5356 bp, Homo sapiens
  misc_feature (15)..(15): n is a, c, g, or t
gattcgaggtgctcngtggccgcgagtgcatcttccacgaacctaattcatctctccagcaaaggacacatctctccagcaaaggacacctctctccagcaaaggacacctgcagagatgtccccagtccttcacttctatgttcgtccctctggccatgagggggcagcctctggacacactcggaggaaactgcaagggaaactgccagagctgcagggcgtcgagactgaactgtgctacaacgtgaactggacagctgaggccctccccagtgctgaggagacaaagaagctgatgtggctgtttggttgccccttactgctggatgatgttgctcgggagtcctggctccttcctggctccaatgacctgctgctggaggtcgggcccaggctgaacttctccaccccaacatccaccaacatcgtgtcagtgtgccgcgccactgggctggggcctgtggatcgtgtggagaccacccggcgctaccggctctcgtttgcccaccccccgtcagctgaggtggaagccattgctctggctaccctgcacgaccggatgacagagcagcacttcccccatcccatccagagtttctcccctgagagcatgccggaacccctcaatggccctatcaatatactgggtgagggccggcttgcgctggagaaggccaaccaggagcttggtctggctttagactcttgggacctagacttctacaccaagcgcttccaggagctacagcggaacccgagcactgtggaggcctttgacttggcgcagtccaatagcgagcacagccgacactggttcttcaagggccagctccacgtggatgggcagaagctggtgcactcactgtttgagtccatcatgagcacccaggaatcctcgaaccccaacaacgtcctcaaattctgtgataacagcagtgcaatccagggaaaggaagtccgattcctacggcctgaggaccccacacggccaagccgcttccagcaacagcaagggctgagacatgttgtcttcacagcagagactcacaactttcccacaggagtatgcccctttagtggtgcaaccactggcacagggggccggattcgagatgtccagtgcacaggccgcggggcccacgtggtggctggcactgccggctattgctttggaaatctgcatattccaggttacaatctgccctgggaggatctaagcttccagtatcctgggaattttgcccggcccctggaggttgccattgaagccagtaatggagcttctgactatggcaacaagtttggggaaccagtgctggctggcttcgcccgctccttgggcctccagctcccagacggccagcggcgtgagtggatcaagcccatcatgtttagtgggggcattgggtccatggaagctgaccacataagcaaggaggccccagagccaggcatggaagttgtaaaggttggaggtcccgtctacaggattggagttggaggtggagctgcttcatctgtgcaggtgcagggagataacaccagtgacctggactttggggctgtgcagcgaggagacccggagatggaacagaagatgaaccgtgtgatcagggcttgtgtggaggcccccaagggaaaccccatctgcagccttcatgatcagggcgctggtggcaatggcaatgtcctaaaagagctgagtgacccagctggagccatcatttacaccagccgcttccagcttggggacccaaccctgaatgccctggaaatctggggggctgagtaccaggaatcaaatgctcttctgctgaggtcccccaaccgggacttcctgactcatgtcagtgcccgtgaacgttgcccggcttgcttcgtgggcaccatcactggagaccggagaatagtgctggtggacgatcgggagtgtcctgtcagaagaaatggccaggggggatgcccccccgacacccctgccaacccctgtggacctggagctcgaatgggtgctgggcaagatgcctcggaaggagttcttcctgcagaggaagccccccatgctgcagcctctggccttgcccccagggctgagcgtgcaccaggctctggagagggttctgaggctgcccgccgtggccagcaagcgctacctcaccaataaggtggaccgctctgtgggaggcctggtggcccagcagcagtgcgtggggcccctgcaaactcctctggcagatgtagcggttgtggcactgagccatgaggagctcataggggctgccacagccttgggagaacagccagtcaagagcctgctggacccaaaagtcgccgcccggctggccgtggccgaagccctcaccaacctggtgtttgctctggtcactgacctccgggatgtgaagtgtagcgggaactggatgtgggcagccaagctcccaggggagggcgcagctttggcggatgcctgtgaggctatggtggcagtgatggcagccctgggtgtggcagtggatggtggcaaggactccctcagcatggctgctcgggttggcactgagaccgtgcgggctcctgggtcactggtcatctcagcctatgccgtctgcccagacatcacagccactgtgaccccagacctcaagcatcctgaagggagaggccatctgctctatgtggctctgagccctgggcagcaccggctcgggggcacagctctggcccagtgcttctcccagcttggggaacaccctccagacctggaccttcctgagaacttggtgcgggccttcagcatcactcaggggctgctgaaagaccgcctcctctgctcaggccacgatgtcagtgacggaggcctcgtcacatgcctgctggagatggcctttgctggaaattgcgggctacaggtggatgtgcctgtccccagggttgatgtcctgtctgtgctgttcgctgaggagccaggcctcgtgctggaggtgcaggagccagacctggcccaggtgctgaagcgttaccgggatgctggcctccattgcctggagctgggccacacaggcgaggccgggccccacgccatggtccgggtgtcagtgaacggggctgtggttctggaggagcctgttggggagctgcgagccctctgggaggagacgagtttccagctggaccggctacaggcagagcctcgctgtgtggcagaggaggaacggggcctgagggagcggatggggcccagctattgcctgccccccacctttcccaaagcctccgtgccccgtgagcctggtggtcccagcccccgagtcgccatcttgcgagaggagggcagtaatggagaccgggagatggccgatgccttccacttagctgggtttgaggtatgggacgtgaccatgcaggacctctgctctggggcaattgggctggacactttccgtggcgtggccttcgtgggcggcttcagctatgcagatgtcctgggctctgccaaagggtgggcagctgctgtgacctttcatcccagggctggggctgagctgaggcgcttccggaagcggccagacaccttcagcctgggcgtgtgtaatggctgtcaactgctggctctgctcggctgggtgggaggcgaccccaatgaggatgctgcagagatgggccctgactcccagccagcccggccaggccttctgctacgccacaacctgtctgggcgctacgagtctcgctgggccagcgtgcgtgtggggcctgggccagccctgatgctgcgagggatggagggcgccgtgctgcccgtgtggagtgcgcacggggaaggttacgtagcattttcttctccggaactccaagctcagattgaggccaggggcttggctccactgcactgggctgatgatgacgggaaccccacagagcagtaccctctgaatcccaatgggtccccagggggcgtggctggcatctgctcctgtgatggccgccacctggctgtcatgcctcaccctgagcgggccgttaggccttggcagtgggcatggcgaccccctccatttgatactctgaccacctccccctggctccagctctttatcaatgcccgaaactggaccctggaagggagctgctgactggccacaggggctcacctgggccccatggcttttcacctaagtgggtcctgccccctcccccatgaccttcaggagcaccccatattatttccaaaaatatcttggacagacaaggaccaaaatgccaaaatctcagcggactcgataatctgcctgctgatgttccttctgtggctgtgtctattttcagttctgctctaacatggcatgccctttctcagcccaggaaacagcatgtggttcagagaaaagagcgacaaggaaaagttaggactcctgaggtccgaacaggggcttctgttgcccacttcacaacacccagtgatcaccggtgtgcaattgcctccttggctctgagggatgttttgcgctcccttttctcatcattggggttagcgggtgcagacaaattcagcaatagtatgcagatcagcccctcaccacctcattgttctcatctggaactgaaactttctggatttctcttgaagtgctacactgcactgaatgtaaggaattgttgcttgtggaagtttctcagcgtttctggctgtcttagggctggcctcagaacccagcattcctgttatttgcttctaaattagcagctctcttttttttttttttttgaggcagtctcactctgtcacccaggctggagtacaatggcgtgatctcggcccactgcaacctctgcctcctgggttcaagcaattttcctgcctcagcctcccgagtagctgggagtacaggcacacaccaccacacccagctaatttttgtatttttagtagagatagggtttcaccatgtctcccaggctggtctcaaactcctaacctcaagtgattcgcctgcctcggcctcccaaagtgctgggattacaggtgggagccactacagctggcccagcagctctgtttctgatagaggtggttggggctctcatccctagatcctaaccctttagtatgctggaattctactcttcacttactgcattgactgttgttgattagttattattgcaaagcactgtcaccggcctcagggagtttatgtgtaatagaattaaaaataatagctgtgtataacacttagctcaagccacgcatgtgtgaggcatttggtatgtatctgaattaattctcactaaaattcagcaaaggacttgatagcctctccccgccttttcaataaaggatgaatgaaggttga

SEQ ID NO: 507211 - DNA, 343 bp, Homo sapiens
  misc_feature (131)..(131): n is a, c, g, or t
  misc_feature (146)..(146): n is a, c, g, or t
gactctgccctgttgctgtcgcgccgctgctggttgctgtccctggacccctaccactggaggagaccatcacaagatcccccccacagtcagcttgtcttgcttggatcactggtcattttctctcaggntcatcttttaacagntgtgggagaaagttcctacattcccctggcaaggggcacgtcaaccatagtccatttcattcacccttttccacgcccaagccgatttctccaattcccccttcagattcgcaaacaggaaatttggggatcttgggccattctttatcagaaaggtgggggggtgggacaggaagaaacccccgttgcagttattc

SEQ ID NO: 507212 - DNA, 317 bp, Homo sapiens
  misc_feature (56)..(56): n is a, c, g, or t
  misc_feature (129)..(129): n is a, c, g, or t
  misc_feature (162)..(162): n is a, c, g, or t
  misc_feature (166)..(166): n is a, c, g, or t
  misc_feature (184)..(184): n is a, c, g, or t
  misc_feature (225)..(225): n is a, c, g, or t
  misc_feature (277)..(277): n is a, c, g, or t
  misc_feature (294)..(294): n is a, c, g, or t
ttcggcacaggattctcaacatgtccgagactgctcctgccgctcccgctgccggnctcctgcgagaaaggcccctgtaaagaagaaggcggccaaaaaggctgggggtacgcctcgtaaggttccggntcccccgtgtcagagctcatcaccaaggctgtngcgnctctaaagagcgtaggangtttctctggctgctctgaaaaaagcgttggctgccgcggntatgatgtgggagaaaaacaacagccgtattcaaacttggtctcaagagccngggtgagcaaggggcantctgggtccaaacggaaagggca

SEQ ID NO: 507213 - DNA, 5472 bp, Homo sapiens
  misc_feature (15)..(15): n is a, c, g, or t
gattcgaggtgctcngtggccgcgagtgcatcttccacgaacctaattcatctctccagcaaaggacacatctctccagcaaaggacacctctctccagcaaaggacacctgcagagatgtccccagtccttcacttctatgttcgtccctctggccatgagggggcagcctctggacacactcggaggaaactgcaagggaaactgccagagctgcagggcgtcgagactgaactgtgctacaacgtgaactggacagctgaggccctccccagtgctgaggagacaaagaagctgatgtggctgtttggttgccccttactgctggatgatgttgctcgggagtcctggctccttcctggctccaatgacctgctgctggaggtcgggcccaggctgaacttctccaccccaacatccaccaacatcgtgtcagtgtgccgcgccactgggctggggcctgtggatcgtgtggagaccacccggcgctaccggctctcgtttgcccaccccccgtcagctgaggtggaagccattgctctggctaccctgcacgaccggatgacagagcagcacttcccccatcccatccagagtttctcccctgagagcatgccggaacccctcaatggccctatcaatatactgggtgagggccggcttgcgctggagaaggccaaccaggagcttggtctggctttagactcttgggacctagacttctacaccaagcgcttccaggagctacagcggaacccgagcactgtggaggcctttgacttggcgcagtccaatagcgagcacagccgacactggttcttcaagggccagctccacgtggatgggcagaagctggtgcactcactgtttgagtccatcatgagcacccaggaatcctcgaaccccaacaacgtcctcaaattctgtgataacagcaggtgctgtgccctagactgggttggcgtcaggacccggggaggggaggccccaggccctggttgggttagtgtaggtcccagaaaggaagcaaggtccatgacgggtatgtccacagtgcaatccagggaaaggaagtccgattcctacggcctgaggaccccacacggccaagccgcttccagcaacagcaagggctgagacatgttgtcttcacagcagagactcacaactttcccacaggagtatgcccctttagtggtgcaaccactggcacagggggccggattcgagatgtccagtgcacaggccgcggggcccacgtggtggctggcactgccggctattgctttggaaatctgcatattccaggttacaatctgccctgggaggatctaagcttccagtatcctgggaattttgcccggcccctggaggttgccattgaagccagtaatggagcttctgactatggcaacaagtttggggaaccagtgctggctggcttcgcccgctccttgggcctccagctcccagacggccagcggcgtgagtggatcaagcccatcatgtttagtgggggcattgggtccatggaagctgaccacataagcaaggaggccccagagccaggcatggaagttgtaaaggttggaggtcccgtctacaggattggagttggaggtggagctgcttcatctgtgcaggtgcagggagataacaccagtgacctggactttggggctgtgcagcgaggagacccggagatggaacagaagatgaaccgtgtgatcagggcttgtgtggaggcccccaagggaaaccccatctgcagccttcatgatcagggcgctggtggcaatggcaatgtcctaaaagagctgagtgacccagctggagccatcatttacaccagccgcttccagcttggggacccaaccctgaatgccctggaaatctggggggctgagtaccaggaatcaaatgctcttctgctgaggtcccccaaccgggacttcctgactcatgtcagtgcccgtgaacgttgcccggcttgcttcgtgggcaccatcactggagaccggagaatagtgctggtggacgatcgggagtgtcctgtcagaagaaatggccaggggggatgcccccccgacacccctgccaacccctgtggacctggagctcgaatgggtgctgggcaagatgcctcggaaggagttcttcctgcagaggaagccccccatgctgcagcctctggccttgcccccagggctgagcgtgcaccaggctctggagagggttctgaggctgcccgccgtggccagcaagcgctacctcaccaataaggtggaccgctctgtgggaggcctggtggcccagcagcagtgcgtggggcccctgcaaactcctctggcagatgtagcggttgtggcactgagccatgaggagctcataggggctgccacagccttgggagaacagccagtcaagagcctgctggacccaaaagtcgccgcccggctggccgtggccgaagccctcaccaacctggtgtttgctctggtcactgacctccgggatgtgaagtgtagcgggaactggatgtgggcagccaagctcccaggggagggcgcagctttggcggatgcctgtgaggctatggtggcagtgatggcagccctgggtgtggcagtggatggtggcaaggactccctcagcatggctgctcgggttggcactgagaccgtgcgggctcctgggtcactggtcatctcagcctatgccgtctgcccagacatcacagccactgtgaccccagacctcaagcatcctgaagggagaggccatctgctctatgtggctctgagccctgggcagcaccggctcgggggcacagctctggcccagtgcttctcccagcttggggaacaccctccagacctggaccttcctgagaacttggtgcgggccttcagcatcactcaggggctgctgaaagaccgcctcctctgctcaggccacgatgtcagtgacggaggcctcgtcacatgcctgctggagatggcctttgctggaaattgcgggctacaggtggatgtgcctgtccccagggttgatgtcctgtctgtgctgttcgctgaggagccaggcctcgtgctggaggtgcaggagccagacctggcccaggtgctgaagcgttaccgggatgctggcctccattgcctggagctgggccacacaggcgaggccgggccccacgccatggtccgggtgtcagtgaacggggctgtggttctggaggagcctgttggggagctgcgagccctctgggaggagacgagtttccagctggaccggctacaggcagagcctcgctgtgtggcagaggaggaacggggcctgagggagcggatggggcccagctattgcctgccccccacctttcccaaagcctccgtgccccgtgagcctggtggtcccagcccccgagtcgccatcttgcgagaggagggcagtaatggagaccgggagatggccgatgccttccacttagctgggtttgaggtatgggacgtgaccatgcaggacctctgctctggggcaattgggctggacactttccgtggcgtggccttcgtgggcggcttcagctatgcagatgtcctgggctctgccaaagggtgggcagctgctgtgacctttcatcccagggctggggctgagctgaggcgcttccggaagcggccagacaccttcagcctgggcgtgtgtaatggctgtcaactgctggctctgctcggctgggtgggaggcgaccccaatgaggatgctgcagagatgggccctgactcccagccagcccggccaggccttctgctacgccacaacctgtctgggcgctacgagtctcgctgggccagcgtgcgtgtggggcctgggccagccctgatgctgcgagggatggagggcgccgtgctgcccgtgtggagtgcgcacggggaaggttacgtagcattttcttctccggaactccaagctcagattgaggccaggggcttggctccactgcactgggctgatgatgacgggaaccccacagagcagtaccctctgaatcccaatgggtccccagggggcgtggctggcatctgctcctgtgatggccgccacctggctgtcatgcctcaccctgagcgggccgttaggccttggcagtgggcatggcgaccccctccatttgatactctgaccacctccccctggctccagctctttatcaatgcccgaaactggaccctggaagggagctgctgactggccacaggggctcacctgggccccatggcttttcacctaagtgggtcctgccccctcccccatgaccttcaggagcaccccatattatttccaaaaatatcttggacagacaaggaccaaaatgccaaaatctcagcggactcgataatctgcctgctgatgttccttctgtggctgtgtctattttcagttctgctctaacatggcatgccctttctcagcccaggaaacagcatgtggttcagagaaaagagcgacaaggaaaagttaggactcctgaggtccgaacaggggcttctgttgcccacttcacaacacccagtgatcaccggtgtgcaattgcctccttggctctgagggatgttttgcgctcccttttctcatcattggggttagcgggtgcagacaaattcagcaatagtatgcagatcagcccctcaccacctcattgttctcatctggaactgaaactttctggatttctcttgaagtgctacactgcactgaatgtaaggaattgttgcttgtggaagtttctcagcgtttctggctgtcttagggctggcctcagaacccagcattcctgttatttgcttctaaattagcagctctcttttttttttttttttgaggcagtctcactctgtcacccaggctggagtacaatggcgtgatctcggcccactgcaacctctgcctcctgggttcaagcaattttcctgcctcagcctcccgagtagctgggagtacaggcacacaccaccacacccagctaatttttgtatttttagtagagatagggtttcaccatgtctcccaggctggtctcaaactcctaacctcaagtgattcgcctgcctcggcctcccaaagtgctgggattacaggtgggagccactacagctggcccagcagctctgtttctgatagaggtggttggggctctcatccctagatcctaaccctttagtatgctggaattctactcttcacttactgcattgactgttgttgattagttattattgcaaagcactgtcaccggcctcagggagtttatgtgtaatagaattaaaaataatagctgtgtataacacttagctcaagccacgcatgtgtgaggcatttggtatgtatctgaattaattctcactaaaattcagcaaaggacttgatagcctctccccgccttttcaataaaggatgaatgaaggttga

SEQ ID NO: 507214 - DNA, 5649 bp, Homo sapiens
  misc_feature (15)..(15): n is a, c, g, or t
gattcgaggtgctcngtggccgcgagtgcatcttccacgaacctaattcatctctccagcaaaggacacatctctccagcaaaggacacctctctccagcaaaggacacctgcagagatgtccccagtccttcacttctatgttcgtccctctggccatgagggggcagcctctggacacactcggaggaaactgcaagggaaactgccagagctgcagggcgtcgagactgaactgtgctacaacgtgaactggacagctgaggccctccccagtgctgaggagacaaagaagctgatgtggctgtttggttgccccttactgctggatgatgttgctcgggagtcctggctccttcctggctccaatgacctgctgctggaggtcgggcccaggctgaacttctccaccccaacatccaccaacatcgtgtcagtgtgccgcgccactgggctggggcctgtggatcgtgtggagaccacccggcgctaccggctctcgtttgcccaccccccgtcagctgaggtggaagccattgctctggctaccctgcacgaccggatgacagagcagcacttcccccatcccatccagagtttctcccctgagagcatgccggaacccctcaatggccctatcaatatactgggtgagggccggcttgcgctggagaaggccaaccaggagcttggtctggctttagactcttgggacctagacttctacaccaagcgcttccaggagctacagcggaacccgagcactgtggaggcctttgacttggcgcagtccaatagcgagcacagccgacactggttcttcaagggccagctccacgtggatgggcagaagctggtgcactcactgtttgagtccatcatgagcacccaggaatcctcgaaccccaacaacgtcctcaaattctgtgataacagcaggtgctgtgccctagactgggttggcgtcaggacccggggaggggaggccccaggccctggttgggttagtgtaggtcccagaaaggaagcaaggtccatgacgggtatgtccacagtgcaatccagggaaaggaagtccgattcctacggcctgaggaccccacacggccaagccgcttccagcaacagcaagggctgagacatgttgtcttcacagcagagactcacaactttcccacaggagtatgcccctttagtggtgcaaccactggcacagggggccggattcgagatgtccagtgcacaggccgcggggcccacgtggtggctggcactgccggctattgctttggaaatctgcatattccaggttacaatctgccctgggaggatctaagcttccagtatcctgggaattttgcccggcccctggaggttgccattgaagccagtaatggagcttctgactatggcaacaagtttggggaaccagtgctggctggcttcgcccgctccttgggcctccagctcccagacggccagcggcgtgagtggatcaagcccatcatgtttagtgggggcattgggtccatggaagctgaccacataagcaaggaggccccagagccaggcatggaagttgtaaaggttggaggtcccgtctacaggattggagttggaggtggagctgcttcatctgtgcaggtgcagggagataacaccagtgacctggactttggggctgtgcagcgaggagacccggagatggaacagaagatgaaccgtgtgatcagggcttgtgtggaggcccccaagggaaaccccatctgcagccttcatgatcagggcgctggtggcaatggcaatgtcctaaaagagctgagtgacccagctggagccatcatttacaccagccgcttccagcttggggacccaaccctgaatgccctggaaatctggggggctgagtaccaggaatcaaatgctcttctgctgaggtcccccaaccgggacttcctgactcatgtcagtgcccgtgaacgttgcccggcttgcttcgtgggcaccatcactggagaccggagaatagtgctggtggacgatcgggagtgtcctgtcagaagaaatggccaggggggatgcccccccgacacccctgccaacccctgtggacctggagctcgaatgggtgctgggcaagatgcctcggaaggagttcttcctgcagaggaagccccccatgctgcagcctctggccttgcccccagggctgagcgtgcaccaggctctggagagggttctgaggctgcccgccgtggccagcaagcgctacctcaccaataaggtggaccgctctgtgggaggcctggtggcccagcagcagtgcgtggggcccctgcaaactcctctggcagatgtagcggttgtggcactgagccatgaggagctcataggggctgccacagccttgggagaacagccagtcaagagcctgctggacccaaaagtcgccgcccggctggccgtggccgaagccctcaccaacctggtgtttgctctggtcactgacctccgggatgtgaagtgtagcgggaactggatgtgggcagccaagctcccaggggagggcgcagctttggcggatgcctgtgaggctatggtggcagtgatggcagccctgggtgtggcagtggatggtggcaaggactccctcagcatggctgctcgggttggcactgagaccgtgcgggctcctgggtcactggtcatctcagcctatgccgtctgcccagacatcacagccactgtgaccccagacctcaagcatcctgaagggagaggccatctgctctatgtggctctgagccctgggcagcaccggctcgggggcacagctctggcccagtgcttctcccagcttggggaacaccctccagacctggaccttcctgagaacttggtgcgggccttcagcatcactcaggggctgctgaaagaccgcctcctctgctcaggccacgatgtcagtgacggaggcctcgtcacatgcctgctggagatggcctttgctggaaattgcgggctacaggtggatgtgcctgtccccagggttgatgtcctgtctgtgctgttcgctgaggagccaggcctcgtgctggaggtgcaggagccagacctggcccaggtgctgaagcgttaccgggatgctggcctccattgcctggagctgggccacacaggcgaggccgggccccacgccatggtccgggtgtcagtgaacggggctgtggttctggaggagcctgttggggagctgcgagccctctgggaggagacgagtttccagctggaccggctacaggcagagcctcgctgtgtggcagaggaggaacggggcctgagggagcggatggggcccagctattgcctgccccccacctttcccaaagcctccgtgccccgtgagcctggtggtcccagcccccgagtcgccatcttgcgagaggagggcagtaatggagaccgggagatggccgatgccttccacttagctgggtttgaggtatgggacgtgaccatgcaggacctctgctctggggcaattgggctggacactttccgtggcgtggccttcgtgggcggcttcagctatgcagatgtcctgggctctgccaaagggtgggcagctgctgtgacctttcatcccagggctggggctgagctgaggcgcttccggaagcggccagacaccttcagcctgggcgtgtgtaatggctgtcaactgctggctctgctcggctgggtgggaggcgaccccaatgaggatgctgcagagatgggccctgactcccagccagcccggccaggccttctgctacgccacaacctgtctgggcgctacgagtctcgctgggccagcgtgcgtgtggggcctgggccagccctgatgctgcgagggatggagggcgccgtgctgcccgtgtggagtgcgcacggggaaggttacgtagcattttcttctccggaactccaagctcagattgaggccaggggcttggctccactgcactgggctgatgatgacgggaaccccacagagcagtaccctctgaatcccaatgggtccccagggggcgtggctggcatctgctcctgtgatggccgccacctggctgtcatgcctcaccctgagcgggccgttaggccttggcagtgggcatggcgaccccctccatttgatactctgaccacctccccctggctccagctctttatcaatgcccgaaactggaccctggaagggagctgctgactggccacaggggctcacctgggccccatggcttttcacctaagtgggtcctgccccctcccccatgaccttcaggagcaccccatattatttccaaaaatatcttggacagacaaggaccaaaatgccaaaatctcagcggactcgataatctgcctgctgatgttccttctgtggctgtgtctattttcagttctgctctaacatggcatgccctttctcagcccaggaaacagcatgtggttcagagaaaagagcgacaaggaaaagttaggactcctgaggtccgaacaggggcttctgttgcccacttcacaacacccagtgatcaccggtgtgcaattgcctccttggctctgagggatgttttgcgctcccttttctcatcattggggttagcgggtgcagacaaattcagcaatagtatgcagatcagcccctcaccacctcattgttctcatctggaactgaaactttctggatttctcttgaagtgctacactgcactgaatgtaaggaattgttgcttgtggaagtttctcagcgtttctggctgtcttagggctggcctcagaacccagcattcctgttatttgcttctaaattagcagctctcttttttttttttttttgaggcagtctcactctgtcacccaggctggagtacaatggcgtgatctcggcccactgcaacctctgcctcctgggttcaagcaattttcctgcctcagcctcccgagtagctgggagtacaggcacacaccaccacacccagctaatttttgtatttttagtagagatagggtttcaccatgtctcccaggctggtctcaaactcctaacctcaagtgattcgcctgcctcggcctcccaaagtgctgggattacaggtgggagccactacagctggcccagcagctctgtttctgatagaggtggttggggctctcatccctagatcctaaccctttagtatgctggaattctactcttcacttactgcattgactgttgttgattagttattattgcaaagcactgtcaccggcctcagggagtttatgtgtaatagaattaaaaataatagctgtgtataacacttagctcaagccacgcatgtgtgaggcatttggtatgtatctgaattaattctcactaaaattcagcaaaggacttgatagcctctccccgccttttcaataaaggatgaatgaaggttgaaaaaaaagacaaaaaaaaagagaaaaacagaacacaaaacaaggcgggggagataaaacaacaccaaaagcaacaaatgcacccatgtttgaaaggggccaaaaagatataaagagcgcgggaaaaaaggcagagagaacgacagaaagagacaatggtggaggtgaaccaacaaca

SEQ ID NO: 507215 - DNA, 102 bp, Homo sapiens
cagcatctcacctctgggcccagtgccttgtgctaatgcctgcccagctttcggctcctgaaacatcttgttgttttacgcatgttggctggggcatctctc

SEQ ID NO: 507216 - DNA, 5337 bp, Homo sapiens
  misc_feature (15)..(15): n is a, c, g, or t
gattcgaggtgctcngtggccgcgagtgcatcttccacgaacctaattcatctctccagcaaaggacacatctctccagcaaaggacacctctctccagcaaaggacacctgcagagatgtccccagtccttcacttctatgttcgtccctctggccatgagggggcagcctctggacacactcggaggaaactgcaagggaaactgccagagctgcagggcgtcgagactgaactgtgctacaacgtgaactggacagctgaggccctccccagtgctgaggagacaaagaagctgatgtggctgtttggttgccccttactgctggatgatgttgctcgggagtcctggctccttcctggctccaatgacctgctgctggaggtcgggcccaggctgaacttctccaccccaacatccaccaacatcgtgtcagtgtgccgcgccactgggctggggcctgtggatcgtgtggagaccacccggcgctaccggctctcgtttgcccaccccccgtcagctgaggtggaagccattgctctggctaccctgcacgaccggatgacagagcagcacttcccccatcccatccagagtttctcccctgagagcatgccggaacccctcaatggccctatcaatatactgggtgagggccggcttgcgctggagaaggccaaccaggagcttggtctggctttagactcttgggacctagacttctacaccaagcgcttccaggagctacagcggaacccgagcactgtggaggcctttgacttggcgcagtccaatagcgagcacagccgacactggttcttcaagggccagctccacgtggatgggcagaagctggtgcactcactgtttgagtccatcatgagcacccaggaatcctcgaaccccaacaacgtcctcaaattctgtgataacagcaggtgctgtgccctagactgggttggcgtcaggacccggggaggggaggccccaggccctggttgggttagtgtaggtcccagaaaggaagcaaggtccatgacgggtatgtccacagtgcaatccagggaaaggaagtccgattcctacggcctgaggaccccacacggccaagccgcttccagcaacagcaagggctgagacatgttgtcttcacagcagagactcacaactttcccacaggagtatgcccctttagtggtgcaaccactggcacagggggccggattcgagatgtccagtgcacaggccgcggggcccacgtggtggctggcactgccggctattgctttggaaatctgcatattccaggttacaatctgccctgggaggatctaagcttccagtatcctgggaattttgcccggcccctggaggttgccattgaagccagtaatggagcttctgactatggcaacaagtttggggaaccagtgctggctggcttcgcccgctccttgggcctccagctcccagacggccagcggcgtgagtggatcaagcccatcatgtttagtgggggcattgggtccatggaagctgaccacataagcaaggaggccccagagccaggcatggaagttgtaaaggttggaggtcccgtctacaggattggagttggaggtggagctgcttcatctgtgcaggtgcagggagataacaccagtgacctggactttggggctgtgcagcgaggagacccggagatggaacagaagatgaaccgtgtgatcagggcttgtgtggaggcccccaagggaaaccccatctgcagccttcatgatcagggcgctggtggcaatggcaatgtcctaaaagagctgagtgacccagctggagccatcatttacaccagccgcttccagcttggggacccaaccctgaatgccctggaaatctggggggctgagtaccaggaatcaaatgctcttctgctgaggtcccccaaccgggacttcctgactcatgtcagtgcccgtgaacgttgcccggcttgcttcgtgggcaccatcactggagaccggagaatagtgctggtggacgatcgggagtgtcctgtcagaagaaatggccaggggggatgcccccccgacacccctgccaacccctgtggacctggagctcgaatgggtgctgggcaagatgcctcggaaggagttcttcctgcagaggaagccccccatgctgcagcctctggccttgcccccagggctgagcgtgcaccaggctctggagagggttctgaggctgcccgccgtggccagcaagcgctacctcaccaataaggtggaccgctctgtgggaggcctggtggcccagcagcagtgcgtggggcccctgcaaactcctctggcagatgtagcggttgtggcactgagccatgaggagctcataggggctgccacagccttgggagaacagccagtcaagagcctgctggacccaaaagtcgccgcccggctggccgtggccgaagccctcaccaacctggtgtttgctctggtcactgacctccgggatgtgaagtgtagcgggaactggatgtgggcagccaagctcccaggggagggcgcagctttggcggatgcctgtgaggctatggtggcagtgatggcagccctgggtgtggcagtggatggtggcaaggactccctcagcatggctgctcgggttggcactgagaccgtgcgggctcctgggtcactggtcatctcagcctatgccgtctgcccagacatcacagccactgtgaccccagacctcaagcatcctgaagggagaggccatctgctctatgtggctctgagccctgggcagcaccggctcgggggcacagctctggcccagtgcttctcccagcttggggaacaccctccagacctggaccttcctgagaacttggtgcgggccttcagcatcactcaggggctgctgaaagaccgcctcctctgctcaggccacgatgtcagtgacggaggcctcgtcacatgcctgctggagatggcctttgctggaaattgcgggctacaggtggatgtgcctgtccccagggttgatgtcctgtctgtgctgttcgctgaggagccaggcctcgtgctggaggtgcaggagccagacctggcccaggtgctgaagcgttaccgggatgctggcctccattgcctggagctgggccacacaggcgaggccgggccccacgccatggtccgggtgtcagtgaacggggctgtggttctggaggagcctgttggggagctgcgagccctctgggaggagacgagtttccagctggaccggctacaggcagagcctcgctgtgtggcagaggaggaacggggcctgagggagcggatggggcccagctattgcctgccccccacctttcccaaagcctccgtgccccgtgagcctggtggtcccagcccccgagtcgccatcttgcgagaggagggcagtaatggagaccgggagatggccgatgccttccacttagctgggtttgaggtatgggacgtgaccatgcaggacctctgctctggggcaattgggctggacactttccgtggcgtggccttcgtgggcggcttcagctatgcagatgtcctgggctctgccaaagggtgggcagctgctgtgacctttcatcccagggctggggctgagctgaggcgcttccggaagcggccagacaccttcagcctgggcgtgtgtaatggctgtcaactgctggctctgctcggctgggtgggaggcgaccccaatgaggatgctgcagagatgggccctgactcccagccagcccggccaggccttctgctacgccacaacctgtctgggcgctacgagtctcgctgggccagcgtgcgtgtggggcctgggccagccctgatgctgcgagggatggagggcgccgtgctgcccgtgtggagtgcgcacggggaaggttacgtagcattttcttctccggaactccaagctcagattgaggccaggggcttggctccactgcactgggctgatgatgacgggaaccccacagagcagtaccctctgaatcccaatgggtccccagggggcgtggctggcatctgctcctgtgatggccgccacctggctgtcatgcctcaccctgagcgggccgttaggccttggcagtgggcatggcgaccccctccatttgatactctgaccacctccccctggctccagctctttatcaatgcccgaaactggaccctggaagggagctgctgactggccacaggggctcacctgggccccatggcttttcacctaagtgggtcctgccccctcccccatgaccttcaggagcaccccatattatttccaaaaatatcttggacagacaaggaccaaaatgccaaaatctcagcggactcgataatctgcctgctgatgttccttctgtggctgtgtctattttcagttctgctctaacatggcatgccctttctcagcccaggaaacagcatgtggttcagagaaaagagcgacaaggaaaagttaggactcctgaggtccgaacaggggcttctgttgcccacttcacaacacccagtgatcaccggtgtgcaattgcctccttggctctgagggatgttttgcgctcccttttctcatcattggggttagcgggtgcagacaaattcagcaatagtatgcagatcagcccctcaccacctcattgttctcatctggaactgaaactttctggatttctcttgaagtgctacactgcactgaatgtaaggaattgttgcttgtggaagtttctcagcgtttctggctgtcttagggctggcctcagaacccagcattcctgttatttgcttctaaattagcagctctcttttttttttttttttgaggcagtctcactctgtcacccaggctggagtacaatggcgtgatctcggcccactgcaacctctgcctcctgggttcaagcaattttcctgcctcggcctcccaaagtgctgggattacaggtgggagccactacagctggcccagcagctctgtttctgatagaggtggttggggctctcatccctagatcctaaccctttagtatgctggaattctactcttcacttactgcattgactgttgttgattagttattattgcaaagcactgtcaccggcctcagggagtttatgtgtaatagaattaaaaataatagctgtgtataacacttagctcaagccacgcatgtgtgaggcatttggtatgtatctgaattaattctcactaaaattcagcaaaggacttgatagcctctccccgccttttcaataaaggatgaatgaaggttga

SEQ ID NO: 507217 - DNA, 347 bp, Homo sapiens
aaagtttgtgcacatatgagggcatgggcagaatctgctccccaaaagcattgaaagcccaatatgaggcccaggtggtggctcatgcctgtaatcccagcactttgggaggccaaggcaggcggatcacaaggtcaggagcttgagaccatcctggccaacatggtgaaaccccgtctctactaaaaatacaaaaaaattagctgggcatggtggtgcatgcctgtagtcccagctactcaggaggctgaggtaggagaatcattgaacctgggaggcggaggttgcagtgagccgagattgcaccactgcattccagcctggcgacagagtgagactccatctca

SEQ ID NO: 507218 - DNA, 4967 bp, Homo sapiens
  misc_feature (15)..(15): n is a, c, g, or t
gattcgaggtgctcngtggccgcgagtgcatcttccacgaacctaattcatctctccagcaaaggacacatctctccagcaaaggacacctctctccagcaaaggacacctgcagagatgtccccagtccttcacttctatgttcgtccctctggccatgagggggcagcctctggacacactcggaggaaactgcaagggaaactgccagagctgcagggcgtcgagactgaactgtgctacaacgtgaactggacagctgaggccctccccagtgctgaggagacaaagaagctgatgtggctgtttggttgccccttactgctggatgatgttgctcgggagtcctggctccttcctggctccaatgacctgctgctggaggtcgggcccaggctgaacttctccaccccaacatccaccaacatcgtgtcagtgtgccgcgccactgggctggggcctgtggatcgtgtggagaccacccggcgctaccggctctcgtttgcccaccccccgtcagctgaggtggaagccattgctctggctaccctgcacgaccggatgacagagcagcacttcccccatcccatccagagtttctcccctgagagcatgccggaacccctcaatggccctatcaatatactgggtgagggccggcttgcgctggagaaggccaaccaggagcttggtctggctttagactcttgggacctagacttctacaccaagcgcttccaggagctacagcggaacccgagcactgtggaggcctttgacttggcgcagtccaatagcgagcacagccgacactggttcttcaagggccagctccacgtggatgggcagaagctggtgcactcactgtttgagtccatcatgagcacccaggaatcctcgaaccccaacaacgtcctcaaattctgtgataacagcaggtgctgtgccctagactgggttggcgtcaggacccggggaggggaggccccaggccctggttgggttagtgtaggtcccagaaaggaagcaaggtccatgacgggtatgtccacagtgcaatccagggaaaggaagtccgattcctacggcctgaggaccccacacggccaagccgcttccagcaacagcaagggctgagacatgttgtcttcacagcagagactcacaactttcccacaggagtatgcccctttagtggtgcaaccactggcacagggggccggattcgagatgtccagtgcacaggccgcggggcccacgtggtggctggcactgccggctattgctttggaaatctgcatattccaggttacaatctgccctgggaggatctaagcttccagtatcctgggaattttgcccggcccctggaggttgccattgaagccagtaatggagcttctgactatggcaacaagtttggggaaccagtgctggctggcttcgcccgctccttgggcctccagctcccagacggccagcggcgtgagtggatcaagcccatcatgtttagtgggggcattgggtccatggaagctgaccacataagcaaggaggccccagagccaggcatggaagttgtaaaggttggaggtcccgtctacaggattggagttggaggtggagctgcttcatctgtgcaggtgcagggagataacaccagtgacctggactttggggctgtgcagcgaggagacccggagatggaacagaagatgaaccgtgtgatcagggcttgtgtggaggcccccaagggaaaccccatctgcagccttcatgatcagggcgctggtggcaatggcaatgtcctaaaagagctgagtgacccagctggagccatcatttacaccagccgcttccagcttggggacccaaccctgaatgccctggaaatctggggggctgagtaccaggaatcaaatgctcttctgctgaggtcccccaaccgggacttcctgactcatgtcagtgcccgtgaacgttgcccggcttgcttcgtgggcaccatcactggagaccggagaatagtgctggtggacgatcgggagtgtcctgtcagaagaaatggccaggggggatgcccccccgacacccctgccaacccctgtggacctggagctcgaatgggtgctgggcaagatgcctcggaaggagttcttcctgcagaggaagccccccatgctgcagcctctggccttgcccccagggctgagcgtgcaccaggctctggagagggttctgaggctgcccgccgtggccagcaagcgctacctcaccaataaggtggaccgctctgtgggaggcctggtggcccagcagcagtgcgtggggcccctgcaaactcctctggcagatgtagcggttgtggcactgagccatgaggagctcataggggctgccacagccttgggagaacagccagtcaagagcctgctggacccaaaagtcgccgcccggctggccgtggccgaagccctcaccaacctggtgtttgctctggtcactgacctccgggatgtgaagtgtagcgggaactggatgtgggcagccaagctcccaggggagggcgcagctttggcggatgcctgtgaggctatggtggcagtgatggcagccctgggtgtggcagtggatggtggcaaggactccctcagcatggctgctcgggttggcactgagaccgtgcgggctcctgggtcactggtcatctcagcctatgccgtctgcccagacatcacagccactgtgaccccagacctcaagcatcctgaagggagaggccatctgctctatgtggctctgagccctgggcagcaccggctcgggggcacagctctggcccagtgcttctcccagcttggggaacaccctccagacctggaccttcctgagaacttggtgcgggccttcagcatcactcaggggctgctgaaagaccgcctcctctgctcaggccacgatgtcagtgacggaggcctcgtcacatgcctgctggagatggcctttgctggaaattgcgggctacaggtggatgtgcctgtccccagggttgatgtcctgtctgtgctgttcgctgaggagccaggcctcgtgctggaggtgcaggagccagacctggcccaggtgctgaagcgttaccgggatgctggcctccattgcctggagctgggccacacaggcgaggccgggccccacgccatggtccgggtgtcagtgaacggggctgtggttctggaggagcctgttggggagctgcgagccctctgggaggagacgagtttccagctggaccggctacaggcagagcctcgctgtgtggcagaggaggaacggggcctgagggagcggatggggcccagctattgcctgccccccacctttcccaaagcctccgtgccccgtgagcctggtggtcccagcccccgagtcgccatcttgcgagaggagggcagtaatggagaccgggagatggccgatgccttccacttagctgggtttgaggtatgggacgtgaccatgcaggacctctgctctggggcaattgggctggacactttccgtggcgtggccttcgtgggcggcttcagctatgcagatgtcctgggctctgccaaagggtgggcagctgctgtgacctttcatcccagggctggggctgagctgaggcgcttccggaagcggccagacaccttcagcctgggcgtgtgtaatggctgtcaactgctggctctgctcggctgggtgggaggcgaccccaatgaggatgctgcagagatgggccctgactcccagccagcccggccaggccttctgctacgccacaacctgtctgggcgctacgagtctcgctgggccagcgtgcgtgtggggcctgggccagccctgatgctgcgagggatggagggcgccgtgctgcccgtgtggagtgcgcacggggaaggttacgtagcattttcttctccggaactccaagctcagattgaggccaggggcttggctccactgcactgggctgatgatgacgggaaccccacagagcagtaccctctgaatcccaatgggtccccagggggcgtggctggcatctgctcctgtgatggccgccacctggctgtcatgcctcaccctgagcgggccgttaggccttggcagtgggcatggcgaccccctccatttgatactctgaccacctccccctggctccagctctttatcaatgcccgaaactggaccctggaagggagctgctgactggccacaggggctcacctgggccccatggcttttcacctaagtgggtcctgccccctcccccatgaccttcaggagcaccccatattatttccaaaaatatcttggacagacaaggaccaaaatgccaaaatctcagcggactcgataatctgcctgctgatgttccttctgtggctgtgtctattttcagttctgctctaacatggcatgccctttctcagcccaggaaacagcatgtggttcagagaaaagagcgacaaggaaaagttaggactcctgaggtccgaacaggggcttctgttgcccacttcacaacacccagtgatcaccggtgtgcaattgcctccttggctctgagggatgttttgcgctcccttttctcatcattggggttagcgggtgcagacaaattcagcaatagtatgcagatcagcccctcaccacctcattgttctcatctggaactgaaactttctggatttctcttgaagtgctacactgcactgaatgtaaggaattgttgcttgtggaagtttctcagcgtttctggctgtcttagggctggcctcagaacccagcattcctgttatttgcttctaaattagcagctctcttttttttttttttttgaggcagtctcactctgtcacccaggcagaggttgtggtgagccgagatggagccattgcattccagcctgagcaacaagagtg

SEQ ID NO: 507219 - DNA, 464 bp, Homo sapiens
  misc_feature (2)..(2): n is a, c, g, or t
  misc_feature (7)..(7): n is a, c, g, or t
  misc_feature (15)..(15): n is a, c, g, or t
  misc_feature (201)..(201): n is a, c, g, or t
  misc_feature (213)..(213): n is a, c, g, or t
  misc_feature (305)..(305): n is a, c, g, or t
  misc_feature (320)..(320): n is a, c, g, or t
  misc_feature (357)..(357): n is a, c, g, or t
gncattnttcctttnccacattcccgtttgtacttacagcccccaatggcccccaaaaagccagagcccaagaaggatgatgccaaggcagcccccaaggcagctccagctcccgcacctccccctgagcctgagcgccctaaggaggtcgagtttgatgcttccaagatcaagattgagttcacaccttagcagattgangagttcaaggangccttcatgctgttcgaccgaacacccaagtgtgagatgaggatcacctacgggcagtgtgggatgtcctgcgggcgctgggccagaacccnacacaggcagaggtnctccgtgtcctggggagccaagacaggaggagctcantaccaagatgatggacttgaacttcctgccatgctcagacattccagacaggacaaggaccattaggacttgtgagggctcggtctgaaagaggcaatgacttaagg

SEQ ID NO: 507220 - DNA, 134 bp, Homo sapiens
tttctgaaggctgattcttttattcaacaaaatgtcaaggagattattccctgcctacacatacacccgtgctgtgatggtttaataactgcataagactccattataatgatgattccacaatctgcataaaa

SEQ ID NO: 507221 - DNA, 172 bp, Homo sapiens
gagaccaggagtttgagaccagcctgggccacatagcaagaccctttctgtagtcctcactacttggaggctgaggcagaaggatcacttgtgcccaggagttcaaggttacactattccagcctgagtacaagtgagaccgtctctaaagaaaaaaaggaaaggcagtaac

SEQ ID NO: 507222 - DNA, 1759 bp, Homo sapiens
ggcacgagggaaggaccttggctctcacttccctcctccttccatcccaggttacgtagcattttcttctccggaactccaagctcagattgaggccaggggcttggctccactgcactgggctgatgatgacgggaaccccacagagcagtaccctctgaatcccaatgggtccccagggggcgtggctggcatctgctcctgtgatggccgccacctggctgtcatgcctcaccctgagcgggccgttaggccttggcagtgggcatggcgaccccctccatttgatactctgaccacctccccctggctccagctctttatcaatgcccgaaactggaccctggaagggagctgctgactggccacaggggctcacctgggccccatggcttttcacctaagtgggtcctgccccctcccccatgaccttcaggagcaccccatattatttccaaaaatatcttggacagacaaggaccaaaatgccaaaatctcagcggactcgataatctgcctgctgatgttccttctgtggctgtgtctattttcagttctgctctaacatggcatgccctttctcagcccaggaaacagcatgtggttcagagaaaagagcgacaaggaaaagttaggactcctgaggtccgaacaggggcttctgttgcccacttcacaacacccagtgatcaccggtgtgcaattgcctccttggctctgagggatgttttgcgctcccttttctcatcattggggttagcgggtgcagacaaattcagcaatagtatgcagatcagcccctcaccacctcattgttctcatctggaactgaaactttctggatttctcttgaagtgctacactgcactgaatgtaaggaattgttgcttgtggaagtttctcagcgtttctggctgtcttagggctggcctcagaacccagcattcctgttatttgcttctaaattagcagctctcttttttttttttttttgaggcagtctcactctgtcacccaggctggagtacaatggcgtgatctcggcccactgcaacctctgcctcctgggttcaagcaattttcctgcctcagcctcccgagtagctgggagtacaggcacacaccaccacacccagctaatttttgtatttttagtagagatagggtttcaccatgtctcccaggctggtctcaaactcctaacctcaagtgattcgcctgcctcggcctcccaaagtgctgggattacaggtgggagccactacagctggcccagcagctctgtttctgatagaggtggttggggctctcatccctagatcctaaccctttagtatgctggaattctactcttcacttactgcattgactgttgttgattagttattattgcaaagcactgtcaccggcctcagggagtttatgtgtaatagaattaaaaataatagctgtgtataacacttagctcaagccacgcatgtgtgaggcatttggtatgtatctgaattaattctcactaaaattcagcaaaggacttgatagcctctccccgccttttcaataaaggatgaatgaaggttgaaaaaaaagacaaaaaaaaagagaaaaacagaacacaaaacaaggcgggggagataaaacaacaccaaaagcaacaaatgcacccatgtttgaaaggggccaaaaagatataaagagcgcgggaaaaaaggcagagagaacgacagaaagagacaatggtggaggtgaaccaacaaca

SEQ ID NO: 507223 - DNA, 464 bp, Homo sapiens
  misc_feature (2)..(2): n is a, c, g, or t
  misc_feature (7)..(7): n is a, c, g, or t
  misc_feature (15)..(15): n is a, c, g, or t
  misc_feature (201)..(201): n is a, c, g, or t
  misc_feature (213)..(213): n is a, c, g, or t
  misc_feature (305)..(305): n is a, c, g, or t
  misc_feature (320)..(320): n is a, c, g, or t
  misc_feature (357)..(357): n is a, c, g, or t
  misc_feature (442)..(442): n is a, c, g, or t
gncattnttcctttnccacattcccgtttgtacttacagcccccaatggcccccaaaaagccagagcccaagaaggatgatgccaaggcagcccccaaggcagctccagctcccgcacctccccctgagcctgagcgccctaaggaggtcgagtttgatgcttccaagatcaagattgagttcacaccttagcagattgangagttcaaggangccttcatgctgttcgaccgaacacccaagtgtgagatgaggatcacctacgggcagtgtgggatgtcctgcgggcgctgggccagaacccnacacaggcagaggtnctccgtgtcctggggagccaagacaggaggagctcantaccaagatgatggacttgaacttcctgccatgctcagacattccaggagcacggacacaggcacctatgaggacttcgtggagngggctgcgggtcttcgacagag

SEQ ID NO: 507224 - DNA, 1368 bp, Homo sapiens
gcaccgctttgtgaaatggccccgctatgtcagtgttgctagcggtggagagtccgatcctgctataagcaggattgacagtgctcgtctctgttgattaatgcgagtttcagcctagtgccctggcagccgtcaagactagacgtactcacggcttgcttagaagctcggtcgtatccatgtacatgcagccagagcagccaacgcgaagacgcaaggagacgctcgatacttgtttggtcgcggggcacgagaagaacggatgcttgggcagaaggggacgtacccacacggaagtagacctaccttgtcccttcgagtcagcgcacgtttagcgcctggcaactagcctatgccatggaggaaacacagcaaaatggcatcaagcatggctggtctgacttaggcacatcgcaacgatggagatcccagtcccagttcttggccttggtactgtacttaccccctggcccctgtggcttcactacaaagtgcaggcgattgccattacctgagagttaaatccaggagggaacaacgggatagaagctctaggagtatcagttgctttatggtaccgcaaccatttgacaaagaacacctcggagagcaccaacgttgttacccggctcggtttaccagctacccaaggggtcgcaagaatcgtcctgggtaacacgcatccataaacggggcccgttccttttgtggggccgtcacaacgcccttgtggcttgccgaatatgggcttaattcggaggagggaattccctaggaggttatgacaaccgcactgtgggatcccagggactaccaaccgaaacttgtggaatggaacttccccaagtccctggatgcggaaacgtgggggcgtgattcgggcccacatatttcggttccccccatagtggggcttcacccttacacacattggctaccgtatgattgggggcatacccgtttacagtatcttggggcccacagaggggtacagcaatagaaaaaccgggggaacattaaagcaggcttttcaacagttacggaacaagccaattttgcccgtccaccacgtatggaaaccgctgggcaggggttctataaccacaattgggattatccagacacatggatattcggaacgcgtgttactccgatgggctgaggcggcattacaaagtaccgagtttgacgtcttgggacacagcattacactagtaggaagcaacaaacagacgtaggaatacaaaaacactcgatgtaacagagagccacctgtcgtaaaacgtatatcccgcagcgcgaagcggcaggaaaatagtaggcccgagcgcttgtctcgctggtacaaatatatcgtgtcacagcacg

SEQ ID NO: 507225 - DNA, 4970 bp, Homo sapiens
  misc_feature (15)..(15): n is a, c, g, or t
gattcgaggtgctcngtggccgcgagtgcatcttccacgaacctaattcatctctccagcaaaggacacatctctccagcaaaggacacctctctccagcaaaggacacctgcagagatgtccccagtccttcacttctatgttcgtccctctggccatgagggggcagcctctggacacactcggaggaaactgcaagggaaactgccagagctgcagggcgtcgagactgaactgtgctacaacgtgaactggacagctgaggccctccccagtgctgaggagacaaagaagctgatgtggctgtttggttgccccttactgctggatgatgttgctcgggagtcctggctccttcctggctccaatgacctgctgctggaggtcgggcccaggctgaacttctccaccccaacatccaccaacatcgtgtcagtgtgccgcgccactgggctggggcctgtggatcgtgtggagaccacccggcgctaccggctctcgtttgcccaccccccgtcagctgaggtggaagccattgctctggctaccctgcacgaccggatgacagagcagcacttcccccatcccatccagagtttctcccctgagagcatgccggaacccctcaatggccctatcaatatactgggtgagggccggcttgcgctggagaaggccaaccaggagcttggtctggctttagactcttgggacctagacttctacaccaagcgcttccaggagctacagcggaacccgagcactgtggaggcctttgacttggcgcagtccaatagcgagcacagccgacactggttcttcaagggccagctccacgtggatgggcagaagctggtgcactcactgtttgagtccatcatgagcacccaggaatcctcgaaccccaacaacgtcctcaaattctgtgataacagcaggtgctgtgccctagactgggttggcgtcaggacccggggaggggaggccccaggccctggttgggttagtgtaggtcccagaaaggaagcaaggtccatgacgggtatgtccacagtgcaatccagggaaaggaagtccgattcctacggcctgaggaccccacacggccaagccgcttccagcaacagcaagggctgagacatgttgtcttcacagcagagactcacaactttcccacaggagtatgcccctttagtggtgcaaccactggcacagggggccggattcgagatgtccagtgcacaggccgcggggcccacgtggtggctggcactgccggctattgctttggaaatctgcatattccaggttacaatctgccctgggaggatctaagcttccagtatcctgggaattttgcccggcccctggaggttgccattgaagccagtaatggagcttctgactatggcaacaagtttggggaaccagtgctggctggcttcgcccgctccttgggcctccagctcccagacggccagcggcgtgagtggatcaagcccatcatgtttagtgggggcattgggtccatggaagctgaccacataagcaaggaggccccagagccaggcatggaagttgtaaaggttggaggtcccgtctacaggattggagttggaggtggagctgcttcatctgtgcaggtgcagggagataacaccagtgacctggactttggggctgtgcagcgaggagacccggagatggaacagaagatgaaccgtgtgatcagggcttgtgtggaggcccccaagggaaaccccatctgcagccttcatgatcagggcgctggtggcaatggcaatgtcctaaaagagctgagtgacccagctggagccatcatttacaccagccgcttccagcttggggacccaaccctgaatgccctggaaatctggggggctgagtaccaggaatcaaatgctcttctgctgaggtcccccaaccgggacttcctgactcatgtcagtgcccgtgaacgttgcccggcttgcttcgtgggcaccatcactggagaccggagaatagtgctggtggacgatcgggagtgtcctgtcagaagaaatggccaggggggatgcccccccgacacccctgccaacccctgtggacctggagctcgaatgggtgctgggcaagatgcctcggaaggagttcttcctgcagaggaagccccccatgctgcagcctctggccttgcccccagggctgagcgtgcaccaggctctggagagggttctgaggctgcccgccgtggccagcaagcgctacctcaccaataaggtggaccgctctgtgggaggcctggtggcccagcagcagtgcgtggggcccctgcaaactcctctggcagatgtagcggttgtggcactgagccatgaggagctcataggggctgccacagccttgggagaacagccagtcaagagcctgctggacccaaaagtcgccgcccggctggccgtggccgaagccctcaccaacctggtgtttgctctggtcactgacctccgggatgtgaagtgtagcgggaactggatgtgggcagccaagctcccaggggagggcgcagctttggcggatgcctgtgaggctatggtggcagtgatggcagccctgggtgtggcagtggatggtggcaaggactccctcagcatggctgctcgggttggcactgagaccgtgcgggctcctgggtcactggtcatctcagcctatgccgtctgcccagacatcacagccactgtgaccccagacctcaagcatcctgaagggagaggccatctgctctatgtggctctgagccctgggcagcaccggctcgggggcacagctctggcccagtgcttctcccagcttggggaacaccctccagacctggaccttcctgagaacttggtgcgggccttcagcatcactcaggggctgctgaaagaccgcctcctctgctcaggccacgatgtcagtgacggaggcctcgtcacatgcctgctggagatggcctttgctggaaattgcgggctacaggtggatgtgcctgtccccagggttgatgtcctgtctgtgctgttcgctgaggagccaggcctcgtgctggaggtgcaggagccagacctggcccaggtgctgaagcgttaccgggatgctggcctccattgcctggagctgggccacacaggcgaggccgggccccacgccatggtccgggtgtcagtgaacggggctgtggttctggaggagcctgttggggagctgcgagccctctgggaggagacgagtttccagctggaccggctacaggcagagcctcgctgtgtggcagaggaggaacggggcctgagggagcggatggggcccagctattgcctgccccccacctttcccaaagcctccgtgccccgtgagcctggtggtcccagcccccgagtcgccatcttgcgagaggagggcagtaatggagaccgggagatggccgatgccttccacttagctgggtttgaggtatgggacgtgaccatgcaggacctctgctctggggcaattgggctggacactttccgtggcgtggccttcgtgggcggcttcagctatgcagatgtcctgggctctgccaaagggtgggcagctgctgtgacctttcatcccagggctggggctgagctgaggcgcttccggaagcggccagacaccttcagcctgggcgtgtgtaatggctgtcaactgctggctctgctcggctgggtgggaggcgaccccaatgaggatgctgcagagatgggccctgactcccagccagcccggccaggccttctgctacgccacaacctgtctgggcgctacgagtctcgctgggccagcgtgcgtgtggggcctgggccagccctgatgctgcgagggatggagggcgccgtgctgcccgtgtggagtgcgcacggggaaggttacgtagcattttcttctccggaactccaagctcagattgaggccaggggcttggctccactgcactgggctgatgatgacgggaaccccacagagcagtaccctctgaatcccaatgggtccccagggggcgtggctggcatctgctcctgtgatggccgccacctggctgtcatgcctcaccctgagcgggccgttaggccttggcagtgggcatggcgaccccctccatttgatactctgaccacctccccctggctccagctctttatcaatgcccgaaactggaccctggaagggagctgctgactggccacaggggctcacctgggccccatggcttttcacctaagtgggtcctgccccctcccccatgaccttcaggagcaccccatattatttccaaaaatatcttggacagacaaggaccaaaatgccaaaatctcagcggactcgataatctgcctgctgatgttccttctgtggctgtgtctattttcagttctgctctaacatggcatgccctttctcagcccaggaaacagcatgtggttcagagaaaagagcgacaaggaaaagttaggactcctgaggtccgaacaggggcttctgttgcccacttcacaacacccagtgatcaccggtgtgcaattgcctccttggctctgatcggcctcccaaagtgctgggattacaggtgggagccactacagctggcccagcagctctgtttctgatagaggtggttggggctctcatccctagatcctaaccctttagtatgctggaattctactcttcacttactgcattgactgttgttgattagttattattgcaaagcactgtcaccggcctcagggagtttatgtgtaatagaattaaaaataatagctgtgtataacacttagctcaagccacgcatgtgtgaggcatttggtatgtatctgaattaattctcactaaaattcagcaaaggacttgatagcctctccccgccttttcaataaaggatgaatgaaggttga

SEQ ID NO: 507226 - DNA, 4394 bp, Homo sapiens
  misc_feature (15)..(15): n is a, c, g, or t
gattcgaggtgctcngtggccgcgagtgcatcttccacgaacctaattcatctctccagcaaaggacacatctctccagcaaaggacacctctctccagcaaaggacacctgcagagatgtccccagtccttcacttctatgttcgtccctctggccatgagggggcagcctctggacacactcggaggaaactgcaagggaaactgccagagctgcagggcgtcgagactgaactgtgctacaacgtgaactggacagctgaggccctccccagtgctgaggagacaaagaagctgatgtggctgtttggttgccccttactgctggatgatgttgctcgggagtcctggctccttcctggctccaatgacctgctgctggaggtcgggcccaggctgaacttctccaccccaacatccaccaacatcgtgtcagtgtgccgcgccactgggctggggcctgtggatcgtgtggagaccacccggcgctaccggctctcgtttgcccaccccccgtcagctgaggtggaagccattgctctggctaccctgcacgaccggatgacagagcagcacttcccccatcccatccagagtttctcccctgagagcatgccggaacccctcaatggccctatcaatatactgggtgagggccggcttgcgctggagaaggccaaccaggagcttggtctggctttagactcttgggacctagacttctacaccaagcgcttccaggagctacagcggaacccgagcactgtggaggcctttgacttggcgcagtccaatagcgagcacagccgacactggttcttcaagggccagctccacgtggatgggcagaagctggtgcactcactgtttgagtccatcatgagcacccaggaatcctcgaaccccaacaacgtcctcaaattctgtgataacagcaggtgctgtgccctagactgggttggcgtcaggacccggggaggggaggccccaggccctggttgggttagtgtaggtcccagaaaggaagcaaggtccatgacgggtatgtccacagtgcaatccagggaaaggaagtccgattcctacggcctgaggaccccacacggccaagccgcttccagcaacagcaagggctgagacatgttgtcttcacagcagagactcacaactttcccacaggagtatgcccctttagtggtgcaaccactggcacagggggccggattcgagatgtccagtgcacaggccgcggggcccacgtggtggctggcactgccggctattgctttggaaatctgcatattccaggttacaatctgccctgggaggatctaagcttccagtatcctgggaattttgcccggcccctggaggttgccattgaagccagtaatggagcttctgactatggcaacaagtttggggaaccagtgctggctggcttcgcccgctccttgggcctccagctcccagacggccagcggcgtgagtggatcaagcccatcatgtttagtgggggcattgggtccatggaagctgaccacataagcaaggaggccccagagccaggcatggaagttgtaaaggttggaggtcccgtctacaggattggagttggaggtggagctgcttcatctgtgcaggtgcagggagataacaccagtgacctggactttggggctgtgcagcgaggagacccggagatggaacagaagatgaaccgtgtgatcagggcttgtgtggaggcccccaagggaaaccccatctgcagccttcatgatcagggcgctggtggcaatggcaatgtcctaaaagagctgagtgacccagctggagccatcatttacaccagccgcttccagcttggggacccaaccctgaatgccctggaaatctggggggctgagtaccaggaatcaaatgctcttctgctgaggtcccccaaccgggacttcctgactcatgtcagtgcccgtgaacgttgcccggcttgcttcgtgggcaccatcactggagaccggagaatagtgctggtggacgatcgggagtgtcctgtcagaagaaatggccaggggggatgcccccccgacacccctgccaacccctgtggacctggagctcgaatgggtgctgggcaagatgcctcggaaggagttcttcctgcagaggaagccccccatgctgcagcctctggccttgcccccagggctgagcgtgcaccaggctctggagagggttctgaggctgcccgccgtggccagcaagcgctacctcaccaataaggtggaccgctctgtgggaggcctggtggcccagcagcagtgcgtggggcccctgcaaactcctctggcagatgtagcggttgtggcactgagccatgaggagctcataggggctgccacagccttgggagaacagccagtcaagagcctgctggacccaaaagtcgccgcccggctggccgtggccgaagccctcaccaacctggtgtttgctctggtcactgacctccgggatgtgaagtgtagcgggaactggatgtgggcagccaagctcccaggggagggcgcagctttggcggatgcctgtgaggctatggtggcagtgatggcagccctgggtgtggcagtggatggtggcaaggactccctcagcatggctgctcgggttggcactgagaccgtgcgggctcctgggtcactggtcatctcagcctatgccgtctgcccagacatcacagccactgtgaccccagacctcaagcatcctgaagggagaggccatctgctctatgtggctctgagccctgggcagcaccggctcgggggcacagctctggcccagtgcttctcccagcttggggaacaccctccagacctggaccttcctgagaacttggtgcgggccttcagcatcactcaggggctgctgaaagaccgcctcctctgctcaggccacgatgtcagtgacggaggcctcgtcacatgcctgctggagatggcctttgctggaaattgcgggctacaggtggatgtgcctgtccccagggttgatgtcctgtctgtgctgttcgctgaggagccaggcctcgtgctggaggtgcaggagccagacctggcccaggtgctgaagcgttaccgggatgctggcctccattgcctggagctgggccacacaggcgaggccgggccccacgccatggtccgggtgtcagtgaacggggctgtggttctggaggagcctgttggggagctgcgagccctctgggaggagacgagtttccagctggaccggctacaggcagagcctcgctgtgtggcagaggaggaacggggcctgagggagcggatggggcccagctattgcctgccccccacctttcccaaagcctccgtgccccgtgagcctggtggtcccagcccccgagtcgccatcttgcgagaggagggcagtaatggagaccgggagatggccgatgccttccacttagctgggtttgaggtatgggacgtgaccatgcaggacctctgctctggggcaattgggctggacactttccgtggcgtggccttcgtgggcggcttcagctatgcagatgtcctgggctctgccaaagggtgggcagctgctgtgacctttcatcccagggctggggtggagtacaatggcgtgatctcggcccactgcaacctctgcctcctgggttcaagcaattttcctgcctcagcctcccgagtagctgggagtacaggcacacaccaccacacccagctaatttttgtatttttagtagagatagggtttcaccatgtctcccaggctggtctcaaactcctaacctcaagtgattcgcctgcctcggcctcccaaagtgctgggattacaggtgggagccactacagctggcccagcagctctgtttctgatagaggtggttggggctctcatccctagatcctaaccctttagtatgctggaattctactcttcacttactgcattgactgttgttgattagttattattgcaaagcactgtcaccggcctcagggagtttatgtgtaatagaattaaaaataatagctgtgtataacacttagctcaagccacgcatgtgtgaggcatttggtatgtatctgaattaattctcactaaaattcagcaaaggacttgatagcctctccccgccttttcaataaaggatgaatgaaggttgaaaaaaaagacaaaaaaaaagagaaaaacagaacacaaaacaaggcgggggagataaaacaacaccaaaagcaacaaatgcacccatgtttgaaaggggccaaaaagatataaagagcgcgggaaaaaaggcagagagaacgacagaaagagacaatggtggaggtgaaccaacaaca

SEQ ID NO: 507227 - DNA, 341 bp, Homo sapiens
caatgtaatggaatgtaatggaatggaatcaacccgagtgcaggggaatggaatggaatggaatgcaatggaatggaatcatccgatgcaatggaatggattggaacggaataaacccgagtgcaatggaatggagtgaaatggaatggaatggaatggaaacaaccagaatgggtaagggaattgaatagaataaatctgaatgtaatgaaatggaatggaacggacatgagtagagaaatcaaagaacagagatgagcataaagcatgagatgaaggaccacaaatttgaaaaataataccagcaactcaaggtgttaagtactttctttctatattaa

SEQ ID NO: 507228 - DNA, 2119 bp, Homo sapiens
  misc_feature (15)..(15): n is a, c, g, or t
gattcgaggtgctcngtggccgcgagtgcatcttccacgaacctaattcatctctccagcaaaggacacatctctccagcaaaggacacctctctccagcaaaggacacctgcagagatgtccccagtccttcacttctatgttcgtccctctggccatgagggggcagcctctggacacactcggaggaaactgcaagggaaactgccagagctgcagggcgtcgagactgaactgtgctacaacgtgaactggacagctgaggccctccccagtgctgaggagacaaagaagctgatgtggctgtttggttgccccttactgctggatgatgttgctcgggagtcctggctccttcctggctccaatgacctgctgctggaggtcgggcccaggctgaacttctccaccccaacatccaccaacatcgtgtcagtgtgccgcgccactgggctggggcctgtggatcgtgtggagaccacccggcgctaccggctctcgtttgcccaccccccgtcagctgaggtggaagccattgctctggctaccctgcacgaccggatgacagagcagcacttcccccatcccatccagagtttctcccctgagagcatgccggaacccctcaatggccctatcaatatactgggtgagggccggcttgcgctggagaaggccaaccaggagcttggtctggctttagactcttgggacctagacttctacaccaagcgcttccaggagctacagcggaacccgagcactgtggaggcctttgacttggcgcagtccaatagcgagcacagccgacactggttcttcaagggccagctccacgtggatgggcagaagctggtgcactcactgtttgagtccatcatgagcacccaggaatcctcgaaccccaacaacgtcctcaaattctgtgataacagcaggtgctgtgccctagactgggttggcgtcaggacccggggaggggaggccccaggccctggttgggttagtgtaggtcccagaaaggaagcaaggtccatgacgggtatgtccacagtgcaatccagggaaaggaagtccgattcctacggcctgaggaccccacacggccaagccgcttccagcaacagcaagggctgagacatgttgtcttcacagcagagactcacaactttcccacaggagtatgcccctttagtggtgcaaccactggcacagggggccggattcgagatgtccagtgcacaggccgcggggcccacgtggtggctggcactgccggctattgctttggaaatctgcatattccaggttacaatctgccctgggaggatctaagcttccagtatcctgggaattttgcccggcccctggaggttgccattgaagccagtaatggagcttctgactatggcaacaagtttggggaaccagtgctggctggcttcgcccgctccttgggcctccagctcccagacggccagcggcgtgagtggatcaagcccatcatgtttagtgggggcattgggtccatggaagctgaccacataagcaaggaggccccagagccaggcatggaagttgtaaaggttggaggtcccgtctacaggattggagttggaggtggagctgcttcatctgtgcaggtgcagggagataacaccagtgacctggactttggggctgtgcagcgaggagacccggagatggaacagaagatgaaccgtgtgatcagggcttgtgtggaggcccccaagggaaaccccatctgcagccttcatgatcagggcgctggtggcaatggtgaggaaaggagttggaacaagagactgggcctgcctggtatcctgccaggtttcgtttagggagaggtatcaggaatctccaaccaaccacccagctctgggtcccattctccatgctctgtacattctagacaggttcagggttggaagggtggaagcctgctgccgtgggatgattggtggtaagggtgcggcagcagttgacacaggaacacaccaaattacaggcccctttggaggccagggactgccctttaatgcctgaccaccactaggtcactgcttctccttgcaaccccggacacggatagggaacc

SEQ ID NO: 507229 - DNA, 431 bp, Homo sapiens
atggagtacaaaaggcgagagattagggaccaatgcaacctatgcatactgggttcaaacaatattcctacctcggcctcccaaagtgctgggattacaggtgggagccactacagctggcccagcagctctgtttctgatagaggtggttggggctctcatccctagatcctaaccctttagtatgctggaattctactcttcacttactgcattgactgttgttgattagttattattgcaaagcactgtcaccggcctcagggagtttatgtgtaatagaattaaaaataatagctgtgtataacacttagctcaagccacgcatgtgtgaggcatttggtatgtatctgaattaattctcactaaaattcagcaaaggacttgatagcctctccccgccttttcaataaaggatgaatgaaggttga

SEQ ID NO: 507230 - DNA, 270 bp, Homo sapiens
  misc_feature (134)..(134): n is a, c, g, or t
  misc_feature (262)..(262): n is a, c, g, or t
tttccggtttgtgcatccgatgaccatcagtcagcaagagtttggccgcactgggcttcctgacctaagcagtatgactgaggaagagcagattgcttatcgcatgacaaatgtccctgcatggaagcagagtnttggccaggcggaatcagcagatcattgagtgccagctacagctattggacacatcctgagccagccaaggaggatggatgattacgactgtgtatgcaggacccctgatgttccttcagacgtgtcnctagagaa

SEQ ID NO: 507231 - DNA, 266 bp, Homo sapiens
gaatcatagaggcatcccttaaaagctaccgcaggatgattcagagactacaacaggagcaagactgagacgttcaggtagatgcaggtatcagtaatagcagccgtataagtcgaggctccataagttctacctcagaggttcattcaccaccaaatgtaggattaagacgtcgtgaaaacattgaaggtgtacggcaaatgcacagcaacgcactcatgacgtgaaatagccacagagcgggtagcctctagagggtaccgagc

SEQ ID NO: 507232 - DNA, 2053 bp, Homo sapiens
ggacaaggctgagagctagcagagaccagagcgacaagatgaatgcgggctcagaccccgtggtcatcgtctcagcggcgcgcaccgctataggctccttcaatggtgccctgtccaccgtgcctgtccacgaaatggggacaactgtcatcaaagaagtcctgcagagggccaaggtggctccagaagaggtgtccgaggtcatatttggacatgtcttgacggcaggttgtgggcagaatcctactcgacaagccagtgtgggtgcagggatcccctattcggttccagcatggagctgccagatgatctgtggctcgggcctaaaagccgtgtgtcttgcagcccagtccctagccatgggcgactccaccattgtggtagctggaggcatggagaatatgagcaaggctcctcacttgactcacctgagaacaggagtcaggatgggtgaggtgccactggctgacagcatactctgtgatggtctgacagatgcctttcacaactaccacatgggcatcacagctgaaaacgtagccaaaaaatggcaagtgagcagagaggcccaggacaaggttgcagttctgtcacagaacagggcagagcatgctcagaaagctggccactttgacaaggagattgtgccagtgctggtgtcttccagaaaaggtcttactgaagtgaaaatcgatgaatttccccgtcatgggagtaaccttgaagccatgggcaagctgaaaccttactttcttactgatgggacaggaactgtcaccccagcgaacgcatcaggaatgaacgatggcgctgctgctgtggtccttatgaagaagacagaagctgagaggcggatgctgaaacctttagcaagaatagtctcctggtcccaagccggtgtggagccttctgttatgggagtaggaccaattccagccataaagcaagctgttgcaaaggcaggctggtccctggaggatgttgacctgtttgaaatcaatgaagcctttgcagcggtgtctgcggcaatagctaaagaacttggattaaaccccgagaaggtcaacatcgatggaggagccattgccttgggccatcctctgggagcatctggctgcaggattctagtgaccttgctgcacaccctggagagagtgggcgggacccgtggtgttgcagccctgtgcattgggggtgggatgggagtcgcaatgtgtgttcagagagggtgaactgcatgacagccaccaccttggacagttcttgttaaatcagtgcaacactaagcagaaagggaaaccagaggaccaaactgaggacaggaacccaggtggacagcttgctgtactttaatgtgagacacccaaggctacggcattgcacctgacactgttataaataagagggaaatccaatcagtcatcaagggctccagagtgaacagcattttcataacttccatgtttatcgtctttactttctgggtgtaattttctctgatcattgttttttgttttttttgtttttctttgtttttgagttagggtctcaccatatagcctcaaaatcgttttgtagatcaggttgactttgaactcccggagatccacctttctgtgcctcctgaatacttgaattaaaggcatgcaccattatgcagggcccccaaaatgatccattcaaaacatggggattcggcttctgttacgaacttcaggctcttcactttaactatggttggttcaaacgcccctgcgtgcctgtctctcggtttcccattgatcaaatcaagaccaatcctgtagtgaaagtcggattcagtgacctcttccaggctgaggtggggtaggtattccagctgttctagtcagaagactggcagtgccaacaagtgtgcctctggattgttgaaaggtgggcagcaagcagcatccacgtacttatttctctgcttgacgggatgggatgttacctgcttcagatatctaccttgacttccccaaaatgatgactggaactggaactgacagtcaaataaactctttcctccctt

SEQ ID NO: 507233 - DNA, 286 bp, Homo sapiens
gatacgtgtccggggttgtatccgtgtcggggttttctggatgattttcccattgtgatcaaacaccagtcgagtcccaaccttcgccgattcctgataggtagaaatgtagacatcattaagccgtctaagagctcgtctcctacccgagatccacagcgtgaagcttgaatgagatccattcgatagtccttaagctttagatcaacattagtggcaccagcatccagactgatttctactatcttcttcatccagtgcttagactcagtaccacctgcccaga

SEQ ID NO: 507234 - DNA, 885 bp, Homo sapiens
  misc_feature (6)..(6): n is a, c, g, or t
  misc_feature (23)..(23): n is a, c, g, or t
  misc_feature (62)..(62): n is a, c, g, or t
  misc_feature (78)..(78): n is a, c, g, or t
  misc_feature (120)..(120): n is a, c, g, or t
  misc_feature (131)..(132): n is a, c, g, or t
  misc_feature (192)..(192): n is a, c, g, or t
  misc_feature (231)..(231): n is a, c, g, or t
  misc_feature (282)..(282): n is a, c, g, or t
  misc_feature (297)..(297): n is a, c, g, or t
  misc_feature (303)..(303): n is a, c, g, or t
  misc_feature (316)..(316): n is a, c, g, or t
  misc_feature (594)..(594): n is a, c, g, or t
  misc_feature (625)..(625): n is a, c, g, or t
  misc_feature (692)..(692): n is a, c, g, or t
  misc_feature (722)..(722): n is a, c, g, or t
  misc_feature (745)..(745): n is a, c, g, or t
  misc_feature (756)..(756): n is a, c, g, or t
  misc_feature (760)..(760): n is a, c, g, or t
  misc_feature (766)..(766): n is a, c, g, or t
  misc_feature (775)..(775): n is a, c, g, or t
  misc_feature (792)..(792): n is a, c, g, or t
  misc_feature (797)..(799): n is a, c, g, or t
  misc_feature (821)..(821): n is a, c, g, or t
  misc_feature (876)..(876): n is a, c, g, or t
gaagtngtcggggggggagaggntagtagagcagcgcgcgcgtcaccagagtcgtggccctncggagtcgaaggggancgagggggggcccagggggcggacgtgtgtgcgcctcccgtncccccccaatnnccaaacgtgtcaccccggcgccgacggccctgtgcaggggaagcagaaggagtacaagcnggaggcccatcgcatcggcagcatccccctgggcaaganccacaacccgcggggccagcgcggcggcatcaagcagcaaaagaacccccngggcccgccggggcngcgcangcccgccaagacnacccgagcgacccgtgccccggcccccacccggccggtcccgccgggaccccggcgccgccaccgcagcagcagcccggggagccggcggccgggccacccgccggccggggagagccgcccccgcccgccgcccaagccacaaggccggagaccgagccgcagccggagcgccccaccgacacagacgcgccgcggggaggggacgaggtgccggcggccacggagacaggagaaggggacgtttttcagggcggagaggcggacgcgacggaagcngcctggagccgcgtggaggggccgcgcaggngcggccagagaagccgagggtacgccggagtggtggcgtcttcccgaggtatctgtgccgcgcgctncccctgcgctgtttccctaggcggggaggncccgccgggtacaccggccgctntccccggcgcngccngccgcngcgcgccgnaccagcgagggacgatntcccnnngccgcccgcggtgtgcccaggnaagcgccgcgcggcggggggtgggcggcggccagccggctgcccggcgcccggcncgaccccgc

SEQ ID NO: 507235 - DNA, 1007 bp, Homo sapiens
gtcgtcgctgccggcctgccggtcttccagtgtctacgtggcacctcgacgcgaatctcgagccagtggctttttcgcctcggcgcctcgtgtggctatctcgaggaagctcgagtgccgccggggtgttcattggtgcgccgctggtcgtcacagcgctccgtctgtatccgagtccctgggcccaggtcgttgctgcgtcagctcagcgagtgctgtaggcgccgttagccgggggacccgtgcttgagccgggcgtactgggatgaagggcgtgagatgggttctggtgagctctacacagacagcgtgaatagagcatatcgtcaagcagatctcttcaaggagataactgcgtccgcagttcgcgtctggtttggtagagggagagcgcgtcgaatgaggtcccaagcagctgtgagtgatatatgggctcaaggagggaactgcgaataaacttggcaatttgcataccgcatgtttgaacctccacaggttcagttgaaaaccgaggcaagaacgtagtaaagtagccggcatggggtcgtaaatcagtttcttgcctggctcaaatacggttggtcgtgacagaggaagtgagtctctcgcctaaaataggcacgatggtcctaaattaaccaaggacgccgggtatcgccataagagccattgtcatgtgccaatgcagctttggcctgtgtgttgacgtatcgagggaacggtatgcctggtgcttgatcaactccgaggatcgcccgaggaagggcatgatgtggctcaacccggggtatggtataacctgtagaaccgcagtttcccggaaacgaagtcttggccctctcggcgaagtgggccactgcaccctggggctccggcgaggagagcgtctcacgctcccggtcacgggcccgcgcacaaaaccgcagacgttttgcagcagggcccgaaaagccccaccacggttcacggcggcatgctcacggaggagataaacactgcgtgtcaaa

SEQ ID NO: 507236 - DNA, 328 bp, Homo sapiens
ttgtattgggaagggagtttgcagtgacacagtacagatgtgaggggacactgcagacctgtgtgttgggaagggagtttgcagtgacacagtacagatggtgaggggacactgcagacctgtgtgttgggaagggagtttgcagtgacacagtacagatggtgaggggacactgcagatctgtgtgttgggaagggagtttgcagtgacacagtacagatggtgaggggacactgcagacgggtgtgttgggaagggagttctttggtgcagaggcccgctcagtctgagttggcctagccatgcagagctgtcaacactctctggt

SEQ ID NO: 507237 - DNA, 639 bp, Homo sapiens
  misc_feature (414)..(414): n is a, c, g, or t
aactaggctgtcggagcggtgtgaatcggcgaggagaacggctgcaggctgccaggcacctgtggcctgctctgtgtcccttggcaggtctggccagaatggccgcggacgctgcttccggtagggagtgcagctccagcctgcccaacgcgcacggcaccctactcgccccctactgcgccttgtctcctactcctgactccctacctgcacctggaacatcctttgcaggcagcgcacaactttaaacattgacgattccttctctgaacacaggcagctttctagaagtttcccttcctccatcctatccactggcacaactgcaataacttctgacctttggtgaagctgagactcctgactgtacatatctgtatgaactttatctaaagaaaaataaatctgttctgngctctttcctctgaaaaaaaaaaaaaaaaaaaaaaaaaaaaaaaacctccggggctttttttcgggggggggaaaaagaggttttgaaatgggccatgggcaaagtttttccttggccccagtttttttttccaagggggaaaactcgcggggcccccccataggggggcgcggaaaaatttcggaaaagacccgggttacccttgttaaattcgagaaaaactc

SEQ ID NO: 507238 - DNA, 323 bp, Homo sapiens
ggactgtttttggtgggactagaacttaaaataaaattggaacaaggccagatgtggtgactcacgcctgtaatcccagcactttgggaggccaagccagtggatcacctgaggtcaggagtttgagacctacctggccaacatggcaaaaccctgtctctactaaaaataaaaaaattagctgggcgtggtggtgtgtgcttgtaatcctagctagttgggaggctgagacaggagaatcgcttgaatccaggaggcgaaggttgtagtgagcccagattgagccactgcactccagctcgggcaatagagcaagactctga

SEQ ID NO: 507239 - DNA, 408 bp, Homo sapiens
  misc_feature (2)..(2): n is a, c, g, or t
  misc_feature (50)..(50): n is a, c, g, or t
  misc_feature (57)..(57): n is a, c, g, or t
  misc_feature (70)..(70): n is a, c, g, or t
  misc_feature (114)..(114): n is a, c, g, or t
  misc_feature (188)..(188): n is a, c, g, or t
  misc_feature (327)..(327): n is a, c, g, or t
anctgtgggaggaggcggcgtggaaggcaggagctcaagccggaccaatnacacgtncgggccgcacccngaccctgcagcgtaccgggaagcgaaaccggccggatgggcgcntgagcccgaatcgcgacatgtgtggagccccctggagctgagatcaggatgttcgcttcatgagggacgtgganctgaggatccatgttactgatggatccctttgcctattcaaagtcagcatatgagccgtatgttgtcaggtggctttggatatagcccttcctcagcatcacagatggcaacatgccagggaccaggcctgcagccgcnggatgcagcaggctggagctgtctccccttttggattgctgggaatgtcgggtggttcatggacatgtttgggatgatgaa

SEQ ID NO: 507240 - DNA, 352 bp, Homo sapiens
  misc_feature (8)..(8): n is a, c, g, or t
  misc_feature (41)..(41): n is a, c, g, or t
gtaccgcnaggtttaccaatcccattggttttgaagacctntattggtacactcatgtgcagatgaaggttttaaaaatgttactgacggagtcaccatttgatcagtcattgtcttgatattttattaaattgtatatttctaataatattttttaaagttgagagaactggttggatgtttattctcctgaaggtatttttaagataaagcttcaccatagcctgtaaacttggcacataagtagtttttgatactttttgttgcatttgaaaaatcttgtgtattgtaaaatggttttatacaaaatactaaatagtagaaattgtataatttacaatcgtataattaa

SEQ ID NO: 507241 - DNA, 718 bp, Homo sapiens
  misc_feature (548)..(548): n is a, c, g, or t
taaaaaccctcatcaataaatggaaacttacaaaaatagtcaaaccacttctacaaaaggtcagtatcaggcgggggtttcaaacccaaagtgatgttgggatgtaaagggaaatattagttgggcggatgaagcagcatagttgaggaaagtggacccaataatgacgtgaagtccggtggaacccgtggtggctacacaaaaaagtgtcgacccgataaatgccgctcggaaagtggtgaagggagacctcgaagtcactctgaggcttgtaggagggtaaaatagagacccagatacattggtaatagagcaggtgctcgaactaactgcgggtttccggactggtctccatactcaaaactagtgggtgagcccagggtgatgcgaataaccccgtgcagtgcgacgtaacacacggagtgctgctccaaaggaggtggcgacccctccaatcaggggaactatcacggcggggagcctgcacctgcccaatgaatggggagagccaagagtgccccaccccaaaactgagggcggagcacacnggacgcacaagggcatggaagctggcataaaaagcgcgacacaaaacaccaactaccatgccgacaagaaacaaaacaccacgtctcatgaaggctaactacaaatacggcgacatctccacaagatattacgaaacagcacattatcgggaaccacgaaggatgcacag

SEQ ID NO: 507242 - DNA, 391 bp, Homo sapiens
ggaatagcgagcaggagctggctggatcgcgagcgcgagtgaggggagcctgagccgccgtcccggcgcctccgcctcccctccgggaacaggagcccgggtcggggcccggcacgccgcccagcccgtccctcgtgcgtcaggccgggagggtagcgcgcgcgagggaggcgagggggagggagagcgagcagagcgccggtgaggaggcggtcggaccgacgcgggctgcccgcggcgtgtggcgtgaggggaagccggtgtgcccgttcgataagggcgccccttggggcaaaaagacccggtaagcggggcgcagggctctaggagacgcaaggtggtggggcatggcacaacaggcgtgtaaacaggactggtccagcggccaaaa

SEQ ID NO: 507243 - DNA, 1049 bp, Homo sapiens
gggcttgcctctgggtgggtcctgctagtcgcggggcggcggtggcggtgcgggcgcgaggttcccagcaggatgccccggctctgcaggtgaagctgaagtgagaggcccggagagggcccagccctgcccgtgggcagtgatgaccaaggccctggctgtatccggctgtggcatggtgctggggtcggtgtatcatgatcctgctgatcatcgtgtacttgtgacagctgcagtgctgcctgcgcacttctacttgcaacacgtacctatactctaggcccgcaaaccgggggcctgccgactgccccactgccctgggcctggacatgtggacatggggcagctcacaggtgccgactccgatagtcggacgacgtattccttgggacaagtttactcatgtgcttggctgtgcaagcagaagcgacacttcccaggaaatgcgagacggagcagcgcggactgcgcctggcggacgcagtggagggagagccgatgagaaggcatacagactcggtccaccgatgcgaaagcccctggcagcaggaccaagacacaagggacctggaacgcacgcgccgtgacggcgcgaccgacgcctttgcctggccgtgaggacctttcgttggggcccacagtcgccagagactgacacacattcaccccagagcaaacgggaaagcaggcggaccatttcgcacggaacaagttcccctccaacatacggaatggcctgaacccgcgacccgtcgaatccgtatgcggaaccgaacgcgtgcaacggggggactccacaacatcataaacgcttgggactaaacccggattgtccccacaaaaggggctgcgtgcccctttgacacctgcaaaccgctgggggcaaaaggcgaccgaattggaacattggaagctcggtctaggactttgtcaagaccggggtaaacacgtactgcgttgcacctattcctaacccgcgcgtggcacatgccacgcccgcattacagcacgtaggggaacacccccggcatggtgcgcacagtttcccg

SEQ ID NO: 507244 - DNA, 196 bp, Homo sapiens
atcagaggtcccagtcggttctacataaatcttccagtattttgctacatagacgggtgtgccttttagcttgtcttaggtagctcgtctggtttccgggagtcttagctttgggtctccttggcaaagttatttctaagttaattccattatgcagaaaggtatacggggttacgtcctttgctatattattgct

SEQ ID NO: 507245 - DNA, 473 bp, Homo sapiens
agcgggaagaatatcgccaatctccctatcgcacgtgtcagtgtcctcatccccatcaccacaccatcatccacatctaccttcaccttcttcttcttgaaaagaagatctgcgttctgttgtctgaggccagcttttccattttgtactcagacactcttctccctaaactccagtctgcatctccttctccttccggccgagttcctttagtgtccacattgtcagtcccgaggctgactactcggcttgctggtccccctcactttgcttctgcaactttccgcgggtgagctcagtgtgctgttgcaggtcagcacagattgcatttcatagtctgttgtcttgcctggctctgaggcaacaggcagccacccaaggaggagctgctgtgtccactaagcatggagacttggtcatcccccaggcagctagccgctggtactgccttcatgcttgcaacagacggtgag

SEQ ID NO: 507246 - DNA, 248 bp, Homo sapiens
aacagccaagtatggaacggagaaggatgggaataggggggaacagtctcatcttgcccaagaacatgcaggagcctgcggctgccctgagtccatggaggccaccctcttgaaatggacgcaatgcagacccttgatgtccgtgggcaggtgcggagggggtaggtgcacggggccccgataggtgctcacactagaggacgaggtcatctcgcggtctcctgtgaatacccaccatttgcccaagg

SEQ ID NO: 507247 - DNA, 436 bp, Homo sapiens
gctctcgtgcgctctttctcttacaagcacatctctctcacagtctctctcacagtgttcgtgtgtctaatgatatgtcatgtgacacacgtatcctcctataagaggtatctcacaacgcagaagagagagtgtgatagtatatgtggggcacagacccgtagtgtcatctcacgcactcagagagtgtgctataagatatcgtgcgcttttgtgcaaatgtgctatagaccgcaacactgtgtatatattttctcatagtgtatatcccagaggtgttaaatatggtcttagtatagtgtgtccttgaagtgtagagcctgattcctatatgtctcacttctgtacctctgagagctctgccctctctctctttcctacaaagcacagagagtgaccgtacaaaaggtgtcctcgtgagtcacagctcgtgccg

SEQ ID NO: 507248 - DNA, 301 bp, Homo sapiens
  misc_feature (31)..(31): n is a, c, g, or t
  misc_feature (57)..(57): n is a, c, g, or t
  misc_feature (129)..(129): n is a, c, g, or t
  misc_feature (195)..(195): n is a, c, g, or t
  misc_feature (234)..(234): n is a, c, g, or t
tttttttgccaattgattttttttccactgngcctggcctgaagctattctttacanaagctcttagtttttgtttgtttgtttgtttttttcttttgcgacggactctctgtcgccaaggctggagtncagtggcctgatctcgggtcactgcaacctctgcctcctgggttcgggcggttctcctgcttcagnctcccgggtagctgggattgcaggcgcctgccaccacgnccagctgatttttgtatttttagtagagatggcgtttcgctttgttggtcaggctggtctcgaactt

SEQ ID NO: 507249 - DNA, 139 bp, Homo sapiens
ctgaagttggttgtgggtagcctcaccctgtctcagggtgatatctggcctaggggaggggaagggaggccacttccttctttgggcacaggaaacattggctgtggctgtccctcaaatggcggcagtctctaagagg

SEQ ID NO: 507250 - DNA, 97 bp, Homo sapiens
tcatctacgttgctgcaaacaacagaatctcacttttttatggatgaatagtacttcattgtatgcctcagagcatattggtgaccggcctgggcaa

SEQ ID NO: 507251 - DNA, 804 bp, Homo sapiens
gggccagactgtcccagaagcccaggactgcaaggaggccccctccagctacgaccactagccctctctgagctacctggactcttttgatggtgaaatgctagacgctgtggatccacaacacaagggtgacacaccccttcagaaggtgccctgggttgccgagtgtcagaatatactcaggaactccagaggtgtcccacgtggaaaattgacaggagacccgccaccgtggtaggccagggggcaaagaaatcaagaacgcatcaagagcaccagccctgggccaaggaagacaggctcttcctgcagtttctcgtgacactgctggctgtgcgggcaagttcggtctccaggtacctgtgtgtctcttttccgatgtaataactacttgtgaccttacactatatgtggctagtagttcactgagcttggtatattggaacagtttcatatagggctagagattttaaggacatgactaaactgaaccttttctggtcccaatgtgaagtggtagtgcggtgcctttccccccagatcatgtttaattcttttcctttcctgtgagaaaccaacagtttccatttatgttcaatgctaaatccaaagtcacttcagacgttggtttccacccatgtgggaaatcagcattcttaaatttccgttaagcgttgtgacttgtatgactgtcaaggtttacagcatattcaaggaagaaccacaggtgggtaccatttagcagatatctgccaattttttctattaaatttaccacacttcaatccggctcacgtggtcatg

SEQ ID NO: 507252 - DNA, 841 bp, Homo sapiens
  misc_feature (43)..(43): n is a, c, g, or t
  misc_feature (89)..(89): n is a, c, g, or t
  misc_feature (114)..(114): n is a, c, g, or t
  misc_feature (119)..(119): n is a, c, g, or t
  misc_feature (123)..(124): n is a, c, g, or t
  misc_feature (137)..(137): n is a, c, g, or t
  misc_feature (155)..(155): n is a, c, g, or t
  misc_feature (176)..(177): n is a, c, g, or t
  misc_feature (198)..(198): n is a, c, g, or t
  misc_feature (200)..(200): n is a, c, g, or t
  misc_feature (204)..(204): n is a, c, g, or t
  misc_feature (206)..(206): n is a, c, g, or t
  misc_feature (210)..(210): n is a, c, g, or t
  misc_feature (215)..(215): n is a, c, g, or t
  misc_feature (296)..(296): n is a, c, g, or t
  misc_feature (327)..(327): n is a, c, g, or t
  misc_feature (354)..(354): n is a, c, g, or t
  misc_feature (357)..(357): n is a, c, g, or t
  misc_feature (403)..(403): n is a, c, g, or t
  misc_feature (419)..(419): n is a, c, g, or t
  misc_feature (421)..(421): n is a, c, g, or t
  misc_feature (427)..(427): n is a, c, g, or t
  misc_feature (433)..(433): n is a, c, g, or t
  misc_feature (460)..(460): n is a, c, g, or t
  misc_feature (687)..(687): n is a, c, g, or t
  misc_feature (744)..(744): n is a, c, g, or t
  misc_feature (816)..(816): n is a, c, g, or t
aaacgctgcatcaacttcaccatgattcccagtagtgctggantggaaggaagagaagactggaaacacagagggacagaaggacaganagcacctccacaaacaaaccctggnctgcnccgnnccctacgtcacangctgggccctgacctgangcgggcctcccaccgccccgnnctgatctgtccagggataggntntcangnaggngtggngagggggccgggacgcaggggtagtggtcgccaggagccggagcaggtgaggaccagtctcgactaatcctttttcttgtnctctgatggatttggaggggcttcctggggntcgctggtagagctggccccctgggtnggnttggtgggcagggacgtggaggcctcctccctggtgtgtggtggtngtggtgggtgtaggtntnggcgtnagggcncctgctgctgtgggaacctcggttatnggggtggtagctgtggggtcttctctcactcatgccaaactcgttgactcgggtggggtcgacgcggtagatccaccgttggtagaggtagatgaagaaaaccacatcgtcccgcaggcagccgatccggtacataacgggcatcttgatgacaaaggcgaacaggtcgtcgatgaatgtgttgagggccttgtaggtgagcatgcgccagggaaggtgggccacanacttgagcttgtagttgatgaagagctggggcgtcatggtgatgaagccgaagtcangcaggaagccgtagagcatgctgagcacccaggagtaccagcccttgtgctccaggtacagagactgtagangcatacagcccaggaacgggaagag

SEQ ID NO: 507253 - DNA, 1543 bp, Homo sapiens
ccgttcgtgtattgtgggggcggctccttcgtatgtgcttgtccgctcgcttgtgaccggttgttgtcgcccgccctgttttttgccgccgcagggttgtgtgtgtgcctcgcctagtgtccacgtgggcgttttcccctcggaggaaattttgtgtgatgtgcggcggcccccctgggtgattcgtggtggagcccgtggggcccgagaggttgtccccaggtgcaccgcagaccccttggggggtgcgcgcctgtgatctgccgcgccgggggcatgtgcccagcgggtgtgcgcccctttctttggggccccgcccccagtatgtttgcccccccccgtgggtgctattatgcttgcgtggcttgtgattgggtgacgcctcgtgtccccgcgtggggtacccaccgttttgtcctgtgtttgtacccccggggggtgttcccccgcccaatgggccgtgttgccgtcttttgggacgccctcctgcctcctgtagccccacggattgtggtgtgacacataggtggcgccgcccctctgcgccccccatgggggtggtgcatatttaacccccatatggcgcgctgttgacgttggccccctgggtttggttctccccccgttgggctggaacacctgcgggtttccccccccacagaggagttgggttctcacatgggcgtgccgcgcccgtggttgcccacgccccgttctcgtatatcccccatcggcgtcgcacagccgacattccgcacgcgtgttatggttggtgtgatttttgggtttggccccccccccctcggggcttttccacacaggtttggcgcactctcccactcttgatctcccacgggcctcttcgcacacgctctgttgtgtgtgtgcccctctgtggtgtgtgagagacgctcttctgggccccacacagtgttatcacacagagagagagctctgtgtgtgcgccactatgctggagggcccgacccccctccacgcccacttctgtctctgagagggcctctggcggctttccccctctggagccccccacgttttgtctgagcctctgagttgtgatatcgcccacagcggtggcctctgtgtgtgtccacctcgggtgaacctgtgggttgaagcgggatttggagaggataaggccgagattttttcctcagagaggcccctgtgaaagatatatcggctccgcccctcttgaagaaagagattttattgaggcgagaggttttggtgcttgcgattctctctgttccgaaagagagagaggtggagagaagaaagagagagagaataactctattgatcccatatcctttgtggcccttgccacgccatcgtccatagctccccaggacatattccagcttccagcttcacatgcaccacgcaccgtttaagcttttctgcgttagcattgttttccccttggtgatccctgtcttttcccagggtacccgtaaaatttttccctccatatctccaagttaagtccataaccctcccaacaaaaataaaaaataaa

SEQ ID NO: 507254 - DNA, 378 bp, Homo sapiens
  misc_feature (378)..(378): n is a, c, g, or t
cggtccctgtgcgcgtgtagcccctcggcgtcgcgtggagctgcgagtcgcccgcttccggaagcgcacacgggccatgttgcggcggaccatctgccggggcggcgggggctcggcgggcagggttgcaggctgcaatctacgctgcagcctgctgtgtgctgtgcggcaaacggtcgcctagtcagcctcgcctgccactggtgcacccgggcttgcttacctggtgcagcaggcattcacatctttctcacctgcattcccactatgcactcttctataccggcacaggcagcaaggatctcagacaggcatcggggaccaagcactgcgcaagcagttccaggtataagggcagtcgtgttgtcataacagccn

SEQ ID NO: 507255 - DNA, 756 bp, Homo sapiens
  misc_feature (630)..(630): n is a, c, g, or t
gccctggggttggagagagagggcccccgaggaaccctaagggtcctccatgggcccccaggaccctccgttcagacagcgacaagctgaccttcagtggacatggaggggatctgggttcgggggcgatctggaggcccgtgtggggtcctcgaggtttcggctctggacctcccggaccccccggtgtcgcaggtctgctcggctgagcctgggcgctttgggtgtgatcaggtccgagtgtcccaggacccggccggccttctctggtgttgcgctgggcgcgcagggtcctcgcccgggtttccttggtctcccggggatcgcccaggccctccgcgtgaagatgagggtgaccccaggcatggacgtgtcgccatggagatggcgagccgtgggcgtgaagcagtgcgccccagtgacataagggggagcaacggtgagcccccgggtaccctgcatggtgctcgtggtggatgagcggacatggcaggagacccggggacctgtatggaggcacacagggccccagtggggcgcacctgggagcgcgctggggcatccatgcatgtcgctcgcagggctcttgatcgcacggtggccctgcgtcctgggggcgcgcccctgtcntgtgttgggaacggctgtcatggcgcccgaatggggcacgaagtggcactgctccggtgccctgtctgggacctcatagcgggggactcctggtcgtgccgtgtctgtgcaggggtgtcaagggcg

SEQ ID NO: 507256 - DNA, 312 bp, Homo sapiens
atcctaatgtagccaagtatggttatctgcatgtattggcatctaccagaactccctatatgaaactgccagactatgtcctggaacatttcaattacatgcacaatccaggttctacaagttggaacaagtctaattgacacacctgcataggtttaaaccttgtcctccccctacttcccaacagatttccaagtttttctgagacggaaccttgctctaggcccaggctggaagtgcaatggcgccaatctcgattcactagcaacctactgcctcctgggtaacaagtagattcctccagacctccta

SEQ ID NO: 507257 - DNA, 106 bp, Homo sapiens
aatgcagcggactcgtgcagcctcagtgcgctttcctgcgcgcactgtggagtggcgccctaatgtgtcaccaagcacactcacttaaagaaaaaacgagctcttt

SEQ ID NO: 507258 - DNA, 273 bp, Homo sapiens
  misc_feature (220)..(220): n is a, c, g, or t
  misc_feature (261)..(261): n is a, c, g, or t
atgaggcaggacggatcgcttgagcccaggagttcaaagcctgcagtaagctatgattgtgccaccgcactttagcgggagcaacagagaccttgtctcaaaaaataaaaatggtttggtccatgaacaagagttcaaatgtgtatagacaaggtgcatgtgtgacgtcaatatatgccaaaaggttagactcgtgacagtatagcaacgttattgtctnctacagctccaatattcatccgttttggccgtgcctctatngtcattttgcgg

SEQ ID NO: 507259 - DNA, 1469 bp, Homo sapiens
  misc_feature (8)..(8): n is a, c, g, or t
gagaaccnacccctttctttgcggaatcaccatggcggctgggaccctgtacacgtatcctgaaaactggagggccttcaaggctctcatcgctgctcagtacagcggggctcaggtccgcgtgctctccgcaccaccccacttccattttggccaaaccaaccgcacccctgaatttctccgcaaatttcctgccggcaaggtcccagcatttgagggtgatgatggattctgtgtgtttgagagcaacgccattgcctactatgtgagcaatgaggagctgcggggaagtactccagaggcagcagcccaggtggtgcagtgggtgagctttgctgattccgatatagtgcccccagccagtacctgggtgttccccaccttggggcatcatgcaccacaacaaacaggccactgagaatgcaaaggaggaagtgaggcgaattctggggctgctggatgcttacttgaagacgaggacttttctggtgggcgaacgagtgacattggctgacatcacagttgtctgcaccctgttgtggctctataagcaggttctagagccttctttccgccaggcctttcccaattaccaaccggtggttcctcaccctgcattaaccagccccagttccgggctgtcttgggggaagtgaaactgtgtgagaagatggccagtttggtgctcaaaagtgttgcgagacccaacctaaaaaggacaacccaggaaagagcaagggtccacggcgaagagaagcagaagaccccaggctgagcggaaggaggacgaacaaggcggctgaccctgctcctgaggaggagatggatgaatgtgagcaggcgctggcatgctggagcccaaggccaaggaccccgttcgctcaccgtgcccaagagtacctcttgctgttcgcgatgagatttaaagcagcaagctactcacaattgaggacacactctcatgtgggcactgtccaatattctctggcgcagacacgttgtgtataacggaccggacgtggtaccctggtgagtactacagacgtatcgacttccgctgaaaggaatctcaactcaagaaccttcaatgacgctgcacatcttcatcgacgtggacatattccagcagactggtacaaggctgaggacagaagtgccttacgtgcagatgtcatcctatttgaggaagccaacgaatagcagcgtccatttctggcagtctgggatcttccgaggccaaggagcttgcctttccgatgagtccagattggcacggtggactacgagtcataacaacattggcggaaaactggatcctggccagcgaggaagacccagaacgctggttcgagagtacttatccttgggagcgagggccattccagcatgtgggcaaaagcattcaagtccagggcaaagatcttcaagtgaacattctctttgccataacgctaactgccctgaacttc

SEQ ID NO: 507260 - DNA, 1499 bp, Homo sapiens
  misc_feature (8)..(8): n is a, c, g, or t
gagaaccnacccctttctttgcggaatcaccatggcggctgggaccctgtacacgtatcctgaaaactggagggccttcaaggctctcatcgctgctcagtacagcggggctcaggtccgcgtgctctccgcaccaccccacttccattttggccaaaccaaccgcacccctgaatttctccgcaaatttcctgccggcaaggtcccagcatttgagggtgatgatggattctgtgtgtttgagagcaacgccattgcctactatgtgagcaatgaggagctgcggggaagtactccagaggcagcagcccaggtggtgcagtgggtgagctttgctgattccgatatagtgcccccagccagtacctgggtgttccccaccttggggcatcatgcaccacaacaaacaggccactgagaatgcaaaggaggaagtgaggcgaattctggggctgctggatgcttacttgaagacgaggacttttctggtgggcgaacgagtgacattggctgacatcacagttgtctgcaccctgttgtggctctataagcaggttctagagccttctttccgccaggcctttcccaattaccaaccggtggctgctgagcccaaggccaaggaccccttcgttcctcaccctgcattaaccagccccagttccgggctgtcttgggggaagtgaaactgtgtgagaagatggccagtttggtgctcaaaagtgttgcgagacccaacctaaaaaggacaacccaggaaagagcaagggtccacggcgaagagaagcagaagaccccaggctgagcggaaggaggacgaacaaggcggctgaccctgctcctgaggaggagatggatgaatgtgagcaggcgctggcatgctggagcccaaggccaaggaccccgttcgctcaccgtgcccaagagtacctcttgctgttcgcgatgagatttaaagcagcaagctactcacaattgaggacacactctcatgtgggcactgtccaatattctctggcgcagacacgttgtgtataacggaccggacgtggtaccctggtgagtactacagacgtatcgacttccgctgaaaggaatctcaactcaagaaccttcaatgacgctgcacatcttcatcgacgtggacatattccagcagactggtacaaggctgaggacagaagtgccttacgtgcagatgtcatcctatttgaggaagccaacgaatagcagcgtccatttctggcagtctgggatcttccgaggccaaggagcttgcctttccgatgagtccagattggcacggtggactacgagtcataacaacattggcggaaaactggatcctggccagcgaggaagacccagaacgctggttcgagagtacttatccttgggagcgagggccattccagcatgtgggcaaaagcattcaagtccagggcaaagatcttcaagtgaacattctctttgccataacgctaactgccctgaacttc

SEQ ID NO: 507261 - DNA, 2137 bp, Homo sapiens
gagcagtcggagccgcagctgcctcccggagcccgagcccctccctccgggtccggcctagcccgcctgactcccactctgatcacctccacagcccgccgacctgagaactactacgcccatgagccttcgcggcgccggtgatttaggggacgctcctcagtgccccctgcgaccgccagagagaactacgttgcccctcagcccgagaggcgcgagtggtggaaaacctctccatcatactccgccctcgagacaccagccccctccatgacgtcttcagccgcgcgcccgacgtcggctgagacggccatagacactggcggctagaggggcccggacttgccctcccagctctaacttccgccggaagtgccttccagccgcaggcgcccttcttcttctgtgcgctcgggctcctggtcccggctccccggttaccggggcgcgagtatgaccacaatggcggccgccaccctgctgcgcgcgacgccccacttcagcggtctcgccgccggccggaccttcctgctgcagggtctgttgcggctgctgaaagccccggcattgcctctcttgtgccgcggcctggccgtggaggccaagaagacttacgtgcgcgacaagccacatgtgaatgtgggtaccatcggccatgtggaccacgggaagaccacgctgactgcagccatcacgaagattctagctgagggaggtggggctaagttcaagaagtacgaggagattgacaatgccccggaggagcgagctcggggtatcaccatcaatgcggctcatgtggagtatagcactgccgcccgccactacgcccacacagactgcccgggtcatgcagattatgttaagaatatgatcacaggcactgcacccctcgacggctgcatcctggtggtagcagccaatgacggccccatgccccagacccgagagcacttattactggccagacagattggggtggagcatgtggtggtgtatgtgaacaaggctgacgctgtccaggactctgagatggtggaactggtggaactggagatccgggagctgctcaccgagtttggctataaaggggaggagaccccagtcatcgtaggctctgctctctgtgcccttgagggtcgggaccctgagttaggcctgaagtctgtgcagaagctactggatgctgtggacacttacatcccagtgcccgcccgggacctggagaagcctttcctgctgcctgtggaggcggtgtactccgtccctggccgtggcaccgtggtgacaggtacactagagcgtggcattttaaagaagggagacgagtgtgagctcctaggacatagcaagaacatccgcactgtggtgacaggtttgggaagccagtctggagagcagggcctggctgaagggtggccttaccccggcagatcccttgtgccttccctctgtctcacattcgccttccttctccctgctccttttccctttccgtcctaggcattgagatgttccacaagagcctggagagggccgaggccggagataacctcggggccctggtccgaggcttgaagcgggaggacttgcggcggggcctggtcatggtcaagccaggttccatcaagccccaccagaaggtggaggcccaggtttacatcctcagcaaggaggaaggtggccgccacaagccctttgtgtcccacttcatgcctgtcatgttctccctgacttgggacatggcctgtcggattatcctgcccccagagaaggagcttgccatgcccggggaggacctgaagttcaacctaatcttgcggcagccaatgatcttagagaaaggccagcgtttcaccctgcgagatggcaaccggactattggcaccggtctagtcaccaacacgctggccatgactgaggaggagaagaatatcaaatggggttgagtgtgcagatctctgctcagcttcccttgcgtttaaggcctgccctagccagggctccctcctgcttccagtaccctctcatggcataggctgcaacccagcagagggcagctagatggacatttcccctgctcggaagggttggcctgcctggctggggaggtcagtaaactttgaatagtaagcca

SEQ ID NO: 507262 - DNA, 1116 bp, Homo sapiens
  misc_feature (8)..(8): n is a, c, g, or t
gagaaccnacccctttctttgcggaatcaccatggcggctgggaccctgtacacgtatcctgaaaactggagggccttcaaggctctcatcgctgctcagtacagcggggctcaggtccgcgtgctctccgcaccaccccacttccattttggccaaaccaaccgcacccctgaatttctccgcaaatttcctgccggcaaggtcccagcatttgagggtgatgatggattctgtgtgtttgagagcaacgccattgcctactatgtgagcaatgaggagctgcggggaagtactccagaggcagcagcccaggtggtgcagtgggtgagctttgctgattccgatatagtgcccccagccagtacctgggtgttccccaccttggggcatcatgcaccacaagcagaagaccccaggctgagcggaaggaggacgaacaaggcggctgaccctgctcctgaggaggagatggatgaatgtgagcaggcgctggcatgctggagcccaaggccaaggaccccgttcgctcaccgtgcccaagagtacctcttgctgttcgcgatgagatttaaagcagcaagctactcacaattgaggacacactctcatgtgggcactgtccaatattctctggcgcagacacgttgtgtataacggaccggacgtggtaccctggtgagtactacagacgtatcgacttccgctgaaaggaatctcaactcaagaaccttcaatgacgctgcacatcttcatcgacgtggacatattccagcagactggtacaaggctgaggacagaagtgccttacgtgcagatgtcatcctatttgaggaagccaacgaatagcagcgtccatttctggcagtctgggatcttccgaggccaaggagcttgcctttccgatgagtccagattggcacggtggactacgagtcataacaacattggcggaaaactggatcctggccagcgaggaagacccagaacgctggttcgagagtacttatccttgggagcgagggccattccagcatgtgggcaaaagcattcaagtccagggcaaagatcttcaagtgaacattctctttgccataacgctaactgccctgaacttc

SEQ ID NO: 507263 - DNA, 1474 bp, Homo sapiens
gagcagtcggagccgcagctgcctcccggagcccgagcccctccctccgggtccggcctagcccgcctgactcccactctgatcacctccacagcccgccgacctgagaactactacgcccatgagccttcgcggcgccggtgatttaggggacgctcctcagtgccccctgcgaccgccagagagaactacgttgcccctcagcccgagaggcgcgagtggtggaaaacctctccatcatactccgccctcgagacaccagccccctccatgacgtcttcagccgcgcgcccgacgtcggctgagacggccatagacactggcggctagaggggcccggacttgccctcccagctctaacttccgccggaagtgccttccagccgcaggcgcccttcttcttctgtgcgctcgggctcctggtcccggctccccggttaccggggcgcgagtatgaccacaatggcggccgccaccctgctgcgcgcgacgccccacttcagcggtctcgccgccggccggaccttcctgctgcagggtctgttgcggctgctgaaagccccggcattgcctctcttgtgccgcggcctggccgtggaggccaagaagacttacgtgcgcgacaagccacatgtgaatgtgggtaccatcggccatgtggaccacgggaagaccacgctgactgcagccatcacgaagattctagctgagggaggtggggctaagttcaagaagtacgaggagattgacaatgccccggaggagcgagctcggggtatcaccatcaatgcggctcatgtggagtatagcactgccgcccgccactacgcccacacagactgcccgggtcatgcagattatgttaagaatatgatcacaggcactgcacccctcgacggctgcatcctggtggtagcagccaatgacggccccatgccccagacccgagagcacttattactggccagacagattggggtggagcatgtggtggtgtatgtgaacaaggctgacgctgtccaggactctgagatggtggaactggtggaactggagatccgggagctgctcaccgagtttggctataaaggggaggagaccccagtcatcgtaggctctgctctctgtgcccttgagggtcgggaccctgagttaggcctgaagtctgtgcagaagctactggatgctgtggacacttacatcccagtgcccgcccgggacctggagaagcctttcctgctgcctgtggaggcggtgtactccgtccctggccgtggcaccgtggtgacaggtacactagagcgtggcattttaaagaagggagacgagtgtgagctcctaggacatagcaagaacatccgcactgtggtgacgaccgggaggagatgaggacgaggagcaccaacgggtacgtggatacagggtgttccggaaaaagctatgaccgatgctgccgctgggagggcgctagctg

SEQ ID NO: 507264 - DNA, 162 bp, Homo sapiens
ccgaggaggtggaggtgtggcagaggctgggggacaacacaggccagggagaaagaggagacagaggaagcaccgagtgtgacttacgttgtcttccctagatcaattttcttctggatggctcgtcgctgagtggtagattgagcgaatcgagtgagtcca

SEQ ID NO: 507265 - DNA, 146 bp, Homo sapiens
ggggaggtgtgctgttgtgcttgtctaaaccaaagcaattcccactgtccctgtgaaatttcaaacctctcccatatattcagtgacattaatctgaatggcatctttttggcttaatcatattttgccttgtttctttgttaact

SEQ ID NO: 507266 - DNA, 1336 bp, Homo sapiens
ttccacatcgtccccggccagagcatcctcggttactgaggtggcgcgtcccgttcaagaagtacgaggagattgacaatgccccggaggagcgagctcggggtatcaccatcaatgcggctcatgtggagtatagcactgccgcccgccactacgcccacacagactgcccgggtcatgcagattatgttaagaatatgatcacaggcactgcacccctcgacggctgcatcctggtggtagcagccaatgacggccccatgccccagacccgagagcacttattactggccagacagattggggtggagcatgtggtggtgtatgtgaacaaggctgacgctgtccaggactctgagatggtggaactggtggaactggagatccgggagctgctcaccgagtttggctataaaggggaggagaccccagtcatcgtaggctctgctctctgtgcccttgagggtcgggaccctgagttaggcctgaagtctgtgcagaagctactggatgctgtggacacttacatcccagtgcccgcccgggacctggagaagcctttcctgctgcctgtggaggcggtgtactccgtccctggccgtggcaccgtggtgacaggtacactagagcgtggcattttaaagaagggagacgagtgtgagctcctaggacatagcaagaacatccgcactgtggtgacaggcattgagatgttccacaagagcctggagagggccgaggccggagataacctcggggccctggtccgaggcttgaagcgggaggacttgcggcggggcctggtcatggtcaagccaggttccatcaagccccaccagaaggtggaggcccaggtttacatcctcagcaaggaggaaggtggccgccacaagccctttgtgtcccacttcatgcctgtcatgttctccctgacttgggacatggcctgtcggattatcctgcccccagagaaggagcttgccatgcccggggaggacctgaagttcaacctaatcttgcggcagccaatgatcttagagaaaggccagcgtttcaccctgcgagatggcaaccggactattggcaccggtctagtcaccaacacgctggccatgactgaggaggagaagaatatcaaatggggttgagtgtgcagatctctgctcagcttcccttgcgtttaaggcctgccctagccagggctccctcctgcttccagtaccctctcatggcataggctgcaacccagcagagggcagctagatggacatttcccctgctcggaagggttggcctgcctggctggggaggtcagtaaactttgaatagtaagcca

SEQ ID NO: 507267 - DNA, 358 bp, Homo sapiens
atgattctactagctccagtttcctgagtagctgggattacaggtgcatcacaatgccgggtaatttttatattttattagagacgggatttcgccatgttaaccaggctggtctcgaactcctgacctcaggtgatctgcccgccttgccttcccaaaagtgctgggattcacaggcatgagcaaccgtgcctggcctttattggcttagtttttaacatttatccctccaaaaacattttggggcctttttctcgtgggggcaacacagttgaagctgctctatcagcattagacactaacctttatccccatcatttcagtcaaccactcaggtattgtttcaccttcttgaggt

SEQ ID NO: 507268 - DNA, 428 bp, Homo sapiens
  misc_feature (18)..(18): n is a, c, g, or t
  misc_feature (108)..(110): n is a, c, g, or t
  misc_feature (134)..(134): n is a, c, g, or t
  misc_feature (174)..(174): n is a, c, g, or t
gtggctgggcttcggccntcatggcggggcgcagggcttcacctccaaggcggatcctcagggcagtggcggatcacggtgcggtgatcgagcacctggagcgtctannnttgtggacttcggcagccgcgagngttggcgcgactggagaaagctatcgccttcgccgaccgntacgcgccgtggacacagacggggtggagccatggaatcggtcctggaggcagatgtctatacctgagatccgacaatgtggtagaaggcaactgtgcctgatgaattactacaaaactcccatcgcgtcgtggaaggagtacttttgttggccccccccaggtaatatctcttttgccaaagctggattgaacaagaagccattcccacacagcttgagtagctcattcttggaaaggggggtactctggtga

SEQ ID NO: 507269 - DNA, 2005 bp, Homo sapiens
gagcagtcggagccgcagctgcctcccggagcccgagcccctccctccgggtccggcctagcccgcctgactcccactctgatcacctccacagcccgccgacctgagaactactacgcccatgagccttcgcggcgccggtgatttaggggacgctcctcagtgccccctgcgaccgccagagagaactacgttgcccctcagcccgagaggcgcgagtggtggaaaacctctccatcatactccgccctcgagacaccagccccctccatgacgtcttcagccgcgcgcccgacgtcggctgagacggccatagacactggcggctagaggggcccggacttgccctcccagctctaacttccgccggaagtgccttccagccgcaggcgcccttcttcttctgtgcgctcgggctcctggtcccggctccccggttaccggggcgcgagtatgaccacaatggcggccgccaccctgctgcgcgcgacgccccacttcagcggtctcgccgccggccggaccttcctgctgcagggtctgttgcggctgctgaaagccccggcattgcctctcttgtgccgcggcctggccgtggaggccaagaagacttacgtgcgcgacaagccacatgtgaatgtgggtaccatcggccatgtggaccacgggaagaccacgctgactgcagccatcacgaagattctagctgagggaggtggggctaagttcaagaagtacgaggagattgacaatgccccggaggagcgagctcggggtatcaccatcaatgcggctcatgtggagtatagcactgccgcccgccactacgcccacacagactgcccgggtcatgcagattatgttaagaatatgatcacaggcactgcacccctcgacggctgcatcctggtggtagcagccaatgacggccccatgccccagacccgagagcacttattactggccagacagattggggtggagcatgtggtggtgtatgtgaacaaggctgacgctgtccaggactctgagatggtggaactggtggaactggagatccgggagctgctcaccggtttggtataaaggggaggagacccagtcatcgtagctctgctctctgtgcccttgagggtcgggaccctgagttaggcctgaagtctgtgcagaagctactggatgctgtggacacttacatcccagtgcccgcccgggacctggagaagcctttcctgctgcctgtggaggcggtgtactccgtccctggccgtggcaccgtggtgacaggtacactagagcgtggcattttaaagaagggagacgagtgtgagctcctaggacatagcaagaacatccgcactgtggtgacaggcattgagatgttccacaagagcctggagagggccgaggccggagataacctcggggccctggtccgaggcttgaagcgggaggacttgcggcggggcctggtcatggtcaagccaggttccatcaagccccaccagaaggtggaggcccaggtttacatcctcagcaaggaggaaggtggccgccacaagccctttgtgtcccacttcatgcctgtcatgttctccctgacttgggacatggcctgtcggattatcctgcccccagagaaggagcttgccatgcccggggaggacctgaagttcaacctaatcttgcggcagccaatgatcttagagaaaggccagcgtttcaccctgcgagatggcaaccggactattggcaccggtctagtcaccaacacgctggccatgactgaggaggagaagaatatcaaatggggttgagtgtgcagatctctgctcagcttcccttgcgtttaaggcctgccctagccagggctccctcctgcttccagtaccctctcatggcataggctgcaacccagcagagggcagctagatggacatttcccctgctcggaagggttggcctgcctggctggggaggtcagtaaactttgaatagtaagcca

SEQ ID NO: 507270 - DNA, 129 bp, Homo sapiens
ctagaggatcccggctatacattatcatatagtatcaggtttactgtctgtgcttgttgtattttaggacagaggcgggctttcagatacagaaatcacctgcgctcttgaaaagtaagggatggaagt

SEQ ID NO: 507271 - DNA, 2044 bp, Homo sapiens
  misc_feature (1045)..(1045): n is a, c, g, or t
gagcagtcggagccgcagctgcctcccggagcccgagcccctccctccgggtccggcctagcccgcctgactcccactctgatcacctccacagcccgccgacctgagaactactacgcccatgagccttcgcggcgccggtgatttaggggacgctcctcagtgccccctgcgaccgccagagagaactacgttgcccctcagcccgagaggcgcgagtggtggaaaacctctccatcatactccgccctcgagacaccagccccctccatgacgtcttcagccgcgcgcccgacgtcggctgagacggccatagacactggcggctagaggggcccggacttgccctcccagctctaacttccgccggaagtgccttccagccgcaggcgcccttcttcttctgtgcgctcgggctcctggtcccggctccccggttaccggggcgcgagtatgaccacaatggcggccgccaccctgctgcgcgcgacgccccacttcagcggtctcgccgccggccggaccttcctgctgcagggtctgttgcggctgctgaaagccccggcattgcctctcttgtgccgcggcctggccgtggaggccaagaagacttacgtgcgcgacaagccacatgtgaatgtgggtaccatcggccatgtggaccacgggaagaccacgctgactgcagccatcacgaagattctagctgagggaggtggggctaagttcaagaagtacgaggagattgacaatgccccggaggagcgagctcggggtatcaccatcaatgcggctcatgtggagtatagcactgccgcccgccactacgcccacacagactgcccgggtcatgcagattatgttaagaatatgatcacaggcactgcacccctcgacggctgcatcctggtggtagcagccaatgacggccccatgccccagacccgagagcacttattactggccagacagattggggtggagcatgtggtggtgtatgtgaacaaggctgacgctgtccaggactctgagaattggggggggnttggggggaaaaaaccttttggggggttggggaaaactgggagatcccgggagcctgctcaccgagtttgcgctataaaggggaggagaccccagtcatcgtaggctctgctctctgtgcccttgagggtcgggaccctgagttaggcctgaagtctgtgcagaagctactggatgctgtggacacttacatcccagtgcccgcccgggacctggagaagcctttcctgctgcctgtggaggcggtgtactccgtccctggccgtggcaccgtggtgacaggtacactagagcgtggcattttaaagaagggagacgagtgtgagctcctaggacatagcaagaacatccgcactgtggtgacaggcattgagatgttccacaagagcctggagagggccgaggccggagataacctcggggccctggtccgaggcttgaagcgggaggacttgcggcggggcctggtcatggtcaagccaggttccatcaagccccaccagaaggtggaggcccaggtttacatcctcagcaaggaggaaggtggccgccacaagccctttgtgtcccacttcatgcctgtcatgttctccctgacttgggacatggcctgtcggattatcctgcccccagagaaggagcttgccatgcccggggaggacctgaagttcaacctaatcttgcggcagccaatgatcttagagaaaggccagcgtttcaccctgcgagatggcaaccggactattggcaccggtctagtcaccaacacgctggccatgactgaggaggagaagaatatcaaatggggttgagtgtgcagatctctgctcagcttcccttgcgtttaaggcctgccctagccagggctccctcctgcttccagtaccctctcatggcataggctgcaacccagcagagggcagctagatggacatttcccctgctcggaagggttggcctgcctggctggggaggtcagtaaactttgaatagtaagcca

SEQ ID NO: 507272 - DNA, 1284 bp, Homo sapiens
cggtaccctttggcacgcagaatgggtggtgaggagatggagagaaaggtgggcctgagtttctaactgctacacttggctatatggatgtgaactgaagagctcgttgaacttggctgtttcctttccttctcctctccagaatatgatcacaggcactgcacccctcgacggctgcatcctggtggtagcagccaatgacggccccatgccccagacccgagagcacttattactggccagacagattggggtggagcatgtggtggtgtatgtgaacaaggctgacgctgtccaggactctgagatggtggaactggtggaactggagatccgggagctgctcaccgagtttggctataaaggggaggagaccccagtcatcgtaggctctgctctctgtgcccttgagggtcgggaccctgagttaggcctgaagtctgtgcagaagctactggatgctgtggacacttacatcccagtgcccgcccgggacctggagaagcctttcctgctgcctgtggaggcggtgtactccgtccctggccgtggcaccgtggtgacaggtacactagagcgtggcattttaaagaagggagacgagtgtgagctcctaggacatagcaagaacatccgcactgtggtgacaggcattgagatgttccacaagagcctggagagggccgaggccggagataacctcggggccctggtccgaggcttgaagcgggaggacttgcggcggggcctggtcatggtcaagccaggttccatcaagccccaccagaaggtggaggcccaggtttacatcctcagcaaggaggaaggtggccgccacaagccctttgtgtcccacttcatgcctgtcatgttctccctgacttgggacatggcctgtcggattatcctgcccccagagaaggagcttgccatgcccggggaggacctgaagttcaacctaatcttgcggcagccaatgatcttagagaaaggccagcgtttcaccctgcgagatggcaaccggactattggcaccggtctagtcaccaacacgctggccatgactgaggaggagaagaatatcaaatggggttgagtgtgcagatctctgctcagcttcccttgcgtttaaggcctgccctagccagggctccctcctgcttccagtaccctctcatggcataggctgcaacccagcagagggcagctagatggacatttcccctgctcggaagggttggcctgcctggctggggaggtcagtaaactttgaatagtaagcca

SEQ ID NO: 507273 - DNA, 172 bp, Homo sapiens
gccagaacacaggtgttcgtgaaaactacccctaaaaggccaaaattgggaaagggaaaagtatcatatcaacattgttcggtcattgggacaaggaggattcgggcaagtcccaccactacttggccaactgtatcttattaaatgccggtggcatcggacaaaaggaccc

SEQ ID NO: 507274 - DNA, 177 bp, Homo sapiens
gattccattcgtgaaaattttcctataccctgaacagtccacttatcaccactgcgacctattgggaactaaccgaattcaccatgttactcagattcgctacaccaaattccgataaatctctagaagtacacatattacaagagcctgctactgagaactaactgaatcccaccg

SEQ ID NO: 507275 - DNA, 1958 bp, Homo sapiens
gagcagtcggagccgcagctgcctcccggagcccgagcccctccctccgggtccggcctagcccgcctgactcccactctgatcacctccacagcccgccgacctgagaactactacgcccatgagccttcgcggcgccggtgatttaggggacgctcctcagtgccccctgcgaccgccagagagaactacgttgcccctcagcccgagaggcgcgagtggtggaaaacctctccatcatactccgccctcgagacaccagccccctccatgacgtcttcagccgcgcgcccgacgtcggctgagacggccatagacactggcggctagaggggcccggacttgccctcccagctctaacttccgccggaagtgccttccagccgcaggcgcccttcttcttctgtgcgctcgggctcctggtcccggctccccggttaccggggcgcgagtatgaccacaatggcggccgccaccctgctgcgcgcgacgccccacttcagcggtctcgccgccggccggaccttcctgctgcagggtctgttgcggctgctgaaagccccggcattgcctctcttgtgccgcggcctggccgtggaggccaagaagacttacgtgcgcgacaagccacatgtgaatgtgggtaccatcggccatgtggaccacgggaagaccacgctgactgcagccatcacgaagattctagctgagggaggtggggctaagttcaagaagtacgaggagattgacaatgccccggaggagcgagctcggggtatcaccatcaatgcggctcatgtggagtatagcactgccgcccgccactacgcccacacagactgcccgggtcatgcagattatgttaagaatatgatcacaggcactgcacccctcgacggctgcatcctggtggtagcagccaatgacggccccatgccccagacccgagagcacttattactggccagacaggactctgagatggtggaactggtggaactggagatccgggagctgctcaccgagtttggctataaaggggaggagaccccagtcatcgtaggctctgctctctgtgcccttgagggtcgggaccctgagttaggcctgaagtctgtgcagaagctactggatgctgtggacacttacatcccagtgcccgcccgggacctggagaagcctttcctgctgcctgtggaggcggtgtactccgtccctggccgtggcaccgtggtgacaggtacactagagcgtggcattttaaagaagggagacgagtgtgagctcctaggacatagcaagaacatccgcactgtggtgacaggcattgagatgttccacaagagcctggagagggccgaggccggagataacctcggggccctggtccgaggcttgaagcgggaggacttgcggcggggcctggtcatggtcaagccaggttccatcaagccccaccagaaggtggaggcccaggtttacatcctcagcaaggaggaaggtggccgccacaagccctttgtgtcccacttcatgcctgtcatgttctccctgacttgggacatggcctgtcggattatcctgcccccagagaaggagcttgccatgcccggggaggacctgaagttcaacctaatcttgcggcagccaatgatcttagagaaaggccagcgtttcaccctgcgagatggcaaccggactattggcaccggtctagtcaccaacacgctggccatgactgaggaggagaagaatatcaaatggggttgagtgtgcagatctctgctcagcttcccttgcgtttaaggcctgccctagccagggctccctcctgcttccagtaccctctcatggcataggctgcaacccagcagagggcagctagatggacatttcccctgctcggaagggttggcctgcctggctggggaggtcagtaaactttgaatagtaagcca

SEQ ID NO: 507276 - DNA, 229 bp, Homo sapiens
tttttttccccccccccccccccggggggggggggggggtgggggggcacaatttttttccccccccccccgggtaaaaaaccccccattttgccggggcccaaattttttttttaccccccaaaaaaggtggggggggggggtggggttttttccccccccccttttccccctggggttggtttttcccccccttttttttaacccccgggggggggggtttttttta

SEQ ID NO: 507277 - DNA, 1881 bp, Homo sapiens
gagcagtcggagccgcagctgcctcccggagcccgagcccctccctccgggtccggcctagcccgcctgactcccactctgatcacctccacagcccgccgacctgagaactactacgcccatgagccttcgcggcgccggtgatttaggggacgctcctcagtgccccctgcgaccgccagagagaactacgttgcccctcagcccgagaggcgcgagtggtggaaaacctctccatcatactccgccctcgagacaccagccccctccatgacgtcttcagccgcgcgcccgacgtcggctgagacggccatagacactggcggctagaggggcccggacttgccctcccagctctaacttccgccggaagtgccttccagccgcaggcgcccttcttcttctgtgcgctcgggctcctggtcccggctccccggttaccggggcgcgagtatgaccacaatggcggccgccaccctgctgcgcgcgacgccccacttcagcggtctcgccgccggccggaccttcctgctgcagggtctgttgcggctgctgaaagccccggcattgcctctcttgtgccgcggcctggccgtggaggccaagaagacttacgtgcgcgacaagccacatgtgaatgtgggtaccatcggccatgtggaccacgggaagaccacgctgactgcagccatcacgaagattctagctgagggaggtggggctaagttcaagaagtacgaggagattgacaatgccccggaggagcgagctcggggtatcaccatcaatgcggctcatgtggagtatagcactgccgcccgccactacgcccacacagactgcccgggtcatgcagattatgttaagaatatgatcacaggcactgcacccctcgacggctgcatcctggtggtagcagccaatgacggccccatgccccagacccgagtttggctataaaggggaggagaccccagtcatcgtaggctctgctctctgtgcccttgagggtcgggaccctgagttaggcctgaagtctgtgcagaagctactggatgctgtggacacttacatcccagtgcccgcccgggacctggagaagcctttcctgctgcctgtggaggcggtgtactccgtccctggccgtggcaccgtggtgacaggtacactagagcgtggcattttaaagaagggagacgagtgtgagctcctaggacatagcaagaacatccgcactgtggtgacaggcattgagatgttccacaagagcctggagagggccgaggccggagataacctcggggccctggtccgaggcttgaagcgggaggacttgcggcggggcctggtcatggtcaagccaggttccatcaagccccaccagaaggtggaggcccaggtttacatcctcagcaaggaggaaggtggccgccacaagccctttgtgtcccacttcatgcctgtcatgttctccctgacttgggacatggcctgtcggattatcctgcccccagagaaggagcttgccatgcccggggaggacctgaagttcaacctaatcttgcggcagccaatgatcttagagaaaggccagcgtttcaccctgcgagatggcaaccggactattggcaccggtctagtcaccaacacgctggccatgactgaggaggagaagaatatcaaatggggttgagtgtgcagatctctgctcagcttcccttgcgtttaaggcctgccctagccagggctccctcctgcttccagtaccctctcatggcataggctgcaacccagcagagggcagctagatggacatttcccctgctcggaagggttggcctgcctggctggggaggtcagtaaactttgaatagtaagcca

SEQ ID NO: 507278 - DNA, 1583 bp, Homo sapiens
  misc_feature (9)..(9): n is a, c, g, or t
  misc_feature (70)..(70): n is a, c, g, or t
acgaagagntacaggtcgatactctgtgttactttaatgctgggccagcgtttaagtgctcgattagccntgtcttcagctgatcaagtccgccggccggaccttcctgctgcagggtctgttgcggctgctgaaagccccggcattgcctctcttgtgccgcggcctggccgtggaggccaagaagacttacgtgcgcgacaagccacatgtgaatgtgggtaccatcggccatgtggaccacgggaagaccacgctgactgcagccatcacgaagattctagctgagggaggtggggctaagttcaagaagtacgaggagattgacaatgccccggaggagcgagctcggggtatcaccatcaatgcggctcatgtggagtatagcactgccgcccgccactacgcccacacagactgcccgggtcatgcagattatgttaagaatatgatcacaggcactgcacccctcgacggctgcatcctggtggtagcagccaatgacggccccatgccccagacccgagagcacttattactggccagacagattggggtggagcatgtggtggtgtatgtgaacaaggctgacgctgtccaggactctgagatggtggaactggtggaactggagatccgggagctgctcaccggtttggtataaaggggaggagacccagtcatcgtagctctgctctctgtgcccttgagggtcgggaccctgagttaggcctgaagtctgtgcagaagctactggatgctgtggacacttacatcccagtgcccgcccgggacctggagaagcctttcctgctgcctgtggaggcggtgtactccgtccctggccgtggcaccgtggtgacaggtacactagagcgtggcattttaaagaagggagacgagtgtgagctcctaggacatagcaagaacatccgcactgtggtgacaggcattgagatgttccacaagagcctggagagggccgaggccggagataacctcggggccctggtccgaggcttgaagcgggaggacttgcggcggggcctggtcatggtcaagccaggttccatcaagccccaccagaaggtggaggcccaggtttacatcctcagcaaggaggaaggtggccgccacaagccctttgtgtcccacttcatgcctgtcatgttctccctgacttgggacatggcctgtcggattatcctgcccccagagaaggagcttgccatgcccggggaggacctgaagttcaacctaatcttgcggcagccaatgatcttagagaaaggccagcgtttcaccctgcgagatggcaaccggactattggcaccggtctagtcaccaacacgctggccatgactgaggaggagaagaatatcaaatggggttgagtgtgcagatctctgctcagcttcccttgcgtttaaggcctgccctagccagggctccctcctgcttccagtaccctctcatggcataggctgcaacccagcagagggcagctagatggacatttcccctgctcggaagggttggcctgcctggctggggaggtcagtaaactttgaatagtaagcca

SEQ ID NO: 507279 - DNA, 663 bp, Homo sapiens
atagcaacccagaatgtaaaaaagaaaaaactggggggaaacaagaccaggtctacagtgactagagcaaacgcaaaagaaaaacagaaacagaacaacaaaaaaaaacattgtgttgcgacgcgccatgggcccccctcgagaaagagccttcttataggaaccacattgtgggtgtgagggagcggggagtgaccacaatgaaagacggaagcaaacagagaggtgacagaaagcaaaggtgggggcaacaacaagccgtggtgacccaacaaggagaaaactccggggaacaaaagagcagatgagagggcggggagaatactccagacatagtataaaaacaacgcccgcgggggaaaacacgagagggatgttgaaacaaacacaccaacagaggagcctacggagggccaatagagggggacctacatcacaagcggaggagtgccacaagcggagacgcgacaattacagaagaattgaaagccccgaagccgggggagacaaaacaagcagccaaatagaaacagagaaggaaagagaaaagaaagccaccagcaacaacagaaggaaaagtaacagacacacacaaagcaggcaggatagcaagaaaagataaacagagaagcgaatagccagaaaaacgaaacaacagaaaag

SEQ ID NO: 507280 - DNA, 651 bp, Homo sapiens
agtaaatcgtaatcgccatccagtcacagacgttctaactgaggtgcattgtaaatccacttcgaccttaatgtttcataggggctatcggagttcctgatgtagaaaatgtagcccatttcttgccacatcatgggctacaccttgacctaacgtctttacgtgggtacttgcgcttactttgtagccttcatcagggtttgctgaagatggcggtatataggctgagcaggaggtggtgaggtcgatcggggtttatcgattacagaacaggctcctctagagggatatgaagcaccgccaggtcctttgagttttaagctgtggctcgtagtgttctggcgagcagttttgttgatttaactgttgaggttaagggctaagcatagtggggtatctaatcccagtttgggtcttagctattgtgtgtccagatatgttaaagccactttcgtagtctattttgtgtcaactggagttttttacaactcaggtgagtttaagctttattggggagggggtgatctaaaacactctttacgccggcttctattgacttgggttaatcgtgtgaccgcggtggctggcacgaaattgaccaacctggggttagtatagcttaattaactttcgttattgctaaaggtcaca

SEQ ID NO: 507281 - DNA, 172 bp, Homo sapiens
aggtgagaatgtaaattaatactatagaaaacagtctgattactgaaaaacctaacaagagaaatatgacataacccagcaatctcactactggatatctatctaaaggaaaagatatcagtatactaaacatgtacctgcatccccgtgttctttgcaacacggtctctca

SEQ ID NO: 507282 - DNA, 1367 bp, Homo sapiens
  misc_feature (1345)..(1345): n is a, c, g, or t
gagcagtcggagccgcagctgcctcccggagcccgagcccctccctccgggtccggcctagcccgcctgactcccactctgatcacctccacagcccgccgacctgagaactactacgcccatgagccttcgcggcgccggtgatttaggggacgctcctcagtgccccctgcgaccgccagagagaactacgttgcccctcagcccgagaggcgcgagtggtggaaaacctctccatcatactccgccctcgagacaccagccccctccatgacgtcttcagccgcgcgcccgacgtcggctgagacggccatagacactggcggctagaggggcccggacttgccctcccagctctaacttccgccggaagtgccttccagccgcaggcgcccttcttcttctgtgcgctcgggctcctggtcccggctccccggttaccggggcgcgagtatgaccacaatggcggccgccaccctgctgcgcgcgacgccccacttcagcggtctcgccgccggccggaccttcctgctgcagggtctgttgcggctgctgaaagccccggcattgcctctcttgtgccgcggcctggccgtggaggccaagaagacttacgtgcgcgacaagccacatgtgaatgtgggtaccatcggccatgtggaccacgggaagaccacgctgactgcagccatcacgaagattctagctgagggaggtggggctaagttcaagaagtacgaggagattgacaatgccccggaggagcgagctcggggtatcaccatcaatgcggctcatgtggagtatagcactgccgcccgccactacgcccacacagactgcccgggtcatgcagattatgttaagaatatgatcacaggcactgcacccctcgacggctgcatcctggtggtagcagccaatgacggccccatgccccagacccgagagcacttattactggccagacagattggggtggagcatgtggtggtgtatgtgaacaaggctgacgctgtccaggactctgagatggtggaactggtggaactggagatccgggagctgctcaccgagtttggtataaggggaggagacccagtcatcgaggcccgtccctggccttgaggtcggacctgaagttagccgaagtcggcaaaagctacggatgcggggacctattcatgccccgaccggaaaacttcggggcagtggagcgcgtacccgccggcgggccggggaggcactaaggggctaaacggacggggcccgaataaaaccctgggctatcaaaggggcacggacacgggcacaaaagctaagagagagcaggcgtcatacgggngtctgcgaagggccgcggcgat

SEQ ID NO: 507283 - DNA, 151 bp, Homo sapiens
  misc_feature (88)..(88): n is a, c, g, or t
  misc_feature (138)..(138): n is a, c, g, or t
ggagtgaacaccagaacacatgacagaaagagatagagcagtctgcagctctagaaggaggggcaggcagctggctctgaggctcgangtatgccccctgtgtggagctggggcagcggggcgggcagaccattcatngcagcaggcagtg

SEQ ID NO: 507284 - DNA, 166 bp, Homo sapiens
tccatattcaagcactttctaagttacgataatgacatttcaattccatatacgcattactagaatatatatttttaaaccagagtgggtcttaaaaatatacttggaaccctcggagtctccatggccagaaccgggtggccatggacttccagccaaaggctcc

SEQ ID NO: 507285 - DNA, 448 bp, Homo sapiens
  misc_feature (5)..(5): n is a, c, g, or t
  misc_feature (14)..(14): n is a, c, g, or t
  misc_feature (94)..(94): n is a, c, g, or t
  misc_feature (125)..(125): n is a, c, g, or t
agggnaaaaggaanaatgcctgaagtacgccggaaaacctttttccaaggggtatgaattttttaaaaccaaagaaaagcctaaaatggttccncgtgtaaacgtaaactgaataaaagtttggnctgtgtccccccaccccaaatccttatccttgaaactgcagctccccataatccccccaggtgttgtgggagggaccccagtgggaggtaattgaatcatgggggtggttaacgcccatgctgttctcgtgatagcgagtgagttctcacgagatctgatggttttataaggggctttccccctccttcgctctgcacttctccttgctgccatgcgaagaaggatgtgtttgcttccccttctgccatgattgtaagtttcctgaggcctccccagccatgttaaactttgagttaattaaacctctttcctttataaatta

SEQ ID NO: 507286 - DNA, 933 bp, Homo sapiens
  misc_feature (2)..(2): n is a, c, g, or t
anagaggcagaaaagggtatctagagacgggtgtcctgcgttcggtcttgtgccacatagatgtcgcctcgtgttgtcttagaacgtggtgttcaccgtatgtttggccatactcttgttggttgctttcacctacacggtggggggttcccgtcggcgccttatttttgctccctaccacgtgggcttctttggggaaaccaatttttatcccccaccgggtgtctcgcccccggcccgtcctcatgttgtggccccgcctcggcccaatttccaggggtttcaagcaacctcgtgaaccatcctgggtgtttcccatccccccgggcgctattggtcatccagggggctgggggcacataaccccaacctccgctcatgggtgggtccgtgctctcacagcagtcccaaagggggtgtaatattcactcgcctgtctcacaagagcgccccacatttttggcgaagtcccccccattccccttgtaagttgggatgcgcaccctctcgaaccttaaggtaggctccctggcacgccttgcgtgccaccgcagtcccgtgtgagcggtgaccccccttccccagatggggctcccccccttccgcggagcgttccaagtcgccccactcccctccctagggcgacagtgaaaccaccccaccatcacggggaagtacgccctctcccgggggaccccaactcagtggccctgctgctccggagaaagaactgccccacccccggggcggtcttaaaccaacgcccgcgctgcgtccatgcaggggcggctcctagatttcacagacggtcgcacacaccactcgggccacaacaaaggctccctgcccagatacgtcgggcgccggacgataccccacaaacaccactttccaccgccccccaatataattccccccccgccaaaaataaca

SEQ ID NO: 507287 - DNA, 125 bp, Homo sapiens
ctcctattcttatcgggctccaaaaaaacgccaaaaggggccaaagccaagaaaaaattttgttcaaaaaaattaaaacccaggggtaagggttaaaggagaatcaaaaataaaatcccggttta

SEQ ID NO: 507288 - DNA, 168 bp, Homo sapiens
cccaaataaagtataggcgatagaaattaaaacctggcgcaatagatatagtaccgcaaggcaaagatgaaaaattataaccaagcctaattatagcagggactatccctatacctacatgcataatgaatttaactgaaataactttgcaaggagagccaaggctag

SEQ ID NO: 507289 - DNA, 144 bp, Homo sapiens
gcaccttgtaatcccagctacctttggaggctgaggtcaggagaattgctcgaagccgggaggcggaaattgcagtgagctgagaattgtgccattgaagtccagcctggattactgagctagacataggtctcaaagaaaatc

SEQ ID NO: 507290 - DNA, 632 bp, Homo sapiens
agcggggcaaaccgtttgggtccttctcggtaccctggtggcttgttgtatttgctctttgcaatagatcttgttgccgcttgctctttggggcctcactgcctttatgagctataacactccccgcagaggtctgcagcttcatgcttgaagccagcgagaccacgaacccactgggaggaaccaacaactccaaacgcgccacctgtaagagctgtaacactccctgtgaaggtctgtggcttcactcctgaagtcagcgagaccaggaacccaccggaaggaatctccggacacaaagaactgcaacactcacccgagggtctgtggcttcattcttgaagtcagtgagattaagaacccaccggaaggaaccagttccggacgtgccgagttcaagcaatgagtcctgcctcagtctccggagtaactgggattacaggtgcacgctgccatgcccagctaaatttgtattttagtagagtcgaggtttcaccgcgttgcccaggctggtctcgacattcctgagcttgggcaacccactcacctcggctcccaaagtgctaggataaacaggcgtgagccaccaggccgggcccgtatggtggtttctactccggactgactctccc

SEQ ID NO: 507291 - DNA, 546 bp, Homo sapiens
acgctgctcacatagaaggatagtatcctgattgtgaaacttaagctcttacccattgccaaaatcaatattggggatgtctctgtaacatagtttacgatgagcctggctttttttttttttttattggggaggcaaattcttgtcctgcccccctggctgaattgcagtgacccgaaatcaccccattgcactcaaccctgggcaacagaccaagattctgtctcaaaaaaaataaaaaataaaaaaagaaagaaaaaaaaagaatgtgattccagaggctgacatgtttggtgaatcgccaaaccagcgcttagataggaacccttccgggaaaactctgcgatccaggttggtgcatgtgtgcccccctcaggtgatgataaccccctttgtcaaggaagagtggtgtaatgggttattacgccagagcaaccggggagagccaagcagccttgatgttgcctcagccagaccccggggtgcatttcgggtcctccccccactgtgttgcccttgctcctttttaaaccctctttgccctca

SEQ ID NO: 507292 - DNA, 110 bp, Homo sapiens
tggggtttttcccagggacccctataaaaaacccaaagggttttgtgatgggggccccctgttcccccaaaaactaaggttttaaagggttccctaatgggaaaaaaaaa

SEQ ID NO: 507293 - DNA, 344 bp, Homo sapiens
  misc_feature (149)..(149): n is a, c, g, or t
  misc_feature (152)..(152): n is a, c, g, or t
  misc_feature (246)..(246): n is a, c, g, or t
  misc_feature (268)..(268): n is a, c, g, or t
ctgatctggtaagtttttaagtttcttgatacaatcatatagaattcattgtctaaaatttttattagcaatgtccttacatgattgtccttacatgattgtttcttatatgattgtttctaagcattaagcaaattatagtaaaattnctncctaaaatctgttatacattggataccatgtgagtctacaagcttaacaatgacggttttctgcctttctgacttatgtctcatactattaagnaagtataattttgtaaaaaggnaataatgtgttagaagaaagtatgaaaggcaatgctagcattattccaggctagtaagtactcagtaagtaaatct

SEQ ID NO: 507294 - DNA, 227 bp, Homo sapiens
  misc_feature (145)..(145): n is a, c, g, or t
tacacctagctaagttttggctttctaaatatcatttcctacgaagaggaaccagggctcctgtgaaaaaagtgctgattacagttccagggcagagaacatacaaggtaagcttagaatatctgtgtaccagaaagtagactangggagatacactatgatataggagtgggttcccacaggtcaaatttaggacaatctgaacatgaagaagataatcctagtaa

SEQ ID NO: 507295 - DNA, 208 bp, Homo sapiens
agaaggatgcctgtggcctcggagacacagtgtcaggcaacggaatcccagagccgcagtcttacgccccgcctcggcccaccgaccgcctggccgtgcgcccttcgcccagcggagcgttttccaccgtttccagcccaatgtttcctgcacgtgcaactgcaaacgctctttgttccagagcatggagatcacggagctggagttt

SEQ ID NO: 507296 - DNA, 480 bp, Homo sapiens
tcgtacaagaaagagatggagaaactggtgagggttcgactgggtgtccacccacaggctcagagcctgcacgatctgccgttctttcgcatcaagaagttgatctagcgagccatttccatgttgtagatccgccggcacctttcatagctttccctctgtcgccggcggcatggcttctcataataccggcgatgctcaatgtcctcaatgagcccatccatagtgaggattctgtttagggtcctgtatgcggctttccacgttcccttcctgtaccatcacagtcctggcgatgaacttcagatgttttgccatgaccttggatttaaaccttcactctgtagagcctaaaggatgatggagaaagggcgaggcaagcagaaagagaaacgcaacataatacaaactacaccgcgcgactaatttaggaattggaactccagatgctcagggacggcgagatggagacatgaagtc

SEQ ID NO: 507297 - DNA, 315 bp, Homo sapiens
tgagctggtccgaaagccgagcatacactagcacgtggggatagggatcaagacagatacgcctaggcaagaagtctgactgccttagaactaactctaatagagcccgggcacgggaaggggtaagagagatcacgctgactagatggttacagatcgcggtggggtaccttactcgagaccacaccagaaattagctacacaacaggatcggaaccgggcgtcgtcgctacccagccttagaccctttccccacagatgttcaccggtagagctctgcaccacaacttcttgccaaggattaccctttcgtgg

SEQ ID NO: 507298 - DNA, 793 bp, Homo sapiens
  misc_feature (12)..(12): n is a, c, g, or t
  misc_feature (81)..(82): n is a, c, g, or t
  misc_feature (140)..(140): n is a, c, g, or t
  misc_feature (154)..(154): n is a, c, g, or t
  misc_feature (156)..(157): n is a, c, g, or t
  misc_feature (167)..(167): n is a, c, g, or t
  misc_feature (191)..(191): n is a, c, g, or t
  misc_feature (207)..(207): n is a, c, g, or t
  misc_feature (226)..(226): n is a, c, g, or t
  misc_feature (240)..(240): n is a, c, g, or t
  misc_feature (249)..(250): n is a, c, g, or t
  misc_feature (254)..(254): n is a, c, g, or t
  misc_feature (269)..(270): n is a, c, g, or t
  misc_feature (284)..(285): n is a, c, g, or t
  misc_feature (303)..(303): n is a, c, g, or t
  misc_feature (305)..(305): n is a, c, g, or t
  misc_feature (312)..(312): n is a, c, g, or t
  misc_feature (316)..(316): n is a, c, g, or t
  misc_feature (328)..(328): n is a, c, g, or t
  misc_feature (331)..(332): n is a, c, g, or t
  misc_feature (346)..(346): n is a, c, g, or t
  misc_feature (351)..(351): n is a, c, g, or t
  misc_feature (360)..(360): n is a, c, g, or t
  misc_feature (363)..(363): n is a, c, g, or t
  misc_feature (367)..(368): n is a, c, g, or t
  misc_feature (376)..(376): n is a, c, g, or t
  misc_feature (383)..(383): n is a, c, g, or t
  misc_feature (396)..(396): n is a, c, g, or t
  misc_feature (401)..(401): n is a, c, g, or t
  misc_feature (404)..(405): n is a, c, g, or t
  misc_feature (408)..(408): n is a, c, g, or t
  misc_feature (411)..(412): n is a, c, g, or t
  misc_feature (414)..(414): n is a, c, g, or t
  misc_feature (427)..(427): n is a, c, g, or t
  misc_feature (433)..(433): n is a, c, g, or t
  misc_feature (444)..(444): n is a, c, g, or t
  misc_feature (450)..(450): n is a, c, g, or t
  misc_feature (452)..(452): n is a, c, g, or t
  misc_feature (459)..(459): n is a, c, g, or t
  misc_feature (463)..(463): n is a, c, g, or t
  misc_feature (473)..(474): n is a, c, g, or t
  misc_feature (482)..(482): n is a, c, g, or t
  misc_feature (484)..(485): n is a, c, g, or t
  misc_feature (502)..(503): n is a, c, g, or t
  misc_feature (505)..(506): n is a, c, g, or t
  misc_feature (508)..(508): n is a, c, g, or t
  misc_feature (535)..(535): n is a, c, g, or t
  misc_feature (538)..(538): n is a, c, g, or t
  misc_feature (543)..(543): n is a, c, g, or t
  misc_feature (546)..(546): n is a, c, g, or t
  misc_feature (558)..(558): n is a, c, g, or t
  misc_feature (563)..(563): n is a, c, g, or t
  misc_feature (578)..(579): n is a, c, g, or t
  misc_feature (582)..(582): n is a, c, g, or t
  misc_feature (589)..(590): n is a, c, g, or t
  misc_feature (645)..(645): n is a, c, g, or t
  misc_feature (729)..(729): n is a, c, g, or t
  misc_feature (781)..(781): n is a, c, g, or t
ttggcttctttnattggttaacagccaaactgtcacaggcagaccgtctgtttcccaccccttcaaacgctatgtgttttnncccttcttcccaaatccggtatatacccccccccccccctcgtgtgtgccggccagcngtcatacacagggngnngtgtcctggnttcttcaagggaacacatattggnatgggggttgggggtnggcgacgggttggtggttngggggggttgggtnttaagatgnnacangggccaggggggtanngtatggggggctgnngggggcaggggggggggngngtgcggntttngggggggggggnttnncgggggggggaatnggggnggtggggtnggngggnngggggggntgcggcngggggtcggggcngcggntgnnggngtnngngtgagggggtggngtttgncccgggtgggntggggngngggggcngggngggggctttnnaacatttntnnctttaccccttttgggnncnntntatctcccccaccccccaggcgactgnttnggcgnggnccgggggggggngggcngcttttggggttggnnacnttatttnnctttctatggcaagactgtcatggagcctggatatttcaggctcatatgcatccntgaccagtgtcccactgtggtcaaaaaacttagcaatggactttgtgaactcggcttcccgctgctgctttgttctcccactgntgaaggtcagcttccaggtgtatttgtcatcaaaccttttaagactggaggncagctgccaaat

SEQ ID NO: 507299 - DNA, 1039 bp, Homo sapiens
  misc_feature (692)..(692): n is a, c, g, or t
  misc_feature (897)..(897): n is a, c, g, or t
ggtgcagcgggggggcccgggggccctgtgtggccctgtagatgggtgaacctgcggtgtgcttcctgcggagggtttctggcaggtgagcatcctgggtgcctggggatcggcggccggtgcgacggtggctcggtggcgcgatggcctgctgggagcatcggcgtgagtgcaatggcctgacggtatacatgtgcagtgtgtatgccctgtcgagccaacgtttggcgcctggcttgggtccaacgggaccattcgaagactcaattgtccccttgtgacggacgaatcgtaagtcgtcttcgtccacgtgcctctaattaaggtgaactcacgaagactcgattgcacgtttcttcgcgtggcgagcgctcttctctcgaagcgactgacgcgtttgtgacagacttagtgcccacgtgccgagagagcaggaacccgttgcccgtgccaagcgacaccaaggttcaagggacattgtgttcgcatatcgggggggactaacaagtgtgccagcgtcgcgtcatggagtgttacagtggctccaatggacgtgtggcccaccgggcaatcgcgtgcgggcccatcaatccgtggcgcaaggctcttccaatcggtccccagtgctgcagaagcgctactgggcgggaaacaaggattcgggcaaggcccacacagctggtccctttgcnaatggttgacaagggccgcttgctggctcgtgtgcctggtactgccttcaatcccttgcagctcaggtggcactggggcatcgtcctccgaaccttgtgccttaagaagctgctcatgatggcctggtatcgatgactggtaaactcaaggccggggcttgactggctaccttggcaacttcggcaaggcacctttgttgccgtntctaagaacctacaggtactgtaccccaacctcggaagggactcgtttcccaagttccaatagaagtcatgagcactgttagagcccacaagtttcgcgcagggagcagccaccggggccacaaggggcttccaaaaaatgg

SEQ ID NO: 507300 - DNA, 608 bp, Homo sapiens
ctcaactggcgcgtcctgagcaacccgggctatactgatgcctctgcctatagattgcttaacctagtctattcgcctgatacttatagcccagtagttatctaagtgcaagtcactatcctttaatactaatcaccacttacagtgcaccacatatcagcactgaactgtttaataaactcacttctttttttcatggatagggaaattaaggctagtaagctcaagtgatttcatccaagcacaaccagcttagaattcagtcagatataaaatttgcacatgtgggtctttctggccacaagatatatctccttttggccatgcagtccttatctattaccacaccaaaaggtcatataaattccattgctataggcaatttttacaatatagcatctcccttaacacaagtgaaacatttgctaggacttggaaacattataggggattgaaaatttcctttgatcatgtaagatttcacttgtacagcttggatatacatttctccacgtgccttttctacaggcttcacatctgtctattccttccttactgtgtcatccttaccctttttccttctttatcacttttccccttcactatta

SEQ ID NO: 507301 - DNA, 331 bp, Homo sapiens
tttaaaaaaaaatttttaccattttttggggggggaacccggttttttggcagacccccccgggtgggtttttttaggataaaaacccccccccctcttggggggggggttttttttttttttttttttgggttttttggggaggaccggcttttgttttaaaggcgggggtttccccaaggtttttttgggccccttttagggggggccccccccttttggggggtcccttttttttggggggcccccctttttaggaagtgggtttaagtggggttcttttttttttttcctgggtttgggtcccccaattaattttggggggccctta

SEQ ID NO: 507302 - DNA, 107 bp, Homo sapiens
ggtaccttcccctatcgaccgataactcgactacctaaccacgacattccaaggagtcgacgtggacgagttccctctccttagtgtcaccccggtggcggtcaaag

SEQ ID NO: 507303 - DNA, 799 bp, Homo sapiens
aggctaggagaattcgagactagcttgggcaacacagcgagcccccatctctacaaaaaataacaattagctgggcatggtggcactgcgcctgtagtcccagctactcttgggaggatcgcttgagctgggaggttgaggctgcagtgagctatgaccatgccactggcgttccagcctaggtgacagagcaagaccctctctctaacataaagttggttaaaaacattacgagaaaaagcaaggtgagtcagttctccaaggaataagtcttgagaaattggttgtctcccttttgaaatgtcaatgtatttgtatgggaaaatcaaagactacttgtacaaggacctgaagtaaaagcatgtctccttttgtaacaaaaccttgtgttattcatataattacgttcggcatgaaaggaacgggtagtagtttgtgaatagtctatggaactagcaagagatggcgagggaaagtgtcaggatcgtgacaacaggaattaatttaaacgtctttaaaacctgcgtttagtaacggccattaatttttgctaggtgacagtcaaacgaaataaatgttctaatttctgtgcagactacccagattgtggcatgattattgcccttggttgtttatccactgaaccaggggaataatggtgctgaaggggcgcccaaggctcatctaaggaccgaatcttttgttgaccttgcggggattcaggtccccaaccttgcttggggcagtttggacctctgaaatatttctggggtgaaccgggtcccaaaagctaatcccc

SEQ ID NO: 507304 - DNA, 396 bp, Homo sapiens
gggggtccttgcaggtgtccggagactctgtgggcaaggaaccccaagtgtggagtggaccagcaaggccaccagtagctttcgtgaaacatatgacctacattgcttatggaggtattgttaatgctaagggtccctgaaaccatcagaataatgtgaagttcaagttaaatagtgttgcctattttcatgttgaattacatattctggcatatgttattttgaaaacatatcaattgtggtaccagacaccagtatatgtccatgttacttcaggcctccagcactcttgatgccaattcggacaatattgatatgagggtgtcagacagtcaatggaattattacagatgtatgttaactattttctgctcaatttgtgcgaagagtcgacgc

SEQ ID NO: 507305 - DNA, 218 bp, Homo sapiens
tccctgattgcccatgacccaccaatcacatgctatcatatatgtaaaacccagcccatgatccctaacagggtggcatcgtgactgggggggccagtcagtcgacgagacataggtgcatcgtgactgggggatccatcctatcatgtcagatccgtgcattgtgcagtgcataggcattggcagcgttggccggtctgttttacaactgtctgtga

SEQ ID NO: 507306 - DNA, 105 bp, Homo sapiens
aaactgttgtgtggtgtatgtggtgtgtgtggaagcctggacaatgtctcagcaccctcccacacacaccacaccacaccacacacacacacacacacacaattc

SEQ ID NO: 507307 - DNA, 103 bp, Homo sapiens
ccaaggtcgcaccacggaactccagcttggcagcctgggcaacagagcgagactccgtctcaaaaaccaaaacaaaaaacaaaaaaacttacctttagtgagg

SEQ ID NO: 507308 - DNA, 142 bp, Homo sapiens
gtaagtaacatgtaaacgttgtcctccgcattagcccgcgtcagattaggacactggactgacaatttacagcccaatatacacaatcaaccatacatagtcattattaccctcactgtcaacccaacacaggcatgctcat

SEQ ID NO: 507309 - DNA, 566 bp, Homo sapiens
  misc_feature (531)..(531): n is a, c, g, or t
taggagaaagccggcagggcagggacatggtcctgagtattttccagatagcgtcggaagatgaaactgtctatcctgggggtgttgatgacaaatctggcagccataaagatgattctatgatgctataatttttgaaatatttactgtagaattttgtccaccctccctgtccacatacacactagcttaggttaattagaagagcaaacagaattaacagtggcatcatggtatctggttgggtcttagagtagcttccatacccaacaagcccacaggagatgtttcccaggaggaggtggctggttaaagccatagaaaggaagtactacagtcaggaagaagagcaagatcaatgctcctattcccatctacagcattacattacctcttctggctgagtgttgattattttaaataggtagcagaggtcttccaaagctttactgatattggttgtggttgtagtgcccttcctttgtgcctgtgactcataagaaacaggtttagtcctggatctgtgtgccncagtaggtgttccctgaagtttaacagcagtgggg

SEQ ID NO: 507310 - DNA, 286 bp, Homo sapiens
gtatgaattgcacgatgaagacattcggctcaagtacacctttgatcaggccacaggtgggactgcgccatttgaaacacactcagatactcacgctttgggcctcttaaatgttacttctgaacagctcatggtagatgaaggaatggctcgggaagtcatcaatcgcatacagaaacttcgtgaaaagtgcaatcaggtttccactgatgaaatccccgtgtactataaaaccaagtctgaaggatcatatctgaatagtgttattgaaagacaccccgagatc

SEQ ID NO: 507311 - DNA, 343 bp, Homo sapiens
caggagtcagtgtcagttatagtttctacgcgggcccttctcctgtgtcattgtattacaacatgcctctagaaactgttgcaagctttcacatgtgtcgctcatgatcaggtcctatggtactccataagacgtatacccacaggtatccgtttaatagtctggaatttccagccttggaaatagcgtagctctattgtaacccacttaatacttagactgtatctcgactggctaacatcagaccccagtcggtatagcagccggttgtgatctcttggatgcacacggccctataagaaccggtactactgtattgtcttctgcgcgctaggcatatact

SEQ ID NO: 507312 - DNA, 783 bp, Homo sapiens
  misc_feature (192)..(192): n is a, c, g, or t
  misc_feature (281)..(281): n is a, c, g, or t
  misc_feature (283)..(283): n is a, c, g, or t
  misc_feature (296)..(296): n is a, c, g, or t
  misc_feature (301)..(301): n is a, c, g, or t
  misc_feature (393)..(394): n is a, c, g, or t
  misc_feature (403)..(403): n is a, c, g, or t
  misc_feature (473)..(473): n is a, c, g, or t
  misc_feature (540)..(540): n is a, c, g, or t
  misc_feature (543)..(543): n is a, c, g, or t
  misc_feature (549)..(549): n is a, c, g, or t
  misc_feature (579)..(579): n is a, c, g, or t
  misc_feature (614)..(614): n is a, c, g, or t
caccgccggagtgctgggcagctcgcagcgctgctcggcgctggaccccacccggcaggcgcaggccacccacacccggctctgtgcggctgccccccgcagcattgcacggccgaccctcgcccgcccactgccaccggccgcgggactggctgggactggctctggccgagggcactgctcctcggtgcnttgctgctcgggcgccgcagccctgcagcctgccagcctcccccggcctgtgcccctcccccgtggagccggcttgtccgtcggctgcncnactgccctgtgcnggcangctggctggagccaggcagccccgctggcggccgagcgcgctcgcgcatcgggccctctggccttctttacctagggcagcccgctgccccnngtgcgaggngagcggtccttaccgagacccgcccggcccggcggtgcgatgagcttcttcggcttcgggcagagcgtgnaggtggaaatccttctgaacgatgcagagagtaggaagcgggccgagcacaagacggaggacggganganggaganatatttcctcttctacgacggggagacggnctccgggaaggtgagcttgccctcaagaacccaanaagcggctgagcaccaggcatcaagatcgagttcatcgggcagatcgaactctactacgatcgcgggaacaccatgagtcggtgtcctgggtgacggactggcccggcctggagagattacccagtcgcaggccttcgactttgacgttaccacgttgagagccgtatg

SEQ ID NO: 507313 - DNA, 1120 bp, Homo sapiens
ggagcagtcgtgcattcccagcctacgcctacgggtgtagggatatagcatagaaaagcaaaactacacagctctatgacttgtgtagtatatcagtatatattaggcattagaggctacacctgatatcatgtacggacgatgtgtcagaaaaaaccaaactctaccataagagacgtacgtaatacaagcagccaacctatgaggctaaagtccgcacccttatttcatggcactctttgcagcaaatcagcagtagcctagcaaaggatgacaaactacaagcaccgacgtataacgcagccgtacacaaaagacgtacgcaggctaactaggacgggtacagtaccggccaacccatataagacggactacaccatacagtaggtaaacccaagaccctagacggcaggacgctggacaccagggactgcgacaagagtggatattaccacttatccacttcatggcctcgtgcgtagccagattctacctttataggctgaatgtgcctgctgccttaaaagtagcacgaatccaccgaccgttgcactaaacggcaaaaccaggttgcggaccggacaattgcgccatggaaacagccaacacaaaatgggaaatcagggaacaaggccgaacaaaaggaaacaggcaggaagcaaccgaacgtaggaaaggcaagaagcacgagcaaccaaccacaaaacaaacggcaacaacaggaccgtggcagcaaaccatggacacccgatgcagacaccacgggaacggccgcaaaagatagaaggacaagcccaacgaggcaaacagttgaccctgggcgaatccccctaaccaaacgtggtgggctgcaagggttcaaagaggggcacatggcgcgcccgacaaccccagcaagacaccaccaaggaagaacgcacaagatacacagcacaaaacggccacgaacccactaaccgagcaaaaccggtaattggccaggaagacactcacgcgggtagctgacacagggggagccgacaaccgaagcaacaaagggcacacaaaaaggcgtaggagaacaagccgacactcaaccagtgccagaacaccacgtgcgagcacaggtgaagacacaaga

SEQ ID NO: 507314 - DNA, 1520 bp, Homo sapiens
acggccctcgcagaagctttctagcacccattctgtttggctgcgcgagtgccccagtcaggtcaagtgcaacatggtcatcagctgtattcctaagagagcatccatggtcatgcactcagtgcttaggattctacaccaatcaaaaaacgccctgggcggcaaaccgagacgattacatgaacaaactccacgatgtgagtttctgacgcgtcatatacctggactctactcaacacggagtccaaggcgagcctcgactatcaacaattacgccccgacacctgtaaaacacacaatagagacgacgacgcgaaagacgagagggagagcgacaagcgagcgcagagaggaggagacgggcacataggagaaggaaaagggagggccggagagagtgatacgacacagggggggagcgcgagacagcaagcgcccacgggaagcgtggaagagcgagcgacgggcagcggagagcagaaccgacaacggagcacggagcagggagaacgggcaaggccagcgcgcgacaggagcagaacggacacgaaagaggaagaagtaggaaagcaccgaaacagaggcgcgacaagcaagggcagaacagaaaaagcgacagaaaaaaagacagaagggaggagggaggagaaggagaggagcaggaagagagcaacacaagcggacaggagaagaaaaaacgaagagacgcggacagaggaggcgaagggaaaaaggaagagaaaagggaaagacagcaaaaaggcaaagagagaaagagagcaggacaagaacaagacaggggagaagacaagaaaaaagcagagaagagacgcaagagcaggagagcagaaaagcaaagcagagaaggaagagacgaaaaggggaggagaagcaagcaaggagaggagagagaaaaacgcgggaggagcggaggggagaggggaaggagaagggagaagaaggaagagggagaaagaagagagaagaagaggatgacgagcacgaagccgacgcggagaggagagagagagaaggagaccgcacggcagggaaacggcgaccgaaagagcacaagagaacagacgagggaaggcacagacgaaagagcaagaggaagcgcgagaggagagcgcagaggagcgagagacggcgggcagggagggagagaggcgaggaggacggcgagagggagacagaggcgtcggcggcaaaggagaggggagagaggggcaccggggggatcgagaggcgacaggcgacgaggcggagagagaacaggagagaggagcgggagagaggggaggcgccgcagacagacggagcgaagacggaaggggagagaggagagccggcacgccggggtgagcgcgtgagggacgaggcgagggggagcgcgaaggagagaggaacgaggcgcgggaggcgcgggaaggagcggggggacgaggcggatagcggcgggcagagggcggagagagggcgggggcgcggagcgggcacaggcagggaggagaaggccg

SEQ ID NO: 507315 - DNA, 128 bp, Homo sapiens
  misc_feature (46)..(46): n is a, c, g, or t
aatgcacacgactatctgctgaggtactccccctgcttattgctanctccacaaaagctatggattaaacacaccacaatactatgtgtatagccagtggaatgtgcgtgggtgtgctttgtgtgtgc

SEQ ID NO: 507316 - DNA, 156 bp, Homo sapiens
caccatcatcaccatcaccatcatcaccaccatcattgccatcatcatcactatcaccatcatcaccatcaccctccttaacctctacttctacctacgcctaatctactccacctcatcatcactatcaccatcatcaccatcatcaccatcagt

SEQ ID NO: 507317 - DNA, 481 bp, Homo sapiens
  misc_feature (10)..(10): n is a, c, g, or t
aggatctcgnatatgctgtctcagtctgtttagtgttgctatagaggaatacctgaggctgggtaatttataaagaaaagaggttatttggctcacggttctgcagactgtacaagaagcatggcaccagcatctgcttctgatgagagcctcaggctgcttccactcatggcagaaggagaaggggagccagtgtatgcagagatcacatggtgagagaggaagtaagagagagaagggagatgccaggatctttttaacaatcagctttctcaggaaagaacagagtgagaactcagtcactctcactctccagggaggacattaatctattcatgaggggtctgcccccatgacccaaacaccccccattaggccctacctccaacactgaggattaaatttcaacatgagatttgcaggggtcaaacatacacactatagcactaaactctaatttgaaagggaatacactttcaag

SEQ ID NO: 507318 - DNA, 198 bp, Homo sapiens
tctaactacggtatctaggcaggagtgaagtggcgcaatcttagctcactgcagctgggctgaagcaattctccttcctcagcctcctgagtagctgagactacaggcatgcgccaccacaccaggctagttttgtatttttttgtagagacagggtttagccaagtgatctgcctcaagggatccttgagcccctct

SEQ ID NO: 507319 - DNA, 158 bp, Homo sapiens
ggcaagtcaagctgggaggaccaaggccaggcagcgggagcacccaaggaaggaaaatgaggtggctacttctctacttatgctctctgcttctccctgtcaacggcttcaagccacaccggtggtgctaaacaatatgtttggccagatccaggtcg

SEQ ID NO: 507320 - DNA, 233 bp, Homo sapiens
agcgacctttgaccgagtccgggtaaatgggtgggctaccctattcctccgaaccagcatccccacgcatcaacatggagaacaagaccacgtggttctctgtggacattgactcggagctggtggcggagctgccggccgaaactcgagctgtggctggtgctggtggccgtgggtgcagggctgctgatggtggggctgatcatcctcctgctgtggaagtgcggcttctt

SEQ ID NO: 507321 - DNA, 426 bp, Homo sapiens
ccatccgctgcagcattcgctccggcgacatatgcaaattaagaaaaggcaacatctcctgcaatttaaaaagtttgcgcgtcagctccttattaaacttcggcagcatagagataaattcgttaaacgatgccgccagtacgccgaccagcgcggttagtgcgatcagcatcaccaccactacaatcgtaatggcaacggggcgttgtactccccgacgaataaaccaggtgacgagcgggttgaggacgatggcaaaaaacagcgccagtaacagctgcacaatgatatctgccgctgcgtgaatgcccgcgaggatcactaccagcgaggccagcttgagcagaatgtgcatgcccgttttatcgggttgaggggtttccattggggcttccttgtgactttttgtattaagtgtagcgggag

SEQ ID NO: 507322 - DNA, 434 bp, Homo sapiens
ttattaacctaatcgctctgaccgtgatgatatagtaccagagcttgacgaacacggattccacccaggcaaccacacaacaagcccagctggcggcagcagctgaaatcgatgcagaaccagtcagtacaagcaaaacagcgtcggcgtgcaacgaaggcacggaaggctatgtccaaactgggtcttcggcaggttacaggagttactagagtcactatccggaaatctaagactatcctcttagtcatcacaaaaccagatgtctacaagagccctgcttcagatacttacatagttatgggggcagccaagatcgaagatatatcccagcaagcccaactagccgctgctgagaaattcaaagttcacggtgcagctgtctcacaccacttcaagcacaccacacagactccaacagtacacgaggagag

SEQ ID NO: 507323 - DNA, 343 bp, Homo sapiens
taacccatttttttttccccccaaaagggggggaatttttgagcccccccccccctgggtggacttcccccccctttttgttagtggaattcccgttaaaaaagggcccaccccgggggttttcccccttttttgggtccccccgggggggcggccccctcccccccaagtaaaatggtggttccccccccctgggggggggggaagtggggaattttttttccctgggggaaaagctttttttttgggaaattaaaaagttttggggatggccgggggggttggttccccccccctgttaatgttcttttttccccccccttttacctggcttaaataggga

SEQ ID NO: 507324 - DNA, 177 bp, Homo sapiens
agaagcttatgtgttatgcggggaaacgccatatcgggggcacgattattaggggaactggtcagttgccaaagcctccgattatggtgggtattactatgaagaagattattacaaatgcatgggctgtgacgataacgtgtagatgtggtcattaccgtgaagattgttggctgg

SEQ ID NO: 507325 - DNA, 211 bp, Homo sapiens
  misc_feature (164)..(164): n is a, c, g, or t
ctagtgttgcactgttatgtgcattctctctggcatgggagtctccaggtgctgtccacatacatgaggagtctggacataggtggtccagacaggaggagcaggaggcacaggattccacctaccctattaggattgaggtggcaggtgggatgatactggtnatggctttctttctcatcacctacacctttcattcaacctgggtacc

SEQ ID NO: 507326 - DNA, 167 bp, Homo sapiens
catgacttaagaatagctggtcttgccataacctgggtgtgtgcggtagaactaggttaataaccactgtaagtcttctgtccgtaagggctgactgctctgctgggaataagccctgcccgggctggtggggtaggccccatagctttgggtagcttgtaccgctg

SEQ ID NO: 507327 - DNA, 240 bp, Homo sapiens
  misc_feature (184)..(185): n is a, c, g, or t
agagttgcgttgttagcgggtggcggatatagtctagtatagcgactatggtaccgcagtgagtgcttagtagtggtgtattgatctacgataatcgtagccgagcagtctacatgcgatagttcgtccatatctagcatatgcttgggacaagtctccatgacagaagatgcagttagcctcnnctatctatagactcaggtgggatgtactgggtcgggactgacgtcatggtatcaa

SEQ ID NO: 507328 - DNA, 965 bp, Homo sapiens
  misc_feature (965)..(965): n is a, c, g, or t
ttgtagactttgagtgtgtaataagagtaaatctatcatcaatcttggcagagctgcagcaggaatcattccccaggaccagctggctatgtcatgcattcgactccactaagtggatgagctggatattctccgcatatccgatccccctttctggcgaacatgtgtacctcgatacatgattgcacatgaatccatatgcgtgtgtatgcatgatcttccttgaaatcttagcatgctaatcttcgaccatgtgattgtggtactctcctcattcatggattgtaagggaactcttcttcaatcgtgatggatgcacaataacaatgtctgaggattagtgcagctgctattagcttttgttttagagtaccaagaggatagtttaaaatggctccttaagtcttggtatctgaataagtgccgtttgctcattcatgtctgtttgcgcatcgatacctcttgcgtacacttcgttttttgccttaccacgtacgcgcgtgtgtgccagtaaaatgggcacacccagctatgtggggccaagctgccttgtacccctctcccatgggtcttttccaattaccgcggagtgagaagttcggggcccatcgaggagcaagtccagcgttgatgcgtctcgattcttttccttccatggacatccaatatagaattgaggccgagatgaccagatcttggcccattcaatcataatgggggcggtttaaagctgcatagggttcggcccagcttaatggatcgttgttgccgtgcaataattctttccagggttggccgtgccaggattgctcccacagacaagttgatacaggttctgctgcgccttattgtcaaaagagttgtcgctgggaatggtaatctcgagagcatttttgccctttttcccgccatatacagggtaacccttaaggagctggcggagggattcacaggggttaacaccn

SEQ ID NO: 507329 - DNA, 692 bp, Homo sapiens
  misc_feature (227)..(227): n is a, c, g, or t
  misc_feature (347)..(347): n is a, c, g, or t
  misc_feature (391)..(391): n is a, c, g, or t
  misc_feature (395)..(395): n is a, c, g, or t
  misc_feature (535)..(535): n is a, c, g, or t
  misc_feature (563)..(563): n is a, c, g, or t
agcgggagcgatgcgcagacatctttgtgtgggcgaaacgaggtgaccgcagagtctgtcacccaggttggagtgcggtggtgtgatcttggctccctgcaacctccacctcccaggttcaagcgattctcctgcctcagcctcccaagtagctgcgattacaggcacccaccaccatgaagaatggcatttttaaaagatggctttcttaaaaaaggatactaagntgctcttctactcataccaagtcctgcagacacattctgggactgcaccttatgagtgctgctcactctgtttcctgcagaagacatacagagccgttcgcatagagggccatgattttnattcagcaattcttcaaaccactgatgctggttgaccatttgantttntttttgaagtattttttacatacagtgtacagaacatttccgctggatatttggatactgaacaggagtaacaagaggaacagctcctacctcccccctgccccttccctcacaagcctgtgagtcagggcaggggcagncactgaaagtagcagaggccttcataanggagaagttgtcaggtagacctttggattaatccccaaaagcagcccctaggagacaggcgacagaccgcagtcaggggatgcaggcgtggaaggcacttctccatgttgccatcatgtgacgaaggaa

SEQ ID NO: 507330 - DNA, 104 bp, Homo sapiens
caagacgtttacttcccctaatgatagaagagctttatcaccttttcatggatccacggcccttcataatcatttttccctaatctggcttcctagtcctcgta

SEQ ID NO: 507331 - DNA, 637 bp, Homo sapiens
  misc_feature (227)..(227): n is a, c, g, or t
  misc_feature (347)..(347): n is a, c, g, or t
  misc_feature (391)..(391): n is a, c, g, or t
  misc_feature (395)..(395): n is a, c, g, or t
  misc_feature (535)..(535): n is a, c, g, or t
  misc_feature (563)..(563): n is a, c, g, or t
agcgggagcgatgcgcagacatctttgtgtgggcgaaacgaggtgaccgcagagtctgtcacccaggttggagtgcggtggtgtgatcttggctccctgcaacctccacctcccaggttcaagcgattctcctgcctcagcctcccaagtagctgcgattacaggcacccaccaccatgaagaatggcatttttaaaagatggctttcttaaaaaaggatactaagntgctcttctactcataccaagtcctgcagacacattctgggactgcaccttatgagtgctgctcactctgtttcctgcagaagacatacagagccgttcgcatagagggccatgattttnattcagcaattcttcaaaccactgatgctggttgaccatttgantttntttttgaagtattttttacatacagtgtacagaacatttccgctggatatttggatactgaacaggagtaacaagaggaacagctcctacctcccccctgccccttccctcacaagcctgtgagtcagggcaggggcagncactgaaagtagcagaggccttcataanggagaagtgagtgggatctgaggggacaaaggttccctgcccaagtggcatgtcatccagtggctgaccacagt

SEQ ID NO: 507332 - DNA, 1055 bp, Homo sapiens
  misc_feature (24)..(24): n is a, c, g, or t
atagaaggagggaccaagcggaanataatctttttgttcagaggtccatcggtcaaagcctgcattttagagatggcattactgaggtccaaaaactagagccactcgctctgggtcatacagccgataaacgcacgcagccgagctcagttcttccctgaccctgttacaaactgcctcactaaatgaggacccccatccccttcccatgccaggaaagcacagctcatttgtcctaaagttaacattacacaaatcacacccttcaagccttcttgaaacattttttttccccgagggtgacgggacggttacgctgattcatcctggccagggaccccaaacatctcccctcctccggcccaggcgccgtcacccaggctccaccggtccgcgggacagagccgcggagagcgcctggaagcgtcgcgccctcaaagccaagcgattaagttggttcctcaaattgttcccgacaggaggggcaggaaataacaccgggctctggcggcggccgcagcaggagggggagaagagcgggccgtctcccgggcagtgctggcggcctctcatcgatctcgggtctaaggtccggccgggtcatcattcctgccatttccacagcattcgaggtaccacatcaccccctgcctcggtcgtcgctcagtcattccctccgcgccgagtcctggagcggcggagtccctggaggcctgggtttccttaaggggccccaatgcccgcagcccccgacccgcccaggtggaaggaaacaggctgcgggcctgggccaggcggggcctgacagaagtaaaggccgggagggggagcggaagacggccagaaggacccctgcgccctctcctccgcgccgcccgccaggctgccaacccagccaccctgggtgcgacgcggcgccttctccgccgctgggagtcgggcaacaggtgaagagggcgggcgtccgcggcgcctccgcggggcggtccctctcctgcctgctgcggaggggaaaaggggggaaaacaagaagcaggagccaaggaaaaaaaacg

SEQ ID NO: 507333 - DNA, 840 bp, Homo sapiens
  misc_feature (40)..(40): n is a, c, g, or t
  misc_feature (89)..(89): n is a, c, g, or t
  misc_feature (115)..(115): n is a, c, g, or t
  misc_feature (136)..(136): n is a, c, g, or t
  misc_feature (212)..(212): n is a, c, g, or t
  misc_feature (218)..(219): n is a, c, g, or t
  misc_feature (221)..(221): n is a, c, g, or t
  misc_feature (223)..(223): n is a, c, g, or t
  misc_feature (232)..(232): n is a, c, g, or t
  misc_feature (238)..(239): n is a, c, g, or t
  misc_feature (243)..(244): n is a, c, g, or t
  misc_feature (246)..(246): n is a, c, g, or t
  misc_feature (257)..(259): n is a, c, g, or t
  misc_feature (267)..(267): n is a, c, g, or t
  misc_feature (269)..(269): n is a, c, g, or t
  misc_feature (271)..(272): n is a, c, g, or t
  misc_feature (279)..(279): n is a, c, g, or t
  misc_feature (286)..(286): n is a, c, g, or t
  misc_feature (298)..(298): n is a, c, g, or t
  misc_feature (302)..(302): n is a, c, g, or t
  misc_feature (335)..(335): n is a, c, g, or t
  misc_feature (344)..(345): n is a, c, g, or t
  misc_feature (349)..(349): n is a, c, g, or t
  misc_feature (356)..(356): n is a, c, g, or t
  misc_feature (368)..(368): n is a, c, g, or t
  misc_feature (371)..(371): n is a, c, g, or t
  misc_feature (378)..(379): n is a, c, g, or t
  misc_feature (383)..(383): n is a, c, g, or t
  misc_feature (410)..(410): n is a, c, g, or t
  misc_feature (415)..(415): n is a, c, g, or t
  misc_feature (419)..(419): n is a, c, g, or t
  misc_feature (723)..(723): n is a, c, g, or t
  misc_feature (779)..(779): n is a, c, g, or t
  misc_feature (784)..(784): n is a, c, g, or t
cagcattatgcatcgcagtatgtagtgtgcaccattcaanatcgtatagaccatatgaggatagattacaacgttagaaactaaaatanatttgttcaacactccagacaacatntagtgtagatgacagggaagntctcatgtgatgtttatttcacaaacatgaccttggaagaattcataagacagcatcccagtcacttacatgagancagagnngncngcttgagtntaaganngcgnntntttctgtgggnnnggcggatntntnncccgggntgaggtnttagagttggcncttngggcggtgcgagggacatcttactgcgaatgangcggggggnntttnggctgcncagggcgtggtngcnattaggnngggnaggaggtggaggagagagagcgagcgnttcantttngggaggtttaacatttatgcacaaaataagagcaagagacttaaataaaaaagttgacagaactcagggacccctccaataaatgtaaaaattggaagacttcagaatttatttcaagatcctcatttaatcattggaatagtaatattctaatatttatctcattgtgaccatcaaaatttttctatatttttacttcttaaactctgtcttatgtctacttactccggcaacgagatggcaacacaagttaacattttccagatgggatgtctctgtctttaaactagaagatgggtattcngaggttaagatagcctctgaagtgtcttattgccataccactaatttttaaaaatnaaatntttttttttttttttggagggggaggctggattttcttttcacttaactgctggtt

SEQ ID NO: 507334 - DNA, 347 bp, Homo sapiens
gcggccgcagccatggttgctcagcttcagaagaggcttgcctttaggtgtcctccgccttttgcaagaagaagggtctggttagaccccaatgagaccaattaaatcgccaattccaacctcccgttagcagatccggaggcttatcaaagatggtcttatcatccgcaagcctgttacggctccattcccgggtcttgatgccggaaaaacaccttggcccgcgggaggacaggcacatggcataggtagccgagggctacagccaatgccctatacagagagtacatggatgagagatgagatttgcgccgctgctagaggtaccgtaatttagaggtcgtcgc

SEQ ID NO: 507335 - DNA, 340 bp, Homo sapiens
ggggacacatcagtgagcaggctgtgggagtggcagcgtggccagagttggcacggggatcacgggaagtgaaaaaggggggttagagaaacattactggtgaaataatctgtttacagggcagggtgaagggatgagatgaatggaaattaattctggggggaaatggattcaacgccagggcctgggagctgctgtagtgggtaactggagaaatcggaaaggtgtatttgggagagaaggaatgggctactcaggctatagagaagtttctgggggcggctaagatatccagatgttagggtccggcaagcagctatggcccggaagggagcccaaa

SEQ ID NO: 507336 - DNA, 112 bp, Homo sapiens
ggaattcgggcacgagacggacacgtacttacgttgttagctcacttccacttatgtcctatcaataggggctgtatttgccatcatagggggcttcattcactgattttcc

SEQ ID NO: 507337 - DNA, 223 bp, Homo sapiens
  misc_feature (56)..(56): n is a, c, g, or t
  misc_feature (67)..(67): n is a, c, g, or t
  misc_feature (95)..(95): n is a, c, g, or t
  misc_feature (138)..(138): n is a, c, g, or t
ctgcctgctggtgaccctggccgcccacctccccgccgagttcaccctgggtgcangcctccctganaagttcctggcttctgtgagcaccgtgntgcctccaaataccgttaagctggacctcggtgccatgcttcnttccttggcctccccccagcccctcctccccttcctgcacccgtacccccgtggtctttgaataaagtctgagtgggcggcaaaa

SEQ ID NO: 507338 - DNA, 119 bp, Homo sapiens
ttggtctatcctcctgtgcttaccacagtgagaacttggatatgccattgagcttttctgagtttccattctctcgtctatacaacatagcaaattttcagcaaacatttgctcccacc

SEQ ID NO: 507339 - DNA, 343 bp, Homo sapiens
tggaggggcaaggttcccaaggttgccaaaaagctcaaaagggttaataaattttatccctaaaacccgccccccccccttttatcagggtggaaggaggggtttcagaactgtttgtttcaattggccctttaagtttagtagtaaaaaacgggttaatgaaaacaaggccttgtaaacccttcaaaaggaaaggaaaatgttttggggccccctttggtttttttttttggggggggcggttttaaggtattagtttttaaaaacaggactttttaaggggaacaacttgccccaaaatttgtcccaaaattttgagaccccttaaaaaagtttaatggga

SEQ ID NO: 507340 - DNA, 698 bp, Homo sapiens
ccagaccctatgacccctaacaggtgccctctcagccctcctaatgatcctccggcctagccatgtgatttcacttccactccataacgctcctcatactagtgcctatctaaccatacacatctaaccatataccaagtgattgtgcgcgatgtaacagcgagataatgcaccactaccaaggcgcaccagcacatccacctgtccaaaaacgtgccttcgaatacgcggataagtcctactttagtataccctctaaggaatgttatttattcttcgcaggattttttctgatgcgcttttatcgcatctcctatggccttagccccctaccctcgctcagacttattgagggcatctgtggcctccctaatccaggcgtcagtcaacctcgcgcttaaagtaccccctagaacgtcccactcctaaagcacatccgtacttactcgtatcaggagtatcaattcaccttcacctcatcctatactctaactagaaaatcatacgcgtatataccaaactaacttcatgcactagctatattacaatatttagccttgggtctcattgttttatccctcctaacgagcgctcatgaggtacgttcgatgatctcgccgttcatccagtttcccgatcggtcagtctacttggctctagcagttttcttagtacgccacacgtgctttcccccggac

SEQ ID NO: 507341 - DNA, 200 bp, Homo sapiens
atccagtatccaggacatgacatgtttgtgcggtccaggcaacacagccaagctttttatcccactttgacatcaaagactttccggcaaagtctgtcaatcagtccctctcccccaatatgccatgtggtctggcggggtagaacccagatgtacccaaccccacaggatggcagtgaggcaggttttcatttggcctt

SEQ ID NO: 507342 - DNA, 562 bp, Homo sapiens
  misc_feature (43)..(43): n is a, c, g, or t
  misc_feature (45)..(45): n is a, c, g, or t
  misc_feature (98)..(98): n is a, c, g, or t
  misc_feature (132)..(132): n is a, c, g, or t
taggatccggaccggcacactaaatagtgtgtgattgcataangnggacagtagctagccaggttgatagtgtacactgacatcatacctgtcaatgnggttgttatagtagcagcgactggcttgcccaanagtgcacagggttcaaggaggtgatgccctttgaggggttttgtgctgtgcctggcagtaggaagggcctgttgttgttagctgttgttgcttccccaaggtgggcactgctccaggagccccagtggggctggagcagactccccagagcaaggggttctcttgagacctgcaaagatctcatgcctctcacccagttctctaaaaagctgcatttcgccagggcacctagccgggaagttctgagatgcgccactagggggcacaggtggccacggagcctcgggattgtcagggccctggggctgttgtcaggagagcctgagggttcatccaacccaggagtcctgtggaagctccagctcgtttacatgcagatgaggttgctcaagagtgttgttacaagcttgttctcttaggcaagtgttga

SEQ ID NO: 507343 - DNA, 214 bp, Homo sapiens
gcatcgccggattcgccgatcatagtcttgtgggaacgaatgttatgatttacgccgtatgactattatagtggaatggatttatggccgtaggtttggtctatgggtgttgcctgagaattggggagatcagtgaatgaagcctcctatgatggccaatacagctcctattgattggacatagtggacgtgagctacaacgtactacgtgtcg

SEQ ID NO: 507344 - DNA, 221 bp, Homo sapiens
  misc_feature (9)..(9): n is a, c, g, or t
  misc_feature (15)..(15): n is a, c, g, or t
attcgcggncgcgtngaccccagctaagtgtgagaattgcttgagcccaagagacggatgttgcagtgagctgatatcgcaccactgcactccagcctggcaacagagccagagcctatctcagataaaaaaaaaggaaaactgaatgaaagaaaaagaaaacaagataaaaaaggccgtgtgcggtggctcacatctgtaatcctagcactttgggaggc

SEQ ID NO: 507345 - DNA, 1148 bp, Homo sapiens
  misc_feature (802)..(802): n is a, c, g, or t
gggccttagagaggatctcggtcaccttgaatgacgcggcggcacctgcacgccaacacggtcttcacggggcagaacgacgggacgtacacgctgactgtctgctgtgcggcacggggtgcctcgacgtctttatcggtacaacgattcgtatacggcggactgccgtgactctacgtctcttcttgcaccacgacgctggggacactgctgaccgcggctacacacgcaccgacttggacgctctgcagtacccacagacacaggccccatgctgacgtccctcctcaagagctggactggcatctgcacaattgatgaccagcacctctctggtggactgacactttgggggcacacacacacgctcttcatacccatcttattggctcagtactctacacacagtggaccaaccttgcatcttacatcaccagggccaaagcaaggttgaccagggccatcttgtgtcattttctttcttgggactgtgctctcttgggctttacaagaagacttgtgaccaagtttctgggcccagtgcattcgctcacttggacccctccacatcggtccatctcttgggcatgcgtactcttaacctgtactccaatgtgtcggacatgtctctacctctaagaccagtggtataacaccataatgtttatccagaattccttcctcgacaactgctgactccacagctggacacttgggtacttgaccatttaagcaaccaacttcatatatgctgcctgtactcttatggaagcatggcttattgcaactcagtgggcaatcnggcactgtgtacctactccaacataccatgcctcctctcgactcaacccaccccattccattgcaccttttaaattcatggtctcgacaccgagggtccccccccattgttcctaccacagtaccacctagcaaagggaaagaacagctcggaaggccccagaccaccgggcagaaactcgacaccgcccggacgagacgaaaagaacgaggaacaagggaacatggcgaccggacaccgagcagcggcacaaaagcacccgtcggtgtcccacacaaaccgctacgacagcgccggcaagacagacacaaaacagtgggggacccggccacccgcagcacgacga

SEQ ID NO: 507346 - DNA, 849 bp, Homo sapiens
ggcctctcccccttctatggcctcccgcctcccgcttggggtcctgtcgccctcgcatcggtcgttatattgggcgtgtttatcaaactccggctttatcacctgggcgccgcgtgttaccagggtggggcacactttctggggcccgcaccaccgtcccgcggtcctctaagagccctttcttttattgggggtatccacccctgttggttccccccccagaagtgttttttttgcccgagagtttttttgagcaccgttgtcaaccccccggcggtgatccgcttctctccgcccatttgtgggggccccttgttcccccccccacgagtgttttcctccccgtttatttttcctcctcatgtagtctcccgcctctcgcgacaagaaccgctccgctgtttattttgtgccgctcccgggggagggttcgcacttctccccccagggtgctccccactttactgtgttatttattagtaacccccccccgggccaccatatgtctacacccgctcttgttgcacaccgttttctgggctttcttatgtttactaccctcccaccagacctctcgcgatgtttgttgggttgtctccctctcaccccctttcggccgcgccattttcgcggctcaccactatttgttggtaaccaaccaccgcggtcttcccgcggcttcaccatcctattttggggtgcactttccctccctatttggcgtctactcccccccctaattttcccctaaaaaaccccaaaacaacttgggtttgaacccccccccttttcgccttttttaaaaggggttaaatttttttattttccaatttttgaaggggggtttta

SEQ ID NO: 507347 - DNA, 254 bp, Homo sapiens
gagtatcgacctcattaaattagcatctgatgattcacatacgaggcttgtggtgatagtacagctgagtgtctacattcgaggtcgtagtcatagctggttcctgatgacaaaagtgcacagaacttacacacacgagtgcagcatgtataatagtgaaatccaaatatgatgggattataacaatgtccatatcttggtcctgatactgtactgtgttaatatgagatggtggtggttggtggaagttggtg

SEQ ID NO: 507348 - DNA, 898 bp, Homo sapiens
ggcagtattcggaaggtccctgacggagtctgtctcttgcattcaacagtagtatggacggaacaagatccgggagactcatacttccagcctccgaactgccctccgcattatcctctccgcttgcattctctccgggaccatctaactcggacatctccatgctatctggagacctgccagaaccgaaataagtggttaagctccttacttgccaaaccaaccatgagctcccagatacgtcagaattattccaccgaccgtggatggcagaccgtcaaacaagcactggtccaatcggtacctgcaggcctacctaccaactacatctactctgggactacaatatacgaccgacgatgatgtggactctggaaggcgtgacgccaatcactaaccgagaaattgggacgcggacgcaagcgcgagggacaacgagcagtctcctgcaagatgcaacacccagcgatacagggccgcgaccactctaaccagagaccatcaagcaaggccagctgaagattgcgtgcgggtaacaccacctagcacgcccattgacaatgcttgccaatgcacccatgtgacgacacatacgtttgaatccaggccccatttggcatcactccatgccctgagaatcatggcccagaacggaccccacaatttctagctgaaatacatgcatgacgtcacttcaccacactgacggcacgtgcaacgatattcaccgaacccactgggatgcaccacctgacacaagcatccaccaggaggagcagaacccgcaaaaatgaactaggacaaaaaaacttatgcacaggacaccagatcaacacagataaaaagactatggacacaccgaaacacatgacagccctcggacaagcacccgggatcg

SEQ ID NO: 507349 - DNA, 211 bp, Homo sapiens
ttgtacaatggaattataagtgaaaagcctttctagttctatcttaccctaaatgggctctatttctctgtaattcacatgacactctttggctgtggctgtctgttaaattccctgtttagaactatttctcagcaaaccaaaacaaatagctcacagaaaagggcaagtggtaactacatttttttttttttttttttttttgtgggga

SEQ ID NO: 507350 - DNA, 127 bp, Homo sapiens
cccccttcccccatggaaggccctcttcctcccttgatttcactttttttcaggcccggatccttttattctccccagttataacccagttataaaaaaaagatttgggcataaaaatacgggttta

SEQ ID NO: 507351 - DNA, 173 bp, Homo sapiens
cgctcagtgtgaagacatgaggatgaacactttatgatgacccacttccacttaatgaacagtaaatatattttctcttccttatgattttcttaatgtcattttcttttaactaactttccttctttttgcttcctgcttctgcctcctgcttctctgcttcctgcttctgc

SEQ ID NO: 507352 - DNA, 409 bp, Homo sapiens
ccctctaaacaatggggcattcgtcaactctcagccccgatgtagggaccagccccacagggtcggtaggtctctccctgtgtgcagcgatgagagagtgtagaaataaagacacaagacaaagagacaagagaaaaggcagctgggcccgggggaccactaccaccaatgcgcagacaccggtagtggccccgaatgtctggctgcgctgttatttattggatacaaggcagaaggggcagggtaaagaatgtgagtcacctccaatgataggtaaggtcacgtgggtcacgtgtccactggacagggggcccttccctgcctggcagctgaggcagagagggagaggaagcagagagagagacagcttacatcattatttctgcatatcagggactattgtcgacgc

SEQ ID NO: 507353 - DNA, 916 bp, Homo sapiens
gtttgagactcagtagatacaggacatagagttctctgacaatgaaataagtagtctatatgaagcagcacaatataaacttgctaacttaaagaaggcatccagtataacaagaatgaatcagtagctcaccaattatgcaattaatccattaaatccatatggggatagagttacttaaagattatggtttagaaaagaaatgtcaagtcatactttgatatcaaaactattaacaatgtataacagatatttataatatttacaagtgcatgtttgaatgtatagttataggatatagtaaaatgtgcttaagaaatatactcagttcttaaaccacctcatatgagtattatacttgatgccatacttctcagaaagccaaatccaaaaaagtgatcgcgttgactaaaaaggaacgcttaggagatcgtctagagagaaagcgtctaggcactcacatttctagcacagggagataggtgatttgccacgataagcctgcatagaaaagaccatcaaatgaagttttcttatctcaacgtctctatgaatacgataatatatggcacaaataagtggtcaaatttttccaaggatgttactgagaaccacaaatccttagttcgtggatactcaaaaatcgtgacagggttaattgagggttaatcatactagagtacatcaaagcgactgtcggggcaagaaggagtcttaaaggggcaagagggaaaatattcccgagtacaacagaaggacgttttttgggaggccacggggagagaacctcgggcgggtaaccaacgggaagggaaccggcttaagatacaaaaaccgggggggggggccacaaggagggcagagaggtcgcgcgggagatagcaccgcgggagagaaaaaaagaacagaggggcgg

SEQ ID NO: 507354 - DNA, 593 bp, Homo sapiens
ggcaggtcctgggggaccagacggtctcagacaatgagctccaggaaatgtccaatcagggaagtaagtacgtcaataaggaaatacaaaatgctgtcaacggggtgaaacagataaagcactctcatcagaaaacaacgagaatcgacatgtagctgccacagacaaactgcttcgagcacaaccgtagcaagaagcccaagacagacagaacagcaggatgccctaaatgcagaccagggaatccagagacaaagctgaaaggagctccccaggagtgtgcaatggagaccatgcatggcccttcatggcgaagaagttgttaaggcccccttggccccttggaaacaccaagaacccattgccaattgaaagttctacgcacagcgtctgcagaagtggctcaggcctggttggccgccagcttgaggagttcctgaaccagagctcgcccttctacttctggatgaatggtgaccgcatcgactccctgctggagaacgaccggcagcagacgcaccatgctggatgtcatgcaggaccacttcagccgcgcgtccagcatcatagaccgagctcttccaggacaggtc

SEQ ID NO: 507355 - DNA, 714 bp, Homo sapiens
gtacttgtcagcttcttggggacactggctgtgcttcctggaaacattgtgtctgctctgctcatggacaagattggcaggctcagaatgcttgctggttccagtgtgttgtcctgtgtgtcctgcttcttcctgtctttgggaacagcgagtcagccatgatcgctctgctctgcctttttgggggagttagcatcgcatcctggaacgcgctggacgtgctgaccgttgagctctacccttccgacaagaggactactgccttggcttcctgaatgccctgtgtaagctggcagctgtgctggggatcagcatcttcacatcctttgtgggcatcaccaaggctgctcccattctctttgcctcggctgctcttgcccttggtagctctctggctctgaagctgcctgagacccggggacaggtgctgcagtgagggatgggggctgtctcaggggctttagggatggcaggcacactgtgagaccaataattccttttatccctaccctgccctgctgtcctggtcctcactcctgtgtttggtgtcttagctgtgtgtgcctgtgtgcatgtgtgtgaccctgatgggcagggactacagggacggtcccttcgttccacttttgggatgaggtactccttactgtggccacctcaatttgccaaggagaaggtggcctggatccttctctccccagtgttagcgggggg

SEQ ID NO: 507356 - DNA, 282 bp, Homo sapiens
cccgttgtggggaggggcagtgttaaagcagggctggtcatcccctttggagttcaaaggaaaaggtaggcccagggcttttttgttttttttgttatttttggttgggggggtgggaaggtttttttaaaatggggcgggccccccccccattccgtgcctcaatttccccttttgtaaacggtaaatatgactattgccccccctcgcagggggctgtgggggggcataagctgatgtttgtaaagcgctttgtaaataaacgggctttttgaatgccca

SEQ ID NO: 507357 - DNA, 185 bp, Homo sapiens
actaacaatacaagtaaaaaaaatcgaggttcaagatcactttcattccaacaactatagtcattattggaattttacttaccttgcgatggaacatatgtatatcgtcagcatagtcatgatatagtgggaaatttctcgttagaaaaaataagccgttcttaggataaaacttcacctttttt

SEQ ID NO: 507358 - DNA, 325 bp, Homo sapiens
ctctgagatagtttcattgaactagcaagggatccatgccccgcacggaaatttgagatgtctctcggcggtggtgaaggaaagctctgcggcctgacggatttcatcagccttatgcttctgcgagctgacgtcggtggcaaattttaacactttcacaacctggccggcttcatcaatgacggggttgtaggtggcctcaagatagatggtctctcccgatgcggtcttgcgctcaaattgcccgcttaaaaaagttcctccctttaaactctgccaaaaatttggattttcttgataaaaattatcgaaacagaacattcgg

SEQ ID NO: 507359 - DNA, 1227 bp, Homo sapiens
gccggacgcccccagtcccaccgaacgctctgcccgagtgcctggcgggaagtcggcgccaccccgtggaaggtccgctcgggtcgtccgcgggggagcgtttcgctcctgtggatcagtgcggtgggaccggggtcgtcgccgggatgacgtccccctgtgtgtttgggctctccaggtgtgggggtcccggggggctaggcgacggtcgtcgagagcgcctggcgctggtggagagtgggcaggtcccgtgatcatatgacatgccgtctcggaccagtgcttcgatacattgatccagatgagggcactggacggtcgcccgtgacggaaatgagccctcaggctagcttgcaacccatgcctcctgcgacccgggcgcttctcgcctagggggtcccgcgtggggtcaccgaaagttggagcgccttggatctccgggccccggtctccctcagggttcttcgagcgtcgccggtgctcccctacatgtgacaccgtctgctggtcattgatgccccgactgaatcgcgctaggactcccccagcgatggctccctgctcggggctcctgcgaaggacgctccttggagcgccgtgtgccctcttgtgacccttccgtcgcccgcccggggagcttgacccgggtggagtaatggaaaccaaaaagtgcgcctgttttccgttggttgcggcgacgaaagccagaagcgggacgtcaaatacatcccagcgtttcgcctttttccgcggaggggtgcgtgcacgccttcgtgcagcgattgtcatccatgcgggtgcaatgccgtagaagcgagactgacgtactgcgcggtaacacagatgtcccatatacgggggaccgcatcgccagcggtgcaaaagtgggccgacgtagccacaatggatcacaaccgcgccgaacctgtggtaaaacccaacgacgacacccaaacacccgggggggtgcccaaggaaaaaccacacaagcgggcggcaaaacgcaggggaccagggggaacgaaatcatcgggcacgggtacattgccgcccggggggaagagccacgccgcgcggatggaaccacacggacgactagtcgagagcgcaaccccgcagaggaggtcgcgacgaaatccgccgtcggaccactctgcacacccccgccggcagagggggacacaggccagcgggacccacgtagcgacgacacccaaccactgggcg

SEQ ID NO: 507360 - DNA, 548 bp, Homo sapiens
  misc_feature (341)..(341): n is a, c, g, or t
caggtgaggaaacgggctcagacaggtcatgtaactggtccaagttccacagcgggggggtgaatttcccatcatggtcccatactcttactttggtgtttggtcctgtcaacacgtgagggctttggtctggagccaaactctcaaaggagggtgaccacaggcacagccccccagggcctcgggtgatctggctccccagcaagggactgcattttctctccttgtctctcgcagccggccaagctcgcggaggccttcaagtacttcgggcagggcatgggatacagtgagtatggcgtcccccgtgtgcagtgggtcggggcatgtgtcggaatggnaagtgctcggtcctgagccaggttgggatgagcaattcggtgtcccccgggccagcttcagcttgcggggaggaaacagttaggtgtgtggagggcatgtggcagccgggaggatctagcctctcataaatcagggaggctcattttccctcctttgtcgaacagacgtggtccacaccaggaatgggggggggttcagatgaggac

SEQ ID NO: 507361 - DNA, 802 bp, Homo sapiens
ctgcgggaacttaagtgccgtcactggtgatcagatgacacttgtggctattgccgtgcatcttgatttcagctgtgccattcgccagttccatgtttcaggcgcaggaagtcgttgctggactgggtcacatcaacgtagatcggatcaagttgctgcacggttggcagcgcagatcgcctgaccgtactgtaccaagtgcgccttcctgtcacgttcgacttaccaatgcgaccggtaatcggagaggtgacttatggtgtaagccagattgatccgcgcagtttcaacggcagcatttcgccgcagataccgcagcattcgcctgattgcgacatcagccaagagacctgatcgtactcttgcttactgatgtactgagtaccgagcagttgctgataacgattcaccgtacaattgcgcgatataggctgcagcctgggactttcgccagatcacctattcgcactgtcgtatgtcgcctgataggtcgcaggatcaatctgatagagagagacactgcttcgatgtcgataccttctttgaaacttacgcttcatgataatcccgctaccttgacggacgaacttctgcgatccggtaaggccctggtgcgacccggaagctcggttgtgatctggagaggttcaggaacagactggtcactacggccaacgagggggcatctgatggccacctagaagggactgtcaggtcggccacatccctgtaggggctaaggtgcctgcgagcatcagaccgaccgccagaggagaaagcatccgataaggacaactgacag

SEQ ID NO: 507362 - DNA, 212 bp, Homo sapiens
  misc_feature (16)..(17): n is a, c, g, or t
  misc_feature (25)..(25): n is a, c, g, or t
  misc_feature (48)..(48): n is a, c, g, or t
  misc_feature (187)..(187): n is a, c, g, or t
  misc_feature (195)..(196): n is a, c, g, or t
ccagacaacatgtgcnntgcccacnctaattggctgaggggccgatanagtgatctgattggttagaagaggttgtggcatcactgaactataatgattgctgtgtgaaatcattttcctagggagaaaatttttaaaaattgaattcctacttgaccaagatctatcttgcaaactattcgcaaanaagtactnntgtttttaacttaccc

SEQ ID NO: 507363 - DNA, 890 bp, Homo sapiens
tagtaagaaaacaaacattctggctcactagagttcagaaaagtaataatttgagccaaaggaatttgaattaagaaaatagaaactaggtttcatgtatttaaaaaataggaaataaaatagaaactcaaatgccatgaagttatcttcctcttccttatatcccctaagtttgggttgcaaataactttccaattcctaataacctaaattattttgaaatagtgttttcagtgaaatgatgaatgtttgaatgtttgtttggtaatcaacataacaatgctaacaaaattcccacttagattttttaacttttaaaagtcagcgtggttttgataatttgatattttaaatgcccacacatacacacacacacacacacacacacacacaagcacatgttaataaactgataggatggagtgagcaaaattgttttcagggaagatggcacattttagaaaagacttgcccagatgatcttccatattgctcccccaatgtcatttatcgctcatgccaatcctcctcttgttacctgtggctatggtaaaattcctttaacaagcttcattgtgtccaagtatttcagagacttttaaaagctgggcatgacatagcgttttgtgctgttaagaccttagcagagtcaggtagtttacgggtaatattcaaccttgtgcatctgaatctgtcatggattcccttcactcagcactttgccactaatttgtattacactctgtggccatataatacttgcacattatgcaaaaaaaaatgttgatagtatctccttgccacacaatatgcagagttgacaaccttttgaaaaccagggtaactaatatgtatgtcccagttgtgtgggcgttgggtaacaagtctgt

SEQ ID NO: 507364 - DNA, 794 bp, Homo sapiens
gcttgcttgggggaatgaagaccttggttcacctcctgccccgttgcttcccgctgcacatggacagacttcagagcgtctgctcataggatctgctagtccttcctggggacgaattgcgactcgtccacagggacgagcgccacgggtctggaggccgaggatcacgcagctagggcgaggatggactgatgtgttgggcaacgaactcgttaccctcgtggagccatgtactcttaggcgtgcaaatacacgacagcagactcggtgccccatctcgcctggatgcaattagctgttgtgcaatccaaggaggcaatgcgtacatcggtaggcaggcgacggggcccggcgtccaggcagaagtagctccgctggaaggcacggcatccactgtcgttcccaccttggggcctggcggggcccaccgccactgacggtcaggccgtcgttggactcttcccggcctcgggcgtacggggtcctcgaggaatgccgttcttgttccaaactcgcttgctcctcgggaccgtggacgatagccctcaaagggattagccagggaggcccgggggggcctctcgaccgtgggacgcactttgaccttgttgagctcgctgcagtgcatgtggcgtcgagcatggagggctgcacatgcgtcgtgtcgtggcgacgtagttgctaatgaaattggctgggggccgcatgggggtccgtcttgcacactgctgcacggtctcttctaggtgcagtctgagctgtggtgggagctcctttggacaagggttagttcg

SEQ ID NO: 507365 - DNA, 254 bp, Homo sapiens
agcgtaaaacgacgtccagcgattcctcattcttggtcatacttgattcctgattaaaaacccccgtcacactatccctatttttagcctaggggccccgggacaaagaacatttcaaggaaactctactataatttcagatttcctactctggataaaaaccatcttctctgaaaacacacagtctgtatctgtgtgttcatgtctatagaaagccctttatgcaagatggagagagccacatttcccctgag

SEQ ID NO: 507366 - DNA, 329 bp, Homo sapiens
ttgaaggtggatcttctaggactcaggtggtgtggatctgtgatgagatggggaaagtgggctcaagaggtctggatctgtggtgagatgggggaagtgggctcaggaggtctggatctgtgatgagatggggaaagtgggctcaggaggtctggatctgtgatgagatggggaaagtgggctcaggaggtctggatctgtgatgagatgggggaagtgggctcaggaggtctggatctgtgatgagatggggaagtgggctcaggaggtctggatctgtgatgagatgggggaagtgattagtatttagagtgtgcaactattgaaaa

SEQ ID NO: 507367 - DNA, 275 bp, Homo sapiens
agtgaatcgactcgggtactggaggatctctaagtcgaccaggctccatgttaacgatatttggaggtcagcactgactagactcacgtgtcgacggaacttgtacagggaggcatgcaccgcagtggtgaatacacgtcgaccaggatgcatgtatgcgtgattgggtcgtgagcgcggagctcatatatgtaaggagcatgtataggaaggtatgcacggccgtggtgaatacacgtcgagcaggaggcatgcatgcatgctcgggtcctgga

SEQ ID NO: 507368 - DNA, 1252 bp, Homo sapiens
  misc_feature (302)..(302): n is a, c, g, or t
atcaccatggcggctgagaccctgtacacgtatcctagaaaactgagagggccttcaaagctctcatcgctgctcaatacagcgtgggctcatggtcccgcgtgctctccggaccaccaccagcattaccaatttcaggcacaacaaccaatcctgcatccccttagaatattgctcgcgacacaattatcgcatgcacggacaaggatccccgatgcagttatgatgggtgattgagtgtgacttcgtgatgatgtatcgagtgaggcaagcggcgcatttgccgtactattgtgatgccnatgatgcgagcttgcggcgcggacagatacttccgagagtgcaagcagacctcgagggtggtgcacgatgaggctgcagcgtatctgcatgattctcccgactatatgatgcccctcacgtcatggtaaccttggtgatgtgtcgcccacctttgtggcaatcaatgcatccaacaacaaaacaggccactgagaatgcaaaggaggaacgtgaggcgacattctggggctgctggatgcttacttgaagacgaggacttaatctggtgggcgaacgagtgacacttggcctgacagtcacagtttgtcatgcaccctgtgtgaggactctataagcaggttctagagccttcttgccgccaggcctttcccaagtaccaaccgctggttcctcacctgccattaaccagcccagttccgggctgtcttgggcgaagtgaaaactggtgtgacgaacgactggcccaggtagactgctaaaacagtttgcaagacccaagctaaaaaggacacacaacgggaacgagaagggctcacgggaaggagcagccgcagccccagctgagcggacggacgaacacaacgggggttggcccatggcccctgacggaggcaacatggttgactcgtactcaggcgttgcgtttgagccaaggccatggacctttcggtaaccctccacaagagaacacagtgggtgagacaactcaagcgccagtgtcccacgtgtgaaccacgttagtcgacaaggacaaatacggggacccagtgacaaggagcgaggcccgaggtaacaccggtggtgcgcagcaacaccacgagaagaggtaaggagcaccttggacagccgacagaagcacagaaaagacgatacctggaaaacgaaccaactgagatgagcacagcgagctggtctcaggtcgtgaggcgggactcacacagctacggcc

SEQ ID NO: 507369 - DNA, 417 bp, Homo sapiens
  misc_feature (396)..(396): n is a, c, g, or t
gagagagagagagagagagagagagagagagagagagagagagagagagagagagagagagccctcatgaaaacacctgcgttagtactcatgcattttagggtactataggatctagtttcagaggattttctgactagtatgtatttgacacagggacaattgaaactttcacagatgcagtgacacgaactgtgtacatctaaacagactcttagattgattcaggctacttgatagttcggcttctgtcacgactttttaaacagttctacatcaaatcagttataatcaacctgtgtttaataaccatcctggacgcctatgaggcatcttcctgcgttctcactagctcatggagtctgtagaagtcacccatgaatgagcattgtccangcattctgagtgagtactgct

SEQ ID NO: 507370 - DNA, 416 bp, Homo sapiens
  misc_feature (20)..(20): n is a, c, g, or t
  misc_feature (53)..(53): n is a, c, g, or t
  misc_feature (57)..(57): n is a, c, g, or t
  misc_feature (65)..(65): n is a, c, g, or t
  misc_feature (102)..(102): n is a, c, g, or t
  misc_feature (156)..(156): n is a, c, g, or t
  misc_feature (305)..(305): n is a, c, g, or t
  misc_feature (338)..(338): n is a, c, g, or t
  misc_feature (373)..(373): n is a, c, g, or t
agaaaaagaaaatagagagncaagaagagaacctgaagaataccaccagaganctancaatggtncgaatgaaatccatgtttcctattggcttttgttttnctcccctaatgggaatgttcaattccatatttgatggtagagtggtggccaaancttcccttttacccctctttcttacacccaaggactgtctccatccgaaactgctggggagatgacaccacagactgttcccttcattttccctgtatattctctgtacttatgtccgattcggcaggacattcaggaaggatctcggncctttcccccttttaaggagcccgccacccagnagggcaggtgggatttctttggggcccaccacctnctttttggggggaggttttttttggaccttaaaggactctttt

SEQ ID NO: 507371 - DNA, 347 bp, Homo sapiens
agatcagaaggatactagttaagactttggggaaacaacctccagttgctctttatgaaacaatgatgtgacttcgttagaagacaaaggagagatgaatgatatgaaattcttctaagatcagagaatgcaagagcacctcctgtagggtaattactctgaagaaggcagaggagattcttacaaagctgcgtacaagattccaaatgaagagtctagaacataaataccctgtctaattacaaaggtttaatacaatctctgccgtaaattgggagatgtgatgtgaatgcatatagttgagaatggccctcgagatctggccgcattaggaaatgcattgacaa

SEQ ID NO: 507372 - DNA, 145 bp, Homo sapiens
gaacactcaggaaccctctcttacccagaagcctgttacacagcaaggtctccccacaagcaactatactctgccacatcgccaccccgtgcctattgatctagcacagacccttcacccctcacctcgaggcggccagtagtgg

SEQ ID NO: 507373 - DNA, 166 bp, Homo sapiens
gaacagtgctcaacagagagaaacagcattccctgtgcagtatcaccatgccaggcctcagtcaggaatctacagcttcccacagcagcccaggacccaaagacacaacattgtcccctggtagataccacagcatcatcccttggtccagaatatactaccttcc

SEQ ID NO: 507374 - DNA, 423 bp, Homo sapiens
taataaagcagcgacatgaaagcacacagaccagagctctggggtcgaaataaagcagcaacatgaaagcacagagaccagagctctggggtcgaaattcatacacctttgcacagggtagaggagtctcgacggacagccaaaatttttcacaggcttatatagtaaaactcaaagggggagaactgggcagagaaagtacaagtttacatcactagggagttctgccaaaggaatctaccgtaactaaggagccatgtcctcctcatttattttgaggttgttccaggaggcctttatctcaaaaatgttcttggaacagtctttagtttgggagggttcgaactttaggatgaggagttttgggggtgaaaagtttaggagtgttccgagaacaacctctagatgggaagggggtgggct

SEQ ID NO: 507375 - DNA, 165 bp, Homo sapiens
  misc_feature (135)..(135): n is a, c, g, or t
ctcaatgggcaagccatggaaaggaggtggaaggcaattgtgcaccatccccggggttactttttggggggttccctttcaaggagggttcaacttgtttaatgttgggcccttgccaccttgcccccctgggcncctttgccaagggttattatcttacccaat

SEQ ID NO: 507376 - DNA, 488 bp, Homo sapiens
  misc_feature (23)..(23): n is a, c, g, or t
  misc_feature (67)..(67): n is a, c, g, or t
  misc_feature (152)..(152): n is a, c, g, or t
aaaaaggatttgctcacatttcnaaaaattttatctttcccatttcttttgtctatgaataaaaaanactctagatttttttctttatttcccaaaatatgggaagtaatcataatttaaggaataaatgacaatcacagaagggttaaatnccatataatgaaatacctacctgtcattaaaaatcatgtgtataggtcaggcaccatggctcacacctgtaatcccagtgctttgggaggtcaaggcgggaggatcacttaagggcaggagtttgagaccagcctggtcaacatagcaaggcactatctctacaaaaaacttaaaaattagccaggtgtgatggcgcatgcctgtagtgctagctactcagaagctgaggtgggaggatcacttcagcccaagagttggaggttgcagtgagacatgattgtaccactgcactccaacctgggcaacagagagagatgctttctaaaatacaaaac

SEQ ID NO: 507377 - DNA, 259 bp, Homo sapiens
gttttctgggctacttatgaccagacttatcttaagaagtacacttttgtaacaatgtagtcacacgcatctgataaatccaagaagaagtgtgcagaatatgtaagatatttgcgcatttataatcactatgattaatctctctctcttctctttgagcagcttagcagtgtctgcaataacgaatctttgcctacaacctgttaactgactggactgttggtaacaaagtaattgtgagaaccatgtcggtcaaaaa

SEQ ID NO: 507378 - DNA, 945 bp, Homo sapiens
ctcgtggtgccacacaacgtttttcccgcacagttacggtgcgtccccttaattggccgcgctcttcaccccgagagcgagtgtttgcgccatgacgctcaaccgttgtgcgacacacaccacgaccgacccgttgtttaaacaccattctagagctggggtgtaggaagctgcgccccccgcaggggggttcctcctgacactatccgctgtgacgccgtctccctttagtttacagcgtacatccttgggccaaacgcatggggaagccgcccctcctttttattcctgccaacggtcggttgcccagttagcaccacttccagggggcggccgcacgaaaaaccacacgccctgtgccagcacgccgggaaccatccaccaaggggggaccccagaaagctccgagggcgtctcccaagcagtaacataacgcaccagccgggtcagaaacaaaggcccacctgtcccccgccagcaagacgacccaagtgcggatgctgcctcccagatgcctcgcagtcacagggaggccccacccccggaccacgctcatgtgttggggatcccgccgcgctccccccgcggacaacggggagggtatatagtcgcccccccccggggaaaaaacaatggggtatttgacctccactccgcctgggaagtgctcccacacaaggcaccgtcacgcccccgcacactgtccccactgttcgtgtgtcggctctcgcacttaatattatgatgaaaacaggcctcaccccctattttatttgggtgctccaggataggggcgtcctgattactcataaaggttttgctcgcagtgttctgtaaaaagtgtagaaaaataccgcgggtggtccttcttcgcagctatcaactagccggggcgtcccgctcggccccaaacaaacaaaaagaatttttgcgccccacaagaca

SEQ ID NO: 507379 - DNA, 215 bp, Homo sapiens
  misc_feature (212)..(212): n is a, c, g, or t
tttgtatatccagtttgtatcttccaaatcttccatagtattttcctctatatgtccatgcattagtccattttgcattcctataaaggaataaaggaatatctgaagttacctaatttatgaagaaaagagctttaaatggcttacagatctgcaggctgtccatgaaacatggcaccagcatctgcttctgttgggggaatcctggaagnctt

SEQ ID NO: 507380 - DNA, 216 bp, Homo sapiens
  misc_feature (6)..(6): n is a, c, g, or t
  misc_feature (71)..(71): n is a, c, g, or t
  misc_feature (73)..(73): n is a, c, g, or t
  misc_feature (82)..(82): n is a, c, g, or t
  misc_feature (99)..(99): n is a, c, g, or t
atccgngctacaacgccaaggcgatcttcatggcgttgttcttcgtgatcttaaagccctgcagggcatcngnagctttccntgcctgtacctcaccgncaaactccacgaaggcgatgtcatgccgcccgggtaccagacggacctccttgaagccagggaactgattgaaaagcatggacagcatgagctcgttgatcgccttggcgttgtagc

SEQ ID NO: 507381 - DNA, 718 bp, Homo sapiens
  misc_feature (521)..(521): n is a, c, g, or t
  misc_feature (534)..(534): n is a, c, g, or t
  misc_feature (537)..(538): n is a, c, g, or t
  misc_feature (546)..(547): n is a, c, g, or t
  misc_feature (549)..(549): n is a, c, g, or t
  misc_feature (569)..(569): n is a, c, g, or t
  misc_feature (620)..(620): n is a, c, g, or t
  misc_feature (635)..(635): n is a, c, g, or t
  misc_feature (684)..(684): n is a, c, g, or t
cggtgcccttggtagcacttcaaggggaactctgttagtggagggaagaagtaaccctgtgaaaccgtttccacctgcccgatccacatggtgttccgttccatgtaaactatggaggacattctctttcctcgttcaggactacactcatattggggacccctcaagtgcacgatgggtgttgcctccccggcatattttgccgaaaatccgagaacgttcgatttgcttagtcctgaagagtatcttattctttgccagaatttgttaagtagcccagtgaagacgattcctgtgctattcgacctttcccaaatgggcaaaacctggtgtcgtattcgggaacaatgcatcgttgtgaacccttggctggaatcatggtccacagaacatcataggtcattcattcacgcaggctggccaaggctgaaccgcatcaagacaagtctggctgatttttcagccgtcatcatgggttctagtgtgtgacaggttgtgtccccaagggactggactgggancaggtcaaccacnccnnggggggtnncnccagcctttttttttttttnttttttttttttttttcctccttaagctgctgtcaatccaaaccattggcntcatcgtttcttttnaattaaaaccaacatatcagcaatagtctgctctccccgggaatctctnacatgctctgttacatcgaaaagacttaggagac

SEQ ID NO: 507382 - DNA, 1484 bp, Homo sapiens
ggcgaacgcggagacgcacgccatgaaggcctcgggcacgctacgagaagtacaacggtagtgggtcgctgtcctgcccaaccccaaatgccacacgccgaccctctaccgatttacgaatctatgcgcctaatcatgtcgatcgccaagtcccgctttctggctactgttgtaatctcagtgtaaggaagactgaagcacagtccttcagggcgatgattcgtcgtacttagtgagagcagagtagtcttgacgaatgtcccacaccgtgtcggtgttgaacgaatcttactgagcgagtctcggtcgtgagggctaattgatcgtccgcagagaatcgggggaagcacacaccatagcaattggtaatctctgagtgtacattaacccaggggaacctcatagataacaacagctgtacaatgagccagaccatcgtccaacacccacactggagtaacccgaacgcaccagtcgagagttgcattcaagaggagaccgctggtcggcacaccaagaaagggcaccccaagcttacaccaactttcaccgaagttcctattagcacaacgggctcgagaacgcgaacgtagtacagcccgggtacactaggaccaaaagtttgccccagacacggcgacctcgtggccatggatacacagggccacgatagtcccacactgtaagattcccagcaaggaatgcacgagcgaatctccccacccgggacattgaccgccagccctacagcacctggcggcacatcacccttgaatggaaccgcgcctccctagaataaaccaataagcgccaccaaaaggtccaatatctgcagcgccaaaacacaatcagataaagagtagagccaccaaaaacaacagccgattaataccctttaccattacaagtgatctgaccacgaagatgaaccgacccatatgacgagttactccacgtaagacagactgacctagaccaaccacctcccaaaacaatgattaaacaaaaccactttcacataggggcaccaaacccctgtactcccaccaccacgtattcctattctctaaatcaacaaccaacaattcaatccacaaccacacaatcacaatcgtagctatcacacaacacaccatctactctaccatactcgcacataacaccacacgcactaccaagtacaatacaacaagactaacagaactattgaatacatcaataatcactatatatcaagatacatatcataaatctactcactaaaacaataatacacatcccaacatgccacatatcagctctaccacaaacacaataaacatcatcacactctccgcacaatttacaattccaaactaaacactcatcccacacacaacactccatatcacactacctcaacctctacgctaatacaaacgatgacatatagtaccactaaggtacctaaccctacaaccacgcacatcctaccctatcattca

SEQ ID NO: 507383 - DNA, 413 bp, Homo sapiens
  misc_feature (45)..(45): n is a, c, g, or t
  misc_feature (47)..(47): n is a, c, g, or t
  misc_feature (300)..(300): n is a, c, g, or t
  misc_feature (347)..(347): n is a, c, g, or t
  misc_feature (377)..(377): n is a, c, g, or t
  misc_feature (388)..(388): n is a, c, g, or t
agacacagagaagttgaaattgagggaatggattacaggcgtgcncncacacctggccggttgtttatatttaattgtctttttttcactaatgaggaccaccttgtaaattctgggcattttcagagttttctcttccatgtgaattgctccagctaacttaatattagtttctcaagggtttgtgtaggacctgggctttgtctctttccatctgtttctctctttccctttaacgtcacttgcctgagggtctataagggccctttaagggttgccagcccagagccaggaagaggntggggtgtccctggaagttaaggaaagccacctttggccctacaggnggggtgtttcacagtgttggggtgttgggnagttcacaggnttgactttttgggggggccccaggg

SEQ ID NO: 507384 - DNA, 130 bp, Homo sapiens
acatgtatcgcgcgcttgtatgcaggcgctggaaccgacgcaatgagcagccgcatctccaccagcatgatgtacaaccagtcggtgtcgctagatgataggccaagcaggccaagctcagccacctggg

SEQ ID NO: 507385 - DNA, 111 bp, Homo sapiens
gccgagtgatgcgtgcgtcgtgcaggcgctggagctgccggcggatgcgaagcagcgctgctggagatgaccccgggcagctacaccggcctggccgagtcactggcgaag

SEQ ID NO: 507386 - DNA, 117 bp, Homo sapiens
tggcgtttggcagtttataagttattagttttataaaatcagtactttttaatgggaaacaatcttgaccaaaatattggtcacagatattttggagaccctattaaaaaatgttaa

SEQ ID NO: 507387 - DNA, 227 bp, Homo sapiens
ggggcccccccccccggggggcccccccccctttttttttttccccctggggttaaacggggggaaaggggggggggggggcccggttttggggcccatcccccttcccccttgggggggaaaaccccttttaaaaaaacccccccccccccccccccttttttttttgggaattttttggggggggggccccaaaaaaaaaaaaaaaaaatccttttttttttcca

SEQ ID NO: 507388 - DNA, 541 bp, Homo sapiens
ctctgtttgagacttggctttaccattactctgtaaggatccttgagcaagtgatttaaattctccaagactcagttatttgtaaaatgatgccagaatgatattacttgccttattttattgcagggttgttctgaggacaaagttagggaacaggtgacaaaggtacagtgatgtacaaatggatgctgttattatggcagcatctaatatatataagggtaaatgtcctgagctgtgagtgggacagatttgcctttagaattgctctgctgtttagtaatttggtgctttgggccaaagcaccacaatctttttgaatttcagtactctcatctgtataaaataatcaacatcacagatttgtgagaattacattaatgtagatactatatttaaatttttgtaaaatagtgatggggtaggagttattatcttgaacagatttcagaaagttagaaaagagatagccagagattttttatctgttccaaacatcttaataagataaattactcatagaatgttagaatgctagaag

SEQ ID NO: 507389 - DNA, 450 bp, Homo sapiens
tatatcggtgcactgtgcatactacatcaatcagacacatgttcctcgtagtaacggccatactcatccaaggcccctgaagctgcaccggctgcagtcattctcataatctgcccagggacttacatcctcattactatactgcctagcaaactcaaactacgaaaacgggagcttcatcggccgatgaagatgccgttttcgtacacgccgatgtaagcgcgccggtagatgatgatgccctgcacggagacactgaagccctgatacaggccccggatgccgtcggcttcaccaagagcagtctcccaggcctcggaaactcgcgctctgtgcctgactttcccaagtacgatagcaaggcgggttctggcaaaatccagcgggtacacgaagcagagggaggtcgggccggccgaactgcggaggccaggttgcctgaaagtactc

SEQ ID NO: 507390 - DNA, 1442 bp, Homo sapiens
  misc_feature (1026)..(1026): n is a, c, g, or t
  misc_feature (1182)..(1182): n is a, c, g, or t
  misc_feature (1334)..(1334): n is a, c, g, or t
gtgggacggtggaggctggcacctgtggccctgcgccccacgtggcgccctttccgggcggggggggtggggaggcacctccagcgacaactctcccccctcccccggcacccggctgatttgctgtgccactgggagggttcgggggtggctgagctgagagggctccgggaaggagtgacgtcagggtgagtgggagcccaggaaggagcgagtaggagagagggagcgagagccaggcaggaccgcagggtcggggctagtgaggagcgagggcaaggagagagcagtgaggccggagagaaagaagctgccgcggaggaagacaggctgcgggttcccgggactgcaggtccaggcagggacctgccttcagccccctttgtgccgcgggacgcccagcggcacgacgtggagctcctggagagcagcttccctgccattttgcgggacttcggggctgtgagctgggacttctcagggactacccctccgcctcggggctggtccccacctctggcccccgggtgctaccagctcctgctgtaccaagcaggccggtgccaacccagcaactgccgccggtgcccgggggcctatcgggcactgagggggcttcgaagctttatgagtgccaacaccttcggcaatgccggcttttccgttctcctgcctggggcccggctcgagggccgctgtgggcccaccaatgcccgggtcagatgccatctgggcctaaagatccctcctggctgtgagctggtggtcggcggtgagccccagtgctgggctgaggggcactgtctactggtggacgactcttttctacacacagtggctcacaatggctcccccgaagatgggcctcgagtggtcttcatcgtggacctctggcaccccaacgtggcaggggctgagcgccaggccctcgactttgtcttcgccccagacccttgaaggaaggtgctcccttcacacacccaggctggagagacactgcgctcagggacggcttgatggtagcangacctctctctaatggggggtggcgggggggcggacggaatgcggacccggcgctactggaccccctggaatctctcattcctggaaatcgcctccttaaaaaaaaaacacaacaaaaacaactcggcggacattacgatgcggggcggcagccanagacgggtcactcaaacggtgcccacagggcatcacatcaaggtgtcttgagcccacccttttgtgccaaacggggcaactaggcgcggagcccccaaaagtcagggccgatattcacaacacgcatcatataatactcgtctgataacacntatctgatgccggatccagtgacgcaggtcacatcgattccaatcatcacatacgtgacactgagcacacactcgatcatcacacgctactcacgctcatcacattgg

SEQ ID NO: 507391 - DNA, 1951 bp, Homo sapiens
  misc_feature (472)..(472): n is a, c, g, or t
gtgggacggtggaggctggcacctgtggccctgcgccccacgtggcgccctttccgggcggggggggtggggaggcacctccagcgacaactctcccccctcccccggcacccggctgatttgctgtgccactgggagggttcgggggtggctgagctgagagggctccgggaaggagtgacgtcagggtgagtgggagcccaggaaggagcgagtaggagagagggagcgagagccaggcaggaccgcagggtcggggctagtgaggagcgagggcaaggagagagcagtgaggccggagagaaagaagctgccgcggaggaagacaggctgcgggttcccgggactgcaggtccaggcagggtaggaaccgctgcccaggggagctaggaggaagcggggagagagagcgagcgaaaagcgggggtggggaggacacgggggagattgaggtgggacgagagaagcagangcgagagagacggaggctgctggaaggacgaaagaagacgggtgaggaggctgacagagggagaggaggaagaagaggtagaaggagagagaaaggggagagaacggagagaggagggttggaggtgcatgaaggaggggagagggagcttcagcgtggagagaggaccgcggaaggagagagagacagcccagagtggaatgtggaagggaaacagtccagcggggagccaggggcagccatggaagggacaggtggggagctggggggacaggggaactggggtccggaggacgccccaggcctcttggccagggcctccctgatcatgctcccgtggccactacccctggcctcctcggccctcaccttgctcttcggggccctcacttccctgttcctctggtactgctaccgcctgggctcccaagacatgcaggccctaggggctgggagccgagctgggggtgttcgtggtgggcctgtgggatgctcggaggccggcgggccaagcccagggggtcctggggatcccggggaaggacctaggacggaaggcctagtgagccggcggcttcgggcctacgcaaggcgctactcctgggctgggatgggtagagtgaggcgggcagctcaggggtggcccaggccctgggagagggccaggggtcctaggtattcagcgcccaggcctgcttttcctaccagacctgccttcagccccctttgtgccgcgggacgcccagcggcacgacgtggagctcctggagagcagcttccctgccattttgcgggacttcggggctgtgagctgggacttctcagggactacccctccgcctcggggctggtccccacctctggcccccgggtgctaccagctcctgctgtaccaagcaggccggtgccaacccagcaactgccgccggtgcccgggggcctatcgggcactgagggggcttcgaagctttatgagtgccaacaccttcggcaatgccggcttttccgttctcctgcctggggcccggctcgagggccgctgtgggcccaccaatgcccgggtcagatgccatctgggcctaaagatccctcctggctgtgagctggtggtcggcggtgagccccagtgctgggctgaggggcactgtctactggtggacgactcttttctacacacagtggctcacaatggctcccccgaagatgggcctcgagtggtcttcatcgtggacctctggcaccccaacgtggcaggggctgagcgccaggccctcgactttgtcttcgccccagacccttgaaggaaggtgctcccttcacacacccaggctggagagacactgcgctcagggacggcttgatggtagccaggacctcctctctactgcgggggtgggcgggggcggaggatgggaactggctagtgagcactgaaatataaattctgaatcctctcctaagaacaacaaaacacaacaa

SEQ ID NO: 507392 - DNA, 1991 bp, Homo sapiens
  misc_feature (472)..(472): n is a, c, g, or t
gtgggacggtggaggctggcacctgtggccctgcgccccacgtggcgccctttccgggcggggggggtggggaggcacctccagcgacaactctcccccctcccccggcacccggctgatttgctgtgccactgggagggttcgggggtggctgagctgagagggctccgggaaggagtgacgtcagggtgagtgggagcccaggaaggagcgagtaggagagagggagcgagagccaggcaggaccgcagggtcggggctagtgaggagcgagggcaaggagagagcagtgaggccggagagaaagaagctgccgcggaggaagacaggctgcgggttcccgggactgcaggtccaggcagggtaggaaccgctgcccaggggagctaggaggaagcggggagagagagcgagcgaaaagcgggggtggggaggacacgggggagattgaggtgggacgagagaagcagangcgagagagacggaggctgctggaaggacgaaagaagacgggtgaggaggctgacagaccgggaccgacggacggacacgaacgaccggtacgacgggacgacgacgcaacagggcgacgacgcacacgcgccgcacacggacggggttgcgagggttgcactgacaccggacgggggcgagagggagcttcagcgtggagagaggaccgcggaaggagagagagacagcccagagtggaatgtggaagggaaacagtccagcggggagccaggggcagccatggaagggacaggtggggagctggggggacaggggaactggggtccggaggacgccccaggcctcttggccagggcctccctgatcatgctcccgtggccactacccctggcctcctcggccctcaccttgctcttcggggccctcacttccctgttcctctggtactgctaccgcctgggctcccaagacatgcaggccctaggggctgggagccgagctgggggtgttcgtggtgggcctgtgggatgctcggaggccggcgggccaagcccagggggtcctggggatcccggggaaggacctaggacggaaggcctagtgagccggcggcttcgggcctacgcaaggcgctactcctgggctgggatgggtagagtgaggcgggcagctcaggggtggcccaggccctgggagagggccaggggtcctaggtattcagcgcccaggcctgcttttcctaccagacctgccttcagccccctttgtgccgcgggacgcccagcggcacgacgtggagctcctggagagcagcttccctgccattttgcgggacttcggggctgtgagctgggacttctcagggactacccctccgcctcggggctggtccccacctctggcccccgggtgctaccagctcctgctgtaccaagcaggccggtgccaacccagcaactgccgccggtgcccgggggcctatcgggcactgagggggcttcgaagctttatgagtgccaacaccttcggcaatgccggcttttccgttctcctgcctggggcccggctcgagggccgctgtgggcccaccaatgcccgggtcagatgccatctgggcctaaagatccctcctggctgtgagctggtggtcggcggtgagccccagtgctgggctgaggggcactgtctactggtggacgactcttttctacacacagtggctcacaatggctcccccgaagatgggcctcgagtggtcttcatcgtggacctctggcaccccaacgtggcaggggctgagcgccaggccctcgactttgtcttcgccccagacccttgaaggaaggtgctcccttcacacacccaggctggagagacactgcgctcagggacggcttgatggtagccaggacctcctctctactgcgggggtgggcgggggcggaggatgggaactggctagtgagcactgaaatataaattctgaatcctctcctaagaacaacaaaacacaacaa

SEQ ID NO: 507393 - DNA, 2211 bp, Homo sapiens
  misc_feature (472)..(472): n is a, c, g, or t
gtgggacggtggaggctggcacctgtggccctgcgccccacgtggcgccctttccgggcggggggggtggggaggcacctccagcgacaactctcccccctcccccggcacccggctgatttgctgtgccactgggagggttcgggggtggctgagctgagagggctccgggaaggagtgacgtcagggtgagtgggagcccaggaaggagcgagtaggagagagggagcgagagccaggcaggaccgcagggtcggggctagtgaggagcgagggcaaggagagagcagtgaggccggagagaaagaagctgccgcggaggaagacaggctgcgggttcccgggactgcaggtccaggcagggtaggaaccgctgcccaggggagctaggaggaagcggggagagagagcgagcgaaaagcgggggtggggaggacacgggggagattgaggtgggacgagagaagcagangcgagagagacggaggctgctggaaggacgaaagaagacgggtgaggaggctgacagagggagaggaggaagaagaggtagaaggagagagaaaggggagagaacggagagaggagggttggaggtgcatgaaggaggggagagggagcttcagcgtggagagaggaccgcggaaggagagagagacagcccagagtggaatgtggaagggaaacagtccagcggggagccaggggcagccatggaagggacaggtggggagctggggggacaggggaactggggtccggaggacgccccaggcctcttggccagggcctccctgatcatgctcccgtggccactacccctggcctcctcggccctcaccttgctcttcggggccctcacttccctgttcctctggtactgctaccgcctgggctcccaagacatgcaggccctaggggctgggagccgagctgggggtgttcgtggtgggcctgtgggatgctcggaggccggcgggccaagcccagggggtcctggggatcccggggaaggacctaggacggaaggcctagtgagccggcggcttcgggcctacgcaaggcgctactcctgggctgggatgggtagagtgaggcgggcagctcaggggtggcccaggccctgggagagggccaggggtcctaggtattcagcgcccaggcctgcttttcctaccagacctgccttcagccccctttgtgccgcgggacgcccagcggcacgacgtggagctcctggagagcagcttccctgccattttgcgggacttcggggctgtgagctgggacttctcagggactacccctccgcctcggggctggtccccacctctggcccccgggtgctaccagctcctgctgtaccaagcaggccggtgccaacccagcaactgccgccggtgcccgggggcctatcgggcactgagggggcttcgaagctttatgagtgccaacaccttcggcaatgccggcttttccgttctcctgcctggggcccggctcgagggccgctgtgggcccaccaatgcccgggtcagatgccatctgggcctaaagatccctcctggctgtgagctggtggtcggcggtgagccccagtgctgggctgaggggcactgtctactggtggacgactcttttctacacacagtggctcacaatggctcccccgaagatgggcctcgagtggtcttcatcgtggacctctggcaccccaacgtggcaggggctgagcgccaggccctcgactttgtcttcgccccagacccttgaaggaaggtgctcccttcacacacccaggctggagagacactgcgctcagggacggcttgatgggagaggctggggcagggccttatgtcttctcctagtacaaccaaacagataaccagatgcaacgtgaagatctagactggaccctggtttgatgaaccagctgtaaaaacacatttctggaacaactggagaaaccggagtatgccctggactggatattaaataaaaatttattgacatgtaaagatggcaattattaacaacaacaaaaaacagattataaaacatttcatacaacacgattgtattttggcaagcaaacacacacacacacacatactctcacacaggaaacgacctggaagaatatttggtgcttttattttttagattatttgtgtttctgaaatttctacaattaataaatactgcttt

SEQ ID NO: 507394 - DNA, 323 bp, Homo sapiens
atcacagcagcgaccacagctccagtgatcacagctccaaagagaaccaggccagcaatgatgcccaccatccccatcgtgggcatcattgctggcctagttctctttggagctatgttcgctggagctgtggtcgctgctgtgaggtggaggaggaagagctcttatagaacaggagggagctactctcaggctgcaaggcagtgagcagtgcccagggctctgatatgtctctcacagcttgtaaagtgtgagacagctgccttgtgtgggaccgagaggcaagatttgttcctgcccttccctttgtgacttgaagaacc

SEQ ID NO: 507395 - DNA, 465 bp, Homo sapiens
aattgacagatgcattccctttattctgtggaagcgagctgagagagactgacaagagtaggttcagacaggtgagacgtcgaactatgtgtcggcaagttgaaaatgaagctatgtattatagtccagacctactactcaataccttagacgatcggcgcgtctctaataaggttgaaccagatacaagtcatttaattactcagtggcttcatgatgtggactgtttctatggtggcttcatgacagaacagatgtgtgtactcggactctgtgctcttatagatatggaacagataccccaagtttaaaatcaggtatctggacagatcatgccggcttacatccttctattataccggattgacaacgagcatatgcctgacatgcagaacatgagcatgacagctgatgatgatgatgacagctgaacataatgatgaaaccgaggaaccggggagtgac

SEQ ID NO: 507396 - DNA, 2678 bp, Homo sapiens
  misc_feature (472)..(472): n is a, c, g, or t
gtgggacggtggaggctggcacctgtggccctgcgccccacgtggcgccctttccgggcggggggggtggggaggcacctccagcgacaactctcccccctcccccggcacccggctgatttgctgtgccactgggagggttcgggggtggctgagctgagagggctccgggaaggagtgacgtcagggtgagtgggagcccaggaaggagcgagtaggagagagggagcgagagccaggcaggaccgcagggtcggggctagtgaggagcgagggcaaggagagagcagtgaggccggagagaaagaagctgccgcggaggaagacaggctgcgggttcccgggactgcaggtccaggcagggtaggaaccgctgcccaggggagctaggaggaagcggggagagagagcgagcgaaaagcgggggtggggaggacacgggggagattgaggtgggacgagagaagcagangcgagagagacggaggctgctggaaggacgaaagaagacgggtgaggaggctgacagagggagaggaggaagaagaggtagaaggagagagaaaggggagagaacggagagaggagggttggaggtgcatgaaggaggggagagggagcttcagcgtggagagaggaccgcggaaggagagagagacagcccagagtggaatgtggaagggaaacagtccagcggggagccaggggcagccatggaagggacaggtggggagctggggggacaggggaactggggtccggaggacgccccaggcctcttggccagggcctccctgatcatgctcccgtggccactacccctggcctcctcggccctcaccttgctcttcggggccctcacttccctgttcctctggtactgctaccgcctgggctcccaagacatgcaggccctaggggctgggagccgagctgggggtgttcgtggtgggcctgtgggatgctcggaggccggcgggccaagcccagggggtcctggggatcccggggaaggacctaggacggaaggcctagtgagccggcggcttcgggcctacgcaaggcgctactcctgggctgggatgggtagagtgaggcgggcagctcaggggtggcccaggccctgggagagggccaggggtcctaggtattcagcgcccaggcctgcttttcctaccagacctgccttcagccccctttgtgccgcgggacgcccagcggcacgacgtggagctcctggagagcagcttccctgccattttgcgggacttcggggctgtgagctgggacttctcagggactacccctccgcctcggggctggtccccacctctggcccccgggtgctaccagctcctgctgtaccaagcaggccggtgccaacccagcaactgccgccggtgcccgggggcctatcgggcactgagggggcttcgaagctttatgagtgccaacaccttcggcaatgccggcttttccgttctcctgcctggggcccggctcgagggccgctgtgggcccaccaatgcccgggtcagatgccatctgggcctaaagatccctcctggctgtgagctggtggtcggcggtgagccccagtgctgggctgaggggcactgtctactggtggacgactcttttctacacacagtggctcacaatggctcccccgaagatgggcctcgagtggtcttcatcgtggacctctggcaccccaacgtggcaggggctgagcgccaggccctcgactttgtcttcgccccagacccttgaaggaaggtgctcccttcacacacccaggctggagagacactgcgctcagggacggcttgatgggagaggctggggcagggccttatgtcttctcctagtacaaccaaacagataaccagatgcaacgtgaagatctagactggaccctggtttgatgaaccagctgtaaaaacacatttctggaacaactggagaaaccggagtatgccctggactggatattaaataaaaatttattgacatgtaaagatggcaattattaacaacaacaaaaaacagattataaaacatttcatacaacacgattgtattttggcaagcaaacacacacacacacacatactctcacacaggaaacgacctggaagaatatttggtgcttttattttttagattatttgtgtttctgaaatttctacaattaataaatactgctttaaaataatcaatggttatttgtaattttaaaaaatcaaggatttccattcaatgctagatgccacaagtgggtgacattctaagaaaaaatattggcgatatctacattgactagaaatttttatctagaacagactttttcaactgaagttcctcatctgaatctcaaaaaccagcaaatatggccaggcacggtggctcacgcctgaatcccagcactttgggaggccaaggcaggtggatcacttgaggtcaggagttcgagaccagcctggccaacatggcgaaactccatctctaccaaaaatatgataaaattagccaggcattgtagtgcacacatgtagtcccagctacccggaaagctgaggcaggagaatcacttgaaccccagagagggaggttgcagtgaggcaagatcgcgccactgcactccaccctgggcgacagagcaagactccacctca

SEQ ID NO: 507397 - DNA, 210 bp, Homo sapiens
tacgaggatcccgtgcaccgtacttctcaggtagaattttttctcttggtattagagaacctccatgaggtcagatgtgggctgagggagaggcaaacagtgcagtaagggtaagtgctcttaagtgtgagccagcgtggttaacttgtccgtcctgagtccagtctcttgacctggcatgtcactgggcaaggagaaagtacggttgca

SEQ ID NO: 507398 - DNA, 2631 bp, Homo sapiens
  misc_feature (472)..(472): n is a, c, g, or t
gtgggacggtggaggctggcacctgtggccctgcgccccacgtggcgccctttccgggcggggggggtggggaggcacctccagcgacaactctcccccctcccccggcacccggctgatttgctgtgccactgggagggttcgggggtggctgagctgagagggctccgggaaggagtgacgtcagggtgagtgggagcccaggaaggagcgagtaggagagagggagcgagagccaggcaggaccgcagggtcggggctagtgaggagcgagggcaaggagagagcagtgaggccggagagaaagaagctgccgcggaggaagacaggctgcgggttcccgggactgcaggtccaggcagggtaggaaccgctgcccaggggagctaggaggaagcggggagagagagcgagcgaaaagcgggggtggggaggacacgggggagattgaggtgggacgagagaagcagangcgagagagacggaggctgctggaaggacgaaagaagacgggtgaggaggctgacagagggagaggaggaagaagaggtagaaggagagagaaaggggagagaacggagagaggagggttggaggtgcatgaaggaggggagagggagcttcagcgtggagagaggaccgcggaaggagagagagacagcccagagtggaatgtggaagggaaacagtccagcggggagccaggggcagccatggaagggacaggtggggagctggggggacaggggaactggggtccggaggacgccccaggcctcttggccagggcctccctgatcatgctcccgtggccactacccctggcctcctcggccctcaccttgctcttcggggccctcacttccctgttcctctggtactgctaccgcctgggctcccaagacatgcaggccctaggggctgggagccgagctgggggtgttcgtggtgggcctgtgggatgctcggaggccggcgggccaagcccagggggtcctggggatcccggggaaggacctaggacggaaggcctagtgagccggcggcttcgggcctacgcaaggcgctactcctgggctgggatgggtagagtgaggcgggcagctcaggggtggcccaggccctgggagagggccaggggtcctaggtattcagcgcccaggcctgcttttcctaccagacctgccttcagccccctttgtgccgcgggacgcccagcggcacgacgtggagctcctggagagcagcttccctgccattttgcgggacttcggggctgtgagctgggacttctcagggactacccctccgcctcggggctggtccccacctctggcccccgggtgctaccagctcctgctgtaccaagcaggccggtgccaacccagcaactgccgccggtgcccgggggcctatcgggcactgagggggcttcgaagctttatgagtgccaacaccttcggcaatgccggcttttccgttctcctgcctggggcccggctcgagggccgctgtgggcccaccaatgcccgggtcagatgccatctgggcctaaagatccctcctggctgtgagctggtggtcggcggtgagccccagtgctgggctgaggggcactgtctactggtggacgactcttttctacacacagtggctcacaatggctcccccgaagatgggcctcgagtggtcttcatcgtggacctctggcaccccaacgtggcaggggctgagcgccaggccctcgactttgtcttcgccccagacccttgaaggaaggtgctcccttcacacacccaggctggagagacactgcgctcagggacggcttgatgggataaccagatgcaacgtgaagatctagactggaccctggtttgatgaaccagctgtaaaaacacatttctggaacaactggagaaaccggagtatgccctggactggatattaaataaaaatttattgacatgtaaagatggcaattattaacaacaacaaaaaacagattataaaacatttcatacaacacgattgtattttggcaagcaaacacacacacacacacatactctcacacaggaaacgacctggaagaatatttggtgcttttattttttagattatttgtgtttctgaaatttctacaattaataaatactgctttaaaataatcaatggttatttgtaattttaaaaaatcaaggatttccattcaatgctagatgccacaagtgggtgacattctaagaaaaaatattggcgatatctacattgactagaaatttttatctagaacagactttttcaactgaagttcctcatctgaatctcaaaaaccagcaaatatggccaggcacggtggctcacgcctgaatcccagcactttgggaggccaaggcaggtggatcacttgaggtcaggagttcgagaccagcctggccaacatggcgaaactccatctctaccaaaaatatgataaaattagccaggcattgtagtgcacacatgtagtcccagctacccggaaagctgaggcaggagaatcacttgaaccccagagagggaggttgcagtgaggcaagatcgcgccactgcactccaccctgggcgacagagcaagactccacctca

SEQ ID NO: 507399 - DNA, 1862 bp, Homo sapiens
gtgggacggtggaggctggcacctgtggccctgcgccccacgtggcgccctttccgggcggggggggtggggaggcacctccagcgacaactctcccccctcccccggcacccggctgatttgctgtgccactgggagggttcgggggtggctgagctgagagggctccgggaaggagtgacgtcagggtgagtgggagcccaggaaggagcgagtaggagagagggagcgagagccaggcaggaccgcagggtcggggctagtgaggagcgagggcaaggagagagcagtgaggccggagagaaagaagctgccgcggaggaagacaggctgcgggttcccgggactgcaggtccaggcagggacctgccttcagccccctttgtgccgcgggacgcccagcggcacgacgtggagctcctggagagcagcttccctgccattttgcgggacttcggggctgtgagctgggacttctcagggactacccctccgcctcggggctggtccccacctctggcccccgggtgctaccagctcctgctgtaccaagcaggccggtgccaacccagcaactgccgccggtgcccgggggcctatcgggcactgagggggcttcgaagctttatgagtgccaacaccttcggcaatgccggcttttccgttctcctgcctggggcccggctcgagggccgctgtgggcccaccaatgcccgggtcagatgccatctgggcctaaagatccctcctggctgtgagctggtggtcggcggtgagccccagtgctgggctgaggggcactgtctactggtggacgactcttttctacacacagtggctcacaatggctcccccgaagatgggcctcgagtggtcttcatcgtggacctctggcaccccaacgtggcaggggctgagcgccaggccctcgactttgtcttcgccccagacccttgaaggaaggtgctcccttcacacacccaggctggagagacactgcgctcagggacggcttgatgggagaggctggggcagggccttatgtcttctcctagtacaaccaaacagataaccagatgcaacgtgaagatctagactggaccctggtttgatgaaccagctgtaaaaacacatttctggaacaactggagaaaccggagtatgccctggactggatattaaataaaaatttattgacatgtaaagatggcaattattaacaacaacaaaaaacagattataaaacatttcatacaacacgattgtattttggcaagcaaacacacacacacacacatactctcacacaggaaacgacctggaagaatatttggtgcttttattttttagattatttgtgtttctgaaatttctacaattaataaatactgctttaaaataatcaatggttatttgtaattttaaaaaatcaaggatttccattcaatgctagatgccacaagtgggtgacattctaagaaaaaatattggcgatatctacattgactagaaatttttatctagaacagactttttcaactgaagttcctcatctgaatctcaaaaaccagcaaatatggccaggcacggtggctcacgcctgaatcccagcactttgggaggccaaggcaggtggatcacttgaggtcaggagttcgagaccagcctggccaacatggcgaaactccatctctaccaaaaatatgataaaattagccaggcattgtagtgcacacatgtagtcccagctacccggaaagctgaggcaggagaatcacttgaaccccagagagggaggttgcagtgaggcaagatcgcgccactgcactccaccctgggcgacagagcaagactccacctca

SEQ ID NO: 507400 - DNA, 135 bp, Homo sapiens
acacatgagtcacagagatatgagcttagtgagtccagacatcaggctagtgattctaattaaagaaacaaaagggggggggagttcccgtacctggttcagtggttaacgaatacccactatgaaccatgaggt

SEQ ID NO: 507401 - DNA, 548 bp, Homo sapiens
agccctatccatctttacgtcacaggccctccagttcctgttgaagctgagaatggcagccatgtcctcctcactcaactggaagtcgaagacctagaaagacaagagttccaaaaccacccttagcaagcaatctctttgatcttgggaatctccattactacggggtcttctggcttggcactagacgaagaaagagagctggagtaaaaatcaccatggctactgtgtgcccgtgaacatccctgccaggacagcatcaaggctgagcactgcagcatttttcctctgcaaggcaggcaggaagatctttccccctggattcgtgcataggatctagtactttggcaatttgaaaatactgccccagcacaggacatcagaaatggaatattccaggggatcagacatgctatcattttaaaaacactttaccctgacaatcccacttgggttaccaacacattgccattggtatattttatcttgtgccttggaacttacatactaatagaacaaattacaaaatgctaattttaagaaggata

SEQ ID NO: 507402 - DNA, 677 bp, Homo sapiens
agggagaaaaaagatttcctttataagcagagcaaaagagtacatgcttggaccacctcgcagtgttttatagcccacctgcctcacccagtgttgtccagtggtggcatctagcttgtacgtgtcatttggaaagattgtgcttaccagacatcctgattcaacaattgtctattgcaatacgttcatttaaacatcgctagttcacatcaaggcggatcagtttccaagggttccttaccctggtacattcatgagggttcttagaatgctcatgagccctgactgtattgcactataccactctttgtacataatagcaactattccaggctaatcacagtcgtatgcgtgagtcttttgaaaggcaagaataaataatatccagtgcaattgatcagatttctcagtgttttcccatatactagtgtataagcttcttgattggttggctgactatgaaccccatatgttcatgtcaaaatagtaccttgctctttaatataatacatagtctccaaataggtgatcattggcgatggattagattttcaaagtacattcatagatatctgttattctggtaagggtcaaaaccgtgtgtgaaggcagctccctgatatgatagctttttggtaatctgcgtttgtctggtcccttaatgatgtgtgattaag

SEQ ID NO: 507403 - DNA, 958 bp, Homo sapiens
agcggagtacggcctcgcggagccggcccggcggaccgtgacgggtcccctcacctcctcttctctcccctccccgccgcctctctccctcccttcctccctcccgtcgctcttctcacgccggacggctcccgctcgcccgctgcccggttggtcctcttctccagcgcgcggggccgccccgcgagccccgaggatgagaccccgcagcctggaggagggctgaccggggctttggatgcttgctgctagagggtggtggagagcaaaacagaaggagacacgtgaccggaagacgagaggtgagagcctgggattcccgagagacatactcttccttgtactcctcctctcctctctatcccagatgtggcacgtgggctgacactaaagacttaggtagccccatcaaacccgaactggcatggtcttccgatggacaactggaaggtcagacacgtatttcgaaaaaaataacctactgcgtgacaatacgagacaatggattccttggtatgagacaatcaaacaacaaacgcccaggagaaataacgccaggtccagtgaacgttcgcaagacatgtatcccaacatgattcttccaaaaaaaggctcctaaaaccaacatgtgaagctccggtataggcaagacttgcatggctggaacgaacagactggataaataaccgatagaaataaaccagagtgcgccattaaaatatatctatcgatgaaaaaccccctaaatcaagcggattagcgataagcagacaaaaagttaagaccgcagttgacaaagcatacaactaagggggacaactagctacacagaggcagatacacaactgtcgaacaacggtaaacggcgatggtagccacgacgctaagtgcaaacaacgatgacacactgcagtatcccacatacgtgttcttgagatcaccacaccgatagcagaaa

SEQ ID NO: 507404 - DNA, 132 bp, Homo sapiens
tgtcacgctcagccagcagtgtggaaggaaaacagacaaaaggctcatcaaaaacagcaggaccaaatattgagcaggctggcagaaccagttcttgctaggtacaccgccaggacacacgactccaggtag

SEQ ID NO: 507405 - DNA, 343 bp, Homo sapiens
  misc_feature (32)..(32): n is a, c, g, or t
cagtgggtgttctagaggccatctggggttgnaagccaatggtctgcacacttcactgggtgacagtctgtgttccaagttccacgaaatagctcaagaagttaccaaagtaagacttggcctcggcctgaagctctgggctcttgaccttctccatcaggtccttgccatagtcagtcacggtctgaaagttctgagaaccgaggtctctccacacatggctcctttcctgtctcgaccaagctcttcaagtctgcagatggtgagaagtagcacagttgctgcgagcagcttcatgttggtcacagtggagagcgcggcctagacagcgtctctgtccgcg

SEQ ID NO: 507406 - DNA, 637 bp, Homo sapiens
caccggcgcgctggacaactcaccaggcgggcgaatcgtcagcgacggtagccagacggtcaccgccgccaatgtggataaccgcgcgggtgtgatcggcagtcaacaggcgttgaacctgaccactgccaacctcgataacactgccgggttgatcaacagccaggctgatttgactctgaccgggcaaacagtcgactcaagcctggatggcgaaatctcagccaagggcgacttgaaactcatcgtccaacagctgatccagcgccagggccgcttgatcggagaacgcgctgtgagcctcgatctgcaaggcggaaatctcgaaaacagcgcaggcttgatcagcgccaaaggtccgctgaccttcgcgcgcctggctaacctgaccaaccgagaacaaggcgaaatctccagccagacggcgttcaccatcgccgccaaacgcatcgataacggtgatcgcggggtcatcctcagtgccgatcaattgcgccttgaagcggataccgtggtcaacgccaacaagggcttgatctccggctggaacggtctgacggtggtcggcaatggcctcgacaacagcgccgagggcacgttgtcgagcaagaggcgtccgtagcggccggggatctct

SEQ ID NO: 507407 - DNA, 326 bp, Homo sapiens
tctctagaggataccctgtcagagtagcccctgttgtcaacggtggggtctgcaatgaccgagtcaatggcttcagctgacacctgcccctcgggcttcagcggctccacgtgtcagctgtactgttgtgacgaatgcgccagtacgccctggaggaatggcgccaaatgcgtggaccagctcgatggctacgaatgccggtgtgccgcgggcttttgcgggcacagcttgtgtgatcgctacgtggactactgctcccctatcccatgccatctatgtgtctctgcgtgcttggcattgccggtttctcatgtgtcctgtgctct

SEQ ID NO: 507408 - DNA, 1371 bp, Homo sapiens
  misc_feature (1025)..(1025): n is a, c, g, or t
  misc_feature (1158)..(1158): n is a, c, g, or t
  misc_feature (1274)..(1274): n is a, c, g, or t
ggcagaaagttgacgaagtcatgtatgcgtacgagcagaaggaataccggaagcctatgaaggtgtgatgactggtgcgcgaacggtgcatgtagaggttctctcgaatctcatggtgcccataggaagggggtaagcctcaattcgctcgacagcacatccctgtcccttatgttcggagggcaatatgaggtgatggttattcgcttgtatgttgccattgtaattccacgtaaaggacatcgtccctagagatggaacgtcacttcgagatctgcgtagacattcgcgaaggattagtacataaagcaatacatatgaaagtggaagtacatgggttcttcgtaaagcacgtcgttttacaagaacattcaagttgtggagatgggtttggagatacgcaacggggaggggttagcacggtgggtaggctattaacaagttcggctacaggaatgcgctgagatagtaaatcacataactgttaagagtggttgactcttcgggagaatggcctgctcgtacgtcccagggcgcatataaaggaacccctttccagttcaagactacctgatgtatgaacatgaccgtgtcagtaggcctaagatatatcatgcgccacggcggaaccgagtatgcgtggaattcaatttactcattgtggggaatctggccaccaggggggagcacatgacgggcgcttgagttcttggactcttggtaaaggtccagccgttgcgacttaaatgttagtgccattctagtttcaacatcctgtttgaaccgtggggtaacctttacttagaggataccgcgccttctaaacttcggaacgaatttcccccttccattaaacgtaacacgaaaaaggaagcgagcacaaaggaatgaaaaggtggttggttcaaaattttttggaacgccatacggtttacagcacgcccataaaagattctcgggagataatttacaaggcaaaacatgggcttattaaaggagacattggtccgttgagatgaaagagnggtgcgtataggcgtggagggtatggcttttttaaccttgtttcgttggacggacataaggaagaaaggaaaagggtcgttgggcggagtcaacattgggcccgcctatggaaatcggaacccgaagaaggtnaaatgaagggttggaaaagcaaattgggttattacggagaaaggagagcactgtgaaacagcaaaacactaggggacgggaaagaaatttaccgttggaaggagacatttttgacntgtgagttgagaagacccttgttggggcacaaagcgcacatgttttgtgcatcttccacatggaaagggattggtggtagggtttgagaaaaccttc

SEQ ID NO: 507409 - DNA, 850 bp, Homo sapiens
ccagctgtacgctccggattacgggatctggctcccgggcggacggagccgcacggtagtagatgggtggtgtggccgtggcccccgactctgctcggcggggccgttcctgctttgccgtccgtgtgggacttccacgacagtggaggcacgagagctgggccccatatgctgcttgcccatgcttgggaaagaggaggctgctgcaaaggacctgatcggcgggtaccgtacagagtgtgatttgcatgtggcagtggcatgtgagcccctcttcccctgcgccgttctgggaggttatctacggcagccaccttcagggcaacctgtccctcctgagccccaaccacagtctgctgcccccgcatctgctgctcaatgccagccactggcgccttcctgcccctcgggctcaagggtcaccatcgtggggctctaccttggcctgtgtgtgtcggagggctcctggggaactgccttgtcatgtacgtcatcctcaggcacaccaaacatgaagacagacaccaatatttacatcgttaaaccttggcccctgtgcggaactctggtccatgctgacgctgcccttccagggcacggacattccttcctggggcttctgggcagtctgcggaatgcgctgtgcaagacagtacattgccatatgactactaccaacatgttcaccaagaaccttacccgctaacttgccaatgacgttgtcggattcgagtaatgtaagccattcttggcagcgccatcacggttgcgctcgaaggggtccggacggtccgaggaaaaaggcccaaggcttggtaaaagtgtgccattcttgggcctggccctcatg

SEQ ID NO: 507410 - DNA, 136 bp, Homo sapiens
catgacagctccattggtgatcaagaccaccacagcggcaggtgagtgccaagttgtacatcgtgcattgtgtctggacctgagaggccgtgagctcgcacacacatgacttgcactctcgccgcccccccaccct

SEQ ID NO: 507411 - DNA, 186 bp, Homo sapiens
cgtagtcccagaggaagaggagttgtacccatgtcagagaggatacaggctaaaaacaatttaacagtttatggatgatggaattgacttaaatcgaacctaaattggaatgtgaatctgcatgtacagaagcctattcccaatctgatgagcaatatgcttgccatcttggtggccggaactcgg

SEQ ID NO: 507412 - DNA, 172 bp, Homo sapiens
  misc_feature (162)..(162): n is a, c, g, or t
agttaacaaagtgctgtcacctatattgtttcatttgatcctcacaaaaagtttatgagattgtttaactctccttcagaggcaggacagcctaggcccagagaggacaagtggcttgccaagaggaatacagtttcttagtggcagaagctcaaatccagnttttctcacc

SEQ ID NO: 507413 - DNA, 188 bp, Homo sapiens
acacagtccaagcagttagctacaggccccgagcagctggtttagccaatcctcgaacctcctcatgggatggcaagaccagagacgcctggagccctgatacctactccagccctctgctcctctcactgaccaggaaacttcccttaagacacgacagccctaccggtcatctgcagccccagaca

SEQ ID NO: 507414 - DNA, 437 bp, Homo sapiens
ggggcggttttcagcggctacgcgcatttgtggaagaaacccgagacgttccgaagtcaaggcaagctaaggggagtgcgggtcggcgagggatattctttcggaaacgtcatattggcctcggggctctccagccctttgggacttccaatgggatcttagaagcagccgatgcagcgtgagggcggcagcccagggccagccacgattcgaacgctctgccttgcagctcttctggaccgaggagcccaaagccctacccttaccattcaccaggtcctgtgcgaagagcagagtggaggtgggctgtggctagaaggtgcagagcgtgcaacaagattgctagctgggcattggacatctgctcttgaacaggccctgggcctgccataggggaagttctccagggatcagttctcatgcgcgcgtacactggg

SEQ ID NO: 507415 - DNA, 365 bp, Homo sapiens
  misc_feature (42)..(42): n is a, c, g, or t
  misc_feature (44)..(45): n is a, c, g, or t
  misc_feature (255)..(255): n is a, c, g, or t
  misc_feature (318)..(318): n is a, c, g, or t
gtctcccccagtagccgggattacaggcatgctattgttttncnnctttttgtatttttagtagagacgaggtttcaccatgttggccaggctggtctcgaactcctgacctcaaatgatccacttgctttagcctcccaaagtgctgggattacaggcatgagccaccgcacccggccggcagttatctttcttaagtagcagttctatttctcagtataaattaatgctgcagttcctaaaccatttgctgangtgcctcagaacccagtagcaagttcgtggggcacagggataagttcttcaaggggaaggcgnttgcaattattggaacatttatttggaattatttcagggaaccacca

SEQ ID NO: 507416 - DNA, 111 bp, Homo sapiens
gggcacagtggcttacgcctgtaattcccaagaaagtttgggaaggccaaaggtgaggcggatcaatgaaggtcagagacagattagatagacaccagacctgtgacaaag

SEQ ID NO: 507417 - DNA, 270 bp, Homo sapiens
atcccccgtgacttattactagtatcaacatcacaagataaagacactactggtatcacctgcccatatcctccttagtagtcacccaaagacatttgactactagactgtggttaattagataacttatacttgactaccaatttaccaatgcttttgctttccctcaccatcttattcccctatgggccccccaaaagatggccagcagcttgctatgcagcagcgtgcatgcaccaatcaacaacaggcagcaaccactcagcaggc

SEQ ID NO: 507418 - DNA, 201 bp, Homo sapiens
aggcgatagaaattgaacctgcgcaatagatatagtaccgcaaggaaagatgaaaattataccagcatatatagcagggactacccctatacctcctcataatgaattactgaaatacttgcagggagccaacctagacccccaaccaacagctactagcacactaagggcacacccttatgacaaatatgggagattaga

SEQ ID NO: 507419 - DNA, 177 bp, Homo sapiens
ctaagatccgtcggacaggggacggcgggagaggtggttctgtgtgtgagccaggcatccagacgtagggccaaaaaaggggctagggtgaggggacctaaaacttgaactccttatatttctggctgcccccacggcggtccgggggctgagctttccgtttttttctgcttctgt

SEQ ID NO: 507420 - DNA, 144 bp, Homo sapiens
aaaacttcaatggctctccaccaccttggtagcatcaaaaacttttcacaacattcccgcatttgtttaagaaagttttcacatttggccaggtgcagtggctcacaagtataatctcagcagtttgggaggctgaggcggccg

SEQ ID NO: 507421 - DNA, 111 bp, Homo sapiens
ggatccccatcatttccctgacaaatggaataggaccgcggtactatatagtaggtaatcaggaactgacggccatgattcatgacgggacaggccgaggagacattcgta

SEQ ID NO: 507422 - DNA, 789 bp, Homo sapiens
  misc_feature (515)..(515): n is a, c, g, or t
  misc_feature (652)..(652): n is a, c, g, or t
  misc_feature (697)..(697): n is a, c, g, or t
  misc_feature (707)..(708): n is a, c, g, or t
ggtggaccggatctttgccatgatggataagaatgccgacgggaagctgaccctgcaggagttccaggagggttccaaggcagacccgtccattgtgcaggcgctgtccctctacgacgggctggtatagtcccaggctggagctggatgcctgggaaccactcacctccttctgtgccatgaggccacctcagccctgacaccaaccccgtgcgtccacccagccttcttccgcatccacacacagccctgacaccaaccccgtgcgtccacccagccttcttccgcatccacacacagccggctgcccttgacccgggaggccccggctctcctctcccctgtcctgcacccatcccccgcctgaagccaccggctccaattgccagcaacctctgcttgtccggaaaacgacaacacgaaatggaaaaggctacagccctctgcataaaccaaggacttggctgcctcgcaggcagcctccgttcctcccgctctcttgcgcgtgtgctttngttttttattttgaacagacgttttaaaagaaaaaaaaacaactaccttctgtcctagaagacacagactgacagatggggtgaaggcctggggacctcagagaactctgccttgccctcatccctcgtccttcggnagccggagaggctgtgggtgggccgagggtgtctaggggttctgnctagtcaacnntatttgtcgtcccatctttgggcagcaaaacacctgcgtggctaggatgattactatgaggatgatgaatttgtgtgataa

SEQ ID NO: 507423 - DNA, 846 bp, Homo sapiens
ggtcggcgaaaacggagggcgctgcggtaaggagcagccgccagaggcacagcgttcgaagcctcccgccgtggttttgtcagcccccgggtgcgggggcccggggtcagaagcgccgctctgaggttcagtccctaatcgatgaaacccggtgtcctcccagccggaggttccttcgggaaaggggggggcagggtccggttgccttggagcagagaggcgggactccttcccgagaaccagggaggagagaaataaaagcacagaccaaaccaggcggatacaagagcagagtagacaaatagatatgcacagaagcgcgacaacagacaaacaaaagagaagcaagacgaagaagaaagcgccagaaacaaagagaccacaatacaggcgggggagcagccccataaagacgcgggcgaaggtagcagaggacgctcgcacaacaagtaaggacaacgcgtcggtcatgtacgacaacaatacagggggtgaggagacgcgagaccaactagtttatgaggcaagagattgcagatacactcacaagactcgggggggagaacgatcgcaatcaaacaagagcacagcgagagagaacgggagcggcagcgaacacatgcgcccgactctgacttagattgctcgacaaaccaaccaaaccagcgccagccgcgtgaagagcagggcgcgctggtgggtgagcaggaagaaggagaagcaccgagagacaaacacagatagagagaggatgtgtggtgtgggaaggtggacgcgctctggtcgcatccaacggcagcagtaggcgcgaccggacagcgcgagtgggaggacaggacacacgaa

SEQ ID NO: 507424 - DNA, 668 bp, Homo sapiens
  misc_feature (394)..(394): n is a, c, g, or t
  misc_feature (531)..(531): n is a, c, g, or t
  misc_feature (576)..(576): n is a, c, g, or t
  misc_feature (586)..(587): n is a, c, g, or t
gcggccgccgaggatggggaaatccaacagcaagttgaagcccgaagttgtggaggagctgaccaggaagacctactttaccgagaaggaggtccagcagtggtacaaaggcttcatcaaggacagccctgacaccaaccccgtgcgtccacccagccttcttccgcatccacacacagccggctgcccttgacccgggaggccccggctctcctctcccctgtcctgcacccatcccccgcctgaagccaccggctccaattgccagcaacctctgcttgtccggaaaacgacaacacgaaatggaaaaggctacagccctctgcataaaccaaggacttggctgcctcgcaggcagcctccgttcctcccgctctcttgcgcgtgtgctttngttttttattttgaacagacgttttaaaagaaaaaaaaacaactaccttctgtcctagaagacacagactgacagatggggtgaaggcctggggacctcagagaactctgccttgccctcatccctcgtccttcggnagccggagaggctgtgggtgggccgagggtgtctaggggttctgnctagtcaacnntatttgtcgtcccatctttgggcagcaaaacacctgcgtggctaggatgattactatgaggatgatgaatttgtgtgataa

SEQ ID NO: 507425 - DNA, 1081 bp, Homo sapiens
gttgtgttcgctgtgcgcccttgtttctcagagccggtctcccttgttttgctgcggggagtttttccggggtttgtcctggcttttgtgcctatggacggtggacaaaactcgtgtggccctcggattcccggtgtcttggcccccgtctcgccagcgttccgggggacccaaggcgggacacatgttttgttgtgttcccccagtatgagccggtgtggtgtgcgtggtagaacgcgttcttttaccgtagttttagccattctggagtgcccgacagggaggtaagttccgtcccgcagggtgatctctcgcccatgttgccgtgtctccggtgaacgtgtggttgtgtcagccgcgtcttgggtttccccggtgtgaccctcaggtggcccccccgagccctaggtttctgttcccgttccgtccgtgttttttttttgtggagacgccgccctgggccacacgagtgagactctgaccccaaaagagaattttgccgctcccaggcttgaagtcaatttaatgttgcccacggggtaagagcctttggttgaaagggctataaagagctatgagaactatctgagagagtgcccctctttaagtgtccgctagaagcctcgcctggagacccacaagaagttgtgttctcgcctcgctagaagtgggtaaatttgaggagattcactcccgctattttcctcaatggtgacccactcccacagagttactcggttttccactcttgaacttgtaaatgcaccaccccatctatcccatcttgcgcccaccaaaccctggcccaaaatgtgagaaccaaccctggaaaccctgagtggagctataaggagtactatttacaccaattgagttgccctttgcacctttattccaggttgtttcttaaattttggtagaccagatcccatttgtatatgtgtgtgttatatctagtttatggctatagagaaggttttaaatactcaccagtgtcccttccctcaaggtttaattagaagctgcctgccttttagttgttttttgcccttttaattaaatgttatccgttccccccaga

SEQ ID NO: 507426 - DNA, 329 bp, Homo sapiens
gacttctctctacaagaaggccatgattcccagctatctagtagaataaagagtactgcagtataggttgcaaacaggtcggtcatagactgtcaccatggtgtgacaagaagtgatctatgaatgcatttccccccctgctacttaccataaagtgtaaaaagggagttaaaggaaagtttccttgttggttcctaccatatgaaagatgctatattctattttagcagtgccaatatatgggaaatatctaaattaaatgttattacaaaaatgaagcagtaatgagattctggctaaagagggcactaaatgggaaaactgggtgg

SEQ ID NO: 507427 - DNA, 741 bp, Homo sapiens
  misc_feature (467)..(467): n is a, c, g, or t
  misc_feature (604)..(604): n is a, c, g, or t
  misc_feature (649)..(649): n is a, c, g, or t
  misc_feature (659)..(660): n is a, c, g, or t
ggtggaccggatctttgccatgatggataagaatgccgacgggaagctgaccctgcaggagttccaggagggttccaaggcagacccgtccattgtgcaggcgctgtccctctacgacgggctggtatagtcccaggctggagctggatgcctgggaaccactcacctccttctgtgccatgaggccacctcagccctgacaccaaccccgtgcgtccacccagccttcttccgcatccacaccacacacagccggctgcccttgacccgggaggccccggctctcctctcccctgtcctgcacccatcccccgcctgaagccaccggctccaattgccagcaacctctgcttgtccggaaaacgacaacacgaaatggaaaaggctacagccctctgcataaaccaaggacttggctgcctcgcaggcagcctccgttcctcccgctctcttgcgcgtgtgctttngttttttattttgaacagacgttttaaaagaaaaaaaaacaactaccttctgtcctagaagacacagactgacagatggggtgaaggcctggggacctcagagaactctgccttgccctcatccctcgtccttcggnagccggagaggctgtgggtgggccgagggtgtctaggggttctgnctagtcaacnntatttgtcgtcccatctttgggcagcaaaacacctgcgtggctaggatgattactatgaggatgatgaatttgtgtgataa

SEQ ID NO: 507428 - DNA, 332 bp, Homo sapiens
gtagctcgggaagacgcaatggtcagaccgaagacccttcgcctttgggtgacagttccctttcctggctggaatctttatttcttatcttacttggagacccggtcttgctttgtcacccaggatagatggagtgtggtgtcttgatcacggctcacagtagccttgaactcctgggctcaagcaatcctcctcacctcagccccctaagtagctaggactacaggcgtctgccaccgcaatcagctaattttcatatatatttgtagagatggggtttcaccatgttgccaggctggtcttgaactcctaagctacaagtggtctgtccg

SEQ ID NO: 507429 - DNA, 561 bp, Homo sapiens
ggtcccttgcactttaagaggcaggaccagcagagtgcagcctgggcaacaagagcaaaactcagtctcaaaaaacaaaagaaaaaacctgtgggtatagtacgaaagaaacgtcttgcagttttctgtggcagagaattaattagaaccaacctgtgggattatacacattcacctttcagaatcctttcttctctgtggaaaccccacatctcagcagtgtgtgggaaccacgcgtagattcttaagcgaatgctgtgtggactgttgcagttctgcattcttcttgaagtaaccagaacctgtgtggtagctgtttacccacgtaccacactgtgtctaaaggacctttgtgaaccttaccgatgtaacgacgacttaatgtgcacccaaaggcgagtctcttaagttacttacaactgacattatttcacacagaactctttacatttgacactttcctggtgacagtctgggaccttgtgtaccactcatgtcccttgtgttcaaaaccagcccctgaaacacgaaccacattaaggcaattaacgatacgcatta

SEQ ID NO: 507430 - DNA, 147 bp, Homo sapiens
tcgagactgaccgaggagagcatagcagtacgtcctgcaacaccagataatctgaattacaaatataactaggaacacattctactacatgacttgcgagcatatataatatatcaacattcaccctctctcatcacgctatttcct

SEQ ID NO: 507431 - DNA, 101 bp, Homo sapiens
ccccccggggcccccccttgggtttccttccccttggggggggggggggtttggcttttttttttttcccccccccccccccttttttttcctttttttta

SEQ ID NO: 507432 - DNA, 825 bp, Homo sapiens
  misc_feature (4)..(4): n is a, c, g, or t
  misc_feature (72)..(72): n is a, c, g, or t
  misc_feature (85)..(85): n is a, c, g, or t
  misc_feature (117)..(117): n is a, c, g, or t
  misc_feature (119)..(119): n is a, c, g, or t
  misc_feature (127)..(127): n is a, c, g, or t
  misc_feature (129)..(129): n is a, c, g, or t
  misc_feature (132)..(132): n is a, c, g, or t
  misc_feature (139)..(140): n is a, c, g, or t
  misc_feature (159)..(160): n is a, c, g, or t
  misc_feature (169)..(169): n is a, c, g, or t
  misc_feature (176)..(177): n is a, c, g, or t
  misc_feature (186)..(186): n is a, c, g, or t
  misc_feature (188)..(188): n is a, c, g, or t
  misc_feature (205)..(205): n is a, c, g, or t
  misc_feature (227)..(227): n is a, c, g, or t
  misc_feature (230)..(230): n is a, c, g, or t
  misc_feature (241)..(241): n is a, c, g, or t
  misc_feature (286)..(286): n is a, c, g, or t
  misc_feature (326)..(326): n is a, c, g, or t
  misc_feature (328)..(330): n is a, c, g, or t
  misc_feature (333)..(334): n is a, c, g, or t
  misc_feature (346)..(346): n is a, c, g, or t
  misc_feature (349)..(349): n is a, c, g, or t
  misc_feature (362)..(362): n is a, c, g, or t
  misc_feature (378)..(378): n is a, c, g, or t
  misc_feature (384)..(384): n is a, c, g, or t
  misc_feature (390)..(390): n is a, c, g, or t
  misc_feature (393)..(393): n is a, c, g, or t
  misc_feature (401)..(401): n is a, c, g, or t
  misc_feature (405)..(405): n is a, c, g, or t
  misc_feature (410)..(410): n is a, c, g, or t
  misc_feature (444)..(444): n is a, c, g, or t
  misc_feature (461)..(461): n is a, c, g, or t
  misc_feature (463)..(463): n is a, c, g, or t
  misc_feature (478)..(478): n is a, c, g, or t
  misc_feature (480)..(480): n is a, c, g, or t
  misc_feature (495)..(495): n is a, c, g, or t
  misc_feature (498)..(499): n is a, c, g, or t
  misc_feature (516)..(516): n is a, c, g, or t
  misc_feature (523)..(523): n is a, c, g, or t
  misc_feature (555)..(555): n is a, c, g, or t
  misc_feature (557)..(557): n is a, c, g, or t
  misc_feature (561)..(561): n is a, c, g, or t
  misc_feature (564)..(564): n is a, c, g, or t
  misc_feature (566)..(566): n is a, c, g, or t
  misc_feature (582)..(582): n is a, c, g, or t
  misc_feature (656)..(656): n is a, c, g, or t
  misc_feature (663)..(665): n is a, c, g, or t
  misc_feature (667)..(667): n is a, c, g, or t
  misc_feature (672)..(672): n is a, c, g, or t
  misc_feature (675)..(675): n is a, c, g, or t
  misc_feature (819)..(819): n is a, c, g, or t
atantgctgcaattaaacccaggcactcctctttatgctgctcactttcgtccaggacagtatgtggatgtnacagccaaaactnttggtaaaggttttcaaggtgtcatgaaaagntntggatttntnttncttcccnntacgcatggtcaaacgaanncccacaggngacctgnngctgttgcnantggtgatattggcagantctggcctggaactaaaatgcntgnaaaaatggganacatatacaggacagaatatggactgaaagtgtggagaataaacncaaagcacaacataatctatgtaaatggctttgttcctgnannnttnnattgcttagtanagntcaagatctaaangcctgcatataagganctcggnaaaatnctncattcccnacanatttncctgatgagatgaagaggaactgccagaagattngtatgatgaaaacgtgngncagcccggtgcgccnangatgacattggccgnacnnctttggacgtggcaganccggacntaggctgtgagcggcgatgagccagagggatngnatanccncngggaggcagacccgcnggggggagggacgggggagtgacacatgtcatctttgtcaagggcataaatatatcattcatacccccattaantttgttnnnanaattnccncattaaatatatgagttaagtagatggatttgctgaaattggtgttgggcatattagcaaaatattcttaatttgtggactcgattctttttactacatatttcccaagttatcttaagatgtctgtaaatttaacttttattnatgttg

SEQ ID NO: 507433 - DNA, 309 bp, Homo sapiens
ctatgagcagctaagaatgatatatagactttggggactaagaggaaggtgggggtggtagtataaaagactacacagtgggtacacgtgtacacagctccagttacaggtgcgcccaaatctccgaaatcaccactaaggaatatattccatgtaacccaaaaacaactgttccccaaaaactattccaattagggcccggtgtggttaatccccgcactttgggaagcccaggtgggccgatcacgaagtccagagtccaagaacagcctggccaacattgtgaaaccccatctctctcagcctggg

SEQ ID NO: 507434 - DNA, 104 bp, Homo sapiens
ccgcgcagttatatagcagcgccggtcaaataattgtggtcgagttttgggacgggtagcggatcggaaggcggcacggtggtgcacgctaccatctatcttcc

SEQ ID NO: 507435 - DNA, 842 bp, Homo sapiens
  misc_feature (4)..(4): n is a, c, g, or t
  misc_feature (72)..(72): n is a, c, g, or t
  misc_feature (85)..(85): n is a, c, g, or t
  misc_feature (117)..(117): n is a, c, g, or t
  misc_feature (119)..(119): n is a, c, g, or t
  misc_feature (127)..(127): n is a, c, g, or t
  misc_feature (129)..(129): n is a, c, g, or t
  misc_feature (132)..(132): n is a, c, g, or t
  misc_feature (139)..(140): n is a, c, g, or t
  misc_feature (159)..(160): n is a, c, g, or t
  misc_feature (169)..(169): n is a, c, g, or t
  misc_feature (176)..(177): n is a, c, g, or t
  misc_feature (186)..(186): n is a, c, g, or t
  misc_feature (188)..(188): n is a, c, g, or t
  misc_feature (205)..(205): n is a, c, g, or t
  misc_feature (227)..(227): n is a, c, g, or t
  misc_feature (230)..(230): n is a, c, g, or t
  misc_feature (241)..(241): n is a, c, g, or t
  misc_feature (286)..(286): n is a, c, g, or t
  misc_feature (326)..(326): n is a, c, g, or t
  misc_feature (328)..(330): n is a, c, g, or t
  misc_feature (333)..(334): n is a, c, g, or t
  misc_feature (346)..(346): n is a, c, g, or t
  misc_feature (349)..(349): n is a, c, g, or t
  misc_feature (362)..(362): n is a, c, g, or t
  misc_feature (378)..(378): n is a, c, g, or t
  misc_feature (384)..(384): n is a, c, g, or t
  misc_feature (390)..(390): n is a, c, g, or t
  misc_feature (393)..(393): n is a, c, g, or t
  misc_feature (401)..(401): n is a, c, g, or t
  misc_feature (405)..(405): n is a, c, g, or t
  misc_feature (410)..(410): n is a, c, g, or t
  misc_feature (444)..(444): n is a, c, g, or t
  misc_feature (461)..(461): n is a, c, g, or t
  misc_feature (463)..(463): n is a, c, g, or t
  misc_feature (673)..(673): n is a, c, g, or t
  misc_feature (680)..(682): n is a, c, g, or t
  misc_feature (684)..(684): n is a, c, g, or t
  misc_feature (689)..(689): n is a, c, g, or t
  misc_feature (692)..(692): n is a, c, g, or t
  misc_feature (836)..(836): n is a, c, g, or t
atantgctgcaattaaacccaggcactcctctttatgctgctcactttcgtccaggacagtatgtggatgtnacagccaaaactnttggtaaaggttttcaaggtgtcatgaaaagntntggatttntnttncttcccnntacgcatggtcaaacgaanncccacaggngacctgnngctgttgcnantggtgatattggcagantctggcctggaactaaaatgcntgnaaaaatggganacatatacaggacagaatatggactgaaagtgtggagaataaacncaaagcacaacataatctatgtaaatggctttgttcctgnannnttnnattgcttagtanagntcaagatctaaangcctgcatataagganctcggnaaaatnctncattcccnacanatttncctgatgagatgaagaggaactgccagaagattngtatgatgaaaacgtgngncagccccgggtggggccttctaattaaaattttggcctaaacattctttttgggaaccggttggcggaaacctttacatatctgtgagcttcgatgagccagaatgatatcataaccaacagaaatcataatctcctttcttagtcacaagaaaatcacacatgtcatctttgtcaagggcataaatatatcattcatacccccattaantttgttnnnanaattnccncattaaatatatgagttaagtagatggatttgctgaaattggtgttgggcatattagcaaaatattcttaatttgtggactcgattctttttactacatatttcccaagttatcttaagatgtctgtaaatttaacttttattnatgttg

SEQ ID NO: 507436 - DNA, 100 bp, Homo sapiens
agtacgtgtcatccctcgtactagtgtatctgtcctctctcacttccttcaggcttctagcagctactttctttgtaaatcaatcacaggaaaggggaaa

SEQ ID NO: 507437 - DNA, 140 bp, Homo sapiens
ccacaccacactggtatccacacctgcactggtagtcccacaccgtgcaccgggagtccgacatctgcaccggtgggtgttggggttggggtcacctgtagtggtggtgctgatgggtgtcgatagtggggtctgtgttg

SEQ ID NO: 507438 - DNA, 392 bp, Homo sapiens
  misc_feature (1)..(1): n is a, c, g, or t
ncccccaatgaatgcccaacactagaaatatcccaattgtcactcaataggtgtttttttaaacatactatggcacattcggacattgtaatactacacggaaatgacccggaacaagctattgatacatgagaaaacttacatgggtctcaaggacattctgtttagtgcaggcaaaagagtcaatctcaaaaggtacatattgagaattaagtgcatactatatgattgcacttaataacaccctcaaaatgacaaaactatatagatggagaaaagattagcggattccagaaagataggtgctatgaatacaaatggagagtacaaggaagttcctttgtggagatggaactacacacatgcacacacacacacacacacacacacac

SEQ ID NO: 507439 - DNA, 468 bp, Homo sapiens
tgcgcagtactctaaactaggcggctatggtataatacgcctcacactcattctcaaccccctgataaaagacatagcctacaccttccttgatacctatccctatgaggcatatctaataatcagctccatctgcctagaacaaacagacctctaatcgctcattgcatattcttcagtcagccacatagccctcgtagtaacagccattctcatcgaaacccccttatgcttcaccgagcagcagcattttcgtcatcatcgcccgacgggttaacatcctcattactaatactgccgtaacctcactctcacttgcccaagaaactatcaaactcctgagaccaaacgaacttaatatgactggccttacacaatagcttacaatagtaaaagatacctctttaacggactccacttatgactccctaaagcacatgtcgaagcccccaatcgctgggtcaacta

SEQ ID NO: 507440 - DNA, 132 bp, Homo sapiens
cagatgtggtatggtgtattcctgtgggcactggtgtcttctctggggtttgatgtccctgctggattactggccctcttcaccctcagacatcacaaatatggtaggttcatgtctgtgagcatcctgttg

SEQ ID NO: 507441 - DNA, 312 bp, Homo sapiens
  misc_feature (32)..(32): n is a, c, g, or t
gccatcccccttcgtgtgacctctcgtaaggnaggaatatgaagtagatagaaaccgacctggataactccggtctgaactcagatacacgtaggactattaatcgtagaacaaacgaacctattagtagcggctgcaccatggggatgtcctgatccaacatacgaggtcgtaaaccctataggtggatatggactactagaataggattgcgctgttataccctaagggtaaactagtaccgtgggtcaagttatagggatcaatatgagtataagtagttcgctatggactggtgaagtactatagcat

SEQ ID NO: 507442 - DNA, 688 bp, Homo sapiens
gggcgcaaggggtcccggtggccctcgagggccagaacgcagcccatgccattcaggcttcccctggcccctcaatggggggcaccaagctcttccgaagaagttttcctcggcaaatgaaaagaagcttcgccggccttttggatgtttttatggctggagtttggtgccagctccgaccaacagccgacatcttgggctgtcccgtaccgggaatggactcctagttgctaagctcgccctaaacctctgccagcaggggaatcatgtctggatcttcaagatccggcgcaggtatgaaatgtacgcccgggagctctccgaagctgtcaagtccatcttcagccccaccatcgtgaaagagtagccggcttcagtgcctgccttggggtgaggaagacacctctgccccagtggattagcaagtgtggcaggcttaacatgtccagggtcccccgataacattgtccaggttggttttaaaattcccaggcagggggaaagtggcatggggagtgacttcttaatgggtaaggggctgcttacttctggggtattggaaatgtttggggcctaggtagaggtgaatgtcccgtgggccactgaatttgtataaaacccaatgtgtggtatgttgatttcacctcaactaaaaaaaaggacgccccggtatcaataccataaaaac

SEQ ID NO: 507443 - DNA, 160 bp, Homo sapiens
  misc_feature (88)..(88): n is a, c, g, or t
  misc_feature (150)..(150): n is a, c, g, or t
tactgcctgtgtccctgtgctctggaaaaggaacaaagtctggatgatagcacatctgtttacaggcatggtttactgaatatttaangcccactattgagatctactgctcagaaaaaagtattccctattaaaaatattattggctcncgttgacaat

SEQ ID NO: 507444 - DNA, 204 bp, Homo sapiens
gaggatcttttggaggcaggacactgactacctacactccagactgggaggaagtcgtgctggccacaaagagagggctcggtgcctgctccatgtcccagccactagagtccttctgggtgcctgcttcacgtacccagccactagagtcctcccagatgagaccagggaaatcatgaagcagccaacccacattgccctgtc

SEQ ID NO: 507445 - DNA, 303 bp, Homo sapiens
  misc_feature (87)..(87): n is a, c, g, or t
atgggtcccctccaggttattaaagggggaatgtcccctgttttaacattaaagggcaggtggtgggccatggccatggtccccagntaaggagcaggtttccctgagaacccaaatttcccagagagtatgtgagacccaaccaatgaaaacagtcccttggtttttacccggtaagtaaacagtcaaaaaattagcatgaaaccagtttagcattgggaggaagctcagttttttaaagtttttttttccccccccaggattgacctgtgtgtaagtcccaataaactcccctattcttca

SEQ ID NO: 507446 - DNA, 237 bp, Homo sapiens
acacacactgggacctgtaggagggtggggggagggagagcatcaggaagaatatctaatgaatgctgggcttaatacctgggtgatgggataatccgtgcagcaaaccatggcaaacatttacctatgtaacaaatctgcacatcctgcacatgcaccactgaacttaaaataaaaattgaatttaaaaagtttaaaaaattaaataaaacctaattttaaaaagtaaaaaaaaaa

SEQ ID NO: 507447 - DNA, 870 bp, Homo sapiens
accacgctgacaccggaccgcgccctcggcagttaaacctacggcacgaggccgcgcaccgcccctctacaccaccggccgcgagggcgcgcataccacacctaccacgcctgcgccgccagccggccccaccccccccgcccctacaagaccacctccagcccccatatcctacccctaagccgcgccgcacgccccccgcctcaccctccccacccccctccacgctccctccgttccccctctccacgcgcctcgccccccctcgctcgcccccccccactccgccgccccccgcttcctccgcgccccgctcgcctcccccctgcctcacccccccctcgccccctcccgccccccccccccccgcccccccctcccccctcggcccccccccccccccccccgcccccccccccccccccgcccccccctccccgcctcccccccccccccccccccccccccccccccccccccccccccccccctccccccccccccccccccccccctcccccccccccccccccccccccccccccccccccccccccccccccccccccccccccccccccccccccccccccccccccgccccccccccccccccccccccccccccccccccccccccccccccccccccccccccccccccccccccccccccccccccccccccccccccccccccccccccccgccccccccccccccccccccccccccccccccccccccccccccccccccccccccccccccccccccccccccccccccccccccccccccccccccccccccccccccccccccccccccccccccccccccccccccccccccccccccccccccccc

SEQ ID NO: 507448 - DNA, 351 bp, Homo sapiens
ttaaggatccgcaggtgttctggtagagaggcccaattctgatgaaccacattcccagagaagtacggcagggatagggcttccgtgtggctcagagacggaatggggagttaagcaaaattttctatcttggggaaagggaggaggtgctagcagagtgagggttaaagcttgttgccagcctcttggacgggtggggcctcccgccttcgcctgacattgggacaaaggggccacgggtgggcaggcagcgcatgggttcttgtctctggcacgggcagaagggcggcaggagcagaatccctccaggctcaagaacacaggcccagcactgttaaccacaaacacctg

SEQ ID NO: 507449 - DNA, 773 bp, Homo sapiens
ctgtggcgagttcatagaaaggccacccgcggcgaagtcatctcctggtggtaatttggaaagccccccctctttttcagaggagggaagaacccacggtcttcaaatgcagagggcttccctctccaatgaggaaacgaccaacagtgggtgacatatagccaccacctattggtgtgtctctatcagaaagcttcgcacgccatcctttggggtgtccttaactagattgtgtatacacgcttcgtgcgaggaaattacctattatttggtggcaaatgaggagtgcggcaatacacacccacgcaagagttgagtctttctgtaatgcgtgccacaccaggatgagatggagtcactagatggtggccgccacgactcagttatgacacactccggtggggtgtgtttctttcttaggcactcaagagatattttaaacagacgatatagttgtgtgggtgtggtgcgagtgtgtagcgagtagacacagagagagaagataagtgcaattaagagatgtgtgtggtgacacaacttgctggaaaaatggacacctggcgcgaatcggtggtggatgaacctcccagctcgtggtgccaccaaggagccgcgtgcagactagggggaccttgacgcattcccacccccagagacatcgtgtcatgagtcataacgtcaggaacaacgggggtgacacaacaggcagttagccaccccctatgggtgagggcaagaaggaacaaaaaataaaccgggcaatcaaaggcgaa

SEQ ID NO: 507450 - DNA, 190 bp, Homo sapiens
ggtgtgaacacaaaagatcaattaagaaccaacagagttaaatctctaaggcaaatttgggagtttaagaaaaatcaaactggcaataaggatatgcacagcataagtacattaactaccaatttactacttactaaattattagacggaaaactataggacgaaaacagcatcaaggaaagggaaactt

SEQ ID NO: 507451 - DNA, 435 bp, Homo sapiens
  misc_feature (10)..(10): n is a, c, g, or t
  misc_feature (37)..(37): n is a, c, g, or t
  misc_feature (60)..(60): n is a, c, g, or t
  misc_feature (100)..(100): n is a, c, g, or t
  misc_feature (145)..(145): n is a, c, g, or t
  misc_feature (165)..(165): n is a, c, g, or t
  misc_feature (179)..(179): n is a, c, g, or t
  misc_feature (184)..(184): n is a, c, g, or t
  misc_feature (191)..(191): n is a, c, g, or t
  misc_feature (195)..(195): n is a, c, g, or t
  misc_feature (279)..(279): n is a, c, g, or t
aaaccatccnccactcacagacccaagacctggctantgtactaaaaggaaggtctgagncctctacgtagctaaaactcagattcagtaggagtgatgncagagtagtgaagagctgataaatagagtaagttgaacttgtaancagacactgattaaaactgngggatcaaaagtanctccntgttgangttnccctgaaagacagaatgtacactgctctgtgaaataagcctgtaaaaaagcagacatcctgttagctgcaggttgataaacaancgggagaagtacttaacagcaaagacagcttccatacctgttcagcaagttacactacatccacagcaaaagcatgatgaaatcaaggccttgtgctgtgtcactcaaacaaccactccagaaccctgatgcctttcttggggttactgttaatgc

SEQ ID NO: 507452 - DNA, 437 bp, Homo sapiens
  misc_feature (15)..(15): n is a, c, g, or t
  misc_feature (60)..(60): n is a, c, g, or t
  misc_feature (63)..(63): n is a, c, g, or t
  misc_feature (69)..(69): n is a, c, g, or t
ccaaaaaaatccgtncccccctggcctaagaaaaaggaatggccttgtaaaaacctaaanatnccctanaatctggcccatgtgggtcttgggtggaggaaagtgagagcacccacatggctggggctgagattttgcatagatctttggggtctgtcagggtgggaaatgcaggcaagcctaggattaaccctggaaggcctgcgaaaggagggtggggacagtccttggaaggcagctgcccttaaaactagcccagctctttctggatcgggcaggacccctgaagctgttcacagtccctgtggcatgtaggaaaccaaggtgtctcaggacaggaggagacaaggagtggctattgggaaatcagctctggcctccccatgagggctaataaggggcaaggacgataggtcctgtggcagggcggacagctc

SEQ ID NO: 507453 - DNA, 327 bp, Homo sapiens
aaaatagtactatcaagaaaatttttaaatgaacagcctagggccaggtacagtggctcacacctgtgatcccaacactttgggaggcccaggtggaggattgcttgatcccaggagttcaagatcagcccggcaatcacagggagactccatctctacaacaaatttttaaatttagctagacatgatggtgcattcctgtgattccagctactcaggaggctgaggtgggagaatcacttgagcccagttgaggctgcagtgaactgtgttcatgccactgtactccagcctgagcaacaaagcaagaccttgtctcaaaaaaaa

SEQ ID NO: 507454 - DNA, 356 bp, Homo sapiens
  misc_feature (100)..(100): n is a, c, g, or t
  misc_feature (105)..(105): n is a, c, g, or t
  misc_feature (112)..(112): n is a, c, g, or t
  misc_feature (116)..(116): n is a, c, g, or t
  misc_feature (200)..(200): n is a, c, g, or t
ggtggaaaaaggcggactggggggggggttggggttgggataaaagacatcctgttaaacccattagcccttaaatttaaagtaaggggatcaaaagtanctccntgttgangttnccctgaaagacagaatgtacactgctctgtgaaataagcctgtaaaaaagcagacatcctgttagctgcaggttgataaacaancgggagaagtacttaacagcaaagacagcttccatacctgttcagcaagttacactacatccacagcaaaagcatgatgaaatcaaggccttgtgctgtgtcactcaaacaaccactccagaaccctgatgcctttcttggggttactgttaatgc

SEQ ID NO: 507455 - DNA, 198 bp, Homo sapiens
ccaaggcccaggctttggtgcagtacctggagagcccctcacccaagtgcggcatcttaaccgcattggtgaaagctgggtcaagaaaagagaattgacaatttgaagggcgggccttcctagaagaaccttcttagacaatggggggaggatgggacttttttttttccaagaataaacttcaactcctgaaaaaaa

SEQ ID NO: 507456 - DNA, 398 bp, Homo sapiens
aaagtagttacgaatctgtgataaaggatggtagctgatggggatggcatagaatctgtaaattagcttgggcagtatggccattttgacgatatcgattcttcctacccatgagcatggaatattcttccatttgttggtatcctcttttatttccttgagcagcggttggtagttctccttgaagaggtccttcacatcccttgtaagttggattcctaggtattttatactctttgaagcaatggtgaatgggaattcactcatgatttggctctctgtatgtctgtagtcggtatataagaatgcttgtgatttttgtacattgattttgtatcctgagactttgctgacgtcgcttatcagctgaaggagatagagggcacacattatggagg

SEQ ID NO: 507457 - DNA, 1346 bp, Homo sapiens
attttgaatgagtttgacactgccggcttccttccatccagcgaggtggtgctgcacagtgtggcacttgcagcacacttcatgcccaacatgcataatgcatcactgcacttctggttgggcagctctcccaaagcaacactgggttggttttcaagcaacaatcagtttcacgacagttccaactcatcattcttttcagcatcattcatgtcatttgttttcactcgtgcattcaggttcactgtgcatcaggccatttcattccatattcgtttcctatcacccacatgtccattcaatcatcattcacacaacacagcatgatatgtagtatcagcacatcatcgcacacaggcgccttcattcttctctattcttccatcagcactagcaccatatctttctggcacattgtcttgcacgtccatatctcatatcattaccttcagcgtatcttgtcacaacttcacaacattcacacggcgccacagctgcacaacacagtcacatcacattctgggcgcatatcattttcacagcgcgtcacccagcacattgctgcatctcctatatccacatttgttcttcatctcaccaacatgggcctcagtctgcggcaccaggccacacccacaatcttgccacacacaggttgggacacaggcacatctccatctattagcggtccaaccacaggcatatcccggcctatcatcactctctctccggcacacgccctatcccattcattaacacatcacacagcacgcttgctgtaactaaaccacttcaccaacagcacgccactttggactaacaccccattttatatcccttacttctctaacaacgtttcatcacagtcggggccttcaccgacacatgtccaccaagggcaacgaggaccaaaccacaatccgtggggaaaaccaggagatatggacaaattgggacaacattttattcaaccttccattatttccttggctggcacacacagacacacacatcccaaaacaagaaggcacatggtcactggcccgaaccccggacaagggaacagcgtcacgcagagcgcggggacacccccggaggacaccgaccactctgcggacttggccaccctgacggggcccaccacacggagccgccccaccggttcggcaccccaccacacgaaaacgggccacaacgcacaggacaacctcaggcacaagccagaaacacgcgcacggaacaacaccacaggacgacaacacccacccaggcacggcatcacatgatctcacacacaactcccccccaatggcacaggcagtacaccacactccaccacacccacc

SEQ ID NO: 507458 - DNA, 187 bp, Homo sapiens
gttggtactagtcactggttggctactagtccactggttggctactagtccacgggtgggctactagtccacgggttggccactagtccacggttggctactagtccacggtgggctggtttccatatggtggcaccgtgtgtggagacttgattttggttcaaaaatgctcttgctccctcttcta

SEQ ID NO: 507459 - DNA, 231 bp, Homo sapiens
aggtgccctaaagatggattacgaggaggttggtgtgcgcttctgtaagaatgatggggtgaggaagaatgcgaggaatactcattatccattccttttggccctgcagcatgtcatgctcccagaatttcagcttccgcttacctgacagacgttaaagctttctggttcgattgtattcacttgagtaatcatgtcttataccatgtgtacctacctatttcacaatcg

SEQ ID NO: 507460 - DNA, 472 bp, Homo sapiens
cacgaggagcggcgagagcctgtggagcaaagggcagaaggcggcggtgatgcacctgctcgattacgtcgcctcgggcgaccaggccgactacgcggactaccgccgcaacatcggcatcacgctcggcgaccgccgggcacgcgaagcactcgaccggccggacccggaccgcgctgccgcagcccaaggcttcctcgatggcggcaacgacgtgggcgacgtgcccagcctgatccgcctgttcgtctggttccgctgggcgccaccgatgcgcgacgcgatcgatctgtggaccgaaggcgaccggctgatcggcgagatcgatgcggtagcgcgcgtggcccacggccagatcagcgccggcagcctgacggcggacgagcgcgcggtactgacgctgcgcgtgcgccagctcgacgccacgctggaaacggtggccgtccgcttctcgtggacactcggcgacatt

SEQ ID NO: 507461 - DNA, 225 bp, Homo sapiens
  misc_feature (7)..(7): n is a, c, g, or t
  misc_feature (117)..(117): n is a, c, g, or t
cctcgcntgaacaaaggtgactggtctcatgagccctgaagaatgaactcagaggaggttgtttacatgaggttctcccactgggagggggggagagtctgcaattataaacagcangatcttattacttcaatgagagcatgtaacaagtttctcaaaccaccaacagccaagtggatttggtacagtgcggctgtctaataaataatcaaaagcatttgatag

SEQ ID NO: 507462 - DNA, 680 bp, Homo sapiens
ggctgggcggcctggtctcggataagagggtgagagtggcgggccgttgaataagctttcaaaatgatgcccacaccagttatcctattgaaagaggggactgatagctcctcaagtgcatggccctcgagcttgtgagtaacatcacgtgcctgccagtgtgattgctgaggctgtaagaactaccctgggtccccgtggcatggtcaagcttattgtagatggcagatcggcgaaagccaacgaatatctaatgatggggccactaattccggtgaaacttcgttgatgttggtccatccgtgcagcagaagactttggtagacattgccaaatcccaagatgctgaggtgggtgatggcactcactctccagtgagcttgctggctgcagagctttctgaaccgtcaggtgaaatgcctatgtggaggaaggtttacacccccgagatcatcattcgaggctttccgcagcagacacccagctggcagttaacaagatcaaagagattgctgtgaccgtgaagaaggcagataaagtggagcagaggaagctgttggaaaagtgtgccatgaccgttctgagtctccaagctgatctcccagagaaaggtttcttgtgctaagatggtggtggatgcaggtgatgatgctcgatgatttgtgcagttacaatgattg

SEQ ID NO: 507463 - DNA, 108 bp, Homo sapiens
cctttgctctgaaattccctttttccctctttccctgagttgtattgacccacagagttaatttcctttgtatttttttaaaaaaatattaaaaatccccggtcccca

SEQ ID NO: 507464 - DNA, 420 bp, Homo sapiens
  misc_feature (412)..(412): n is a, c, g, or t
ctgcctcagcctctcaagtagctgggattacaggtgcccgccaccacggccggctaatttttgtatttttggtaaagatggggtttcaccatgttggccaggttgatctcgaactccttacctcaagtgatccacctgcctcagcctcccaaaatgctggaattacaggcttaagcaactgtgcccagccctgttttattttatgtaagtggaattataattatataattttttcccttttgtgcctggcttatttcacttagcaaaatgttttcaagattcatccatgttgtgacatgcatcagaatttcattcctttttaaggctgaataatatttcactggtatgtatatacccgcatatctttatccatttatctgttgatgggacatgggtcgtagaaccatttggntaatgggg

SEQ ID NO: 507465 - DNA, 113 bp, Homo sapiens
atattgttggtcagagagatatttgtctaggctcagccatgctggctctgcagcgagggtccttcactagaacaccatgcatttgtggtggcagcattagtagaaggcactga

SEQ ID NO: 507466 - DNA, 444 bp, Homo sapiens
atcgaagttcaatagcacattgctgcgagtaatccaccccagcgtaaaggcaacccttcagtcaagtttatacagcaaaccctccatagtccatggtcaacagggaaggggtggggacaggtctgccaatctatctaaaagccacaatatggaagaagtattcaattgatatcataaagggctacttaacggttgaatcactttcatacatggatgaaacgggttgaacacaggatccagatgaatcttcggtgggccaagagatgtgccttaatccttgtagatcctgtttgctatatggaactagctttggtacagtagagttatctgactttcgatttatccactgccaatataaagaggagacaggggtgcgggaagcatgacttcattccagaggcttctcagagtacagcatatgctattgaaactgctaaaactagg

SEQ ID NO: 507467 - DNA, 226 bp, Homo sapiens
tagaggaccccgcctcaattttagttctgtcacgctgcctggtgtggactgtcactcagctgaatatggtggggaagtgtccctcaggcacattacataggaaggggacgttctgcctacatccattacatgcatgatctaggactatccggcatgtacatatggtcttaactcacaatacaacaacgcgtgttcaacttgaatgccagtcatggaaccacagtct

SEQ ID NO: 507468 - DNA, 234 bp, Homo sapiens
aggaccccgaagccgtgggctgggcgtctatgtggttgtggctgtggctctttgtgtccacaggatttaagaactccttggagcatggcaggctatagtgtcggtctgtcttgtctgtgttgtggttcaagaggctgcctgactggcagcaagtcttgccacactggctgcaagaggagcggctccctggatgcagctgagagctgtagtctctgttggcccagctatccatgt

SEQ ID NO: 507469 - DNA, 353 bp, Homo sapiens
  misc_feature (329)..(329): n is a, c, g, or t
cttggattcgtgaacagaccacagtggaccacttctggggtgagtccctgcgagacacagattgtcccgcctacagttggggtgtttctcagattatgctggggagaggggaggcggtggccaggttgtcggtttgcatggattatgctagggagagggaggctgtggccacattgtgggtttgctgcgtgactggttggtaggagcatcagttaggttccaggcttgtcctcagacttgatcaggacgctccttggaagctgcttccatgtgcgccttgtcgggtggtcattgggttatgctaacgtgtagtgactagttccaatggngagatgaagcagcaggtagtaatt

SEQ ID NO: 507470 - DNA, 295 bp, Homo sapiens
tcaagccccaaatggttgggggaggggcctatacaaggctccaggccccacctcctcctccatactttcaggggtgcatctggccgctgctgtggtgaccacactgatcctgaataaaatggatggatctaacatacatggaatgcttacagatcatgacctgaggagggaggatcgtggtcaactcagagttgcctcttcctgcaacctcacctccacttgcccccatcataggggcacttaccccatcccatgctgcttattaagcacagttcccatcatactctcctctcaa

SEQ ID NO: 507471 - DNA, 977 bp, Homo sapiens
  misc_feature (112)..(112): n is a, c, g, or t
  misc_feature (402)..(402): n is a, c, g, or t
gtgctctttctttttttgatgtgccgctgctgttctcttttcgttagcgcgtttggtaggggtgttaaataaaaggaattcgtggggggttttttcttttctctcggtctcnccttctgcgtcttctctactgtgctggtgaccttgtgtccggcgcttctctcgtgttcgtttagtgtctctgtgcgttgggggtcgtgggtggtggtgattcggctcgcgccgaggggggatccactttctcggcctggcgcggccttcgctcttccgtcttcgggacggggaccttgacacacattgatgatagctcctccatttttctctcttcacctctcgcgtggcgggtattttgttttctctcacccgctgagcatatgtttttttctccgcgcgcgggttgcnctctctctctcgcgcgcgtggttctgtgtgtttttctgtctctgtcgtgggggcgctgattgcctgcgtcgtggtgttgtggttccccacgcacgctagtatgtcggtctgctcctcacacgcactccactcgcgcgcgggtgtgtttctattcttacatagagagggagcgcgcgcccctcttctgtttggtcttgtattgtatgttattctttgtttggttgcgtatcccgtatgcaaacctccctccccgccccctccgctgcgtcggagaggcgacggcgcactcctctcgttggtattgtttttgttatgatactaaacttgtgttttttatgtgtgtgagaagaagcatcattatttgtggcggaggaggatagaatagaatcgagctcttctttgcaaagacaataatgaacataccccaccacgtgggcgccgcaccataattgttctccattaatcgtgtgcgggagagagacaagcgaggtgtcagtatgttttttttttttccccccccccctttttttttttttttttttgggcggggtggttttttaaaaaaaaatgtttga

SEQ ID NO: 507472 - DNA, 245 bp, Homo sapiens
ggtaagagcggtctggggtcaaatcggagctatagctgctggactacaccacaacaatatgggatctgagcggcatctgccacctacaccacagctcatggcaacaccagatccttaacccactgagtgagggcagggattgaacccatgtcctcatggatactagtcaggttcatttactgctgagccatgatgggatgagttcagcaaaaaaagtcacacaatttttttttctcattgcatga

SEQ ID NO: 507473 - DNA, 952 bp, Homo sapiens
aaataggctaggtacgaggccctggtggtttaattcggccgaggcaccgctccctgcccctccggtgccctccagcgaggtggggaaactgaaaggccgctgtctttctttttggtttcctcgtgctcccggtgtgtggagtgctgcggggtgcgcagtgccccctgtttcacctgagcctggcccagcgtgcgcgccaggggcgggggtttctcgcttcacaccggtacggaggaggaaacttgtggggtggctgggaccccgcggcctgggtcctgagtcaggcatgctgaggccgtctgggaagtgactactcactctcggggtttccttaatcccgctccccccgtttgtcgttgggcgcgtgtacgctccgagggaggcggccgctgtgcggacagccatgcattagggcaggggcttcccttattgcggcccggtgatgagcgcgggacccggtgcctcggggcctgctctggcatgcttgccggccggttctgggggagcccggatgccccaagctcctgatgcctcggccggccttgcccccatgggccgggggtcgttcgaacgccacggacgtggggggcttggcccattgtggggggctaagtgcacacatcgtacgtgcggccctttttgggcccatttgacaggtacaagggtgaaacccaatgacacactagttgggtaatggggacctgtgccaccgggtactgagtggggtatcccccccatagaaaaggggagccgggggggtgcacacccccaacaggagtgagacacgtgataccgcgccctggagggtggtacccccccacgtggagaacagtatgaaacatcagggacgaaaggggccaccactaaaggttgtgtgagaacgagcgacccataataatacagtgggaggggacaagcaaccggaggcgcaatatgatactcagcgaggaaa

SEQ ID NO: 507474 - DNA, 393 bp, Homo sapiens
atgtgtcgtaggattcaaattccctggagtactcgaactctgatgtgctactgtctgtcctgtaccttctgattgataatcggttgacgtacttcctgtgccgggatctggacaaccccacagttcacggatcccacggtcagcgccaggcccaggggcaccacgggatgcagaccaatcgctctggatgcttccaccattgattcctcagatgctcggcggattccacgagatgctcgtgctcccatccggcttgctctcttgtatcttgctgcgccttttcctctgcctggcgcctgggatcctgactggctttgttctcaatctcccgaacagcagagtcttgcaccttctcatcatgagcagcgtctgccttcgcttggctgagttcaa

SEQ ID NO: 507475 - DNA, 723 bp, Homo sapiens
tcacctgatagtgtaaccatagttccatatcctcaaatgtgtgtgttctaaactaactttttttttcttttattagagacagagtctcacttggccaggtgcggtggttcacgcctgtgatcccagcactttgggaggccgaggcgggtggatcacgaggtcaggagtcgatgaagccccgtctctactaaaaatacaaagaattaccaggtgtggtggcgcacgcctgtgatcccagctactcaggaggctgacgcaggaattcgctgaactgggaggtggaggttgccagtgagccaagatctgcgccgttgcaccttccagccatgggtgacagagttagaaatcgtggtctcaaaaaaaaagaagaacgggatcgggccaagtgagaatcagcagtggtgagtcgtagtagaatgttgagtcagtgaaaaggtgcgtgggatcaccaagtagggttcggactttcgagacccaagtgtgtcccgatacactggaagataatgttaggtcaacatagatgaaaaatgccaggagttagataggaaatgatggtggatagacgacgtgttggatcacgatgtaacttagggaggctgaaaacataacgagtcggattggagacatggagacatgcacgagggtcgtcgaagggaaacgttgatagaacatgtgcggttacaagaaataactaagagtgaatggttagtcggaagaaagata

SEQ ID NO: 507476 - DNA, 620 bp, Homo sapiens
gttccgcccatttccttgtgatcgaccacccccgcttatatctatttcccccactctatggagaaagtttcacatgagcccacacctcgagtctatactcttcacgaggagaaccacaaaatggttcacattgaatggtcccttcacccccgcggagaagggcgaccacggtgctctatagaccacgagaaattcgcggagaaaaactatggcccacaaatgtacccagagccaccaccccggaatgtcaattctttggtaaatttggaattcacgagaactcacattttggtggtggcacaagacacaactgggctttggcacatgaatttattgagatttccctggagattaatgcacaagagaaaaatgagaaccccaacactatgactctgcaaagaacacatggcctgtaatgaagaaagagaaaagagcctcacaagagaagcacacgaaaaggaaacgcacagagacagagaatgaagaaaatcacagggggagctgcacaaaggccacaatgttggtgctggccaaaagaccgaaggagtaaaggtgctgccatgatgttagctgtggcccctgtggatttttcgcaagaaccattaattaacttaaaactt

SEQ ID NO: 507477 - DNA, 541 bp, Homo sapiens
  misc_feature (180)..(180): n is a, c, g, or t
  misc_feature (345)..(345): n is a, c, g, or t
  misc_feature (439)..(439): n is a, c, g, or t
  misc_feature (499)..(499): n is a, c, g, or t
  misc_feature (529)..(529): n is a, c, g, or t
  misc_feature (539)..(539): n is a, c, g, or t
tttttaagtgtatagttcagtagtaataaatgcattatattgtttttccccctttatctccctccttccccttccctttcctggcttctggtagccaccaatctactctatcttcatgagatccacatttttacctcctgcacatgagtgagaacatatgacatttgtctttttgtgctnggtttatttcacttaacataatggcttccagttccatcgatggctgcaaatgatagtatttcattttttcaatggctgatattccattttatgtatttgccacgttttctttatctattcatccaacaatgggcacttttcctttgctgtgcagaagctttttgntttgatttaatcccagtggtctatttttcctttaattgcctggcttacacaagaagtctgtctgcaccaatgtcctggagcatttccttagtgnttcttctggtagttcatagtttcaggtcttagagtcgctttaagccactttggatttgancttttgtatggtaggaactatggatctggnatctctttcnct

SEQ ID NO: 507478 - DNA, 958 bp, Homo sapiens
gcccaaaaatgtgcattattaaagatagctcgtcaatgccacgtaaggggatttggtttgggtaaactccgcagatttcttggattcaacttcttttgaaggatgtccccgcaagtccccgcacacctcctcttgagaagggaggggggcaaaagacttttcggtaaatatttccagttatgacctccaagttcccaggattaggcccctggagtaagtttgaagccccacagttgtttcccatcttttcagatggatgcctactgtggagattaactttggcataattcccagtgtccagcttttctttagcctggaattggcccaatcacatttgttggtccccgctgcttctccactggggccccacgctctttttttttccaaagtttagtaatagtataatccacacgttgtttgaaatcccaaagtagaattactctttaaagtagattttttcttccacttattgtccacttggcgctgtttcttaagattttaccccctcattagaatggttaagagacccacttaatagccagattttgccaccaaataatattttcaccattctggatccattccagattcctgctccattggtaatcctttgtttgttagaaacaccacaatggatggaaaccacattaggggttcttgtaaaccttttgtaaagcctatgaattctctgtttaaattttgggcctgtcttattttcttgcctgaaacccatcgccacaaattggagcctttggtggggcctgggagaggggttatagtatatcatgggaccctttaatattgtcaccagaaccaccagaacttatattctgtccagttatttaatacaccattgaaaattttagtgaaatagttccaaagagaatatagatagtttccccaaaaccacaccatctttatgttaaaaatagtcattataaagatctgttgtaatata

SEQ ID NO: 507479 - DNA, 274 bp, Homo sapiens
tgctcagaaatcgcgtctatcgattacggaacaggcacctctagaagggatatgaagcaccgccagtctctttgagtttaaagctgtggctcgtagtgtactaggcgagcagattttcgtatgattcaactagttagaggttaagaggctaagacatagatgaggtattaaatacccagattcggagtcttagctatttgtgtgtacagatctgtcaaatgccacttatcgtaagtactatttatgtagtcacctgtgagttgtttgacaaact

SEQ ID NO: 507480 - DNA, 406 bp, Homo sapiens
  misc_feature (1)..(1): n is a, c, g, or t
  misc_feature (41)..(41): n is a, c, g, or t
  misc_feature (67)..(67): n is a, c, g, or t
  misc_feature (199)..(199): n is a, c, g, or t
  misc_feature (208)..(208): n is a, c, g, or t
  misc_feature (225)..(225): n is a, c, g, or t
  misc_feature (364)..(364): n is a, c, g, or t
  misc_feature (368)..(368): n is a, c, g, or t
  misc_feature (374)..(374): n is a, c, g, or t
  misc_feature (400)..(400): n is a, c, g, or t
nttcacccttcctcctcccctggaatccagtccaatgccanagttggggatgaggtgaaaacaaccnccctctggggaaccctttccatgacaatttaacagcagaccataaggcaaccttaaaaatacaattttagaatccccttcaaactgtagatctacacaccccaacaaacagccatatggaagggtgtgtganattatctcncctggatagaccacgcncctgggggcggggggtggtgggtcactccttgattagaaaagaatgttgctaattatactcatgtttgtcttatgttatttactaattttaggatgaaagccggaataagagcaatgaccaccatgcctgacagacccntgtngcgcanacctgtactctccaatgaacaagacngaagtg

SEQ ID NO: 507481 - DNA, 665 bp, Homo sapiens
caagtgatgacaccattgctgacatgactgactataggagatagtgatgagtcccatatgccgtatctgtgtgctgccaggagagtcgctgattgatctctgtgaatctcgcacgtataattctgcagagaggatagtaagccgagatgacatcagatcttagactgcacagtgaggagcattcgtgtgcgcttgtacagtctagtgtatcgttgtccactgacacaccgttctgggccatacagacgataatccgttgttcctccggacaaaacttgagcaaaggaatgtacgtcgccgacgtggaaaccgggcgaatgaggcagacacaggctcttgcagaccaatttgaagataaaactacatctgtattggaacgcctgaagatttgcgtattgctgtcaagtaccacgctcactgggccacttcagcgccaacttgcgaagttatgtctctctgagttgggatgtaccagttcaggcccttcagatatttgagaggagctagaaatgtgggaagatgttgtcatcttgtgtatgaacagagccgggcagcacggcaacggcagaagaaatccttagacaagagctggagaaggaaagaggaggcctagttaatacgggttgtttggagatgtcctcggagaccattcttggtatgacaag

SEQ ID NO: 507482 - DNA, 302 bp, Homo sapiens
ccatgagcaaaaacacatagcctaaccccattccttgtaacaatccctatgaggaataaaaataacaagctaacatcttgcatacgacaaacagaactaaaatctgctcatttgcatacatatacaatcagaaccaaatagacccatcgtagtgacagccatactcatccaaacccactgaacgcatcaccggcgcagtcattctcataatcgcccacggacttacatcctcattactatcctgcctagcagacacaaactacgaacgcactcacagtcgcatcataatcctctctccaagg

SEQ ID NO: 507483 - DNA, 678 bp, Homo sapiens
ctttttgatcctgaactgggtcaggtgccgctgttgctgctcgtgttgaatctagaaccgtagccagacatgggactggaggacgagcaaaagatgcttaccgaatccggagatcctgaggaggaatctgacacagagtccaaatgcgcttgtccccaatttttttggggggggcgcgccaagagcgcgcaagccttcaggggccccccgcagatttattttcttcttggggccttctcacctcttgtagtcagtgttttcacaatcaatcctccctccataacaaaccaccaacgctgctcggctcccttgtggagcacctgttagcttggtgaacactaatacacgtactaccctgcaacattgcccccctgatggttatagggtggaagtcctccgcccccgagatcgcaccccttccacccacacccacaaatgagcgcgacaatcccacgttaacaaccaaacacccatcacacactccacgaatacaacacggggcgccttattaattagaagcctgtttttgatgtgcaatgtgaagtggccagtatctcgtccaccaaccaaacaaataagaatgacttgtcctccaaaccacttaacaatataatttatcactatatttcgcccttctctcgttgtctatctgcccatggttaatttccccccacatga

SEQ ID NO: 507484 - DNA, 297 bp, Homo sapiens
atagagctacgaggatccagctgcagctctcaggcctggccgtacctggagcacgtgggccacaacacatcgatagaacatggcacccagtggcctggactcagccgacctgccaccacccagtgccctcaagaaaggcagcaaggagaagcaggctgacttcctggacaagcagatgagccgggatgagcagcgagcccgagccatgaagatccctttcaccaatgacaaaatcatcaacctgcctgtggaggagttcaatgaactgctgtccagataccagttgagtgaagccca

SEQ ID NO: 507485 - DNA, 526 bp, Homo sapiens
aagactcacaagaacatctaagcataatatatcagcttccgcctttcaatttggcaatctctgagagagattccacctttattggatccagtatatcctcgctcttcaatatttctttggaaataatgccaatagggacatactcttaggtcatgaataaaacctttcagaaaattagtcagtgtttaattttcgaaaacttccctctctagacagtagacacctcctactgatggtcccatatgctagggaaattttaaaattagcaaatgctgatagctcatattataaatttctaaatcctagaaagacacgcttggagtgcttctgaatacacacaagttccatttaagggcaagtttccccgtagatgtatcaaaattctctcacctgtaaattgagatttaattcccgaatgtattcaacttgttctaaaacaatctgtccacaaatataaacctataagtaataaattgttattttcgcacaatggcaatctctaatgtgaaaatgtgttctatgaaaa

SEQ ID NO: 507486 - DNA, 420 bp, Homo sapiens
  misc_feature (21)..(21): n is a, c, g, or t
  misc_feature (35)..(35): n is a, c, g, or t
  misc_feature (58)..(58): n is a, c, g, or t
  misc_feature (107)..(107): n is a, c, g, or t
ccaaaacaagcagtgggccantccatggaggtttncccgggaaaaggggtggggaaantcccggaactgagagttccctccccccctttaatccatatagggtagantcccagatgttacccatgtcatttgtaaactgtcatggcactggtgagagtgtcttttacccatgctaagtataagaaccttaaggatgaccaagttgctttcgttgccatcttggtttttgtgcgttcttctggctctttacgcatctcattttaccagtggggtctttgtgatttgtaccttgtaaaaccagtcctgccaaactcctgtctcatcatgagagaatcagttgagccaaggaggttgaggctgcagtgagctgtaatcatatcaccacactccagcctgggtgacagagcaagaccctgtctc

SEQ ID NO: 507487 - DNA, 148 bp, Homo sapiens
tcccagacgtgggattacaggcgtgagccaccattctcaacctagactttttgcaattagaaagaattaatgatactttagatagatatctcgtattgccccctgcttccagatgccttggagtaccggagactcgaatttctgtaat

SEQ ID NO: 507488 - DNA, 113 bp, Homo sapiens
aaatgcacgcgggactcgagcactttccaagcagcacacgggcatctgagcgtaaacatccaaggtaggtgaccagagccatcctctagctcgcgtgctccgaggatgcgttt

SEQ ID NO: 507489 - DNA, 184 bp, Homo sapiens
acactactggagaaggtaatgggcttggaagataaagtagaatttggataacaaagaagagggagaaggcatcagtgaaaaaaatgacatgagaaaattcaggcacggaaaggaaacatttcatgcttttcagcaattaaagatttttttttttttttttctgaaacagagtctcgctttatca

SEQ ID NO: 507490 - DNA, 113 bp, Homo sapiens
  misc_feature (24)..(24): n is a, c, g, or t
ccaggtatagtggtgtgtgcctanagtcagtccaggaagctgaggcaggaggattgtttgagctcaaagtctttgagaatatagtgtactatgactacacctgtagaatagcc

SEQ ID NO: 507491 - DNA, 435 bp, Homo sapiens
  misc_feature (5)..(5): n is a, c, g, or t
  misc_feature (69)..(69): n is a, c, g, or t
  misc_feature (74)..(74): n is a, c, g, or t
  misc_feature (95)..(95): n is a, c, g, or t
  misc_feature (110)..(110): n is a, c, g, or t
  misc_feature (112)..(112): n is a, c, g, or t
  misc_feature (119)..(119): n is a, c, g, or t
  misc_feature (134)..(134): n is a, c, g, or t
  misc_feature (140)..(140): n is a, c, g, or t
  misc_feature (160)..(160): n is a, c, g, or t
  misc_feature (162)..(162): n is a, c, g, or t
  misc_feature (166)..(166): n is a, c, g, or t
  misc_feature (175)..(175): n is a, c, g, or t
  misc_feature (182)..(182): n is a, c, g, or t
  misc_feature (187)..(187): n is a, c, g, or t
  misc_feature (191)..(191): n is a, c, g, or t
  misc_feature (193)..(193): n is a, c, g, or t
  misc_feature (197)..(197): n is a, c, g, or t
  misc_feature (205)..(205): n is a, c, g, or t
  misc_feature (230)..(230): n is a, c, g, or t
  misc_feature (233)..(233): n is a, c, g, or t
  misc_feature (250)..(250): n is a, c, g, or t
  misc_feature (256)..(256): n is a, c, g, or t
  misc_feature (272)..(272): n is a, c, g, or t
  misc_feature (289)..(289): n is a, c, g, or t
  misc_feature (293)..(293): n is a, c, g, or t
  misc_feature (336)..(336): n is a, c, g, or t
  misc_feature (345)..(345): n is a, c, g, or t
  misc_feature (378)..(378): n is a, c, g, or t
  misc_feature (391)..(391): n is a, c, g, or t
  misc_feature (394)..(394): n is a, c, g, or t
  misc_feature (411)..(412): n is a, c, g, or t
ttggnctagaaatgcgaggggaacttctttgtagtttttacaggtattaaacttcatcttgcacactgnggtcntcatacatacggggcaaaatnggggcttttatattngngtttatncttcatttaactttngggggnactactatggtttgttgagngngggncaggagcangtggtgngcatnttangnttanggtgcttnactcattcactactgcacattaaangcnagcggtgagtgttattnactggnccattaagaggtctgncactgaacaccacctcngggntgatgttcatcatcctcatatgcttctccattgtggtggcgcngtctttccngatttggatcaaagtccaccagttctacttggnccatctcatcagnctnttccacttccttcctcnngggtgggggtttttccagcaaag

SEQ ID NO: 507492 - DNA, 391 bp, Homo sapiens
cagtagctctggtcattactctgacttcgagtaatataggtagagtcgttccatctctgcctttgctagtaccatttccaaagtgtactcgttctctatctcatgatactcaatatccttattttcgcttcttaatcgctctagctcgtgtcctcgaagatgtaaataatgactgcatctgttaaatagtctagtgtgattcatcgaccttaactttccatttattttcttcttgctcaacacttctctgtagcttcagtaaaattccttctgtttctgcaaggacggatttgtatctgtcacactctagctagtaacaatgtgtgcatttcatcagcttctttcaacttgtgctctagaaccttaacctcctctgaccctgaagtgtcta

SEQ ID NO: 507493 - DNA, 106 bp, Homo sapiens
tgagagaccgtgttgatgaggagttcccgttgtggcgcagtggttagcaaatctgactaggaaccatgaggtggggggttcgatccctggccttgctcaagtgggt

SEQ ID NO: 507494 - DNA, 131 bp, Homo sapiens
  misc_feature (70)..(70): n is a, c, g, or t
  misc_feature (111)..(111): n is a, c, g, or t
cagttctcaggagtgtcttcgcaacagctggtgtcggcgctctgacagaacgttatactctaaggactanaggaggatcaacctgatggaggtgagatgagccccgctggnaacttagctcagagtctacc

SEQ ID NO: 507495 - DNA, 293 bp, Homo sapiens
ggcgttcaatgtaattccatcaccactgaccaactccgaaagctcatcccccacaatatctaataaaatgcagtaagactaagattctgaaactcagactatgtcttaagaagccttataacatatctgtgggccttttagaatacttttttttgaaatgtttgttttgagcgtagccagctgctatataagaagtaaggttaccttgtttccattatgtgtggctagagagccatgttgttagcccccagaagttataactattccagctcagggaatgaacctgtgagtga

SEQ ID NO: 507496 - DNA, 225 bp, Homo sapiens
agacgtcattctgtcatgcttaacgtttttggtttggtttggtttggttttgcatttttagtagagatggggtttcaccgttgttagccaggatggtctcgatcttctgacctcgtgatccacccgcctcggcctcccaaagtgctgggattacaggtgtgagccattgcaactggcctgacagaaaaaatttctaagctgcaaagcatgcaagaagggaggtct

SEQ ID NO: 507497 - DNA, 138 bp, Homo sapiens
ccagagcaatgttagggtctgccagcgtgctaccgcatgtctacttccaacttatgcatctggcactggggtaatatgaccacaggatgagtccgggtcacccactgaacccgctgttaagtcctgagctaaggactc

SEQ ID NO: 507498 - DNA, 379 bp, Homo sapiens
ggaccaggatgtacaccacaaactctgcgcatatggttagctagacgaacaggcgcttgaacatctgccggtagctttgatactcatcgatcaaagcgggacgcagaatatcggtttccaggatgcagacgcgtagcgacataaaaaatacctgacacggcgatgggaatattgcacacccagagcctgccttgaaatacctccccaaagcaagccctcaatggccgcccacactccctgtaggagcgagctagctcgcgaaaaacgtcaacgataacgcaggtggcctgaataaaagcgttgcctgtgcgttcttcgcgagcaagctcgctcctacagtggaacgtctaaaacagcgcgccttttgcggctttttcca

SEQ ID NO: 507499 - DNA, 419 bp, Homo sapiens
tgcacgagcacgagattgagaccaccctgtgcaccacagcgagactctgtctcacaaaaaaagagagagtgagagtgagaaaaataatgtgtctgtattactgagtaggtttaactttataggaatttctggaccattctttgggaaccggttctgtacattatcaggttctcacttacagtgggtggacctaagaattttcatctttacagggaggcccaagcaatatgcctttaatagaaattatactctaaggacccttacacaccattctggtttcacttacaggataggattcaataaattatatgagatattcaacactttattattctgagcatgtgtaaaggaagccccgcttaaccgtgaagttcacaattaaattttgcctttttaacttacacggttttcactcttcc

SEQ ID NO: 507500 - DNA, 420 bp, Homo sapiens
cacgagggcgcgaccggcagacgagcgtcaccttgacaccggcgcggcagaacatctgggcgagttcgaccccgatatagccgctgccgataacgagcagcgagcgcggcaattcctcgaggtcgagcgcggtcgtgctggtcagatatggcacggtctcgatcccggggatggcgggcaccgccggccgcgcaccggtggcgatgatgatcttgccggcggcaatgcgcgtgccgttcacctcgacgccgccgtcgatgagatgcgccggcccgtcgcgataggcgatgccgttgtaagcggggaggaggtcgacgtacttggcctggcgcagctcggaaacgagcgcgtccttctgacggacggtcccgcgccaatcggtcagttcggcttcggcgttgatgccgggaaaacgggcgg

SEQ ID NO: 507501 - DNA, 368 bp, Homo sapiens
cctctcaattaatcagagcgaccgcatctggccgatgatgccgcggagtcggggcgtgtcgagttcgccctcgagttccttgcgggccagcagcaggtcgagaagatcgttgtctcccaactcgaagagatgcgtcaatgccgtcacgtcatcgtcggtaagctcggcttcgtgggcgtcgagataccgggtgatgatcaagtcgttttcgagcaggccccggcgcgcccgccaacgcagacgcgcccgttccagttcagtaagcctgctcatcattacaccttaaatacaccaaaatactagaccgtccgacggaccatcagttccttgatcttgccaatggccttggtcgggttaagccccttggg

SEQ ID NO: 507502 - DNA, 154 bp, Homo sapiens
caattaataatttatatgtagacaaaaagggacaaaaatcaacctcaagattcttaactgaggtcctccctaaaaatgtacttttcaagaaggaaagagctattgcaacttaataatattgggatttgtattgggttaagagataagtttctga

SEQ ID NO: 507503 - DNA, 272 bp, Homo sapiens
ctcaaatgggcacagaaagtttcggaacatgagtttgtgaaggctatttttcatcacccagcagttatatgtgagatagtactatactacactgttaatgtgtaatgaatataatatactacttcaattaaacctacattatatagaggaaaaatacattattcacatatttctatttcttagtccatttaaggtcgtctaggctaaattaccaattgactatatttccgacaccctataggacataatgaccatttctgtgcccatttcaa

SEQ ID NO: 507504 - DNA, 784 bp, Homo sapiens
gctattgtggcgggtgaggaacaggaagccctgaagggtcaccagaaatacaaaagcaaaggctatattcttttttttattgctttctattctttccttccttcctcgtgttctttctttcttcctttcatttatttactctttttataagagcgatgcggctctgcgtgtgtgctgtgatgtggtgtgttgtggctgcctgccgagtgctgatggtcgtcatctgcctccctgactgctgcctgagtaagatgtgtgttgtgtttcacttatagtgacttggatgtgtgtgatagactgtgtaaccatctataactcacaacacagagtgattagtgaggtcctagaaggacaagaaacctagagaatagacaacggggacaaaacatgtgactgagcaaagacaagacatcgtggacaggacacagcgtatgcgacacacacacacatgacactgacctcacagagacaagacacgtggtaccaggagtgagaagagcttacagtgcgacatcaccgcatagacgagcctactcacattacatcaccgtttggaacaaacggtggacctaacccagcgaggacaacccactagaaagcggtgaccacacgaggacactagccgctgacccacgggaccgatcagccagaacggaggacaacgcacggatataacaaaacgaggactgcacaacacacaaccaacatgggacacagcagcaggggggtcttaaaagaaagatgaacagagcaccagtgacagaacccacaaacctcaactacc

SEQ ID NO: 507505 - DNA, 818 bp, Homo sapiens
cggacttaagcgatcctctggctccaagcccactaccagtctggccaacatgtcaaaactactaaaaataaagaaatcagccatgaaaaaaaaaaaaaaaaaaaaaaaaaaaaaaaaaaaaaaaaaaaaaaaaaaaaaaaaaaaaaaaaaaagagagagggggcgcgcggtcgaaaaaattaatctccccgaagggagcgagcaacaaaagcggcgacccgaatttttggagaaaaagggggccctcaatgatatggggggggatgtatatatatataaacgaaatgaagagagcgaaggtgagtcggcggtgtatattaaaaacaagctaaggagttggtagagggtggataaaacaaggtcgtatacgctggaagtaagggagatattttgtgtgtgggagaggtacaggcgacaaccattttattgttgcgtgggagggtgaggacagaaaataatatgttgggagcacaaaaaattactttcgtattacagagagagattataagagagaagagacctcggttgagaggggaaacaataattatatacaaaacatattctattaaagccgggggtgtgtacatagagaggcggggtgaaaacaaaaacaaaaagaggacatatatagtatgtcgtggtagcatgcgggctgatggaaagaaagaagaaatgtagtgttggagtagataattcgatggagggtatatgtaagtatgaatttttatgagaaacaatatatttatttaatatatatacacggagagagagagactatagaatagttatataatagaataattaataaataggtagat

SEQ ID NO: 507506 - DNA, 125 bp, Homo sapiens
gtcgtgcatatatctgctggaagcaggaaagctgaagccacccatagggtgtgtaaccggagaaacaggacccaggccttggactgcctgcgtgggcagcttcagcgccttgagatgttttccca

SEQ ID NO: 507507 - DNA, 599 bp, Homo sapiens
  misc_feature (80)..(80): n is a, c, g, or t
  misc_feature (267)..(268): n is a, c, g, or t
atagtctcgccccgactctagaggaaccctgtggagacgggatctcatttacacttggcgcgctggtttcaaactcctgnactcaggtgatcacctgcttggctccaaagtctacaggtgtgagccaccatgcctggcacttttctgtctcttgaaaccacttctttcctttctagtcagaatttaaatctcattctgttttaccacatgtctgaactttattaagcgagagaatacgtctaagttgcttaacacgtaatacgtgtnnatatgcttgcctgacagctgtggctgtggtctaagaattaggttctaagtgaattcttaattcagagatcctcagaaatgaatatacaaaaaggcaggctccattttttaaggtgagagagttgctaaacttggttttcatttggtgtagtagaaaaagcggcatcatcactttggagtacagttcccttgttatcagcgtaagtccatgagaaaatcacctagcccttcagtaccaggttttttgaacatagagggaggtagctgctatgtgtgtaattcatcttttatgtggttcaagcgttactcgacaaaggtgggttcatgtacag

SEQ ID NO: 507508 - DNA, 239 bp, Homo sapiens
tggtgtctgttatatagcaggaaacagtgtagtcttggagcgaggttcatggactacaggcacacggaaagaaggggaagaggccccagtgctctgttcttctcctattaccgtaccacagaaatccccgaaattaggttttccccaccaaatacacatacgctgacatcaactaagcaagtgacttttaaaaacaaaactgacattcagagggagaggaggggatcctcctagagtcg

SEQ ID NO: 507509 - DNA, 96 bp, Homo sapiens
cggatccctataggcgctagtgtccctcagtggatctgctgtcacaatggagtatagccataaaattttagcctgtgcaaatatgtaggaaaatgt

SEQ ID NO: 507510 - DNA, 172 bp, Homo sapiens
tcttacccacagggtcctgtctggtattggtcacaaaacgggtacagcttttggcttatcaattcatacctcagtaaagtagtctaaatcaataaatacagtgtggatttcaaaaacaaaaaaagggaacactctatttttttcaaaggccggtggttaagaggggtaccga

SEQ ID NO: 507511 - DNA, 398 bp, Homo sapiens
cagcttggtcataagtgaggatgccaaggtcgtagggtctatatttctgaaaagtgattgtacaagtaaatccttcagtcgtccccctaatgcgatctgctagggaagctaggagtgccttcacagtggctccaagggggtatccttataggggactacatctcaagacacattttccccagcaagaggctgcatgagtcagcagactgatgaagtcagctctgttaggtcacccgcaattgcaatttctaagttaatgattacagctcccccgaggaaccagaacacagctgagggcacagagtattccccgtgacttactgggcagtggggataatatagcccagatatgtgggtcggggctgaatggtgaagacaatgatatgtgattcgcaggt

SEQ ID NO: 507512 - DNA, 747 bp, Homo sapiens
aagacagcctgaccaacgtggcgaaaccccatctctactaaaaataataaaaaaaaattagccaggcatggtgttacacacctgtaatcccagctacttgggaggctgaggcatgagaatcacgtgaacccgggaggcggaggttgcagtaagccgagatggagccactgcactccagcgtgggcaacagagcaagactctgtctcaaaaaaaaaaaaaaagactataaagctacagtaatccgaagcccgggggaaaccgggcccccagaatagcacttaaacaatcaactcaaacatcatacaaagtctagaaaagtggatgcattccaaccaaacatgccaggtaactccattactaaaatgactttctcaactaaggtgactgctggacacacaccgggatatccactttaggaaagccactaaccaaacacatgctgaaataggctcctagaaccttaaaccttaaacatcttaacaacccttaacactggctctagcacagacaccacgggcatcaacaagcatctcgtcgaacacctgtgggggtacaaccgggccctctctcttcataggcgaaccttccacacacggtgtttgcacaatggtcgaaaaacactacaaacttttactctcaaaaccacttaacacacacgcgtgagccccctcctaataagcaagaaccatcccacttactcgaacaggttcatttgaagcgccaggcctacaacagaccacggcagac

SEQ ID NO: 507513 - DNA, 305 bp, Homo sapiens
gcacattcagcatatggaataaatcttcagaaatcactgaccatgtttcttcaaataaattgcaaggcagtggggggaaaagctagggagaacatgtggagaaacagattagggagataccaattcagcagcatgcacacctatgtttagatcttgatttgaaacacaattataacaggaaaaaacaattgagaacgaatttgacactactggatattctgatatgtacgacatttagccaccctattcaggctatttatactagttttgtatttggtgtatttttaaaagtgctgagagataga

SEQ ID NO: 507514 - DNA, 160 bp, Homo sapiens
tgctgggagtaccagcatgagccactgcaccgagcctcttattattctttccagtgattctcccacctcagcttcctgagaggctgggactacaggtgcaaccaccacgcctggctaatttttgtatatttagtagagacggggtttcgccatgttggcc

SEQ ID NO: 507515 - DNA, 156 bp, Homo sapiens
  misc_feature (45)..(46): n is a, c, g, or t
gcggtccgtcttacagaggcggggagtaagagagcaagctcgcanngatgaatcaaaaggtatacaagacaaggttaggccagttaatttcttagtgtcatcagctataaatggagttatgagaaataagtgaaaatgttcaataaatatttcagt

SEQ ID NO: 507516 - DNA, 370 bp, Homo sapiens
cagtcacacgggggtatcgcctggtccgcccgtgttggacctctacggtcagtggtgaagcctacaggactcgttgacgggtccgataggccttgaccacgtaatcactgggggtgctcggtcacctgggactcctcgtaacacgtggccccgcttcctgttcaaagccccgtagattccacctgaccatctgctctggacactggatcttcacagggtagattggctccatgagtcgtggctgggcagacgcacgcgtgggttaaaggcagcgccgtgctgtggggatgatctggccccctccgcggtggatggcgtcggcgtgcagggtgacgccgtggacgtcgaagcgcacaccccgcatgttctc

SEQ ID NO: 507517 - DNA, 113 bp, Homo sapiens
tcagcgtgttggcaactctgtcttcagcctctgcagctcctccagcagtcgtgagatggcgtcaggttggcgctctgtgcggagtgtcgtaacagtggccacaccacgcggcg

SEQ ID NO: 507518 - DNA, 106 bp, Homo sapiens
agttccgggtcccccactgggtggaagggacattttcagacttttctttctggtcactgggagtgtctatgcctctcatatttccctattaaactcttcaattttt

SEQ ID NO: 507519 - DNA, 504 bp, Homo sapiens
gcaacaaacggacgcacttatcacgaccccccgcatttgcacacccacacagaaaggggagacaattcggaggggagaagcgagccacgcccacgaacaacggagcccgagagaacacgaacaagacgaccccacgcgcgccaggcagcgaacacgacaagagaaacagagagagacggcagaagcaggagcacgccagacaaggaacgagaacgaaccagcgcaccgagacccagccagacgaacaacgccacacgcgacgcagacgaaacgaccgaacaagagcagggacacaaggaacaggacgaaacaaccacacaacagaacaaaccgaagaccgacgcaaagaaacaccgcaacaaagcgcagcaagcaaacccaggcagagcgacaagccgaggagcaaacagggaccacacacacacacaccgccagcacacgagccgaccgaggacaccacaagaacgcagccaacgcaggcacacacagccaccagcccacccg

SEQ ID NO: 507520 - DNA, 392 bp, Homo sapiens
  misc_feature (24)..(24): n is a, c, g, or t
  misc_feature (128)..(128): n is a, c, g, or t
  misc_feature (203)..(203): n is a, c, g, or t
  misc_feature (361)..(361): n is a, c, g, or t
ggtccaggaaagctccccgggtgnaaagcccctgcaggtcccaaaaggactgccctcctaagtcatctggccggtacctgtccaggtggggctgcagaaagaaatttataaggctgcacatgctgtgnctcatgccctgtaatccccagcactttaggaggctgaggcaggcagattacctgaggtcgggagttcgagactancctggacaacattgtgaaaccctgtctctactaaaaatacaaaaattagctgggcgtggttgtgggtaactataatcccagctactcgggaggctgaggttgcctgaacccaggaggcggaggttgcagtgagccaagatcatgccattgcacttcancctgggcaacaagagagaaactctgtctcaa

SEQ ID NO: 507521 - DNA, 243 bp, Homo sapiens
cagatacaccacgcacctcacacaccaccacaccataataaccataaaatcaccaccaccatcacatgaccaccaccacaccatcattaccattcaagcaccaccaacataaccacatataccaccactaccatcaaatatccacaccaggccctatcactgatctactccacaccatcgcttccaatactaatgtagtaatatccaccaccatgccctatcactgctactagtccacaccat

SEQ ID NO: 507522 - DNA, 359 bp, Homo sapiens
cgctattactctctccataccttacaccagattttgaggcattaaatgtgctctctgtgtccacaagataccataaattttttaagtaaatctgtgaacacgaatgaaggaatgacttccagaattcgaaagaaactgagttccacaaagctctgtctgagactggaacttgcagaccagacaataatcttcatttttgctggctatgaaaccaccagcagtggtctttccttcactttatatgaactcggcacttacacctgatgtgcaccagaaactgtgaaaggagaatgatgcacttttgcccacataagggaccacctatctatggccgcggtactggagtaccttgactggtg

SEQ ID NO: 507523 - DNA, 331 bp, Homo sapiens
  misc_feature (118)..(119): n is a, c, g, or t
aaaggaaaggggccagggatgggagcagtgctgtgctgttatccctgttttgcttggaatgaaaacatttgagcacccggttttcaagggggacgctttccccttattccagcagggnnattttcctttttccttttgagaaggggagctttatttgctttcaaaatggagcacgtcgcactggagttttgggcccttttgttaacctgtcaggagccacaggggtccataaaacggaatcagggtttcaaaaaacatgacctatgtttaaagcaatgttcagccatttgggtttgaaaaaaaccccattaaagccaagacccgtttggag

SEQ ID NO: 507524 - DNA, 150 bp, Homo sapiens
gaggataactatgtacggttgcattgatccagcatcatgttgtgttcagatatccatgtcatgggtagtagtatgttgttggcataataattttacagcattgtaagaggttcaagtttgggacgtaatcggtcacgtatgtgtgggata

SEQ ID NO: 507525 - DNA, 447 bp, Homo sapiens
catgcatgcatctagcttccttgtctggctgtttcttcagtctctggcgccttcttccgtgcatgccataggacaggcattgtatgtttagtctgttcttctcccctacgtgcctatccagcacttccaaataaggtatgaacaggatccaccatatctcctgacctgacatgcaaatcccccagattgtcttcatctagacatgctaatatgaaattacagcagtatactctctatcaatccaaatgaagtcttccaattatctttagggaagccaggacccaccatgagtcgcataaatctggaaacttctccggacttccattgagcccgccagagggtacttgtcgttcacaaagccatcagccaagtaaatcagaatttacttgatgcaacagacttgacatagccagaaatcctgtgcaaaaatagatctagtccagaatg

SEQ ID NO: 507526 - DNA, 159 bp, Homo sapiens
ccccaaaattaaggtttttggccttttttaagcccccccctggcttagaccagcaaaaaaagccaggaaggggttagttgcttttcccagcccccccccccaaggtttttcaaatttaaagccccgccccccccctgggtaataaaagtggtttttgga

SEQ ID NO: 507527 - DNA, 462 bp, Homo sapiens
  misc_feature (34)..(34): n is a, c, g, or t
  misc_feature (83)..(83): n is a, c, g, or t
  misc_feature (88)..(88): n is a, c, g, or t
  misc_feature (92)..(92): n is a, c, g, or t
  misc_feature (97)..(97): n is a, c, g, or t
  misc_feature (147)..(147): n is a, c, g, or t
  misc_feature (184)..(184): n is a, c, g, or t
  misc_feature (193)..(193): n is a, c, g, or t
  misc_feature (212)..(212): n is a, c, g, or t
  misc_feature (236)..(236): n is a, c, g, or t
  misc_feature (272)..(272): n is a, c, g, or t
  misc_feature (302)..(302): n is a, c, g, or t
  misc_feature (331)..(331): n is a, c, g, or t
  misc_feature (351)..(351): n is a, c, g, or t
  misc_feature (361)..(361): n is a, c, g, or t
  misc_feature (444)..(444): n is a, c, g, or t
  misc_feature (446)..(446): n is a, c, g, or t
tactatttcctaatgcatgaggtggacagacatnagaaaagcctggactcagtcggaaaaacaaatccagcagtcaaaaaagnccttnaccngcaanccccacccccagccaacccaagagcattaaaaaaacaactcaaaaagcanccatcaaagacaccaatcaattccccaccggcgaaanacaaaagancccccaggagtcacaagantcccaaacaatcaatcaacaaaancaacaaaacatttgcccatgaaaaaagaccaggatncacccccaccgacgtccccacccggatggngcccagcacccccccccccccgccgccgncccccccacaggcgggccanggccaggagncggagggcaggggggggggcagcaccccccggaaagaagtaaccaaagcaccccccccagcccgcaccagacccaccaccagncnggaccccccccccccc

SEQ ID NO: 507528 - DNA, 218 bp, Homo sapiens
  misc_feature (101)..(101): n is a, c, g, or t
  misc_feature (168)..(168): n is a, c, g, or t
  misc_feature (176)..(176): n is a, c, g, or t
aaaggtggtgtctacatcagttagagccctctactgaactccatgcctacgtcgccgcgcgctgcaccgccaatatggggacagattcatcaacctcaggngacccattcctgctcacctgctgggtaaggacctgaccttgcctccgcatgttccagggtcatcctnctcatgtntcgcattccagagcatggcaccacccactccccgacacgtga

SEQ ID NO: 507529 - DNA, 979 bp, Homo sapiens
cgggtcatggcgccccgagccctcctcctgtctgctctcggtggagtgcctggccctgaccgagacctgggcctgctcccactccatgaggtatttctgacccgcgcgttgtcccggccgcggccgcggagagcccccgttcatctcaggtgggctacgtggacgacacgcagttcgtgcggttcgaccagcgactgcctgcgagtccgtagtagggcgaggcctgctggctccgtgtggtggcatgcacgtgagggcgccggagtattggtgaccggccagacacagaagtacaagcgccaggtacatggctgacctgagtgagcctgcggtaacctgcgcaggctactacaaccagagcgaggacgggtctcacaccctcctagaggatgtctggctgcgacctggtgcccgacggcgctgcctcctcctgcgggtgtgaccagtcctgcgctactacgtgcaaggattacatcgccctgaccgaggacctgcgctcctggaccgccgcggacaccgcggctcgagattcacccagtcgcatagttcggcagtgcgggcccgtgccggtggacgcagctgagagccctacctgtcatcgtgccgtgcgtgcgagtggctccggcgatacctggcagaacgggcacaggagacgctgcagcgcgcagaaatcctcatggatgacaacggtgacccacctgaagacccttgtctgacctgtgaggcccatcgcctgtgacggcagctgggccctgggcggttctacctgctggaaccaccactgtcctgctagtcccgtatgtggcatatctgcaacctgtaacgcctttttgctagcgcctcttctgcctggccctgcggccttgtccgtttcgtggggtctggggcaccgatgttcatgccagaggttggacccctcctgctgcacttcccgacgcccacctggttgtcacacctcttccccttgcctgcccattga

SEQ ID NO: 507530 - DNA, 286 bp, Homo sapiens
  misc_feature (38)..(38): n is a, c, g, or t
gtggccaaccttagtggtgcctttgccaccagccctgntggcccctggtttcgctggccccccaaatgcctgggttagacacgccagtggcctcagctgcccacacctttttccggcccctgaagttggccctgcagcaaacagctccctgggccccaggcaggtaacaaacacagccgccagcccaaacagcaacggcatgggcagcgccagcccgggttttaacagggtatcccccagccaggagtgcccccgggaatggataataaagatactaaagaactga

SEQ ID NO: 507531 - DNA, 855 bp, Homo sapiens
gatcgagttcacagagggcgaagacaagatcaccctgagagggccctacagaggatgtcagtgtggcccaggaacagatagaacggcatggtcaaagactttgattaaccgagatggactatgtggagactctaacatcgaccacaagttccaccaggcacctcacttgggaagagcggtgccccaaccatccacagatatcaaagacacacggtacaacggccgtcccgctgcgccaatgacaatacctgcaccggatgagaaccgcagcaacaatggactcccgccatcgcagacggcgaaccgaacagggcgccgcgtccaacccaagcgccacaccggcgcaccacgcactgcacacgcacccaacaggccctcatatcagccatctggcaaagacctgaccccccgataaaccccaaatgagacactccctacacctccaccatctaaaaaaccacataacaaaaatctcaacactacccccacccaacaaaaacactacaagacaacccacaagaacaaccgggcacgacgaacactaagaaccctcccccggactagacgacaaaccgcctcggcgatcggaaacccgaacacaattgcgagcgaaacacgaaacgcgacaccccacatgcaactacaaagcaagcatagctcaccgccacggctaccctcccccccctatttaccaacacgcccatacgacccgcaacccacacaaacaccctaccattactgcataacccccaaagacaaccttcccacctgtcaacatcgattcaacctcccttaaaacaacacaacaaacttatacacagaagaataacatacccacaccctcaactcatctag

SEQ ID NO: 507532 - DNA, 301 bp, Homo sapiens
  misc_feature (23)..(23): n is a, c, g, or t
  misc_feature (151)..(151): n is a, c, g, or t
tctgtaataaatgtggtacactngaattatgatttcctgagaataataaaaattgggccaggtgcagtatctcatgcctataatcccagcaccttggaggccaaggcaggcaggtcacttgaaggtcaggagttcgagatcaacctggccnaatatggtgaaaccctgtctctactaaaaatacaaaacttagccaggcttggtggtgcacgcctgtagtgaagtagaggttgcagtgagttgagatcgtgccattgcactccagcctgggcgttgcagagagactctgtctcaaaaaaat

SEQ ID NO: 507533 - DNA, 421 bp, Homo sapiens
gaaagcacttaagcactccgtcctgttggtaaagaatataccaccatttcatctggctagttcaccatcacaagctgcattaccataaggagatttttgataacgaggagttgaccacgataatatctgaagatgattgcttttccctggttgtagttgttctgcccataatttgctggcacattaatcatagataaagaaagattgatggacttagccctcaaatttcagtatctatacagtactagaccatgcattcttaaaatattagataccaggtagtatatattgtttctgtacaaaaatgactgtattctctcaccagtaggacttaaactttgtttctccagtggcttagctcctgttcctttgggtgatcactagcacccatttttgagaaagctggttctacatgggggga

SEQ ID NO: 507534 - DNA, 115 bp, Homo sapiens
agatgagctggctaccattcactgtgtctcctgtgtgctctgttgctccggctgggccagtgctgctccactgcatcagctcctcactgcctgccttcagcttgacccgaagcag

SEQ ID NO: 507535 - DNA, 489 bp, Homo sapiens
atgtcgctggtgtagcggtgtatgctagttgcgtttgtatatgctgtacgtctgtagtgtgtactagtgcgtacatgtgagtgcgtgtgaagtgccgaacgattggtcataccgtgtgtgcagtgtgtagtagcgtgtgtgtgctgtgcgtttgtgtgtgtgctgtgtgcacatctgtgtgctgttgtgtgctgtgcatatagtagtgtagtgcatgtgatcgtgtagtgtgctgtgttcatgcgtgtagcttgtgtgtagtagtgtgtagtagctgcgggaaatgataaagtatgagtgctatataggatgggaattgagatgtaagattttgggggtgaggatcgtgccaattacatttcattagcatggatttcggttttcatgctctgtcctcccctcctttggtcttactgggtccctctgactgctctgtgatttatagtgatggaaaagggagtgaggagccagtctgggttgttgctattt

SEQ ID NO: 507536 - DNA, 166 bp, Homo sapiens
cgacaccccggcctggcgcgccacggtattgagggtgactgcggccgcgccccgggcttgcgcggtttgtgttcgttcacggcaaaaacctcaaaaaggaatataaaactaattttttagtatttgacgctctaaaccgacgccttcaataatgccgatgttacgc

SEQ ID NO: 507537 - DNA, 229 bp, Homo sapiens
atttttgaggtcaggagttcgggaccggcctggccaacgtgatgaaaccctattagtactaaagatacaaaaaataagccaggtgtggctacaggcgcctgtggtcccagctgctcaggagactgaggcggaagaattgcatgagcccgggaggtggaggttgcggtaggccaggaccgtgccattgcactccagatccagcctgagtgccagagtgagactctgtcta

SEQ ID NO: 507538 - DNA, 121 bp, Homo sapiens
tcggctcggcccatgtatgcatgagagaaatgggaggatgatgatcagaggctagggctttgagctgtatgaaaaagatttgaactaactgcaagaaagaatttgaggctgggtgcggtgg

SEQ ID NO: 507539 - DNA, 245 bp, Homo sapiens
  misc_feature (172)..(172): n is a, c, g, or t
ctcagtgaagtggagataacatcaggatctgaagcacgcatggtggctcatccctgtaatcccagcactttaggaagccgaggcaggaagattgcttgagcccaagactttgagatcagcttaggcaacatagcaagaccttgtctctccaaaaaaatagccaggtgtgatnggacacacttgtggtcccagctactcaggaggctacggtgggagaatcacttgagcccaagtggtcagtcgac

SEQ ID NO: 507540 - DNA, 100 bp, Homo sapiens
attggaatgttcccagtagagaaggtagtcagcccttctggatgcggaaggctggtagccaagtcaagtctgcccacagcgctagatgtccaactctgga

SEQ ID NO: 507541 - DNA, 142 bp, Homo sapiens
ggggctttaaaccccccccctttccttccggccttttgggttttttttccccaggccccccctcccctgggggccctaaccccctctgggggggcccccccgcccatgggtataaagccagggcccttttttttaccctgga

SEQ ID NO: 507542 - DNA, 283 bp, Homo sapiens
tagcagcgcagccacatcaatgctggaacaatcagaaacccttcaccatgttttaaagaggtaatacacaaacatttttacttgaaaaggagttgagataatggcccaagtgtgagcgagtggattggcggatatcccagcatgtacagcatgtgataacgcgggtacggcaggactagtgtctcaccagtgcagcatgctcctcaagctgtcacacgtgctcagcctccgcggaagatgttgcgtgaaatcttccgcggccctagaaggctttggtatcctg

SEQ ID NO: 507543 - DNA, 320 bp, Homo sapiens
cataggctagctattcctatatatttaatattagcttttcttaaaaaaaattccagcctcataaagttgattagaaaactagattgctagtttattttgttatcagatatgtgaatcttttctcccttgtaagaaactattcatttattgttacgttatgaagtcttctgtatagtttgttttaatactaatttttgttttagtattttgtttgaaatgaaaacttcattatttgtgttcatatgttttatataaacttaacttttttatactgtttatttttagccctttgttttattattaatagttaaaaaaattta

SEQ ID NO: 507544 - DNA, 154 bp, Homo sapiens
cggttgacatgcccttggctatctaagaaatctaaatcaggctaggcactaccatgcctgtaatctcagcacttgggagggcaaggtgagaggactgcttgagctcaggaattcaagaccagcctaggcaacatagggagaatctgtctctact

SEQ ID NO: 507545 - DNA, 190 bp, Homo sapiens
tttttttcccccccccccctttttttttccatttccctttttcccaaaggggcccccggggggtttttccatggggaccccaagcggggtggggttttttaaaaaaatttttccccccctggggtttttcccttggggaaaagggggttttaaaaggaaatttttaagggtaatttaaaaaaaatttcca

SEQ ID NO: 507546 - DNA, 271 bp, Homo sapiens
tggtgtgcacagtgtgatgcggtgagtgtctggagaaggagcacgataacagggattagcatttggactttatccagtcaacctgcggagtctgccttcagttggggcgctttgatacacatcagtgaaagaagagaaaaacctcgacttgttgtataagtatattgttcataaaacatacggtttccacttcaccacacctgccttagttgtggaaaaggatgccgtttttatacctgcaggctgggacaatgaaaagaaaatagctatt

SEQ ID NO: 507547 - DNA, 149 bp, Homo sapiens
  misc_feature (1)..(1): n is a, c, g, or t
  misc_feature (98)..(98): n is a, c, g, or t
ngcacactcaggtatcacacacagagaggcacacacacagcccagcacgcagagaataacttgctgatatttgagtaacaccagtttgctaaaactanaaagatgcctttgtgtcaccttacgtaaaacaagacttgatgcctataact

SEQ ID NO: 507548 - DNA, 280 bp, Homo sapiens
ttaagctgttacccttgtgcactgtgcagctcatggtgtatgggaacttagtgatcttggcaataccgagtaggggtaataaaattaaaatgactggactgttaatatttacattgtgcactggtttataaaagtacactactcctcctatgtccaccccaatctcttaataaaatttccagggcagggcttgggaacttgtattttaaaaaatgatcccaggacttctgggtgttgggaatgtccaatttaactaggttgttacatagtgtgtatgtgt

SEQ ID NO: 507549 - DNA, 787 bp, Homo sapiens
  misc_feature (452)..(452): n is a, c, g, or t
ggccgggcgcggtggctcacgcttgtaatcccagcactttgggaggccgaggcgggcggatcacgaggtcatgagatcgagaccatcctggctaacacggtgaaaccccgtctctactaaaaatacaaaaaaattagccgggcgtgatggcgggcgcctgtagtcccagctactcaggaggctgaggcaggagaatggcgtgaacccgggaggcggaggttgcagtgagccgagatcgcaccattgcactccagtctgggcaacagagtgagattccgtctcaaaaaaaaaaagaaagggacaaaaaaaatagctttatacctcttccttgtctcaaccgccatgaaatttctgaacactcccaaattcagttgaatattccaaaacaaattttttacgtttacaataatttacctccttatagtaatagtataccttaaaaagcctcaggntatatatcttctaaacagtacaattcagttgcagcttaccttaaccaatatgttctctagtggagaacccacctaggcgccttatttcactggctgtgggttgccctccagcgggcctaacattgtggtgccccaattaaatttttcgggcagaatttacccctgaattggtaaaacccatccggagttgggttacacagtctgccaaaaatctccaaaaggccccgtatttagtgtaatccctctgcgacagtgcttcttgcgattgcggtccccagtcatgacctgctcggtgtaactaaaaccatagctcacgtttaaaagacccgaaatgg

SEQ ID NO: 507550 - DNA, 272 bp, Homo sapiens
tcccctcagatttcctgatagcttgatggcatgtgtctgtgactgtgactgtcatcattgctgaacaacatctctttgaatcaaagcttgattttcccagaggttgctgggtcaggcacttgtgttaggagttggaaagcaaaaatgggtccatagtcactctgtggaggtgtccctgtctgctctgtgttgtatcccttgagaattaatgccaggaacgtaatgtggatgtgactgatggactgaaatttaaagtaaatagcctcttctta

SEQ ID NO: 507551 - DNA, 654 bp, Homo sapiens
tgttaacaatcgtgttgaattagcacaaatagtaatacattcctgcactgacttagcagtgaaatgtgttatggtttgcgttatgtattattacttgagacagggtctcagtctgataacccagtatggagtgcagtgatgcaatcttggctcactgcatcgtctgcctcccaagctcaaacaatcctcccatctctgcctgccaggtagctgggaccacaggtgcacaccaccatgcctggctaataatagtatttaatgtagagacgggattcaccatgttgcccgggctagtctcgaactcctgggctcaagcgatcctccgtcctcaacctcacaaagtgctgggataacaggcatgagccaccatgctggctactccttttgaatggacaaaggtttgcttaggccccccaagaataagtctggcatgtggcacttcccctacagccctggatcctcagacactgatgtgagacatactggctacagaaattcgtctaacttggtaaaaaatgctatctttaggctgcaaatccagcaaacgagaaatatcatcatcttaggtgaagatcatacaaaaaccctggggcacttgagaacagcatcccaggtcccctgaagtccatatagctcacgtcacaactactgatc

SEQ ID NO: 507552 - DNA, 377 bp, Homo sapiens
  misc_feature (30)..(30): n is a, c, g, or t
  misc_feature (76)..(76): n is a, c, g, or t
  misc_feature (204)..(204): n is a, c, g, or t
  misc_feature (233)..(233): n is a, c, g, or t
  misc_feature (245)..(245): n is a, c, g, or t
  misc_feature (248)..(248): n is a, c, g, or t
ttcctggctgctgcagctgtcgacgacggncgttataaaacgcttgcacccagttcaggatcgcgatcgaaacctntccgcgttgccacatcttcaacccgatgttcttcccacaggccatctgcggcgcgaaaggtacgaatacctgattccgcagaaattcctgcccctgtcagtacgagtactcttggtttttccattgcntccggcaccactttatctctgaaaaaaantactgacgcaanacntcgcgcaggcggcgtttatttttacgaaaacgacttaaccgatgaccccgacgcgacagcatagcaacctctgttgtttaatcggttagatgtaggaaggccgcaccacgcattcctcccgcatcaccg

SEQ ID NO: 507553 - DNA, 363 bp, Homo sapiens
gctcgactgtagaacaaaaagggaggaaaactaacattctcttcctatttcatatagctaaaaagtctgtcaattgtcactatacttcacaaatgttgtttttaataacatacattagatattttcaaatgctaagaagtgtataggacaaaacataagttctaccccttagttaagccttaatgtttttaaatgacaaaagtcttacacacacatcatagaaatccatgtaatttagaaagacataagatgagatgtagaattctctctcccccaaattccactccttctccccacatttaactattaacaaaaatttttatgtatccttccaaaacgcaaaagttgaaattgacgtcgacg

SEQ ID NO: 507554 - DNA, 675 bp, Homo sapiens
gcggacgcggagcgtgctattgtacaccagtgaataagatgttataaagggcaagccagtacgcatcatgtggtcaacaccagtgatccatcacttcgcaaaagtggagtaggcacacactcatatcattaagataaatctggactaaatccatatgcactaagtaaagcactgtttgatacatctgcagcttttggtaacatcctttcatgtaaggtggtttgtgatgaaaatggttccaagggctatggatttgtacactttgagacgcaggaagcagctgacagagctattgaaaacaactgacatggacatgctcctaacactgatcgcaaagtatttgttggaccgattcaagtctcgtaaagaacgacgaagctgaacttggacgctacgggcaaaagaattcaccaatgtttacatcaacgcaatttctggagaagacatggacctgatgagcgccttacggatctcttccggcaagttcgggcctgccttacgtgtgcacagtacatgactcgatgacaacgtcggacaatcccacacggaacccgcgctcgtcaagcctcggaacaaggcatggcaacatgcccacagcaaacccgtggacacagatgacacggacaacgaccccaacgcacacaacaccacagcggcacagcccaaaaacagtgc

SEQ ID NO: 507555 - DNA, 555 bp, Homo sapiens
  misc_feature (555)..(555): n is a, c, g, or t
agcagtggtatcaacgcagagtgtccattccggccgggcgcggtggctcacgcctgtaatcccagctctcagggaggctaagaggcgggaggatagcttgagcccaggagttcgagacctgcctgggcaatatagcgagaccccgttctccagaaaaaggaaaaaaaaaaaaaaaaaaaaaaaaaaaaaacctggggggcggccggggccctgaaaaagttttcaagacaccatcgcggttggggcggcgggggcccaatggaggtgaacagggagacctggggccataagcggggtcccaagggagaacacccggggccagggacaaaggggggggagttctccaccacaatataaaaaacggccgggggggggaaacccgcggagcggggttcctgtggaaaacaaatatttcacgagagattggggagcgtccaagggagagggatcatcaaaaggggggagacctatatctacaacagagggggcgctccaacagagagagaccccgagaatattcaaaattaaagcgcccggcatccgtgggggggaagn

SEQ ID NO: 507556 - DNA, 195 bp, Homo sapiens
  misc_feature (30)..(30): n is a, c, g, or t
  misc_feature (63)..(63): n is a, c, g, or t
  misc_feature (132)..(132): n is a, c, g, or t
  misc_feature (168)..(168): n is a, c, g, or t
  misc_feature (182)..(182): n is a, c, g, or t
ggatccggttgcagtgagccgagatggcgntaccgcactccagactgggtgacagaacaaaantccatctcaaaaaaaaaaaagtgtttacaattattctaaggagctgtacctgctctgatcacagcttanctcgctatcatcttctgctacgtcccctcttcatgntggttcacacagcncccttttgcagct

SEQ ID NO: 507557 - DNA, 203 bp, Homo sapiens
gcgtagatgggaggggatgaggactaggatgatggctgcgaaagtcagacggtttctatttcctgagcgtctgagatgttagtatacgttagtttggtggtgagtgttaggaaaatgggcatacatggactaggacagcagactaaggaaaatgattatgaggcgcgtgatcatgacaaggtgataacgctcttctatgcata

SEQ ID NO: 507558 - DNA, 226 bp, Homo sapiens
  misc_feature (49)..(49): n is a, c, g, or t
atgtaagcatcaatgaatagtatatttaatagcaatacagcactgttgntaagccctcagtatatgccaaaatctaggctaagaaatttgcatgacatgaccctctctctttctatgtatgtatatttgtgtctatctatatagagagtatgtagagttgcttaattagggttaagtgaaagatatagatagatgatagatcgatcaatcaatccatatagggaga

SEQ ID NO: 507559 - DNA, 223 bp, Homo sapiens
cctgcacacgccgaatatcatacgccgcaagtcgaatggcgaagttgttgctgcacacgccgagactccagacgccgcgagtccgagagatcactgtggacgaagttgttgcgcaacaacttcgtccacagcgacctgggtctgggtcctcggcgtgtgcagcaacaacttcgtccacaagacctgatcttaagaagtgtttggagactcggcgtgtgcaggt

SEQ ID NO: 507560 - DNA, 208 bp, Homo sapiens
gttagggaagggggagatgagagagcccactagagtaagagagaaaaaggagggaggagggggagggaagagagagagagaaacctcaacttttatttaaaatcagagagcagttgtaagcctggagttgttgccatggcaacagcaagaaaagaagatagagagcttgtgaagccatgaaaacccaataggggtaaatgtttaaagc

SEQ ID NO: 507561 - DNA, 275 bp, Homo sapiens
actgtatgagtgacatgtgtagtgggactggcaggcacagcacatctgcttgatcgtgtatgtcacgtgcatgtagacttcgctggcactgtgtgcgaggcagtgctgtcgtgtgtacggtcccgagcatctgctaggtggagttctgcggcagtctgtcgcttcgtcaggtcaactgatggtctggggaagagcctgaccaggcatgcgacgacacgttccatcttgggggtgctgtcgagctcagcgtgaagacttggggctggtcggggatg

SEQ ID NO: 507562 - DNA, 337 bp, Homo sapiens
  misc_feature (46)..(46): n is a, c, g, or t
cccagtaggtaacaactttatctagtgtaaaaatgaaagaacattntgggccgggcacggtggctcatgcctgtaatcccagcactttgggaggcccaggcgggcggatcacaaggtcaggaaatcgagaccatcctggctaacatggtgaaaccccgtctctactaaaaatacaaaaaaaaaattagctgggcgtggtggccggcgcctgtagtcgcagctactcgggaggctgaggcaggagaatggcgtgaacccgggaggcggagctttcagtgagcggagatagcgccattgcactccagcctgggcgacagagcgagactctgcctcaaca

SEQ ID NO: 507563 - DNA, 355 bp, Homo sapiens
  misc_feature (337)..(337): n is a, c, g, or t
  misc_feature (348)..(348): n is a, c, g, or t
tatatatagtgtaaaatactgtatatagtatatatacactatagtatatatagtataaaatactgcatgtcgtatgcatactctatagtgtatatagtaaaaaactatatatagtttgtatatataaactatatatagtacatatatggtatatatactataaactatatatagtatatatgcgctatggtgtatgtatgctatatgtagtatagtatacatacatatagtatgctatgtactataggtatatatatactatatataggcataatatacatacatataggtatgtaccttaaagtataggtatatattatacctataggtataggtnttatataggtnttaacat

SEQ ID NO: 507564 - DNA, 783 bp, Homo sapiens
  misc_feature (5)..(5): n is a, c, g, or t
  misc_feature (76)..(76): n is a, c, g, or t
  misc_feature (104)..(104): n is a, c, g, or t
  misc_feature (116)..(116): n is a, c, g, or t
  misc_feature (154)..(154): n is a, c, g, or t
  misc_feature (158)..(160): n is a, c, g, or t
  misc_feature (164)..(165): n is a, c, g, or t
  misc_feature (177)..(177): n is a, c, g, or t
  misc_feature (194)..(194): n is a, c, g, or t
  misc_feature (199)..(201): n is a, c, g, or t
  misc_feature (203)..(203): n is a, c, g, or t
  misc_feature (247)..(247): n is a, c, g, or t
  misc_feature (253)..(254): n is a, c, g, or t
  misc_feature (266)..(266): n is a, c, g, or t
  misc_feature (282)..(282): n is a, c, g, or t
  misc_feature (288)..(288): n is a, c, g, or t
  misc_feature (292)..(292): n is a, c, g, or t
  misc_feature (311)..(311): n is a, c, g, or t
  misc_feature (326)..(326): n is a, c, g, or t
  misc_feature (341)..(341): n is a, c, g, or t
  misc_feature (351)..(351): n is a, c, g, or t
  misc_feature (360)..(361): n is a, c, g, or t
  misc_feature (364)..(364): n is a, c, g, or t
  misc_feature (366)..(366): n is a, c, g, or t
  misc_feature (372)..(372): n is a, c, g, or t
  misc_feature (379)..(379): n is a, c, g, or t
  misc_feature (388)..(388): n is a, c, g, or t
  misc_feature (394)..(394): n is a, c, g, or t
  misc_feature (551)..(551): n is a, c, g, or t
  misc_feature (558)..(558): n is a, c, g, or t
  misc_feature (561)..(561): n is a, c, g, or t
  misc_feature (563)..(563): n is a, c, g, or t
  misc_feature (568)..(568): n is a, c, g, or t
  misc_feature (572)..(572): n is a, c, g, or t
  misc_feature (576)..(576): n is a, c, g, or t
  misc_feature (608)..(609): n is a, c, g, or t
  misc_feature (618)..(618): n is a, c, g, or t
  misc_feature (621)..(621): n is a, c, g, or t
  misc_feature (626)..(626): n is a, c, g, or t
  misc_feature (638)..(638): n is a, c, g, or t
  misc_feature (642)..(642): n is a, c, g, or t
  misc_feature (648)..(648): n is a, c, g, or t
  misc_feature (662)..(662): n is a, c, g, or t
  misc_feature (684)..(685): n is a, c, g, or t
  misc_feature (782)..(782): n is a, c, g, or t
gcggngggggggagcccggagccttccgcggtcccccgcccgcccggggcccaacgacgccctactgggcgagcangatttccgaggacagggggtccgggccnttcgctttcgantctcggaggagccgggtccgggggctgttttttttttntttnnnttcnncgtcccgcagantggagctggagtgagcnttccnnnantttttgctgccaaatgtggtgcagaagtaatactgtcagacatntcagtnntgcctcactgtntggaattctttcggcnatgctnccanttgaataactctgcctacntctgcaggtggtagnactaacattgtgtcntatatcttgngatcttctnnctntnccaccncaagatnttacccttncatctnatgttttctttgaaccagaacattttgaagacattttggctacaatatattttttgatgcacaagaatcccaaggtccaattgtggtctacttatcaagttaggagtgctgactggtcacttgaagctttactctacaaatgggatatgaaatgtgnccacatnccncntgagncttntgangcagacaaagaagatatagcagaatctacccnnccaggaagncanacagntgaaatgctggncatncccttngcaaaggacagtcnctgaattatacctacaacctgnnctgggacagtatcaatactgatgagcaacctggcacacaaactatgagcagaccacttcagcttgagaatgcagtgggtctgaagatggtcaagtcng

SEQ ID NO: 507565 - DNA, 886 bp, Homo sapiens
  misc_feature (5)..(5): n is a, c, g, or t
  misc_feature (76)..(76): n is a, c, g, or t
  misc_feature (104)..(104): n is a, c, g, or t
  misc_feature (116)..(116): n is a, c, g, or t
  misc_feature (168)..(168): n is a, c, g, or t
  misc_feature (184)..(184): n is a, c, g, or t
  misc_feature (306)..(306): n is a, c, g, or t
  misc_feature (317)..(317): n is a, c, g, or t
  misc_feature (338)..(338): n is a, c, g, or t
  misc_feature (355)..(356): n is a, c, g, or t
  misc_feature (366)..(366): n is a, c, g, or t
  misc_feature (390)..(390): n is a, c, g, or t
  misc_feature (400)..(402): n is a, c, g, or t
  misc_feature (420)..(420): n is a, c, g, or t
  misc_feature (422)..(422): n is a, c, g, or t
  misc_feature (424)..(424): n is a, c, g, or t
  misc_feature (427)..(427): n is a, c, g, or t
  misc_feature (429)..(429): n is a, c, g, or t
  misc_feature (432)..(432): n is a, c, g, or t
  misc_feature (441)..(441): n is a, c, g, or t
  misc_feature (456)..(456): n is a, c, g, or t
  misc_feature (477)..(477): n is a, c, g, or t
  misc_feature (486)..(486): n is a, c, g, or t
  misc_feature (493)..(493): n is a, c, g, or t
  misc_feature (503)..(503): n is a, c, g, or t
  misc_feature (511)..(511): n is a, c, g, or t
  misc_feature (517)..(517): n is a, c, g, or t
  misc_feature (519)..(519): n is a, c, g, or t
  misc_feature (522)..(522): n is a, c, g, or t
  misc_feature (528)..(528): n is a, c, g, or t
  misc_feature (530)..(531): n is a, c, g, or t
  misc_feature (539)..(539): n is a, c, g, or t
  misc_feature (546)..(546): n is a, c, g, or t
  misc_feature (548)..(549): n is a, c, g, or t
  misc_feature (551)..(551): n is a, c, g, or t
  misc_feature (654)..(654): n is a, c, g, or t
  misc_feature (661)..(661): n is a, c, g, or t
  misc_feature (664)..(664): n is a, c, g, or t
  misc_feature (666)..(666): n is a, c, g, or t
  misc_feature (671)..(671): n is a, c, g, or t
  misc_feature (675)..(675): n is a, c, g, or t
  misc_feature (679)..(679): n is a, c, g, or t
  misc_feature (711)..(712): n is a, c, g, or t
  misc_feature (721)..(721): n is a, c, g, or t
  misc_feature (724)..(724): n is a, c, g, or t
  misc_feature (729)..(729): n is a, c, g, or t
  misc_feature (741)..(741): n is a, c, g, or t
  misc_feature (745)..(745): n is a, c, g, or t
  misc_feature (751)..(751): n is a, c, g, or t
  misc_feature (765)..(765): n is a, c, g, or t
  misc_feature (787)..(788): n is a, c, g, or t
  misc_feature (885)..(885): n is a, c, g, or t
gcggngggggggagcccggagccttccgcggtcccccgcccgcccggggcccaacgacgccctactgggcgagcangatttccgaggacagggggtccgggccnttcgctttcgantctcggaggagccgggtccgggggccgacggggctgccctggaggtccaccncccgcaggccctgcanccccagtatggaatgtatgtttggccctgtgctgtggccctggcccagtacctttggtctcacagaagatctctcccaggcaaggccatcttagagattggagctggagtgaccctcccagnaattttggctnccaaatgtggtgcagaaccancactcccccaccgcccnncactccctcnctccctggaaccccccccgcaacnctcccaaacnnntccccccccccctccgcngncngcngnccncccatgggnccatatccctcgggnccccccggccccccccccccnagatatcanccccgcncctgatgtgncctttganccagangnggncgaagncnncccggcgncaagagngnncnggaggcacaagaatcccaaggtccaattgtggtctacttatcaagttaggagtgctgactggtcacttgaagctttactctacaaatgggatatgaaatgtgnccacatnccncntgagncttntgangcagacaaagaagatatagcagaatctacccnnccaggaagncanacagntgaaatgctggncatncccttngcaaaggacagtcnctgaattatacctacaacctgnnctgggacagtatcaatactgatgagcaacctggcacacaaactatgagcagaccacttcagcttgagaatgcagtgggtctgaagatggtcaagtcng

SEQ ID NO: 507566 - DNA, 251 bp, Homo sapiens
gtcacggcttgcaggtctctttcccaggctctgtcgcactgccgcctggcccgtgcactcgtgcatgcgtcgtcctcggcacctccattcgttacttccgtttccccccgacgtcccgcgtgcagctctttctctcgtctcctccatctggcggccgccgcccgggtctcggccaggtctgggcctcccttactacgtacgctgtgaaggacgcactcccggggactcctctacgacgtcgaccctgcagg

SEQ ID NO: 507567 - DNA, 287 bp, Homo sapiens
  misc_feature (113)..(113): n is a, c, g, or t
  misc_feature (169)..(169): n is a, c, g, or t
  misc_feature (204)..(204): n is a, c, g, or t
  misc_feature (260)..(260): n is a, c, g, or t
gctgattctagaggatcccggacattacagccgtactctgagaactcgggtgttaacacaggaccggccgtgattcttacaagccgggggctgggaccagcttcgagtttgcncttgcaattgttgaagccctgaatggcaaggaggtggcaggctcaagtgaaggcancacttgttcttaaagactagagcagcaaactgcancagatcacttagagaaacaggccagttagaatccattctcactgtgttcactctanacaaaacagtggtaggttaatgtgttc

SEQ ID NO: 507568 - DNA, 102 bp, Homo sapiens
aggttttacatttgctgttccttctttcccgactcacttcatagtgtctcagcctggtccaggcttgcatgcaggccacctactcatgcacctaactggaag

SEQ ID NO: 507569 - DNA, 860 bp, Homo sapiens
ggatcacttgaggccaggagttgaaaccagcctggcaacatggtgaaaacctgtctctactaaaaatacaaaaattagccgagcgtggtggtgcgtgcctgtagtcccagctacttaggaggctgaggcatgagaatcacttaaacctgagaggtggaggtgcagttgagccaagatcacgacactgcactccagcctgggcaacggagactctgtctcaaaaaaaaaaaaaaaaaggttgattgaaattttgacttttttaacctagttcccattaattcggcattaatggggggaatccaaaatttgacgggggtaaatttggaaaaccatttttgcatacttggtgggtgtgaaaaaccaatctaattttgggtatacattaaaaacgggtctctgtgagggtggacacggtagtcatctggttctaaactctatacatattagtggtctctagggcagaaataggtataacttcccaatgggggacttctaatttcataggacatgtaacgctgaaggtactctaaaagagcagatgctttcagaaccctttcagaagagggtccgggcccaccaggcccggaattaacctctcacaggtgtaatttcggggggcccactactgcgccaagaatcctaatagttggcacaggccttcagacagatgggctcacatatgtgttcctataccatggtttacccactggaggcgtgaacatttcgggtaaacaaaacttttacactttcaagaaccattcctgagagaacactctttaacaatcccttcaatagtgcctggggccgtagtgactcggtactaactactcctattaggtccgagataaaccagaggatag

SEQ ID NO: 507570 - DNA, 178 bp, Homo sapiens
taaaaaccttattttcatcagttataacaaatgtaccactctggtggtgaatgttgctaaggagggaagctatacatgtgtggggaaaggagatgtgtgagcaatttctgtaccttctactcaatcttctgtgagactaaaattgctgtaaaaaataaagttcatttttttaaaaacc

SEQ ID NO: 507571 - DNA, 212 bp, Homo sapiens
gtgatagcttgagctcgggggtttgagactagacctggttaacatagaccccatctctactagaaatacaaaaccaggcgtggtggtgtgcacctgttgtctcagctacttgggaggctgagttgggaggatgacttagcctggtaggttgaggctgctgtgagccgagatcgtaccagtgtactccagcctagaagacagtgagatcctgt

SEQ ID NO: 507572 - DNA, 771 bp, Homo sapiens
gacactgtgtcttctgcttttaggggcgcagcctctgtggccctgtgacctgccccctggaagcctattaaatggtgactgttgacatttagggatgtggccatagaattctctctggaggagtgtgcagtgacctggacactgcagcagaagcaatttatagtaggaatgtgtatgttagagaatcgtagcagagaacctgtggctctcctgggttattgcatgtcgtctaaggccgatgactcgtcatcatcgtgtcatattggacagaaatacaataaatgaatagagaagataaataacaaagaagaaagaaatataaaataaagagagaataaacaaacaaaagtgcaacagtttacaaagtcgtctggggtagaaattgaagcaagacaacgtgcgacgtacccgagggctccggcaaaaaaccggtacagcgaacgacttgtctacgaaccatgatgtgttctccttgcgcgttcgaagctcaccggaattccggtgttgaaagactcttacacacgatgacgctgacggcccgattgatgtcctgcatgtctcattgtgttcaacggccagccacactggctatgaaacgggacgatctggcgacatgctttggacgtcttctattgctaaacccacccttgatctacagaagcgatctctgcaccagattactggcttcgcagggacgatccctttccggcaaagacttttctctctactctggcctatagttgaagttaccgttatagcatgatgaaagtg

SEQ ID NO: 507573 - DNA, 443 bp, Homo sapiens
  misc_feature (5)..(5): n is a, c, g, or t
  misc_feature (122)..(122): n is a, c, g, or t
  misc_feature (241)..(241): n is a, c, g, or t
  misc_feature (284)..(284): n is a, c, g, or t
  misc_feature (346)..(346): n is a, c, g, or t
  misc_feature (386)..(386): n is a, c, g, or t
  misc_feature (416)..(416): n is a, c, g, or t
gacgngtgggaagaaggtggtgtcttcgcctgggtatcaaatactctggggccgagatggggatttgcagcgatctcatttggctatctgcaaatcgccattggttttattccgatgctctntttcgtgttaggggcactctcctacatcctgaaatggccagcgctgaatgaagaccccattaccaaaactattgcagcactcatcattctttgggcgctggcattaacgcattttggtngcacgaaatacacggcgcgaattgctaaagttggcttcttcgncggtatcctgttacctgcatttattttgatcgcattagcgctgatttatctgcactccggtncgcccgtttgctatccgaaatggattccgaagaccttgtntccccggacttgttgttaaaagtggggcancctgggtaagtattttgtttggccttc

SEQ ID NO: 507574 - DNA, 606 bp, Homo sapiens
  misc_feature (45)..(45): n is a, c, g, or t
gggcgcaaggcggacatgggcggcgcagttgtgtgggtccagganttttataacgtcactttggccctggacttgagtttcccccctacaggaaaatttttggggggcgaggaaagcggggtggagtttgggatgcagaacatgggttttcatcgaagcccccaccgggctatgcaggtggtttgagctcggcctatgggggcctcccaagccccggcctcagatacagcctggggtccaattttggttttgggggggggtccagttccttcaaccgccccagctcctccagggccgtggttgttaaaaagatcaaaacccgtgatgggaagttggggtttgggtcctttgaggtcctgcccaagtgaacagttgggggggcccctcccagcctaccccttttggggtgccccagagcctgggaagggggccccttttcaggggagccctggggacaggggaccccccttggggtcaggcccttgccctcagcccccttggggggtttttttcctgggggccccccttggccatgcctccaggttcaaaacaattcaattggtttttttttttgggccaaaataaaacctcaggtgggtttgccca

SEQ ID NO: 507575 - DNA, 644 bp, Homo sapiens
gggtctctgacaggctcagctggagagggacgggtgggacgcactgtccttgtgcccttccccctccgcgagcagaagctgactccgcaggagcgagggtcgcagagctgggtgagcggaaatgtccctccgcagagatgaagtcgcagggtccgccccgcggtctgagggagcggaggtcttcctgggggactttcaggtctccacataggtttgtggagccggacttttgaagaatgattcgtgaatccggaatgggtgacagcgtcatcacggtgactttgagttgactagaccatggattcttgagcagtgcaccagagtcaactcgctagtgcatcctcaagacctgaagattactttataggtgccagctcctcgtgcagaagagcgattagaatctggtgcaggaagcagagtgtcatttagtcctgagtccatcctcgaaggaaagttccccagtgttcgcagttgcaggaagatgttgaccctcaaaaggttggattcgcttctggataaacagtggactttatatagtttaatcccttatataaattctcctatagtaatctcagagagtatgctagagttctcaatgcttgtagtgttgctgaagagcaggaaggacttgtgtggaagtggga

SEQ ID NO: 507576 - DNA, 112 bp, Homo sapiens
ccagggctcaatctctgggggctgaggagcagcaggaggggggagggaagggagccaagggattggacatcttgtcatttttttcctttgaataaatgtcactttttgaggc

SEQ ID NO: 507577 - DNA, 311 bp, Homo sapiens
cgacggactccccctaggtggaaacgcgacgtaagacaacggtacacgtaaccgacaggtctgtacccaaacagtgtacgtacttatccttcggacaccttgaagcgcaatctttatgcactcggactgacacctaattggataatttatgtcaatttatatggatacaccttcgcgggttttctttagattagagacattgcaaacaaagaaagattcaggcataccattcactgtggccgccaagtctaaacaccagatgcagataaatcctcacctctgggtttggttgcatccgcatccccaaatcc

SEQ ID NO: 507578 - DNA, 665 bp, Homo sapiens
  misc_feature (189)..(189): n is a, c, g, or t
tccaaatttggaaatatggtacaacggagtctgtgtttgccagaaaaggccctccattcatcccggggttattcgagccggggcaattggcaggcagctttatcaagcagcttggcaacattcgggtattgcagctatatgctctgtagtatagaacagacgttccggagcatgacagacaggatgtcntcaggcaatgtcatatcagtacattctcaagaatgtctgctcattgtcatgcaaaccagtgcgcatcgcaacaactggaggtctatccatgagtatcagatcctggctgcaagctctgtgctgcaagaagcgttcatttctctcaggatgatgatatgcgcagcagtcatccgtttcaccaaagggttcgagaacagatgcgctgatgcataacgtgtttccattaggggtatccagtaacctgcctgaatcttcacctacatgatcttcatatggtccatgctcaagacacggacctaaggcatgcaacggcaagactgcgctatagtactctcccagatctttgaaccatatgagcatcgtcactagtgtgggcatatcggcgaggcacgccctgggaataagtcaagctaaagagagacagcaggcgaatagacgttagcagattcagtgtgcccaaggggtatgcatttgac

SEQ ID NO: 507579 - DNA, 149 bp, Homo sapiens
cctgatacgacctttactgtgtttcccaggctgcacttgactcctggacttaaaactatccaccagcctcattctcccaaggtgctgggattacaggtgtgagctaccactagtggccttttgtaagaggaaatttggatatacagaga

SEQ ID NO: 507580 - DNA, 237 bp, Homo sapiens
acgttacagcaacagtgctcctctacaggggtatgaagcaccgccaggtcctttgagttccaaacatgtggctcgtaatgttctggcgagcagattgtagcttgactttaacttgttgagcgtttataggactaagccatatgtgggtgtatcggtgaatccctctatcagtcccacctgcagggcattgcaatgccttggcatctggcctgtctgttctatcaatcagtcgtgact

SEQ ID NO: 507581 - DNA, 162 bp, Homo sapiens
gggagcagcacttgggagagctctaccactgttggcctcttgcaggaaggtcctagtgggttgactggagtaggatggggatggggagttgggtgtgggttgggaaaaaggggatgaaacaagctctgagccatgaaagcattctttcttaaattccaagaa

SEQ ID NO: 507582 - DNA, 179 bp, Homo sapiens
ctccgacgtgcttcatccgacgtggattcagtataatcatagaaataaaatagaaacattgtaacgtgcagcagggcagtcaacttttcattctcatgagtttctcttgaatgtgtaccatttattagccagttcttcagaattctgccagtttcagatgtcaacccagcattggacag

SEQ ID NO: 507583 - DNA, 288 bp, Homo sapiens
  misc_feature (174)..(174): n is a, c, g, or t
cagccaattttttttaaacgagacatggtcttgctatgtggcccaggtgggtcttgaactcctggcctcaggagatccccccaaccttggcctccaaggggctgggattacaggcatgagccaccgcgcctggcctcaagtaagtttttataccagtgataggggaaaacctgnaaggctaagagatgtgcggttttccttcatgggaccccattttccacagtaaccgaggggtataatcatttattacgtggtatgccatttttgccttagacaacatgggtctgg

SEQ ID NO: 507584 - DNA, 355 bp, Homo sapiens
  misc_feature (36)..(36): n is a, c, g, or t
agctatccaaggcacaagtacagaatatatatgttntcaagcagtcagtactcttattgttcacttaagaaaactcagctgagatgttgatggaatacctggggcacagtaattgcttatacccaacttagtagaaatgcatcacctgttcttcttccgaagtctgttctgcacttaaagaggcactaggttcttttaaggatttcatgcaggcaccagcatacagagttccacatggggaatctttgaccgggtaccatatatttgcaagccgggaggaaagtctaaaaacatgtttggtcctaatatgagtctttctgtgagaaggacatttcttactagggataatttcttt

SEQ ID NO: 507585 - DNA, 1292 bp, Homo sapiens
cgacgacgacgacgacgacgacgatgacgacgacgacgacgacgactacgactgacgacgacgacgacgacgacgacgacgacgactacgactacgacgacgacgactgacgacgatgacactgataactatcgtatccgagaactgcgacgacagcctagactgcgtactacatctacgactacacatcgtctctgttctgattatgatggtaatacccatagaccaactgtagtagagtgagcaatacaccacattaatatgtcagatcaaagcacttctctcttccacagcacgattagtgatgtggagttactacgtataacgtcctcatcacactataccaacaagctctctgattgattgactgcgttcgcactgatactgatgtcgtacatccagctatacagcagaacgtattacgtagatacatgggacgtccttaggatgtagtcactcgatcgaggcgcacatcgtacgtcgacaaggctacacgaatacattgagtatcgttcatcgtgaggctctgaacgtggtatccgtctgcgaagataccgatgacatagtcgctgatgaaggctacctgtgtttgttggcacgatcgatctgggctgtaccctgtaggcttatacttcaataacgaattacgcacgatctcatgatttattacataatcatagactatgtttcaattctgattgatattaacggctgtaatcgatgcaaatggcaatagtgtgcgtcgacgcagtgtacggtatggatgaccaccacaacatcccggatgatgctgtacgattgcttagagctaactggctaccgctcattctacacgtgcatcctgtattatgctcataccgaatcaagcaggatgaggagccagcgcacacagtatagcactcacatcactgtaagcatataaatacctaagatcatgtctttggattatctgactacagataatgagacatagaatgaccagagtagacaccagctaacgcgacgaagcagctcactatcggagactcacgaccacgattgtatagcttgatcaacgaaaggctgaatgtgatagactagcttaattcatcgccttagagtgataatacacatcgcgtcctcacatcttaactgagtgtacgttgcattgagtaacacgtgcattcttgcagccccagtgcaagtagagatagttatcaattgataacatgatattggtctgctgagaagaacgaagaatcaatgcatttattatgccccaattgtttataggcatcacatgtcggtctttc

SEQ ID NO: 507586 - DNA, 455 bp, Homo sapiens
ggtatagacggaccggggtccaacactaatgcagtgctcacgccaaacgggaaatgatcaaaccggaagaagtacactggcggactatgaggagtggcatcaggattataggaactgcagggaaacaactatgtatctcataatggggctagaaaattttcgaagacgaaagttatactacgattcctggctgttcctcatctgtgcttactcagaataacaaacgaactctcgtcctaacggcttataccgaggacatgactgaagaattgatatcactttatagaagacgaactgttggctaaaattaacatgacgcaagccgcaggacactcttcgaatctggagaggatcgagaagtacaacaatggtttgattatactgaatgacgttacttgtcccattttggccattattactggtggactgaaatggaagacaaggatatactagct

SEQ ID NO: 507587 - DNA, 409 bp, Homo sapiens
tgagacctggttatctgaagactcaagatctgggctacgtgttgaaaaaatgtccagtgaggctcacttatgtctgtaacgatgggaaaaccatacaagaacatggttctactaataaggattagaggtcatcaatgattcatcatttaagacatggttaagtccttactgagcaacgcatttaaacacttaatttaaaaatgagcagcaagagtatgaccacaattcagattgctgacttgatggcagaacagttccgcagtgcatgctggtttgggcaaactaataaaaattttcgaagatataccaacgcttgaagacctgggtgaaactcttaaaaaagcacagttaaaacgtaaaggagcagccctattaagaaagaggaagaaggaagtggatgctacttcac

SEQ ID NO: 507588 - DNA, 559 bp, Homo sapiens
gtgtgattagaaataaaattaaagatggcccagttagatcggaatttcagataaacaataggttttttatatttaacatggaatagtgggaaaatacttatacggaaaaatggttggttggaaatccaaatttaatggggagtctggtatttaatcgggcaatcctaaaatacatgggtatgaaacaaatcactttaagaggtatatggctatttggatggggtggttttggtgtgtagaaacgtacaataccaactcaagggcacaggagattcctaaacatggtgaaacgtggagtagatcatatattaatcctcatattactttcactattactaaaggtgcggatccagcacatttagtagagatagttatatgggctatataacacacgtaacggggggtcgggaaagttcctccattcattggatttcctttagaaggcgatttccagggtgtgcaatttatccatgaccacatacacggatccacggacctagataaggtcaagtctctcaggtaacggttaaatttggaggtcggcttaaaaaatacttca

SEQ ID NO: 507589 - DNA, 404 bp, Homo sapiens
  misc_feature (404)..(404): n is a, c, g, or t
gcacgagggattaataaatattataatccaatgtaaaagtcattacatttgccataatgtaatgattcagttcttgttcaataactaaattgctatgtatatatattatatatatataaaatatatatataaaatatatatataaaatatatatataaaatatatatatataatatatatataatatatatataaaatatatatatataatataatatatatataatatatatataaaatatatatataatatatatataaaatatatatataatatatatataatatattatatatatatatttgtatttgtttattttttcactcacaggtcaaccatgaactatattcttatttgttattttttatttcctgctttgggcatagaagatgagttatctttn

SEQ ID NO: 507590 - DNA, 553 bp, Homo sapiens
aacggtcatggctggggaagcgtggcaaggtcaccaagtctgcccagaaagctcagaaggctaaatgaatagtattaagtttcccgcccacccggtttttacaaaccaaaagtttaaagcctgccaccccactcttaatcagtggtggaagaacggtctcagaactgtttgtttccaacgttcttgggagagccccaaacatttggtttcgttttaaaaagaaaaggggctttaggttaagctaaacacaggaccctggggtctacaggtgtataacaatgcagtcgtaaaaccttcagaaggaaaggagaatgtgtagtggaccactgtggttatctttttagcgatgatggccacaagggggtatagtgtttaaagaaggggaggttttgttgaaacagttttagttttgtaaaaaaagggggaatgtagtggtgtttacaaagacaaagaagttcgaaggcttacctctagtagtacatgggagagacgaagcttgcacgcaaagaattgtgtcacaggaattttgaggaccattaaaaaagttaaatga

SEQ ID NO: 507591 - DNA, 360 bp, Homo sapiens
gcaaacaagcagatggtgaacaacagatctaaagatggactggggaagccgagaaagggagctggagtctgagctctgggagtgggtcgggacctcgtgacattactccatctgctaccccacgcttccttaggctccagcctctggctagcttgagaggaaggacgatggtcaaggtacatgtctcttctcctctgactctgggcacatgcagcatttttctactccccacaggcttgaacgtctccattcatcaggcagtgtctccacatgccaaaatcagaggaagtccgcaataaaacctcccaaggctgaaaactagagctggcacgtagtccatggtcagtaaatgttttcagg

SEQ ID NO: 507592 - DNA, 249 bp, Homo sapiens
tgcagctcatcatgaggcctattatgcctctaaatttctcttaactttgtcacgtctttccatctcactatttgctaatttaggcttctatcgacgtcttttctgttgtgttttagtttagagacagggtctcactcgctctgttgcccgggctgagtgcagtggtgcaatcatggcccactgaagcccctatcttccggactcaagcaatcctcccacctcaggctcccgagcagcgagggaaagaca

SEQ ID NO: 507593 - DNA, 856 bp, Homo sapiens
tgttcgtttccgggtcccggacagtccctgggccccaaccggtccctggcttccgatcttgggcccatgtttccgcgcgccgtgtcccctctgggcaccctccgcttgcaccttgttttggacccccccgttggccagtgtggccacagcaccaccgcggggcttgtttcttggcattgacccgtgttcccttcttgtcgcccaacccagggcactggtccgccgggctgacgcgaccctgtccggttcgtcgactgtgtacctcaggagagccaccctttctcccccggaccacacacaatttacgaatcctacaacattgggtcccccccccaagattgatcccctccactcatgttgcccacaagcatttttcctcgctgcagcattaactattgaactcatacacctcttttttctgcggtaaaaggccactctcccctcacgtaatcatagatactccggcacactctctgtctaaaatctaggagattacatacaaccccacacacgactatactcccctcttttggatcctccaaacagttccacctctccaacattatctgcttccctgggaatttctctcttcactattataaccacagcgggtatatttctcttctaaaagatctttatacaaaattacttttatttcaaaaatcaacacgcaatttttatttattatcgcttcctcgatgaattctcatggcgtcaacaatgtgacccttctttagtgttacgccaccaccacaacggtccccctttcttctctaggaaaagaagacacgaacatgctcttttcgtgtcgacaaaaattgggtaacaatattccccccatttcttcaccaaaaca

SEQ ID NO: 507594 - DNA, 934 bp, Homo sapiens
gactatcagtccattggcagtaccgtgttgtggggcggataatctaagctgcgagttcacaccatttgctgtatctgaaagctgtgtcgattgcttgttcggaggagccacatctcatttctgtgtgcaatgtgtcttggaatgggtatcgggtaccttgcaacactgacattagccataggtctgatatcccacgcatttgctaagcacaaaattactctaacagattagtcaatcaaagacagacctctttcaagacagatggcaaggctggctacacttcacatttcgggcgtataagagtttaaatgggtttgtgggacccccacaagatgccaatatccaccatgctgccaacgcatggcagatgtctttaggggatcgacaagatgccacgtctttcttcaaacccatgtttggcactattcgacaattctacagaatattaatcgacaccaattatattggggagaaatataacaatgttgttgatggcaaaaaaattttgaaacacgcaattaaatttcgcaaaatatatgtaaaatcaattaggcgttgtaatggacatttgcacttaaattttggtggcgaataattgcaaaagagcaactgttcaactttgtgtgaccattttggcacatgtagagtatgggcacaactttcccctctccacaggcccatcgtttgtgacaccccacggactacaggacaacattctgccacaaaagatctgcccaagcgcagcaccacctgttgccccgcaccaccggcagatcgcgctgctccctacaaaaattaccacctaagatgtcaaccttctaccacactgtggccacaagtttgccctcggccaacacttctttggcgcaacaaacggccaataactgcgctatacattggaacagcaatgggggcacaaggctccatatacagc

SEQ ID NO: 507595 - DNA, 108 bp, Homo sapiens
gcatatggcaaggtcagtacctgcgtaggggcacaactccataggtagctttttctatttctacgttgtccgctgctttacacaactccttggccttgccatatgcaa

SEQ ID NO: 507596 - DNA, 515 bp, Homo sapiens
  misc_feature (106)..(106): n is a, c, g, or t
tatatatatgtcattaacatgaaggattttgtccatgagcttaatgttattattgccaacgtattaattcatgggacttcccaggaagtcttgtaacactgtgacncaggtcttatgggtaagacactaaaagtgagaacaaaattatggaaacaaaggttggaattattctttttagtcctgcctttagcttattagataacacactctcccaatgatatcttaatattttaattcatatttatttttgttggaccaattagcatattaaattttatgaaaagctttaatccaagatatagaaagaaacagaaaattatgtgaatcgtccagataagtgagggtgttataacctagggagactttgagaagtactggcctttttattgaccacattatttggctctaatgcaataatgctagaaataaataacaaaaaataactagaatgacatctacagaagaaagtaaaaccatagtacaaagaactcatgggtcatagaataaagtccagc

SEQ ID NO: 507597 - DNA, 349 bp, Homo sapiens
taattgaatttcgctgctaaaaatacaaaaattagccaggcatggtggcacatgcctataatcccagctactcggaggctgaggcgggagaatcgcttgaaaccgggaggcagaggttgtggtgagccgagatcacaccattgcattccagccagggcaacaagagcgaaactccatctcaaaaaaaaaaaaaaaaggaaaaaaattggggggcttaaaaaaacattttattgaagcccaggagggggggctaatgcctgaaaccccaacattttgggagcccaggggggggggatcatttgaaataaagagttcgatcccaccttggccaacatgaggaaatctcgtt

SEQ ID NO: 507598 - DNA, 227 bp, Homo sapiens
ccctgctgtacatagtattgatagatattgatagtaactgattcaggcttgggagcgcactaaagtgctgcagctccttatctttgctgcttgttatagctgtagctagagccatagcacaggaagttagtcagttatgagtcagcacagctgggtgccattaccattttaacgatcaacactcatgttcagccgggggtaccgagcctctgaaattccgtctcgtg

SEQ ID NO: 507599 - DNA, 95 bp, Homo sapiens
ctttcttcttggtggcttttcatttccgggtgttctttccggcaggctaggtgtcgtgaccggagtggccgagtagacggcagtggagaatgcac

SEQ ID NO: 507600 - DNA, 103 bp, Homo sapiens
cggctggtacgcccccggagttacgggatggcgtagtacggactgggcctggcctggggcgtccccgcgaagcctgggcctgtcaggcggttccgtccgtgtc

SEQ ID NO: 507601 - DNA, 158 bp, Homo sapiens
tgtactctaacattgtattttttatagtagcacccagaggtgtggggttctcgacgtaagtctatcttggttccaaaatttgtaataattgaagcacctgaggactcagtctccctgtcttccctttcccatctatttctattccttttggtgatctc

SEQ ID NO: 507602 - DNA, 493 bp, Homo sapiens
gcgtcgacattcatgagccgtgtcctggtgtgggattgctctttgtgtgatacactttctcagtaaggtaggctcactgtggcagaaagcgggattaccgtgggagatatattgagaatcaccaagaggccggtcatggtggctcactcctataatcccagtgctttgggaagctgaggtgaggtggattgcttgagcccaggagttcaagaccagcctgggcaacatggcaaaaccctgcctctacaaaaaatgcaaaaattagccgggtatggtgatgcacacccgtagacccagctattgggggtgctgaggtgggaggatggcttcagcccaggaggttgacactgcagtgagccctgatcatgccactgcactccagcctgggtgacagagtgagaccctgtctcaaaaaaacaaaaagacagaatcactgagaaagcaaaacataaggtttaaaacctttaaaaggcaagaaaacctaggtttgcat

SEQ ID NO: 507603 - DNA, 857 bp, Homo sapiens
gaccctgaggacttgaaattgtgtccagaactggtgggttcttggtctcactcacttcaagaatgaagccgcgaccctcgcagtgagtgttacagttcttaaaggcggcgtgtccggagttgggtgtgcttctgatgtccagatgtgtccggagtttttcccttctggtgggtccgtggtctcgctggctcaggagtaaagctgcagaccttcgcgtattacggatcagtattgtttcaacactgaataattgaattctgaaaggcagtatgtggtatgaccaaaaagcaagactttgtcttgctttcatcagtgcatggacatttgagctctttcaaccttttgtggctatgatgaacatgtttgaatgctatgaacattttatgcacaagttctgttatggagaagaaaataagacacacaggaggaaatgaatatttccataaggaataactactaacaggatgtgagagaatcaatgatcatgtgtccagaaggtgggttattgctcatggctcagaacaacaacaccttgaggaatgtttcctctgtcatgccatatacctgatggcggacggagcagttgtaccagtattggaaaaatgcttcctgatattgattgtccccggtttgaactgatccaactgatcagttccccaggtgctggtaattcttatatatcctgtttcacctccaagttaacctatgacggcaaattggtatatgttacacggctacaggtgttgggccaggatattggggaggggaaagagcaacggtggccactccactcttcacactcgctctttggcggtcacacggacacacttctgggacaggaaagcgtctggcgtcaa

SEQ ID NO: 507604 - DNA, 123 bp, Homo sapiens
tctatatatgcttggttaatttttcatctttcccttcggactatatctatgcgcaggttcaattctatcgctatacttatttgggtaatggttagctaaggtgtctgagatacaaaatgccat

SEQ ID NO: 507605 - DNA, 225 bp, Homo sapiens
aaggcggcgtcaggtcggaaccggtctaggcgactgaggttctgcccctaatccccctcaagggcatccgtcactcaggtgtgtaccacacacccgactccggggttagcgtcgatagtcgcggcttgccccgtcacaccctcgacgaccccacagtgcagggaacacaccacctgggggtgatcgcgggccaggtcgaggaagggacagtggcgcagcacgatg

SEQ ID NO: 507606 - DNA, 572 bp, Homo sapiens
tgtttagaatcagaagcagttctgatttaggcaaggcttgtatagacaccaaagaaagacttgcttttctttacccctatcttggtgtacttgctctgtgttagcttcattttcagttacactttctctgagtgggagcaacagtggccattgatggtttcaggctttcattattttcaaagtaaatgattccaaggaaaatccttcatccttctaaaatccttcatcatcgtaaaatataaatatgattatttctctgtttttcttaattctattcagtggttcctcacccccttcaggataaagttcaaattctgtggcaagcaagaattcatgaattcttgatttggcttttacatattttcattgtcctgttgctctctgctttaaaatttgtatccataaataccaagttgcatgtgcagtttcctctgcctgcagtggcttttcacattgtttacttgccaaattcattatcttttagctaaataaaccccagttcagatattactcttccaggaaaatcttatttgataaattttgtgctcaatcccagacaaggtagagccgag

SEQ ID NO: 507607 - DNA, 1455 bp, Homo sapiens
gccggcgcccttccaccccgagccctgactcagccctgcggccacctgcgccccgcccctgtctggcctgctgccctgagcccagctgcctgctgagcctgcatcccctgtgctgtggcttggcatcctgtgcccctgtgaagctgctgagctgttcacgttagctggctgcagttggctcctgtctcctgctgtgacatgagctgctgctgcccccctgtgccctgtgccctgctgatggggtgctccctggctgctggtcccctgatgcagtttccctgccggggtgtgagctgggcctgatgccctgtgctgggagtgaccatgcccctgctggcctgctccaaatgtcctgtggatgatcggactttgttttgatgccccgggagagcgccagaaaggcttgtgctgggaatgcccagggctacgcattgcaaacaccgtgtgcgggccctggctgctggcagtgctctgcagaagatccctgcaattgacacggacgccttgggactgcctgtgcatgcaacacccgcgaccgctgtcgaaacgaacgaaggagccgaaggaaacgacacgacttttttaccctaggaacaaaacgtgctggtccttccgtaaaacaatttcgccctggtgtggccctgttcctagacacgaccaactggcttggcgcccttcatcctggagggctggggagaacctatacccatacctcgggaacggcagttgcacggaaggtggagacacaccctcccattctttcccaattccgagcaacctgatgtgccattcccgattacatgcggggcaaagttcaacagggaccttccttcctacgccacgacagtttggcaatgacggaaaactaaattacgcaagtgcgccgtaagttggggattacccaaaattggacttcaatgattaaagaacagattggaaaaatgaagcaaaagaatttcaattggtaaccccacgagatttcagacgtagccccttaaaagagaggacaaattagtttggctgggaaggctttagtgacagaccacagagctgtggatttgaaagtcattctgtgcagaggaatatataggaagcggagagataacgcacacggacatcttgacaacccgggcatacaaacacgtgccccagcaggaacataacttgcgcagcttccatgttttaggtgcatcttacccgagagtgcccattgaaagcgcatagacaacggaaacgctgtcgataggcacactttggcagtaaaccgaacagtctgagagttacgctaccaatgtgtgcgaagctccaaacgcctctagtattttgcataccagggctcatcaagagtctcaggacggtagtcccagcagcatgcgatgcatacacaaccctcgaggaggaggcacaatacctagtcgttgcgcgtcacagcatactgcggacgcagcaagggaa

SEQ ID NO: 507608 - DNA, 685 bp, Homo sapiens
  misc_feature (156)..(156): n is a, c, g, or t
  misc_feature (167)..(167): n is a, c, g, or t
tgtgttcagtgacttacgtgcttggatttctctatccaattataaaaatcgcccggctgggaacacgagtcgttcttgaacaatctccatgatgtgcatgttctgatggtcattactggtgatctatgcaatcaggtagtccaaggcgagactcgnatattcaaatntacgccctcgccctgagagttatttccacgcgacgtggaaggcaggccgtcagacatgcctgggtccaatttggtaccctgccaggccctccgtacacactacactcgtctctgaggcgttctagtttcgcaccggcgatgaatgatggcctctggaaagagcgttgagccatcttctatccggcgagactggcccgagcgagaaagcgcgtaggagctacagaagcgtctccttgaacgatgctacataccaagccgtggctggccagcgcatctcttccagtgacattcaagaaagccgagctgacagattgagttggggtaaaaaccccaagacgccatgaaaagctgccaatggccctggaagaaataagcttgaacccaggccctatatgcgatccttcatgaccctgaggtacatgacccgcacggaacccccatcttctgtgactttcctgtgagacttcacttcctagaatgagcgacagttgagcttattcaagacgattgggtgacca

SEQ ID NO: 507609 - DNA, 138 bp, Homo sapiens
attatatccggtgccgaggattatagttggttgttgttcttaacggtaaccggcctactgcagaccttgaagtgtaatacttctaggcagactaggtaaacacgtgggtcataccttatttgtcattgaacagatacc

SEQ ID NO: 507610 - DNA, 279 bp, Homo sapiens
taagcatacgatgacagtatgcgacatgaactgaattattaaaactttaaaaagaaaacatatacatagctgaagcagtggtggaaatcttccattctgatagccccatatattcaaatattatttttccaatataaacacatcaattttttggtcactgtgttgatgaatgatgaaggccatgctgcacagtcaactaggtattccttatcttagctccagtgcatcagagaatagatgttagtgttttttttttttttttttttttttaacgtttcc

SEQ ID NO: 507611 - DNA, 444 bp, Homo sapiens
gaccaggagctgaaagctctgcggacagaaacccggttctccgtgcttcaggaggaggctgcctggggccaggtcgaggcactgcaggaggccctcagcagggcccaggctgtgctgcaggaaaaagagcggcatctcctggagcagacagaattgagtcacagtctagaggccagcaccgccaccttgcaggccaccctgaacacctgccagacacacgcccggcagctggaggaggccctgaggacgcgtgaaggtgagatccaggaccagggcctgcgacaccgggaggacatgcagcagctccagcaggcccttgcccggagggacgaagagctgaggcttcagaaggagcaagggcagctgctggagaagcttctggcccagagggaccaagaggacgtgctccaagagaggcagaatccggggcagcaaaaaaaagag

SEQ ID NO: 507612 - DNA, 166 bp, Homo sapiens
ctccagaatcatttatacgtggctggcatctgcttcactgtagtactctcatggccacaatgtcttcgaacatcttcccgccggttaccaggtcaaatcatcgaggtatctgtaaacccatctatacacataagtagctgctcactggtgacgcactatttatagg

SEQ ID NO: 507613 - DNA, 897 bp, Homo sapiens
aaaaaaaataaacacaacatcttttctgtccctaaggagtactgacgtagctgaagaaagaagaggggaaaaacaccacaaaaaatgtaaagaatgaagcaacaatataaggaatgtcacaagacagaccatgatcatttgctaaatgagtggaatggaaaataagtacagtgagttgagaggcaggagcaatcacctagaatctgatagtcttgctgaagtgccataggagtgatcacggttcactgcagcctcagcctccttggatcaagtgattctcctgtcgcagcctctcaagtatctgagaccacagggtacaacagtcccagccccgcccatcacacccacaacccttatgtacgcccaagggtgcctggcatgcaagattctaagagcaatgggttgcaagtccctttgacaaagtttgcctggggaccaggaaatttaaatctacatccgaggaccaaagatatttaaattaaaaacttcctaccaaatccaacagcagctaagagagtggcgaatgcgatattacagaaatcggtctgcagcctccaaatgccaaagtggcagcttgttatttatgataacgataaggagcagctcgttactaaagatatccatgtcaaccccacgcattgagcagaacaaaggatcgttaatgattcctgggcttgtcatgtcagaatggggtggcgatgataaaagagcatctatatatgctttccttgtgacatttcttatttttaaactcccatataaacaatatgtgttcaatgtcatgatttgtgtcacatgctatgctcccaggctggaccaggaaacagtgtccccattctaagtattttataactaaagcaataaacaaccaataaccaatgaccaagagaagagaaa

SEQ ID NO: 507614 - DNA, 966 bp, Homo sapiens
gctgtggctaaggaggggagaacctctgctccccgcccgtcttctcttctgctgtttcccgtggctagggtggcgtgggtgagtggttttagtgcgtgcgaagccgctcggcagcaccttccttctttgccagtgcagacgcccgttgtagccgttggggaacctgttgagaatcctgtcatggagcctagagatgggaatggtgacctgatgagacaccccatggaatggtcatgtggaaatgcatgtgcatggcccacaaagtaatgctaggtctgtgggcaggctgatggctgattgaatagcctgtgttgtggattctcagagcgacgatgtcagtccctgatggcgcagagaagagccgcgcttaatcgtacgcatatattaattatacttgagcaacgtgtcgaatgtacaccacattgacacagactgttgtgcaagtatgcttgacaggtattgcgagtatcttggagcagaattcgcaaatgattcgcaaatacccgagactgtgtgcgcagacgttatttcgatcagaaagccagccgtaaagcatacgatagatgggtactgttgttactagcagggtgacatgcatgttcagtcgtaccacatatttaacacgtgattcatatattgagagctttgcgagtgatctgtcgcagaaacgcgattacagtgaccattaacataacctgcgtatgcgcataccagccaatacgatactgtacatttatcatagacgtgaatagtgagaataaggggcataacatatatcttaggtaggcgtaatagtgatggcatgtgtacgtagttccgtgtccgcagcagtagtagcgcaacggtgtggacacagtgcgcacctattgtaacaccttagtcatttatagttggctaatagttatgatccgcgtccattcgacgacgctttgtcaggtgaaatggagttcctcaatacgagttgca

SEQ ID NO: 507615 - DNA, 875 bp, Homo sapiens
ggtcaataggatcacggaagccagctctctagatgccctacccggattgctcgcagccgttcaggccgtcgaatgcgctggtagcgcagactaaggcggcagcgccgtgaattagttgacgacctagccgggcacaatggatggcgcgtgttctggtagtccggtgcgcgacctcgcgagaggggccacaacatgtcgacggccagatcagttcaccttgctgcgaacggcgctgaattagcacgagcaccgtagttgcgcagccagaccgggatggacgccctgtcctggcatcggtggagctgacattgacgtcgcgcgtagccgtctcgatgcgtccgcgtggggaccgtagcccatggagaagacggtggctcgttccccgactcggtccttggataccgggtcccggcttggctgccggagcgttgcctccgagccttgcagcgcgctctagaccgggtcttccggtctgctggtgcagcttcacctggccgggctgcgtacgtattcgcatgcctgcggtcaggtgtggtccgggcacgtatcccgctggagccgcattggtcccggcgtgctgcgggatgtccgtaggggctgctacggagtctggcacgtggctgcctgtgtcatcgtaactggcttgtcagacggaggacctgggctgcctggtgctggcgcggaattccgcgagctgcggagtgtggcgttgggcggctgcgggcaactgagtcgccgggctgcttggggctttggccgagggcgtgcccacgcctgcagtgcctgtcgtcgcgcactgtgactgggtggacgggtggcgctggcggctcgctgatcgctgccggcctgaggagctgggtctcaccgctgcgcag

SEQ ID NO: 507616 - DNA, 545 bp, Homo sapiens
gttgatgtgactggttctggggctatcatttcaaacttggtctttttctatttgataaataatgattgcatctatttatggggtacaatgcgatggtttgatacatgtatacattgtgaaatgatcaaactaggctaattaatatatctaccacttcacatatttatcatttctttgtggtgagaacatttaaaacctactcttgacagggcgcagtgggtggttcatgcctgtcatcccagcactttgggaggtcagggtgggtggatcacttgaggtcaggaattcgaaatcagtctggccaacatggtgaaaccgcatctccactaaaaatacaaaaattagccgggcgcggtagtgcacacctgtaatcccagttacttgggaagataaggcacaagaatagcttgaactcaggaggtggaggttacatgagccaagattgcaccactgcactccagcctgggtgacagaacaaggctctgtctaaaaaataaaataaaataaaataaaacctactcttttagcaattaaaacatgaaaac

SEQ ID NO: 507617 - DNA, 261 bp, Homo sapiens
  misc_feature (38)..(38): n is a, c, g, or t
  misc_feature (51)..(51): n is a, c, g, or t
gctccttactagttgattatccgatttaataaaaatancaaaacctgatgnagactagggctgattgtagccattgtacagtgtcgggaacataccaggacactgagaatagtgtcatgtcataaggacccagagcaggtggaccctgctgtgatgcacaaagaggaccacgcaagatatgataaagatctacatcactgaattttggttccatttttgtatctcagcttcccggaaataaaaaagaattctaacattcat

SEQ ID NO: 507618 - DNA, 408 bp, Homo sapiens
  misc_feature (38)..(38): n is a, c, g, or t
  misc_feature (51)..(51): n is a, c, g, or t
gctccttactagttgattatccgatttaataaaaatancaaaacctgatgnagactagggctgattgtagccattgtacagtgtcgggaacataccaggacactgagaatagtgtcatgtcataaggacccagagcaggtggaccctgctgtgatgcacaaagaggaccacgcaagatatgataaagatctacatcactgaattttggttccatttttgtatctcagcttcccggaaataaaaaagaattctaacattcatactttcagtattttatgtgagaggttttgttgtcaaaatcaagtctgagagcaatgtttgttgggcctttaattggagtcaccaagtgataaaggggacattgtcctcaacaataaccctataataaacacgttttcgacagtaaag

SEQ ID NO: 507619 - DNA, 201 bp, Homo sapiens
accaagacccttgcttaccaacctccaatgccacctgaggtgtatactacttggggatccgtgcacgttaacgattactaggactatgcagaaaccagagagtttaagaataccgcatggcttggttcgttgttttctttctttctctttttctgttctttatttctttcttcaattctttttcttctacacactcccctt

SEQ ID NO: 507620 - DNA, 279 bp, Homo sapiens
  misc_feature (23)..(23): n is a, c, g, or t
  misc_feature (29)..(29): n is a, c, g, or t
  misc_feature (41)..(41): n is a, c, g, or t
  misc_feature (72)..(72): n is a, c, g, or t
tgggggtttgagatattattatnttaganatttttaatacnctttgaaatgactggcaaactcaggacagangtagggctgatttgagccattgtacagtgtcgggaacataccaggacactgagaatagtgtcatgtcataaggacccagagcaggtggaccctgctgtgatgcacaaagaggaccacgcaagatatgataaagatctacatcactgaattttggttccatttttgtatctcagcttcccggaaataaaaaagaattctaacattcat

SEQ ID NO: 507621 - DNA, 550 bp, Homo sapiens
cttaaaatgtcaaaatgaaatattgtctattaaaacagaagaattaaaataaacaagagaagttgggcattggtcatttgatggttgtaacctccagctttcccaggaaaaaaaaaaagacatgaaaaaaaaaaaaaaccttaaatggcccttcgctaagtgaaagaagcctatctgaaaagactacatactgtgagtagggctgattggagccattgtacagtgtcgggaacataccaggacactgagaatagtgtcatgtcataaggacccagagcaggtggaccctgctgtgatgcacaaagaggaccacgcaagatatgataaagatctacatcactgaattttggttccatttttgtatctcagcttcccggaaataaaaaagaattctaacattcatactttcagtattttatgtgagaggttttgttgtcaaaatcaagtctgagagcaatgtttgttgggcctttaattggagtcaccaagtgataaaggggacattgtcctcaacaataaccctataataaacacgttttcgacagtaaag

SEQ ID NO: 507622 - DNA, 426 bp, Homo sapiens
  misc_feature (23)..(23): n is a, c, g, or t
  misc_feature (29)..(29): n is a, c, g, or t
  misc_feature (41)..(41): n is a, c, g, or t
  misc_feature (72)..(72): n is a, c, g, or t
tgggggtttgagatattattatnttaganatttttaatacnctttgaaatgactggcaaactcaggacagangtagggctgatttgagccattgtacagtgtcgggaacataccaggacactgagaatagtgtcatgtcataaggacccagagcaggtggaccctgctgtgatgcacaaagaggaccacgcaagatatgataaagatctacatcactgaattttggttccatttttgtatctcagcttcccggaaataaaaaagaattctaacattcatactttcagtattttatgtgagaggttttgttgtcaaaatcaagtctgagagcaatgtttgttgggcctttaattggagtcaccaagtgataaaggggacattgtcctcaacaataaccctataataaacacgttttcgacagtaaag

SEQ ID NO: 507623 - DNA, 183 bp, Homo sapiens
ccatcatatgtgtgcgatgtgtcaggtcaccttggcacacctgttacgaacagaaggtttcgtggaagggactgtcagcccagctcaggaaggcactttgttctcagaattccccaggacacggagccaaccagaatccaggtttgacaaacaggaggatcaacctgtggggggaaaatgagt

SEQ ID NO: 507624 - DNA, 132 bp, Homo sapiens
cacgaggacgatggttccacctctggaaacattggcaccctcatcactataccaacagcagctcctccttctagcaccggtgtaaggaaaggctggcacgaatatgtcactcaggaactgaggagccatcta

SEQ ID NO: 507625 - DNA, 557 bp, Homo sapiens
  misc_feature (206)..(206): n is a, c, g, or t
gaaaaccaataaagagttttaatggacaccttttcgctctccagagtcactaatgctattgggaatctgaagaactggctctgttacacttaaaaaaaatttatcgaccaatgaacattagtccagaacagccccagcattgatcaaacttcagttttactggacttttttgtttgcacaaaaagtcccaggacaacttccattgntgagaaaatcctcaaaggactttcccacttggctcctgtgatggatgacagaagagggattcattaaccattgctcaagccccaattttgggataaagggattcaaaagccaggatccagaactaacccagtgaaaaaaatcagtcccccatttggccagtataggtgagaaaacataattataaaaatgatcccatgaaaaattccccagatcagtttagttgtaaagttgtcaaagttaaatgtgaaaccaatgaaaaaaaatttgtagcatgtaaccggttatttctgttttttaaaaagaattgttagggggctattaaacttggatttttttttttattaatccca

SEQ ID NO: 507626 - DNA, 1291 bp, Homo sapiens
gcccatagtttgtcgggtacccgtgatctgaggacccgctttgtaagggacatgctggcgcttcgtcctcccaaactcgcgtacgcgcacgtactgactatgacatgcacttctcgcactaccatcgttacgagccgaagctgtctgtacctagcactcggggatgcccgtgcgtgcgatcctctagcctgggcgtgggaacaccggcagtccgagcgcccgatgtgctcacgtatagcccaacgctgcacaaaggaaccactctgcgggtcgcagcgatcatcgacgttcgcctctcaagcaaccttatctatcaggtgaacgtacaggagcggctgggcataagacaaccgtgcacgcatttggagacttgtggtatgtctgtctagacacgtctctgcgcataaacgcgtatctaagtctatgttcgcatatggatacgtttacacgtcaaccttgtgcgaccctgacgcaggcggcatagtctgcggtttctctacacacgtagacatgctaaggctccaatatctaacctaaggtgctattatgggcaccgagaacttgccttctgactcgaaagtgaaagcatgaagtggacaccccagtaaggcgtggcaaggcataaaccaatctgcaattgtagagggccaataggcggaaggagaattcccaaattatcggagaccgcggtatggggtcgctttgacggagtacctcctgccacatttttcccaggcggaaattgacctttcgagtgtatgaaaaccccaaagggtagacctaggcccggggagatatgcaattattcgcagcggggagccatttatccgttgggggcgtttgtaataattcgcacaagacaaaggcggtaatgatgcgggcttgggccgagttgtgtgacccaccttttgtggggtttaccatagaggcggaatattcggacggcaattcctccccagtggtcctatacctgatagggatggagaaccaggattcttttccgttacaagactctctggcagattgtgccatacggtgcggagacgacggcaacaaattcttccggagcccggccttcaggagggaggttggccgtgctccgaaatgttatacaacaccacctgagggaggcgaaacacccacccctattgatgagagttctattcgcgcagaactgaagggaggctcagggtgcagctcgcgaattagaaaggccccccgtttacacagaagaggcgttacactaatgcgcccgttcgaaaacccggaacgcgtctgaggccacgccgaa

SEQ ID NO: 507627 - DNA, 82 bp, Homo sapiens
gcggccgcctactactactactgctcgaattcaagcttctaacgatgtacggggacatgtttttctattaaaaatagacagc

SEQ ID NO: 507628 - DNA, 756 bp, Homo sapiens
gtgtacggtgtggaacgctgcatccggctctgcgagtccggtcgagagaggacgttaacccacttacagccgtcaacatgtccccagcgtcagcatcttactagcggaggaccgcttccagaaccgagctgtgtccactcactgcttcagaggacatattgcagtgacagcacaaggatcgttccgttcagcccaaggaagtcagcgccgctggcgcccaaccagagagcgcaattcgttggctaggaacattaggcacgcacgatgcgtgagacacgtctcaggtgttgatacgaccgcgacctaaccacacaatttcttaaaaattgcccataggaacgtgccaacggccagggcagacccaagaccgtgcgtattttggaagcgtggccccagacattttgcacgtgagcagcaacacgtcaagcgactatgcgcctatggaatgtgtacacgcacacggctatgacgttacgaaggcccagaaatgtaccttcggatacctggcttggccaaacgccaacatttccaaaacaaaaaaattattccgccccatagtggccttgcacgagacattccccccttatggacacacaaacccttatcctctggcgcacaccacacgcaaacttccacattggaaaaccttggttccactttctgcgaaggaaacgcctttactttcggactcggaacccgaagggtccccaatcagaaacaccaaaccaaatttcgcattcccattcatggctgagg

SEQ ID NO: 507629 - DNA, 201 bp, Homo sapiens
catcattattccaaccattcaaaacagcaagtgcagctcatccaagcccatgcaccagcacatggggtgggccaggccatggtggctccaccctgtcaatccgcagcactttgggcaggctagcaggtgggacggatccctatgcagtgtccaggcagttcgcagcacgcagcctggtgcaacatcagtgcagcaccccat

SEQ ID NO: 507630 - DNA, 178 bp, Homo sapiens
catcattgaagtgtgcagtcatgtgcacgcagaagtctggtgtgctcacaggtctgagtcacaccacatctacttgaggcacttgctgaagcccaacatggtcaccccaggccatgtttgcctcaagcaagttttctccatgaggcagattgccatttgtgccagcgggggttcccgc

SEQ ID NO: 507631 - DNA, 272 bp, Homo sapiens
tggtgagctattttttggcaagagcaaaggagacattaaactgaagtgaactaccatgtcgtacatgctgaatccatgcagaacactgtggcgaaggctgatacctgacatcattgatttttgtatactgacttggtttttgatgaagcagttctgttatagccagatgctttttcaatacgtgctagacagaggaaaaatgggctgtaaataaatgaaagctcgatcagcaatttcaggatgggaacctggatttgaaaaaaactgtatca

SEQ ID NO: 507632 - DNA, 297 bp, Homo sapiens
agaggatccctctacagactgcgccgaaggggcatacaaatcttcgatgtggctgtcttgaggccatttcctacccgtgcacatttctgctttcacggccaaatacgcttgcgtagcagaagaacccacctgcgaccacacatcccaccgagctcaggttgagggtctcggtagccctgtacccgccatccgccgatgaccacacatcccaccgggctcaggttgagggtctcggtagcccctgtccccgccatcctgccgatgaccacacatcccacctggcgcagtcttgtgagg

SEQ ID NO: 507633 - DNA, 109 bp, Homo sapiens
gatagcagaggtaagtagtttgggattcagcgtcatctatagcagacacgaggtgtgggcagtgccactgttcctggagggaggtagaaattggctgttacttggaagc

SEQ ID NO: 507634 - DNA, 110 bp, Homo sapiens
agctttttctccgtagtatgcgagttgacaaaacagccagagaacagggcttcccatttaccaatccttttcggggatcttttccctttgctaaccggatcttaatttgt

SEQ ID NO: 507635 - DNA, 300 bp, Homo sapiens
tactactactactttgtgcgcggccggtgcgactctcccctgtacccatctatttactagataactctgaggcaggccaggcgtggtggctcacacctgtaatcccagctctttgggaggccgaggtgggcggatcatgaggtcaggagttcgagaccagcctggccaacatagtgaaacccccgtctctactaaaaatccgaaaaattagctgggcgtggtggtgggtgcctgtaatcccagctactcgggaggctgaggcaggagaattgcttgaacccgggaggcagaggttgcggt

SEQ ID NO: 507636 - DNA, 551 bp, Homo sapiens
cactagaggatcccacaggtggatgctgtgggaggcagagctacatagctcatgctcaggttctttgtcaagtccctggccaacaagacctccgactggctaggctaattgagcttactcattatcccgttcggttctcaccctgtggccaaatacttggggtcagtcaacagtaaatacagtagttccttcctggattctggttggagagatctgttcagtcgctcggagccacctgtgtcagagcaactggccgtggtatggaaggtgatgcagtacgtcaacggggcagccacgacacaccagcttcccgtggcctgaagccatgctgacttgccggcatatgttacctgatgaagactcctatcagaagtttattcccttcattggcgtggtgaaggtgggtctggttgaagactctccctccacagcaggcgatggggacgattctcctgtggtcagccttactgtgccctccacatcaccaccctccagctcgggcctgagccgagacgccacggccacccctccctcctccccatctatgagca

SEQ ID NO: 507637 - DNA, 476 bp, Homo sapiens
cccaacagtgagtcatcaaggtcactggtgcttaaacacaagatgtatcctttcacgtcttactacactccaaatcggagtccatcacttcacatcaattattcattaaggagttcctctacagcttacctagggggttgtatagtcttctgattggaagccacaaatttcatataaactagtccaagtaattgtgctagagctaagatactcaaacctgaaatcagaagagggccatgcattggtatacacgccgcaatacagagactcagtccaaccacagcgaggatataggctatcacctgaataaccaatatggcaatgacgaaggaggttaatccaatcgctgtactaaacacatagtagtgaagtaatattaatatccctgtagaagtcacaattaaaccaaggccagtagcattctttaatgaatattcacctgggacgaaaagaatggctccaacagtgacaatgac

SEQ ID NO: 507638 - DNA, 180 bp, Homo sapiens
gttggactcacgggcggggcatgatggtggtgggtacgggcacctcgctggcgctcttctccctcctgttcctgctgctctttgctgggatgcagatgtacagccgtcagctgggcctccaccgagttggtcacaatcaagggcggcttctttggtccgggcttctcgggtcttggccaa

SEQ ID NO: 507639 - DNA, 139 bp, Homo sapiens
ctcgtcccatagcaggatccccctacatttattgatagttacttggttgaaggattgattattatcccccttagatcagcgaatcaaggtaaagtaactattcagtttcacactgctatgcatagcattgtatctggta

SEQ ID NO: 507640 - DNA, 428 bp, Homo sapiens
tagcgtgtgctcaggagaggagaggcttctgacataggctaccagagtcatcttttctattggcggatgagaacaaaggttttctaattgctcccgagaaggtgttctaatggtcttttctctgagccatgctcagatcggatcttcttggcgtgcagaggcaccatgtgcaagagaggcctgggtctgagcaggtacttgctgtactagggttgcttcttccccctgctgaggtactgatgataagctctgacaatccatctctaccatcctcagaggggaggaggaaggcccgggcccttactcaccctcctttggggcaccgcactgcctctgctcccgacggctgaggaggggtggtctggcagtgaggatggaggtcgctgctgctgtactgtgcagctgcagctgcttagcgtgcgggtcga

SEQ ID NO: 507641 - DNA, 2995 bp, Homo sapiens
  misc_feature (1)..(1): n is a, c, g, or t
  misc_feature (12)..(12): n is a, c, g, or t
ngttctcgagcntctcggagcatgttggctgtgctgtgcaggaggctgaagtagtgcagggtcagcccgcaagttgcaggtcatggcgctggctgctcgactgtggcgccttctgcctttccgacgtggagccgccccggggtctcgtctccctgcggggacttcgggcagccgcgggcattgcggcccctgtcgattccgcggcttcgaggtaatgggaaacccaggaactttcaaaagaggccttttactctcagctttgtcgtatttgggttttgaaacttaccaggttatctctcaggctgctgtggttcatgccacagccaaagttgaagaaatacttgaacaagcagactacctgtatgaaagcggagaaacagaaaaactttatcagttgctaacccaatacaaggaaagtgaagatgcagagttactgtggcgtttggcacgggcatcacgtgatgtagctcagcttagcagaacctcagaagaggagaaaaagctattggtgtatgaagccctagagtatgcaaaaagagcactagaaaaaaatgaatcaagttttgcatctcataagtggtatgcaatctgccttagtgatgttggagattatgaaggcatcaaggctaaaattgcaaatgcatatatcatcaaggagcattttgagaaagcaattgaactgaaccctaaagatgctacttcaattcaccttatgggtatttggtgctatacatttgccgaaatgccttggtatcaaagaagaattgctaaaatgctgtttgcaactcctcctagttccacctatgagaaggccttaggctactttcacagggcagaacaagtggatccaaacttctacagcaaaaacttacttcttttaggaaagacatacttgaaactacacaacaaaaagcttgctgctttctggctaatgaaagccaaggactatccagcacacacagaggaggataaacagatacagacagaagctgctcagttgcttacaagtttcagtgagaagaattgagaacttttcagagaagatttatgaaatagctaataaacattgccttttcttttaattctaaacttaatatatgaactataactgttctacggctttttaaatgttgtgaccatttaaccgtgtaaatataaaatattctaggcttcttcacaaataatagggtaaaataaataatcgccataagagtggtagaaataaatctccatggctcaggcaaagagattattttgcatcctggataccagcaatgcaaaatggtatgagatttctaaggattgatcacattgggatgggagatcaagcaaagaaatatttgtagaggaggggaaatggatctataggggatatacagggggatggattttcaaattggattgattctaagttgaaatcttgaagagaaggtgtggtgacagtggttaggatgttgtgggttcctgacataaagtagttaaatgatatatcttggagctaacctgtgtaagtaaagaactaagtaaggagatgactaaaaatggagtagtttccttttttatttttttgagacagagtctcactttgtttcccaggctggtgtgcagtggcacaatctcggcccactgcagcctccgcctcccgggttcaagtgattctcctgccttagcctcctgagtggctgggattacagggttgtaccaccacactcggctaacttttgtatttttggtagagatggggttttgccatgttggctaggctggtctcaaactcctggcctcaagtgatctgcccgccttggcctcccaaattgctgggattacaggcgtgagccaccgcacctggccagtttactttaaatgtggtgtagtctcatggtaaactgaatttgtcatcagatgcaaagttctattccctaatggaatggaaggaacacaaaacttaagagtgaaatggaatactaagatgtttttaaataggcaggactatgctactcacttgaggctggagtgccaccactgcaaaatctttttaagttttgtaaaaaggagcatcttgaatccacttagataaagagagactgtgtgtgtaggtggatttttcccaaaggatttgggaattgtaatgttacaatgaactgtatggatatgtttgtcatgtacattttcaaacaaaaaggaaaactgaaagtagtgatctttgtatacccatctcttagattcagtgattttgctatataggttgtgtatcccttatctgaaatacttgggactagtagaagcatcttggatttgggatgtttttccaaattttggaatacctgcatacacacaataagatatcttggagatgggacccaagtttaaacacaaattcacttgtttcatatataccttatgcacatagcttgaaggtaactttatataacattatttttaataattttgtgcattgagaccaagtttgcataccttgaaccatcagaaagcaaaggtgtcattatctcagccactcatgtgggtaatttgtggttggttgatgtcaccatcattcctgactgaatgtatatgctaccaataagcagttattttcttatacttattcatgcataagtacttaacagtaaaaaatatgacataactcgcacaggaacaaggatggcaaaaaaaaaaatatgacacaccactgatacagtgaaaaaataatgtggtcagggtagctaggcaacagtagcatcaccagaaacctgtatcagctgttaaacggcaacaacaatggcaggctttcagtttcccacttaatgatgctgtattttaaaaggttattgtatactgtaattttatttttgtaggtgaagagaaacagaagcagctgaagggccaggaagtgggtctttctagggatgtggcattctgctggatggctttttaaaatgggttttttcctttagggagaccgaataaactgtgttgtgcacctgcaaaaaaaaaa

SEQ ID NO: 507642 - DNA, 718 bp, Homo sapiens
cgcagtggctcacgcctgtaatcccaacactttgggaggccgaggtgggtggatcacctgaggtcaggagctcgagaccagcctggccaacatggtgaagccccatctctatcaaaaatacaaaaatttagctgggcgtggtggtgggcacctgtaatcccaggtatttgggaggctgaggcaggagaatcccttgaacccaggaggcaaaggttgcagttagctgagatcgcaccactgcactccagcctgggcaacaagagcgaaactccgtctcaaaaaaaaaaaaacacccttattgtaacccatgggacttgggcgtggtacacgatgtctgattgtcggtccactcaatttttaccacattgtcccccctttccgggggggactataatatattctggatacttacttataccttgagaaaactcctttcatttcctgatacttctaagcaaattcacatcctcgtgaccattaatttcttcaacttacaaacagcgctctagggttccactccaaacaattcttcctttccaacgagaaccttatttctatctggccccaaattgtcgtccacatttccccccgtgaaacccttcccaaattttcctaacaacggtccacgctccacaactttctttgatctcttctgaagagaacaaccgttttaacggccgcttttaacgctgcggaacactaccttagaccagaaacc

SEQ ID NO: 507643 - DNA, 940 bp, Homo sapiens
  misc_feature (11)..(11): n is a, c, g, or t
tgccagtaggntggcgcttcgaggccattctggaggccagtcgcttactgaaaaggcaaaactgactttaaggtaatgggaaacccaggaactttcaaaagaggccttttactctcagctttgtcgtatttgggttttgaaacttaccaggttatctctcaggctgctgtggttcatgccacagccaaagttgaagaaatacttgaacaagcagactacctgtatgaaagcggagaaacagaaaaactttatcagttgctaacccaatacaaggaaagtgaagatgcagagttactgtggcgtttggcacgggcatcacgtgatgtagctcagcttagcagaacctcagaagaggagaaaaagctattggtgtatgaagccctagagtatgcaaaaagagcactagaaaaaaatgaatcaagttttgcatctcataagtggtatgcaatctgccttagtgatgttggagattatgaaggcatcaaggctaaaattgcaaatgcatatatcatcaaggagcattttgagaaagcaattgaactgaaccctaaagatgctacttcaattcaccttatgggtatttggtgctatacatttgccgaaatgccttggtatcaaagaagaattgctaaaatgctgtttgcaactcctcctagttccacctatgagaaggccttaggctactttcacagggcagaacaaggaaagacatacttgaaactacacaacaaaaagcttgctgctttctggctaatgaaagccaaggactatccagcacacacagaggaggataaacagaggtgaagagaaacagaagcagctgaagggccaggaagtgggtctttctagggatgtggcattctgctggatggctttttaaaatgggttttttcctttagggagaccgaataaactgtgttgtgcacctgcaaaaaaaaaa

SEQ ID NO: 507644 - DNA, 873 bp, Homo sapiens
  misc_feature (765)..(765): n is a, c, g, or t
tgtagattttggtaactgccaccataatcaagatacagacctgttccgtcatcacaaagatccccagtgctgtccctttacagtcacacccatctacctcctcctctcccccacccatccctaactctgacagcactaatctgttctccataattttgttatttcaacaatgttatacaaatggaatcatacagtgagaccctgtgatactttttttcactcaacataattcccttgagacctaagttctatcaatagtttgtttctttttacagttgactagtatttcattttatgggcataccatatcaaccatatgctgaggggcatttaggttattcctgatttttagctattacaaataaagctgctatgagcattatatgcaggtttttatgtctacatagattttatctctctgggatacatgcccaggagtgtggctcctgggtccttttatcttcatttttcccctttactctctgagggttaggtttcttctgcaagacatggtgccttcccaagattctgattctgtgcactaagtctcttccatttgacttcccaggagcctgattccccacgtgtcacattggtccgtgacgtttccccactaagggtgagacccattactgagaacaaaccccaggaatcccttacattctccttcccgtgcagcccccacctgattgttcttgtgtggattccagagctgactgctggattgagatgcttatttccccacgtacatgtatatcaaagtangttggtagtactctgtgttctaagtgtattacatacataggctatatctctccattatagatgtttccttcttccttttgaggatatgagtagaatactggatttgga

SEQ ID NO: 507645 - DNA, 388 bp, Homo sapiens
actccttggaggctgaggtgggcagatcgcctggggccgggagttggagaccaggctggccaacatggtgaaacctcgtctctactaaaagtacggaagttgtccaggcatggtggcgcccgcctataatgccagctactcgggaggttgaggcatgagaattgcttgggtccaggaggcagaggttgcagtgagccaaagctgtgcggctgcactccagcctgggtgacggagtgagattctgcctcaaaaaaaaaaaagaagacggcaagttaatctgttttcaaaacaaaaataattgcagattaatacaattaattacagaagagttttacacttgcaaaggtgaagggtctctcctaaccagttttcacatcacttaggggca

SEQ ID NO: 507646 - DNA, 487 bp, Homo sapiens
ggtcgacgcataatattgttgaaaacaagtgtgttcatttcaagtgtaaattgattgacatttatatttctatataggaaataatttagttactatcaccaggtggatgttacgggttgcctgctacaatgcagaattattcctgtttgacacacatggcagatcgagttaacatttctaaaacataaaagtcatgggatgtgtactaaagtggaagagctgagagtctcatctggtcactgtcaagacattttattgttataatgtcctatctggtttttggaaactcttagaaaccccactttataaacttaaatttcacaagttagtctcttagctctcctgtttacttataacatgtatttttccattttagatacagacagaagctgctcagttgcttacaagtttcagtgagaagaattgagaacttttcagagaagatttatgaaatagctaataaacattgccttttcttttaattcta

SEQ ID NO: 507647 - DNA, 174 bp, Homo sapiens
gggtcgcaactgatcaggtactgcggcgcggtacgcctacgattgtgggggcatgaactgatgcgaacagattttcgtttcatttctggttctcagcggtttgttataattttttatttctatgggctttgatgagggaggtaggtggtagtttgtgttttggcccttatcgag

SEQ ID NO: 507648 - DNA, 3042 bp, Homo sapiens
gaggcggaagaggtgctgtgcaggaggcgggcgggcgcggttctttccggaaggattgaatctcctttagccccgcccgcctccgtagctgcctgaagtagtgcagggtcagcccgcaagttgcaggtcatggcgctggctgctcgactgtggcgccttctgcctttccgacgtggagccgccccggggtctcgtctccctgcggggacttcgggcagccgcgggcattgcggcccctgtcgattccgcggcttcgaggtaatgggaaacccaggaactttcaaaagaggccttttactctcagctttgtcgtatttgggttttgaaacttaccaggttatctctcaggctgctgtggttcatgccacagccaaagttgaagaaatacttgaacaagcagactacctgtatgaaagcggagaaacagaaaaactttatcagttgctaacccaatacaaggaaagtgaagatgcagagttactgtggcgtttggcacgggcatcacgtgatgtagctcagcttagcagaacctcagaagaggagaaaaagctattggtgtatgaagccctagagtatgcaaaaagagcactagaaaaaaatgaatcaagttttgcatctcataagtggtatgcaatctgccttagtgatgttggagattatgaaggcatcaaggctaaaattgcaaatgcatatatcatcaaggagcattttgagaaagcaattgaactgaaccctaaagatgctacttcaattcaccttatgggtatttggtgctatacatttgccgaaatgccttggtatcaaagaagaattgctaaaatgctgtttgcaactcctcctagttccacctatgagaaggccttaggctactttcacagggcagaacaagtggatccaaacttctacagcaaaaacttacttcttttaggaaagacatacttgaaactacacaacaaaaagcttgctgctttctggctaatgaaagccaaggactatccagcacacacagaggaggataaacagatacagacagaagctgctcagttgcttacaagtttcagtgagaagaattgagaacttttcagagaagatttatgaaatagctaataaacattgccttttcttttaattctaaacttaatatatgaactataactgttctacggctttttaaatgttgtgaccatttaaccgtgtaaatataaaatattctaggcttcttcacaaataatagggtaaaataaataatcgccataagagtggtagaaataaatctccatggctcaggcaaagagattattttgcatcctggataccagcaatgcaaaatggtatgagatttctaaggattgatcacattgggatgggagatcaagcaaagaaatatttgtagaggaggggaaatggatctataggggatatacagggggatggattttcaaattggattgattctaagttgaaatcttgaagagaaggtgtggtgacagtggttaggatgttgtgggttcctgacataaagtagttaaatgatatatcttggagctaacctgtgtaagtaaagaactaagtaaggagatgactaaaaatggagtagtttccttttttatttttttgagacagagtctcactttgtttcccaggctggtgtgcagtggcacaatctcggcccactgcagcctccgcctcccgggttcaagtgattctcctgccttagcctcctgagtggctgggattacagggttgtaccaccacactcggctaacttttgtatttttggtagagatggggttttgccatgttggctaggctggtctcaaactcctggcctcaagtgatctgcccgccttggcctcccaaattgctgggattacaggcgtgagccaccgcacctggccagtttactttaaatgtggtgtagtctcatggtaaactgaatttgtcatcagatgcaaagttctattccctaatggaatggaaggaacacaaaacttaagagtgaaatggaatactaagatgtttttaaataggcaggactatgctactcacttgaggctggagtgccaccactgcaaaatctttttaagttttgtaaaaaggagcatcttgaatccacttagataaagagagactgtgtgtgtaggtggatttttcccaaaggatttgggaattgtaatgttacaatgaactgtatggatatgtttgtcatgtacattttcaaacaaaaaggaaaactgaaagtagtgatctttgtatacccatctcttagattcagtgattttgctatataggttgtgtatcccttatctgaaatacttgggactagtagaagcatcttggatttgggatgtttttccaaattttggaatacctgcatacacacaataagatatcttggagatgggacccaagtttaaacacaaattcacttgtttcatatataccttatgcacatagcttgaaggtaactttatataacattatttttaataattttgtgcattgagaccaagtttgcataccttgaaccatcagaaagcaaaggtgtcattatctcagccactcatgtgggtaatttgtggttggttgatgtcaccatcattcctgactgaatgtatatgctaccaataagcagttattttcttatacttattcatgcataagtacttaacagtaaaaaatatgacataactcgcacaggaacaaggatggcaaaaaaaaaaatatgacacaccactgatacagtgaaaaaataatgtggtcagggtagctaggcaacagtagcatcaccagaaacctgtatcagctgttaaacggcaacaacaatggcaggctttcagtttcccacttaatgatgctgtattttaaaaggttattgtatactgtaattttatttttgtaggtgaagagaaacagaagcagctgaagggccaggaagtgggtctttctagggatgtggcattctgctggatggctttttaaaatgggttttttcctttagggagaccgaataaactgtgttgtgcacctgcaaaaaaaaaa

SEQ ID NO: 507649 - DNA, 2988 bp, Homo sapiens
gaggcggaagaggtgctgtgcaggaggcgggcgggcgcggttctttccggaaggattgaatctcctttagccccgcccgcctccgtagctgcctgaagtagtgcagggtcagcccgcaagttgcaggtcatggcgctggctgctcgactgtggcgccttctgcctttccgacgtggagccgccccggggtctcgtctccctgcggggacttcgggcagccgcgggcattgcggcccctgtcgattccgcggcttcgaggtaatgggaaacccaggaactttcaaaagaggccttttactctcagctttgtcgtatttgggttttgaaacttaccaggttatctctcaggctgctgtggttcatgccacagccaaagttgaagaaatacttgaacaagcagactacctgtatgaaagcggagaaacagaaaaactttatcagttgctaacccaatacaaggaaagtgaagatgcagagttactgtggcgtttggcacgggcatcacgtgatgtagctcagcttagcagaacctcagaagaggagaaaaagctattggtgtatgaagccctagagtatgcaaaaagagcactagaaaaaaatgaatcaagttttgcatctcataagtggtatgcaatctgccttagtgatgttggagattatgaaggcatcaaggctaaaattgcaaatgcatatatcatcaaggagcattttgagaaagcaattgaactgaaccctaaagatgctacttcaattcaccttatgggtatttggtgctatacatttgccgaaatgccttggtatcaaagaagaattgctaaaatgctgtttgcaactcctcctagttccacctatgagaaggccttaggctactttcacagggcagaacaagtggatccaaacttctacagcaaaaacttacttcttttaggaaagacatacttgaaactacacaacaaaaagcttgctgctttctggctaatgaaagccaaggactatccagcacacacagaggaggataaacagatacagacagaagctgctcagttgcttacaagtttcagtgagaagaattgagaacttttcagagaagatttatgaaatagctaataaacattgccttttcttttaattctaaacttaatatatgaactataactgttctacggctttttaaatgttgtgaccatttaaccgtgtaaatataaaatattctaggcttcttcacaaataatagggtaaaataaataatcgccataagagtggtagaaataaatctccatggctcaggcaaagagattattttgcatcctggataccagcaatgcaaaatggtatgagatttctaaggattgatcacattgggatgggagatcaagcaaagaaatatttgtagaggaggggaaatggatctataggggatatacagggggatggattttcaaattggattgattctaagttgaaatcttgaagagaaggtgtggtgacagtggttaggatgttgtgggttcctgacataaagtagttaaatgatatatcttggagctaacctgtgtaagtaaagaactaagtaaggagatgactaaaaatggagtagtttccttttttatttttttgagacagagtctcactttgtttcccaggctggtgtgcagtggcacaatctcggcccactgcagcctccgcctcccgggttcaagtgattctcctgccttagcctcctgagtggctgggattacagggttgtaccaccacactcggctaacttttgtatttttggtagagatggggttttgccatgttggctaggctggtctcaaactcctggcctcaagtgatctgcccgccttggcctcccaaattgctgggattacaggcgtgagccaccgcacctggccagtttactttaaatgtggtgtagtctcatggtaaactgaatttgtcatcagatgcaaagttctattccctaatggaatggaaggaacacaaaacttaagagtgaaatggaatactaagatgtttttaaataggcaggactatgctactcacttgaggctggagtgccaccactgcaaaatctttttaagttttgtaaaaaggagcatcttgaatccacttagataaagagagactgtgtgtgtaggtggatttttcccaaaggatttgggaattgtaatgttacaatgaactgtatggatatgtttgtcatgtacattttcaaacaaaaaggtatataggttgtgtatcccttatctgaaatacttgggactagtagaagcatcttggatttgggatgtttttccaaattttggaatacctgcatacacacaataagatatcttggagatgggacccaagtttaaacacaaattcacttgtttcatatataccttatgcacatagcttgaaggtaactttatataacattatttttaataattttgtgcattgagaccaagtttgcataccttgaaccatcagaaagcaaaggtgtcattatctcagccactcatgtgggtaatttgtggttggttgatgtcaccatcattcctgactgaatgtatatgctaccaataagcagttattttcttatacttattcatgcataagtacttaacagtaaaaaatatgacataactcgcacaggaacaaggatggcaaaaaaaaaaatatgacacaccactgatacagtgaaaaaataatgtggtcagggtagctaggcaacagtagcatcaccagaaacctgtatcagctgttaaacggcaacaacaatggcaggctttcagtttcccacttaatgatgctgtattttaaaaggttattgtatactgtaattttatttttgtaggtgaagagaaacagaagcagctgaagggccaggaagtgggtctttctagggatgtggcattctgctggatggctttttaaaatgggttttttcctttagggagaccgaataaactgtgttgtgcacctgcaaaaaaaaaa

SEQ ID NO: 507650 - DNA, 97 bp, Homo sapiens
gtggttcggtccggaatgtagggatcaccagcgctctacagtctactgtcagcctcagctcgccgaagcaaagctagcgagtacgcagcgcggcgat

SEQ ID NO: 507651 - DNA, 276 bp, Homo sapiens
  misc_feature (10)..(10): n is a, c, g, or t
atgtgagttntttacaggtttgcatatggatagccctatcagactaggatgatctgggtgcattcttgcttgaaggcaaggagaaatagtcttttcttttatttctcctttttaaataaagagccgggtttttatccgtgtggctcaggcgggggcttaggggccccgttttagctcagtgcagccttaaagtccagggctcaggggatctttcaacctcagcctccggaggagcggaaattatgggcacatgcccacataaccgaggggggcaag

SEQ ID NO: 507652 - DNA, 2972 bp, Homo sapiens
  misc_feature (2933)..(2933): n is a, c, g, or t
gaggcggaagaggtgctgtgcaggaggcgggcgggcgcggttctttccggaaggattgaatctcctttagccccgcccgcctccgtagctgcctgaagtagtgcagggtcagcccgcaagttgcaggtcatggcgctggctgctcgactgtggcgccttctgcctttccgacgtggagccgccccggggtctcgtctccctgcggggacttcgggcagccgcgggcattgcggcccctgtcgattccgcggcttcgaggtaatgggaaacccaggaactttcaaaagaggccttttactctcagctttgtcgtatttgggttttgaaacttaccaggttatctctcaggctgctgtggttcatgccacagccaaagttgaagaaatacttgaacaagcagactacctgtatgaaagcggagaaacagaaaaactttatcagttgctaacccaatacaaggaaagtgaagatgcagagttactgtggcgtttggcacgggcatcacgtgatgtagctcagcttagcagaacctcagaagaggagaaaaagctattggtgtatgaagccctagagtatgcaaaaagagcactagaaaaaaatgaatcaagttttgcatctcataagtggtatgcaatctgccttagtgatgttggagattatgaaggcatcaaggctaaaattgcaaatgcatatatcatcaaggagcattttgagaaagcaattgaactgaaccctaaagatgctacttcaattcaccttatgggtatttggtgctatacatttgccgaaatgccttggtatcaaagaagaattgctaaaatgctgtttgcaactcctcctagttccacctatgagaaggccttaggctactttcacagggcagaacaagtggatccaaacttctacagcaaaaacttacttcttttaggaaagacatacttgaaactacacaacaaaaagcttgctgctttctggctaatgaaagccaaggactatccagcacacacagaggaggataaacaggagcctgattccccacgtgtcacattggtccgtgacgtttccccactaagggtgagacccattactgagaacaaaccccaggaatcccttacattctccttcccgtgcagcccccacctgattgttcttgtgtggattccagagctgactgctggattgagatgcttatttccccacgtacatgtatatcaaaggttctgtgtagcctcacctagtgcatcgtaatttcttacttgagggagaccagcaccctgaaaacgaactggaaagctgccttcttcagtcaaatctgctaaatcatacctacaatgaatgatattcaataacttctgtcatggcaaaatttatacagcagtggtaccatttgtaattctaatacttaactcttttatggtatacgcagtcctttttgaaggccagtttccctctatcacataacctgtcacatacattagaattttttttttaattctttaggcttgaaaattaccagagtgttcataataaggatttggaaaaggagtctattcaaccaagcagatctctgcctttctttcgtctttactatgaattctgaataaaatggagaacacactctcaatatgtagaaaaataaaattttggcaaaacaataattactgtttttctgtatgtacttagcagtgaaatatttataggcaacagattttaagaagtcagttccatggctattaaaaaatgtttaagttaatgaaatttacagtgcatattaaaagcatgatacaaatggaaatttaaaattttgtattaggaagcccagtttgctaaaagtagcattaatatcattcacatcagattttaatttgttacacatttttgtagttcagcaaaggcccctatgatgaaaaacaattaaaaagtgttatgacaaaaataattatctgtgtaaaaagggggagacccaaaagatttttcatatggttatttaattcagttaaatagaactgttatgaatttgagaggaatgaagatattcaaacactaacagaaaatcattagccttatattagagcattcaaatgcttatgtaactcttcaatccatctggcttcataaaaaccaaaattttgaacacaaaaaagtggcagagtttacattaccttttgtatgttcctaagtatgaaattgcatcaatttattatgaattaaatttgaaaagcatcacagatttaaaaacaaagtacaaaagagcctgattctttttaattccacaaatacctagcatctcaaagtaacatgtaaacaaacttctatgctgctcaatgaatccttccaatttcgataataaactaaatagtattggatctagtatatgactttcatgtgtaagttatggttctatccattactttaacaatattactgatgtaacagagaaaaattttcaactattgtatttatttaaaacaaactgacaagttcaagcacctgtcttcagaaaagccagcagcatttttttttttttaacatactcaaagtaagatttggcctaagcccttaatacctttctgaacagccatgcaactaaacaccctcaggagatgttacataagggagagaagaacatggagcaatttgcactttttcccctagataatattaacaaggtaaagcaaatccagatctttatgaatgaatggctgtcatgtttaatacacttggagctctataaaactagagccactatcatatatgtttatatagatatatatgtatttttaataaagtctctcacttgcttcaaaatttaaggatgatctttttcctggtcagtcatttcaagggaacaataaataaagtagaaaaggatgaactgttttgcatatttctgtggaagaacggaaaacatactttgagaggttcggaaaatncactgtacagaatgaacagcttatatacactatctgtgc

SEQ ID NO: 507653 - DNA, 550 bp, Homo sapiens
ggatttacttcatcaatgactctataataagtaataagggtagaacacattacaattcacaaaataattccacaaacattatctcacttgcttttaataacaacagtggaagaatgaacaactcattccagtgaggaatttaagactcagaggttaaataaagctgaatatgggaaagattaggcaatttgcccacctcaggacttgaactttggtgggcaggctttagctctaaagttcttctataccaaagctgtgtcaacattaaagctgggactggacttccaatctgaggacccagaagagtcagcatatcctacttaacttctaagggtagggtggcggggtatgatttctttattttgaactataatttatatggtgtctcctagaagtttatggcccatacaggtatcttccactgttgcgggaagtcaaggaccccgaacagagggaccggctggagcctcggcagaggaacataaattgtgaagatttcattttaatatggacatttatcagttcccaaataatacttttataatttctt

SEQ ID NO: 507654 - DNA, 1541 bp, Homo sapiens
gtctctgctgcggacgcctgggggcctggcgctggtgttggcctgcccccggcctcgccgagtgcatgcgctgcccgaagtgccagtgcctgcgctcctgtcctgctggccctggctgcccagtggatgtgcttgtggatgtgcctgcctgctgcagtctgcctgcactgcatacacctgcctggctgcctgtcgtattctgctgtctgccctgcttatcctgtgccacctgctgtgcctgccaatttttagtatcgggctggaatgctgcctgctgggtaggtgtgttgggaagcccaaaggctgggaggatgcctgctggggcatttcgctgtgcctgccagcccattagccggtcggtccccctgactagctgggttggctgtgtggttgttgctccgaagcaacgcaaggaaccctgggaaggccatttgggagtgctgcacaaagcaattcgcatcaatgcacaaacgtgtggcatttccatgcggttcccgaatcccttatattgagagacactgtggggatctaccaaccgagttgaaaatggctttcccaatgtgaacccaggctataccccagaacaaagggcacccaaaatatgatataacatagagttctatcaaaaaagacccagcattaattgaaccacaggaattgattacaaagtggaatcctatcctatacggagaaaagaacaaagagaaagctcctattagcaacaggaactggggattttatacgcattaatatgcttgagagcacggaaacattacagagagaattcaaatggcccccgtgcacccaggaaaaagcaaattcgccaggaaaaccttgctgaaaaagagaccccttggtatttagattccttaagaactcacgtcaaccttattggacagaagatggaagacgaacgattgtaattagcaccccaagtgttagggttggggacaaggactcgtagaagatttcgcaagaaagaaaacagtggaagaaactcttagccacaagcacattgatgccaccgtatggtcccaaatttgtttgtcacaatttccaaggacacaacactcaaactgaggggaaggcccaccccattgtggaggacagtataccgttccaaatcccttgggagaagccttatctgacgcacaagtgtggtaatctcccacagccaaacaactctgggaaaagcacaatattttggagaacaatcgacaggattcccgacacgagaagccttatgcattatgacaggagaagctattcagaaggacagagaacgaaagtatgacccgacaaccatttttactttgacaaaaccgggcctaagcgttcatacgattgagccccccagcgagaccacaggaaaaatagtaggcagtgaccacttgtagtaagccgtccagtagattgtgcacaaaacgtttatatccgcatccctgagagactattgattaaacaaaacgaggagagatcaacagagaggcaaacagagagcaataacaccacaaataacagtgtgcataaataaaagaggg

SEQ ID NO: 507655 - DNA, 2495 bp, Homo sapiens
  misc_feature (2456)..(2456): n is a, c, g, or t
gaggcggaagaggtgctgtgcaggaggcgggcgggcgcggttctttccggaaggattgaatctcctttagccccgcccgcctccgtagctgcctgaagtagtgcagggtcagcccgcaagttgcaggtcatggcgctggctgctcgactgtggcgccttctgcctttccgacgtggagccgccccggggtctcgtctccctgcggggacttcgggcagccgcgggcattgcggcccctgtcgattccgcggcttcgaggtaatgggaaacccaggaactttcaaaagaggccttttactctcagctttgtcgtatttgggttttgaaacttaccaggttatctctcaggctgctgtggttcatgccacagccaaagttgaagaaatacttgaacaagcagactacctgtatgaaagcggagaaacagaaaaactttatcagttgctaacccaatacaaggaaagtgaagatgcagagttactgtggcgtttggcacgggcatcacgtgatgtagctcagcttagcagaacctcagaagaggagaaaaagctattggtgtatgaagccctagagtatgcaaaaagagcactagaaaaaaatgaatcaagttttgcatctcataagtggtatgcaatctgccttagtgatgttggagattatgaaggcatcaaggctaaaattgcaaatgcatatatcatcaaggagcattttgagaaagcaattgaactgaaccctaaagatgctacttcaattcaccttatgggtatttggtgctatacatttgccgaaatgccttggtatcaaagaagaattgctaaaatgctgtttgcaactcctcctagttccacctatgagaaggccttaggctactttcacagggcagaacaagtggatccaaacttctacagcaaaaacttacttcttttaggaaagacatacttgaaactacacaacaaaaagcttgctgctttctggctaatgaaagccaaggactatccagcacacacagaggaggataaacaggcttgaaaattaccagagtgttcataataaggatttggaaaaggagtctattcaaccaagcagatctctgcctttctttcgtctttactatgaattctgaataaaatggagaacacactctcaatatgtagaaaaataaaattttggcaaaacaataattactgtttttctgtatgtacttagcagtgaaatatttataggcaacagattttaagaagtcagttccatggctattaaaaaatgtttaagttaatgaaatttacagtgcatattaaaagcatgatacaaatggaaatttaaaattttgtattaggaagcccagtttgctaaaagtagcattaatatcattcacatcagattttaatttgttacacatttttgtagttcagcaaaggcccctatgatgaaaaacaattaaaaagtgttatgacaaaaataattatctgtgtaaaaagggggagacccaaaagatttttcatatggttatttaattcagttaaatagaactgttatgaatttgagaggaatgaagatattcaaacactaacagaaaatcattagccttatattagagcattcaaatgcttatgtaactcttcaatccatctggcttcataaaaaccaaaattttgaacacaaaaaagtggcagagtttacattaccttttgtatgttcctaagtatgaaattgcatcaatttattatgaattaaatttgaaaagcatcacagatttaaaaacaaagtacaaaagagcctgattctttttaattccacaaatacctagcatctcaaagtaacatgtaaacaaacttctatgctgctcaatgaatccttccaatttcgataataaactaaatagtattggatctagtatatgactttcatgtgtaagttatggttctatccattactttaacaatattactgatgtaacagagaaaaattttcaactattgtatttatttaaaacaaactgacaagttcaagcacctgtcttcagaaaagccagcagcatttttttttttttaacatactcaaagtaagatttggcctaagcccttaatacctttctgaacagccatgcaactaaacaccctcaggagatgttacataagggagagaagaacatggagcaatttgcactttttcccctagataatattaacaaggtaaagcaaatccagatctttatgaatgaatggctgtcatgtttaatacacttggagctctataaaactagagccactatcatatatgtttatatagatatatatgtatttttaataaagtctctcacttgcttcaaaatttaaggatgatctttttcctggtcagtcatttcaagggaacaataaataaagtagaaaaggatgaactgttttgcatatttctgtggaagaacggaaaacatactttgagaggttcggaaaatncactgtacagaatgaacagcttatatacactatctgtgc

SEQ ID NO: 507656 - DNA, 2688 bp, Homo sapiens
  misc_feature (2649)..(2649): n is a, c, g, or t
gaggcggaagaggtgctgtgcaggaggcgggcgggcgcggttctttccggaaggattgaatctcctttagccccgcccgcctccgtagctgcctgaagtagtgcagggtcagcccgcaagttgcaggtcatggcgctggctgctcgactgtggcgccttctgcctttccgacgtggagccgccccggggtctcgtctccctgcggggacttcgggcagccgcgggcattgcggcccctgtcgattccgcggcttcgaggtaatgggaaacccaggaactttcaaaagaggccttttactctcagctttgtcgtatttgggttttgaaacttaccaggttatctctcaggctgctgtggttcatgccacagccaaagttgaagaaatacttgaacaagcagactacctgtatgaaagcggagaaacagaaaaactttatcagttgctaacccaatacaaggaaagtgaagatgcagagttactgtggcgtttggcacgggcatcacgtgatgtagctcagcttagcagaacctcagaagaggagaaaaagctattggtgtatgaagccctagagtatgcaaaaagagcactagaaaaaaatgaatcaagttttgcatctcataagtggtatgcaatctgccttagtgatgttggagattatgaaggcatcaaggctaaaattgcaaatgcatatatcatcaaggagcattttgagaaagcaattgaactgaaccctaaagatgctacttcaattcaccttatgggtatttggtgctatacatttgccgaaatgccttggtatcaaagaagaattgctaaaatgctgtttgcaactcctcctagttccacctatgagaaggccttaggctactttcacagggcagaacaagtggatccaaacttctacagcaaaaacttacttcttttaggaaagacatacttgaaactacacaacaaaaagcttgctgctttctggctaatgaaagccaaggactatccagcacacacagaggaggataaacaggagcctgattccccacgtgtcacattggtccgtgacgtttccccactaagggtgagacccattactgagaacaaaccccaggaatcccttacattctccttcccgtgcagcccccacctgattgttcttgtgtggattccagagctgactgctggattgagatgcttatttccccacgtacatgtatatcaaagcttgaaaattaccagagtgttcataataaggatttggaaaaggagtctattcaaccaagcagatctctgcctttctttcgtctttactatgaattctgaataaaatggagaacacactctcaatatgtagaaaaataaaattttggcaaaacaataattactgtttttctgtatgtacttagcagtgaaatatttataggcaacagattttaagaagtcagttccatggctattaaaaaatgtttaagttaatgaaatttacagtgcatattaaaagcatgatacaaatggaaatttaaaattttgtattaggaagcccagtttgctaaaagtagcattaatatcattcacatcagattttaatttgttacacatttttgtagttcagcaaaggcccctatgatgaaaaacaattaaaaagtgttatgacaaaaataattatctgtgtaaaaagggggagacccaaaagatttttcatatggttatttaattcagttaaatagaactgttatgaatttgagaggaatgaagatattcaaacactaacagaaaatcattagccttatattagagcattcaaatgcttatgtaactcttcaatccatctggcttcataaaaaccaaaattttgaacacaaaaaagtggcagagtttacattaccttttgtatgttcctaagtatgaaattgcatcaatttattatgaattaaatttgaaaagcatcacagatttaaaaacaaagtacaaaagagcctgattctttttaattccacaaatacctagcatctcaaagtaacatgtaaacaaacttctatgctgctcaatgaatccttccaatttcgataataaactaaatagtattggatctagtatatgactttcatgtgtaagttatggttctatccattactttaacaatattactgatgtaacagagaaaaattttcaactattgtatttatttaaaacaaactgacaagttcaagcacctgtcttcagaaaagccagcagcatttttttttttttaacatactcaaagtaagatttggcctaagcccttaatacctttctgaacagccatgcaactaaacaccctcaggagatgttacataagggagagaagaacatggagcaatttgcactttttcccctagataatattaacaaggtaaagcaaatccagatctttatgaatgaatggctgtcatgtttaatacacttggagctctataaaactagagccactatcatatatgtttatatagatatatatgtatttttaataaagtctctcacttgcttcaaaatttaaggatgatctttttcctggtcagtcatttcaagggaacaataaataaagtagaaaaggatgaactgttttgcatatttctgtggaagaacggaaaacatactttgagaggttcggaaaatncactgtacagaatgaacagcttatatacactatctgtgc

SEQ ID NO: 507657 - DNA, 894 bp, Homo sapiens
ctatgtcggggccgtccgtggggagcggtggtcctgtgaggctgcgcggggctgagtgcggcctcgatttgtgcgaacttgctctgaagatgcctggatctaagcctggagtccaaggtcatggacttccccacaatttcccgatccccttcggggcctccagccatgggacttggagtgggcccaggggacattcttgttgccttcggacgtgatctcatcgccatgacacgtcagttgggaccctatgccaggagggccccggtaggctcaagtcgggatggaacttgatagatgtcaagccttcatggagctcggttgcagctagtttgaaggctctgcccaggcagatctaggttgtgcccgatcgccccaggttggagccccctgtccctctactacatttgctcgacaggccggagtggccattggtggcctcctcgaaggagattggctgagtgctgcacgtggctccgtgtcgtgccgaaggcgtgggctggggatgacactgcgtgggcctcttgcgacggtgcggaggaatgcctcgccattctccagacgtggctccgttgaacgagcctctagagcctgtcccccgacttgtcgcgagccccctgatggatccaaatgaggattcctggactccccgaggaatggggtggaggcgggctcctgctgacgcaggaagggcagcacgggagctcaagcaggttccccggaacctggctggagacggtgtctctagtccacactgaataagccacccgctggtgcccagagccccgaaacctggcttctacctggacccccaagaggttgcctggtccctgtgacactgaagactctggacggtctcaacttttgggcacggaccttgcggttcaccaccttgtg

SEQ ID NO: 507658 - DNA, 2918 bp, Homo sapiens
  misc_feature (2879)..(2879): n is a, c, g, or t
gaggcggaagaggtgctgtgcaggaggcgggcgggcgcggttctttccggaaggattgaatctcctttagccccgcccgcctccgtagctgcctgaagtagtgcagggtcagcccgcaagttgcaggtcatggcgctggctgctcgactgtggcgccttctgcctttccgacgtggagccgccccggggtctcgtctccctgcggggacttcgggcagccgcgggcattgcggcccctgtcgattccgcggcttcgaggtaatgggaaacccaggaactttcaaaagaggccttttactctcagctttgtcgtatttgggttttgaaacttaccaggttatctctcaggctgctgtggttcatgccacagccaaagttgaagaaatacttgaacaagcagactacctgtatgaaagcggagaaacagaaaaactttatcagttgctaacccaatacaaggaaagtgaagatgcagagttactgtggcgtttggcacgggcatcacgtgatgtagctcagcttagcagaacctcagaagaggagaaaaagctattggtgtatgaagccctagagtatgcaaaaagagcactagaaaaaaatgaatcaagttttgcatctcataagtggtatgcaatctgccttagtgatgttggagattatgaaggcatcaaggctaaaattgcaaatgcatatatcatcaaggagcattttgagaaagcaattgaactgaaccctaaagatgctacttcaattcaccttatgggtatttggtgctatacatttgccgaaatgccttggtatcaaagaagaattgctaaaatgctgtttgcaactcctcctagttccacctatgagaaggccttaggctactttcacagggcagaacaagtggatccaaacttctacagcaaaaacttacttcttttaggaaagacatacttgaaactacacaacaaaaagcttgctgctttctggctaatgaaagccaaggactatccagcacacacagaggaggataaacaggagcctgattccccacgtgtcacattggtccgtgacgtttccccactaagggtgagacccattactgagaacaaaccccaggaatcccttacattctccttcccgtgcagcccccacctgattgttcttgtgtggattccagagctgactgctggattgagatgcttatttccccacgtacatgtatatcaaaggttctgtgtagcctcacctagtgcatcgtaatttcttacttgagggagaccagcaccctgaaaacgaactggaaagctgccttcttcagtcaaatctgctaaatcatacctacaatgaatgatattcaataacttctgtcatggcaaaatttatacagcagtggtaccatttgtaattctaatacttaactcttttatggtatacgcagtcctttttgaaggccagtttccctctatcacataacctgtcacatacattagaattttttttttaattctttaggcttgaaaattaccagagtgttcataataaggatttggaaaaggagtctattcaaccaagcagatctctgcctttctttcgtctttactatgaattctgaataaaatggagaacacactctcaatatgtagaaaaataaaattttggcaaaacaataattactgtttttctgtatgtacttagcagtgaaatatttataggcaacagattttaagaagtcagttccatggctattaaaaaatgtttaagttaatgaaatttacagtgcatattaaaagcatgatacaaatggaaatttaaaattttgtattaggaagcccagtttgctaaaagtagcattaatatcattcacatcagattttaatttgttacacatttttgtagttcagcaaaggcccctatgatgaaaaacaattaaaaagtgttatgacaaaaataattatctgtgtaaaaagggggagacccaaaagatttttcatatggttatttaattcagttaaatagaactgttatgaatttgagaggaatgaagatattcaaacactaacagaaaatcattagccttatattagagcatgaacacaaaaaagtggcagagtttacattaccttttgtatgttcctaagtatgaaattgcatcaatttattatgaattaaatttgaaaagcatcacagatttaaaaacaaagtacaaaagagcctgattctttttaattccacaaatacctagcatctcaaagtaacatgtaaacaaacttctatgctgctcaatgaatccttccaatttcgataataaactaaatagtattggatctagtatatgactttcatgtgtaagttatggttctatccattactttaacaatattactgatgtaacagagaaaaattttcaactattgtatttatttaaaacaaactgacaagttcaagcacctgtcttcagaaaagccagcagcatttttttttttttaacatactcaaagtaagatttggcctaagcccttaatacctttctgaacagccatgcaactaaacaccctcaggagatgttacataagggagagaagaacatggagcaatttgcactttttcccctagataatattaacaaggtaaagcaaatccagatctttatgaatgaatggctgtcatgtttaatacacttggagctctataaaactagagccactatcatatatgtttatatagatatatatgtatttttaataaagtctctcacttgcttcaaaatttaaggatgatctttttcctggtcagtcatttcaagggaacaataaataaagtagaaaaggatgaactgttttgcatatttctgtggaagaacggaaaacatactttgagaggttcggaaaatncactgtacagaatgaacagcttatatacactatctgtgc

SEQ ID NO: 507659 - DNA, 338 bp, Homo sapiens
  misc_feature (71)..(71): n is a, c, g, or t
  misc_feature (74)..(74): n is a, c, g, or t
  misc_feature (113)..(113): n is a, c, g, or t
  misc_feature (189)..(189): n is a, c, g, or t
ggtggtcttgatgcagttgtaagcttggggtatgaaggtttgggccccgctggcgctttccggctgcgctngcntgttttcctttccgctcccaggggcgttgggaacggttntaggacgtggctctttattcgtgagttttccatttacctccgctgaacctagagcttcagacgccctatggcccgnccttcgaacccaaccggcggccttgagcgctgagcaagcaaaggtggtcctcgcggaggtgatccaggggttctccgccccggagaattgcagtgcgcatgggacgaggtttcgggataaacgccttgcaacgacatggggtaaaggat

SEQ ID NO: 507660 - DNA, 623 bp, Homo sapiens
gataggcttgtgtcttacccctgctgacttctcgccgtcgccttgtaagctttgtcttcgccttgcaagctttgtcttcagggttggaaagatgagacattcaaagagaacttactgtcctgactgggatgaaagagactgggattatggaacatggagaagcagcagcagtcacaaaagaaagaagagatcacatagcagcgcccgtgagcaaaagcgctgcaggtacgatcactccaaaacgacagacagctattatctggaaagcagatccataaatgagaaagcttatcatagtcgacgctatgttgatgaatacaggaatgactacatgggctacgagccagggcatccctatggagaacctggaagcagataccagatgcatagtagcaagtcctctggtaggagtggaagaagcagttacaaaagtaaacacaggagtcgccaccacacttcgcagcaccattcacacggggtatgagtgccttttaaacgttctgaaaggttttatttcccatggagaacaggaaacagtttgtgtttgagaaaatttcaagataaaagtcatcacaactctaccttgcaggagtattcttttagtatttgtgtattacataaga

SEQ ID NO: 507661 - DNA, 196 bp, Homo sapiens
tacaggatctagctccattggtagcctgagcagcgtctcatccatccgcgctatagtcaaatgtcacctccgccaagaggccctcctcttctaagtgcaactcctatcttcccatcttgggttaggagctcatttgacagatgaggaaactgaggttaacgcaaatctatacaagctcctaagggaaaggccagga

SEQ ID NO: 507662 - DNA, 874 bp, Homo sapiens
  misc_feature (381)..(381): n is a, c, g, or t
agcgcgcgttgtcgacgctaaaccccggggccaagcgcgaccggtcaaccacgaccggggttccggccccaccagggtcgtcggccgagtagaagcccgcacggcgccggacaagacaacgacgggcacgcgagccagacactaacgggaaaacaggcaaccccgccaacggcggacgaaacagatcccaccttcaggcagacactagacaacccccgtcgacacacctgctctggggcccacccctggcccaacatgtcaaggggcagcccccacgaacgcgactttgcgcacccttgccccagagaacaccggcgctggccccagaaacatatacgaaggcaccagggcccctccaaggcgtcatactttgtgcccggncgcaacgttgccagccggtaacgcgccctggccccgagacatagacccgtggggcccgcaacacacaccctcgccggctacccgcctgtgggagaaccacccagcgcccgccactcctccgcgtgctactctactgcagcacggcgcccggaggccctcacggaccacaccatcagtacaaggcggggccgcacagtcagacacgtgggcccaacagctcgtgaaggatacaccccgtcctgaagagcttctaccgcaagcacataggtacttcggagcgcacgcaggtcggcagactcctaccgtgtcactcggatcgttggaggtagttgagcaccacagcacgaaggttttatgtcccctcgatctcgctccccataggttgaaggaagtcgagagggacgccggcagtacatccgacgggggtcgtccacccgtgcagatgatccccggggttcgggtccccacaaaaagcccccgcccccacattaac

SEQ ID NO: 507663 - DNA, 357 bp, Homo sapiens
attatttatttcgcggccgtttgtctgttataacggggctcttctttctacgttactttatgttggtgtttttgtaaaacagaattagggtgaccgcggggattgtgcggaaatttagccaccgtttacatgtcgggaggctgaggtgggaggatcgcttgagcccaggagttttacaccagcctgggcaacatggtaagaccccttctctaccctcccccccaaaaaaaaaattttagtgtggcatggtggtgggtgcctgtggtcccagctactcgggacgctgaggtgggaggattgcttgagcccaggagtttgacaccagcatgggcaatatggtaagaccccattatctac

SEQ ID NO: 507664 - DNA, 142 bp, Homo sapiens
ttttggttctcaaaaactgcattattaataatattttagtatacagagctattccacagtttttacattgtaaacatggctgtggttttgtatttgctaaatataggggctggactaaaatataataaatctgtaccttatc

SEQ ID NO: 507665 - DNA, 289 bp, Homo sapiens
gtatgacataggggggcgattctctggtggcgacgctgccggcgcctcaagggcgcttcctggcgaatcttcgccgagtgggccgatacagggatgcggcatgcaatacgggacgcatcagccgggggcgtatcgacaccacgtctacaagcgcggctacgttcaccacaagcgggtgcttgggccatcaaatcgggggagacgcggaactcgtcagcctgggtggcttgcttggacgacggcaaacacgagcgcgatgctggtcgggttaccgagcccgaaattcgta

SEQ ID NO: 507666 - DNA, 80 bp, Homo sapiens
  misc_feature (5)..(5): n is a, c, g, or t
gcgcnaatggtggcctttaataccaagaaagaccatgacaagtgacagaacaggagcaaattcccttctgtcgtcttctc

SEQ ID NO: 507667 - DNA, 110 bp, Homo sapiens
ctcttggtcgtgtgaagttctttctcttgcgtatgctcctagtctcatgtcatccctaacagtactgagtgcttatgggcatgagcctacatgccctgcatccagtcaga

SEQ ID NO: 507668 - DNA, 564 bp, Homo sapiens
cgaacatgtcgatggctataccagtgtatgttgtactttcacttgttgattggacattatctatcatctccgcgtttgggctattatgaatgaaactatcatgagcatccatacgtggcaggccaggtctcactaacacaggcctccgaaacaactgtttcagtaccgactgagtggttcaataaaatattaagaggaaaaaaaaaaaaggatctctgtgcccttatacaaggggcgggcaatgtcatcaaaagcccaccaagagttattgcctaggatttctccggggcgtaagagcatgcacggaaataacgaaggctttatgaagaggaagcgcatgttagtaattaaataaagtgcttcctggggggggtctagaaagaaatcccccagggctccagaaaccagtttctgggagatctgaagggactcctcgaaacctcgtgggatctagcaggaaagaatagtaagggcccccaaggagaacaccctatttagataaagtgaatataaacctagaggttccagaggaagggtctatccgcgactcgtcctgtgttctag

SEQ ID NO: 507669 - DNA, 1692 bp, Homo sapiens
ggccccttacaacgcagagactctcctcttcgcagcaaacaagacgcaggcgctcctccaagctagcacatattgacagaccttccactggcactccttacccgacagggctctatccccactcgtgctgctcgtaatactggtgactttgcccagctctcaatctcctaactacaggacgctggcagctcaacccattactcaacgtggacgcacagctcaccagcgtcgctcgcacgtgcccacgccttcgttcctgtggaacacttcgtaacctccaggaacgtggcacactccctgcaacctaacttgcacttaccatgtgatcaagccacctacactggcgcgctggatcttcgcgactctccacgtggctccggcccacgccagctccttaccacagactggccaggccacctctagggcacacttcctgggcagcacccccttcacaacccccgttcccctctttccaactcttttgccaccttcctatgacgtcgcgcgcaccccgaggccacagccatgcggcgcaacccacacgcaagcgcaacacactccgtggtgcgcttggccctgggagcacaacttgggcccaaacaccactgtggacacacgggacccccctgatacatgaaaaccgacccttagatgggcccactgcaacaaacgggccggccctaggcgcacgctcggcgccacaccacactctatacgccgcccaccgagacgacgcgcctgggcatcccaccacacccatttcacgcaggtggggcgcccaacatctacctgacaagcacgccagcgacacggggcgctcaacaaccacaccgatgccgtgcgagcgaaggacgaacctacccgcgcacacggcgcacgaagatgacagaccgaacggccgcatggcgagctgtcacggcaacacactccagctagtggcgcagggcgggacacgactctcacactgtcgtcaccaagacgaactgttaccacagtcacgctgcggacacctgctcccgtcatctgactcttatcagccgactcttgtgtacactctgtgcaaccccgtcccccctcctagctacgtttcggacacgaacggcctggggtgaccaactagccgcctatacgccagcccacagccggcacgtgagcctgctgcaatgcgtgccgccgtaccacagccttggtgagtcacatctcgcgtctcacgccacgcgcacgcctcgaagactgcgcctggcacccgcttattagcgctaactattagggcgccacaagggtgcccctagccgtatggtaccatcttctccgcgtataacgtttccgtaccacgcaagaccctatagacagcccgctaccattaacccatgcaatactcctctctgggctaacgcgccacacgaccccaccgacactccccacgacgcctagggcacccaacccaacgcaccggacagccagtggcagaccgcggaggtgcacagcgctccgatcagccccctcacaacagctacgggccagcccacatcagcggagtacgcactcacctggacgccagccagctcgccgcacccccaacacgctgaccggcgactccccctcaagcgcgaaaccaacgcgactcgctcgagccactgctcgcgcaggcagcgcaccggcaccagacgaaccgccctgactcgaactgct

SEQ ID NO: 507670 - DNA, 474 bp, Homo sapiens
taggttggagggggaatgctgggaaatggtaaggggtatggagacttgtcatataagtaaggctagggtgaggggtaggaagtttttcataggaggtgtatgagtgggtcgtagcggaatcgggggtatgctgtccgaattcataagaacagggaggttaaaagtagggtctgggtgacaaaatatgtggtgtagagttcaggggagagtgcgtcatatgtggtccctaggaagatggcaggggtgagggtgttattataataatgtggtgtatccgggctatgaagaatagcgcgaaggggcctgcggcgtatccaggatgttgaccgcctgagactagtctcggactccccttcggcaaggtccaagggggtccggtgaggtctctgctagctgttggacacaccccctatcacgcccacgggccatgatgccggacgtcaccagaggtgtctcgcgtcgcgacaagggcca

SEQ ID NO: 507671 - DNA, 143 bp, Homo sapiens
gggctcatgatagaatcgagccgttaccccgccgttgcatgcacatgcaaggcaatctgtggaaaaccgcaataagatgctcaaggcgcagggattaacgaaacactgtttatggcgctgattaccctggatgcgcaggagag

SEQ ID NO: 507672 - DNA, 733 bp, Homo sapiens
  misc_feature (11)..(11): n is a, c, g, or t
  misc_feature (15)..(15): n is a, c, g, or t
  misc_feature (24)..(24): n is a, c, g, or t
  misc_feature (26)..(26): n is a, c, g, or t
  misc_feature (29)..(30): n is a, c, g, or t
  misc_feature (36)..(36): n is a, c, g, or t
  misc_feature (41)..(41): n is a, c, g, or t
  misc_feature (49)..(49): n is a, c, g, or t
  misc_feature (64)..(64): n is a, c, g, or t
  misc_feature (86)..(86): n is a, c, g, or t
  misc_feature (116)..(116): n is a, c, g, or t
  misc_feature (118)..(118): n is a, c, g, or t
  misc_feature (136)..(136): n is a, c, g, or t
  misc_feature (172)..(172): n is a, c, g, or t
  misc_feature (217)..(217): n is a, c, g, or t
  misc_feature (239)..(239): n is a, c, g, or t
  misc_feature (270)..(270): n is a, c, g, or t
  misc_feature (290)..(290): n is a, c, g, or t
  misc_feature (322)..(322): n is a, c, g, or t
  misc_feature (327)..(327): n is a, c, g, or t
  misc_feature (346)..(346): n is a, c, g, or t
  misc_feature (368)..(368): n is a, c, g, or t
  misc_feature (386)..(386): n is a, c, g, or t
  misc_feature (394)..(394): n is a, c, g, or t
  misc_feature (396)..(396): n is a, c, g, or t
  misc_feature (399)..(399): n is a, c, g, or t
  misc_feature (419)..(419): n is a, c, g, or t
  misc_feature (453)..(453): n is a, c, g, or t
  misc_feature (455)..(455): n is a, c, g, or t
  misc_feature (464)..(464): n is a, c, g, or t
  misc_feature (477)..(477): n is a, c, g, or t
  misc_feature (513)..(513): n is a, c, g, or t
  misc_feature (555)..(555): n is a, c, g, or t
  misc_feature (564)..(564): n is a, c, g, or t
  misc_feature (566)..(566): n is a, c, g, or t
  misc_feature (569)..(569): n is a, c, g, or t
  misc_feature (581)..(581): n is a, c, g, or t
  misc_feature (589)..(589): n is a, c, g, or t
  misc_feature (628)..(628): n is a, c, g, or t
  misc_feature (644)..(644): n is a, c, g, or t
  misc_feature (652)..(652): n is a, c, g, or t
  misc_feature (659)..(659): n is a, c, g, or t
  misc_feature (721)..(721): n is a, c, g, or t
taccaaggaanaaanacctttatnangannataggnatgtnagaaaaanccagttcagtcaaanaaaaggaggcaaaaattggganagagcaagaatccaagtgtgaaaaaaaaancnccatctaaaaatcccaanagaaatgccgcggaatttagcccaggggaaacttcngaaagcccctggggaaatgagaattttgcataaagagagagcccnccagccctgcggcatctgagcntcttataaagggacagggcttggccagcagnagaggaagagaaaaaggggntgtctcaacacccaagcaagggcgtctgtgtncaagngagagaagaaccttagggntttggacagagtaaactggggnagcggagggaaaatggcngaggaaananaangtctaggccgggtgtggganaatggggggggggctgtgcagtgtggggtgagtncntctccaggngggcttgggaaanactggcattccttcctgaggccattttggttctgtnctgacttcattcagagcagaactgccaatgtccagcgccaantcctggatnanaantagctgagtggnatgcagtngccaccctatgactcccatacctcttcctttctggagcngttacttttctcagancaagtganaacttanccagtaggggcccaatctagaaatcactcccaccttcatatgagcaccaggtggagagaatnattctcatgact

SEQ ID NO: 507673 - DNA, 236 bp, Homo sapiens
tgctggtgtcctggagaacagctggctgggagaccttcttccccacaggcagctgctatgcgtagggaccgcgggggaccgagtggcatcacaacaaaccccgagcacagtccagcccggccacagcctgcctccttagtgtatctagtaagtcttccctgctgctgcccacatcctttacccaccgtgtctctcggcccactggaggtatcaggatgtgggcacgcattatggag

SEQ ID NO: 507674 - DNA, 588 bp, Homo sapiens
taactcgcagatggcaataagatacccgctacaaactgtgaaaaaaaaaaaaaaaaaaaaaaaaaaaaaaaaaaaaaaaaaaaaaaaaaaaaaaaaaaaaaaaaaaaaaaaaaaaaaaaaaaaaaaaaaaaaaaaaaaaaaaaaaaaaaaaaaaagataaaaaagagcgaatagagaaaaatcaagatatatcgacgtacagaagtgtagagaaagaggtgtatgaaagagggagacgaaacaagggagtatgatagatagaaatgtgacgtacaagatgggagaaattacagatggtgcggatcgttaaaattagatagtgcaagagcaatacaactttacgtcgatagatatgaacaacaaagctgtaaagaagtaggactcagcacagttatcaagcaagattatgaggcatgtaacataaacgagtcgcaagcaaaaacaaatgggcacatagagatatgctacatgtagagcagatacaacagagttggaaccaactaacatgagtggatcacatatcattgtaaaaataaataaattatatattacaatcagctgagacattatgcgtatatcctagaataa

SEQ ID NO: 507675 - DNA, 131 bp, Homo sapiens
  misc_feature (5)..(5): n is a, c, g, or t
  misc_feature (46)..(46): n is a, c, g, or t
ccttntgctggaaaggggtagggcagtcttctcgtaaggtgctgantgagcggagtcttgcagaacgaggagtcaccaggcggacaagggaaattccaggcagaaggaacagcatgtccaaaggcatgggc

SEQ ID NO: 507676 - DNA, 164 bp, Homo sapiens
tccataatgtgtcccattcgggagaatgggatgaaggtaagaaatcgtgatgagagtgttctgtaacattcactctcagtcgggaagattcgtgggaaacaggaaattttctcttttttttgatacagctcttgctcttgtcaccacaggctgacagtgcagtg

SEQ ID NO: 507677 - DNA, 102 bp, Homo sapiens
cccccccccccccttttttaaaaaaaggggggttttcctttttttggtggggggggggggggggggcccctgttttttccttttaaacgggtttggggggca

SEQ ID NO: 507678 - DNA, 1554 bp, Homo sapiens
gtgcatccctttgcggactccgtggaggctcggcgctgcggcggactccggcggtgggcgggcttccgcgcagggcggccgggctccgcgctgccgccgccgtggcccatgggcacaatcgtctcggaaggccggcattaaaccaaaaagatgtccctatatgatgacctgggagtggagaccagtgactcaaaaactgaaggctggtccaaaaacttcaagctcctgcagtcccagctccaggtgaagaaggcggcgctcactcaggccaagagccaaaggaccaagcaaagtacagtgcttgctccggtcatcgacctaaagcgaggcggctcctcagatgaccggcagattgcagacacaccacctcacgtggcagctgggctgaaggaccctgtgcccagtgggttttctgcaggggaagttctgatccccttagctgatgaatatgaccctatgttccccaatgactatgagaaagtggtgaagcgccagagagaagagcggcagaggcagcgggagctggaaagacagaaggaaatagaggaaagagaaaagaggcgtaaagacagacacgaagccagtgggttttcaagacgaccagaccctgattctgatgaggatgaagattatgagcgagagcggaggaaaagaagtatgggaggagctgccatcgccccaccgacgtctcttgtagagaaagacaaagagttaccccgcgattttccttatgaagaggactcaagaccgagatcacagtcttccaaagctgctattcctccccccgtgtatgaggagccggacagaccaagatctccaacaggccccagcaactccttccttgctaacatgggtggcacagtggctcataagattatgcagaagtatggcttccgggaaggtcagggactggggaaacacgagcaagggctgagtactgcattgtctgtggagaagaccagcaagcgtggcggcaagatcattgtgggggatgcgacagagaagggcgaggctcaggatgcatccaagaagtcggattcaaatccattaactgaaattcttaagtgccctactaaagtggtcttgctgaggaacatggttggtgcaggagaggtcgatgaagacttggaagttgaaaccaaggaagaatgtgaaaaatatggcaaagttgggaaatgtgtgatatttgagattcctggtgcccctgatgatgaagcagtacggatatttttagaatttgagagagtcgaatcagcaattaaagctgtggtggatctgaatgggaggtattttggtggacgggtggtaaaagcatgtttctacaatttggataaattcagggtcttggatctagcagagcaagtttgattgtaacttaaagtcacctccttgatccttacatgagctacagactgaacaatgacacaggcatggctgttgtgtccatggctggtggacactgaaactcttggatggacttctaaaatatatgttgatggatcccttttttattttgtgttttttttaatatagtataaaaatcctttaaaaatc

SEQ ID NO: 507679 - DNA, 329 bp, Homo sapiens
ctcggaccggaagttccagacacacaacctcgcagcctttggcccactctccatgatgaacctgcagcacaccatagcagtgccctccgcacagcaatgccctcctatggagttatgtaactgcatgagactactgcctgtggcacatggcacacatgacctactatgtggccacctatttcatgcataaatgctctacacttgccctactggaaaggccaacacctcttcttgaactcacatgcagtcatgttccctgaatcctgccctaaccctggtggatacctactagcagtctgaccctgcatggcattgcaatgctatgtgca

SEQ ID NO: 507680 - DNA, 733 bp, Homo sapiens
tccaccagtggtcaaatgacccttaattggaaatgtttcccttggggctaaacgggcggggcatcccacagcaccacggtggattgtcatcgataatgtcatgaggatgggcgggccatcaactattaacagcccactggactggggcagcccccaggatctcttaaatggtgtcccaaaaagtcctcgggctaaggatcggtgccgctatctggtcgagcaatgggttgcacaatctctatcaaaatgtgattatccccacgttggtgtgtttaatgtggtgtttctcgtggtgtgtctcttctcttggtcctctttggtgtgggtctcctttgaggggctattgggatggactcagggtggcaagatgtgcaagatatgtgcccccaccttcaactcttgggcgccttggtctggtccctagaatttgtgctcatgttctcactgggttactctcctctcaggcgcccttctcacatgttcccccctgttgtgctcttgttggtggcaatgcgctcatctcacacatatttttttttgtgtgggagaaaccatgcaccccaggggggtggcgccagatctcttgggagttgcgccagttggggccacacattgtggtggcccggaatgttcaacctctcgcggtttgcccccttcaggtggttttacccgactttgggaccctcgctggggggctccaaactctcgggggggccagtggttggacgtgtgg

SEQ ID NO: 507681 - DNA, 574 bp, Homo sapiens
  misc_feature (522)..(522): n is a, c, g, or t
ttgcaataccccaatctgcgctcaagtagaacgctggtcatgccgagtgtaattcatggcgtcagtcccttactcatacccatagtggtgatccttagaatcgccaccgcatccacgatatatcattagagcgcgtctcaagcagcccatacatctagatcatgcgctctcaaggcctagcttcctctcctgtcggcctgcgtgaccaagcgcggcgaagaatgccctcggtgcagggtttgaatgcgttgcattccattattatattctagtcgatagttctaatgagtcgaaagatcgagcagtcagggagccttggggtgagaataaggcaggcacattaacgcgccctgatcttgtccagagactttcacgaagtccctcaataggttgcaacttcgacgccaacttataagccctttctagcgcaccacaacgttgaaatggcttcggcaccgatccctgttgtatgaccaatagctgtcttccctaacacataactcaacctccacagagattcanctctagaggatagctaaacctattctacacgcgataggtttaaatctctagg

SEQ ID NO: 507682 - DNA, 112 bp, Homo sapiens
gagacttctccggggcagacgccgccgcgatgcctacgtggctcctacctgctggcggccctagggggaactcctcccccggcgccaaggacatcaagaagatcttggacag

SEQ ID NO: 507683 - DNA, 127 bp, Homo sapiens
tgagaatagtcacggtcggcgaacatcagagaggattgcttaaacccaggatgttcaggctacagtgagccatgatcacaccactgcattctagtctgggtaacggagcaggaccctgtccaaaaag

SEQ ID NO: 507684 - DNA, 1015 bp, Homo sapiens
gggacgcaggagctagacagtctgctggccatcactgcagaccctgctgggggccctgtacgagggagtggagaacgtggtcctgatgacataatgaagggccctggggatggagatgctgctgtccatcagaagagtggtgatgcccatgtccattctccagtgcttcggcagaggttttcgggaacgtggcccggcgtgactagggctcatgctcaggtctgagttcggagctcccgtggtccgtccctgtgcaggaaacttgctggatttcatctggcggaccctcagcggtcagtagcaagaatattagcttgcatggaagatgggtcccctgcaggtgctgctgctgccctcgtatccagcttgaggtctaggaccatgctgtcgtgcactcatcctcgcgtgctgtgcaagccggcgcgttgcgctgtggggatcctgatcgggcgcctgattgcccaggtcctcaattcctggatgcatcggtagagattccctctctccaggccacgagcacggccttacagcacggctcggaccacggtgtatgcgatgttagagctgagggtgcaggtgtgtggggcctcggcgggaatgcttcagggaggagcctctggagaggccctggtacacgacctgctcagcgacatctacccggcagtctgatgcgcttaagctgcgtagcccgcgggggagcctgatgtgagtctggaagactgggaagactatggccccgcagaaacgcaccacgcggaatcgtggggggaaggctattggggccgcaacaaaaggcaaccggtcaaaggggcgatggcaaatggcggaacacgagaaaacgtaatacgccggcaggccatccagaaggcgccaagcaggagcccccccatgttagtggcccctgcatcttcgggcagcacacacaacacgaacaccctcgagcagaggagctaccccgggcacggctgtatcaacggagtatatcgcatgagtgtgccacggcgaacaaccacca

SEQ ID NO: 507685 - DNA, 432 bp, Homo sapiens
ggagagtcatgtacaatgagcaactcagttctctgtacaaaacatcaatcatgcggttcggtatcatgcaccaactcagccgagatcctactggtagcctatcacagggaggatgtgacgactattggcaagtcgataggacacataatggaacatgggaggggacacatagggaataaaagctggccaccccagccagcagcaacaagctgctcaggtccccttccatggtgtggaagctttgttctcttgctcttcacaataaaccttgctactgctcaccctttggatgtgtgccatctttgagagctgtaacactcactgcaaaagtccgtggcttcattcttgaagtcagcgagaccacgaaaccaccaaaggaaccaactccagacacattatgcctgtacgttataattctaccactcaaattat

SEQ ID NO: 507686 - DNA, 315 bp, Homo sapiens
tggacccacatgaatgagcctcttgacttagagtgcttcctgggcaggtctcattatgatcttccatactcctgtacgtgtgctgacagtgaattcttttccatttcttgctcgtgagtgtaaagacttggtgtccgtaccctgacacgggttctggatgccagctctagagtggcgaaatctcaccgtaggggggcagaaagcccctctgtcgagaagggatcggggaggcgtgccaggtaatgggtcacagcgacaggctttctaagtgggcttatatagttgacagatcacggaaccggagcggagttgagg

SEQ ID NO: 507687 - DNA, 866 bp, Homo sapiens
gaatctaaggcttgggtacgaaatagtaggaggtgttacgaagtccaatggaggcatagatgaagaaggtgctgtccagcgctggacacctaagtggtgcacctccgtacaaggtcctagtcactgtgggatgccaaaaggcgggaggatggcttgagtcgcaggtagattggagacgcagacctgggcaggcgaatagggagaaccctatctctcaggaaaaataaaaaattagtcgggcctgtagtctctgcgacttgggaggctgaggtgggaggatcgcttggagttcaggcagattgagacgtgcagtgagccatgtttgtgccactgtacttcagcctgggcaacagagcgagaccctgtctcaaaaatacaaaaattaaaaataatcccctgctgggctgcggtggctcacgcctgtagtcccagcacttgggaggctgaggagggtggatcacttgaggccaggagttcgagaccagctggcaacatgatgaaaccccgtctctgctaaaaatacaaaacaattagctgggtgtggtgacatgcaccttgtggtcccgagactacttgggggggctgaggcagtgagaatcaacttgaaccccaggagcgcggaggtttgctggtgagctgcacaatcgtgccacttgcactttcagccctgggttgataagagcgagactccatttcaataaataataactaataataatgcccttggtcccacgaggagtccaagaagactttacacgaaggaaggtgttattttcataccatctattcaatccattcatcgatcattcttcatccatattataaacatatttactgtgggccacaaatctctggtattacgggac

SEQ ID NO: 507688 - DNA, 507 bp, Homo sapiens
gcactctaaggatcccatgatagcggatagggcattggaaggactgcgggctctaccgcctgatgtggactctgagtggggtaacagtgaagcaggtctgcagggtgtctctctcacagcaacaagcaggcttacagtggggcaggcttagtgactgtgcctcagttatgctgtacctgggagtgggcaggccctctcccatgtcaccatcaaaatccactgatgagggctggtgggagtcttgagggctgcacccgggtattgtgagttcccctcagtgattgtgctgagcgccttggcctggcttcttggctccgcccacctgctctccctgccaccaagttgtcttccccgggtggcatgtgccacttggctgcctcgtgcctgggcacagtggtgcctattatgggccctccaggtggctctggtgctcagcctgctgtgagcaggaacagctgagtcccagtggttcttgcacacagcagggctcgggtttgaatccaggct

SEQ ID NO: 507689 - DNA, 337 bp, Homo sapiens
cagaaacgcagacattatgaggacgatgatgatgtccagagtctgtagaaaatttggatgaggcatcaaagaatgaagctaactaaaagttgggttttgggaagctggcatggacatagatttaacaaatcagctatgtggttccaaagtttaacagacatggagaacatcaccggttactagctcagtaatataaatatttggtatattaataatgctagttggtccagcattttccggtcatttgatttggcatttggcacttcctcccaggatattttttgggtcaaaatatgaagtatgggtgcagttggagggtcttacggtttcaagtggt

SEQ ID NO: 507690 - DNA, 671 bp, Homo sapiens
ggaccgtaagtgtcaatcctgttctcagttaatgcagtatcagtctgcgtgcatattgctcagttccatgagtactggcccatgcatctatgcaagccaagcatacgagagactcattatcgcctccagcacatgacgcagatgcgatctgtagagcacaggcaatgtctattcagagcacagcggaggcatctgtagactctcaatacggtcatcagtcgctagcacttgacacaagatgctgatactcatgcagattgcatcaccatcatctgattatgaacatgcacgtcttacaatgtgaaaagctgtacaattataccattacacgtgtcagctatggtacatcggtcgtcgatctgttccacgcgctctatctaagtctttaggatttggcaatctgaatgcattacacatgcatatactagcacacactgtaaatgtaccgaactgtccgaatgatgttcacatacgcttcaatctgatcgcaagtttcaagcgcacagctttagtgtgtatgacgcgttaataaacacgtgctcatccgtaaacatcactagcaacaatcagaatgcactttccatcgttgatcactcttaggaccctatcagatctggtcatgcgctcatagagcgcaaccttagatcccacgtagctccagccagtggcct

SEQ ID NO: 507691 - DNA, 250 bp, Homo sapiens
gcttatgaaagatgaggatatccactgttccccgtgcagacaaatacagtgatgtggtcaggtagaaagcagttaaaccccagtgcttatggaggggttggtgctgctcccttgcagagcaccttgcttgtgggactcttggaagcataaaccctttgaaaactaaaggaattggtttctggccaacagcttgaaacaaagggagaactttgtaggaacagggattgaggaggcaacataaccgtgggaa

SEQ ID NO: 507692 - DNA, 120 bp, Homo sapiens
  misc_feature (2)..(2): n is a, c, g, or t
  misc_feature (50)..(50): n is a, c, g, or t
anatgaatcttttttcttttttatatattttaaatttatattatattttntattttttattattttatattttaaattttacttgaagttctggggtgcatgtgcagaatgtgcagtttt

SEQ ID NO: 507693 - DNA, 338 bp, Homo sapiens
tataaccaagtgacattattcagtcatttcacatagctagactttagtgatgtgatgattaaaatgataaaagttcatatgttctcaaacttggggtaaactgaggtatttagctacctgggaagatcttcgtaactttgagtgctcctgtgaggagcggggatagcagctacagcaacaatagtttccctgccccgaaccgcttccacaacatagcaatgtggtatagcagctctgacttctgctcccagtaacccatcgttagggcactctagcactatggaggtacccaaggctcagacagtctctatttaagacactttaacaaatacgagtaa

SEQ ID NO: 507694 - DNA, 461 bp, Homo sapiens
cgcctgcaccggcgttgagcgaggtgcgggtattcaaggttcagtcggccaagtgcactgaaaccattcccgagcgggccgacagcacccagatgtgcacgcaccgcgggcagacactggtgtacgtgatggaagtcggcctgggcaacagcccacaggcatttttcgacggcgcgtcggtgccccgtatcagcaccaccgccgtctgccaggtgggttccatcagccagccatgcagcggcgcgggaacgttgatgggctacatctatacgttccagctggataatgtcgaagccggcggcacgttccagtacagcaacacctcgatcaacccaccgcgcaaccagttggtcaccaccctcggcattcgctgatcgccacccatcaattgccttgaacgctcataagctccggaagtcggaccgctaagacggcgacttttctgaacgccgcgattgcac

SEQ ID NO: 507695 - DNA, 164 bp, Homo sapiens
cgtaccccaactgacgtagcccacctgacgtagcccacctgggcaacagagagagactctgtctctgaaaaacaaaaatttaaaaaagtcctattttcaaccattgaaacaaaaaggtatttatcaagtataatccgtttcctacggtctaggtgtggtggctc

SEQ ID NO: 507696 - DNA, 278 bp, Homo sapiens
tttggctgttcttttgtattttggggaatttaaaattcctgggtgggaaggattcaaaatgaaattcagctgggcttagaaaaagtgggacttttgggtcggtccctggatttttcccccgggatttcaaaagctttttaggcccttctgtttgggctaatgtgtgaagtcccccctggtgaggggaaaattttaggatccaaagggttgtaaaatggggttgccccctcataaaaaacaatgaaaataaaattttttcctgggagagcccccctgca

SEQ ID NO: 507697 - DNA, 186 bp, Homo sapiens
  misc_feature (77)..(77): n is a, c, g, or t
taaaacccccccccccccaaagggtgctttgttttaaaaacggaggtgggattttctaaattgggaaattaacgganccgaagccccccccggcaagacttttcctttaaaattttgcaaatttagattaattaaattaaaatttgtttttaaaagccttaaaaaaaaaaagtttttggggaaata

SEQ ID NO: 507698 - DNA, 869 bp, Homo sapiens
cccacgcgtcggcagcagaggattctgggggaagaatcaggagcccctagtcccagtccacaaataagacatggcgtagtcctggttgatgaggaagtttggggtctgcctgaggagatagaggagcttagggtgcccctcctcttgttaccccaaggagaggagacattgttggccaggaggaggtctggtgacgtggcagcttgtgggggaaggaggatgagagtcttctggtatgaggagtttagatgcttggcctggggtccagtggtcccagctatcctgactccccgtccctgaagtgacggagtgcaagtaatgagtgaagagggggctccagattgggcatccctcgtaggggatcctggcagatggttgttcctttcccgcccgtaatataccgctcctggatacctcccttcctaggctagcacgctgtgatgtcctctgatccctgtgccgagcccagtctgcgcctgagtatctcctgatgccgccatgtgcactgcctgaggcgtgttctactacctttgtgcagttggtgcgtcgctctcttacattgggcacgtcccgtgcctcgcgctctcatggcattggcgtaggcgttgccttgggctttttcccagtttcgtccttggactagccccaccacgtgccatgtgagagtggtaggctccttgtcgagtgctatgtcggctttgtcttcgtggcaccttttgcagcgtttgagagtgccttgggtgggcggtcttaaggtgagggccctttcgcattatggcttgttcgtccccttttttggtgccacgacccccctggcagtgcattggtcccccttcccatggtcctttggttcccctaatcatacctga

SEQ ID NO: 507699 - DNA, 280 bp, Homo sapiens
tcgtcgtttgaggacccgaaacctacttacgcagtcactttgtcataggcatttagttgttttcacatcttaggtattatgaatagtactgcagcaaacataggagtgacaatatctctttgaaattgtgatttcaattctttcagagtaaatacccagaagtgggatttctgaatcattaggtaattctatttttaatttttcgggattgatagtactattttctgtggtggctgcactattttatattcccaccaacagtgtgcaagatttcaacttc

SEQ ID NO: 507700 - DNA, 710 bp, Homo sapiens
gtgctgtagaacagaacattaacccttgtaccaacgaagaaatggataaacttggccttgtctaagtggtaagaatgactgtcagatataatatactgtatgtgtacgtttgatttaaatttaatctcgtaatgtatagggggataatctttcccagaaagaaagggatgcgattgttttctagaaacttctttaaaagtgccatcattgagagtacagaatgagtctgagtgtaataggccagagatttatatatagtgagaagtgtcgtaacaatggtgaaaagtgtgccattgtgtcagagttacagtggctctatgtttttcatagtaattcagagtgaacttgcctatttttgagtagtacacatgtgattttaatagtatactttgcccattgtgagcctcgacttgcaaagattagggcagaggagaaaacgagatttttgaatgtaatcttgattttgaccgtcatatagtgtatcattccagaaaggactcttaaacgtatcttaaaagatcagttggatacactaccgtaagatattcaccttaaaatgggtataaggctgagtgaacttcatgccaacctgagaaacatctcatacaagtgctaaactcatgtagcgaagtgtcgtaaaatcctggaaaaacacgtgcccatcctttgtgcaaaatcaatccggtcaacatacttggcgccccccctag

SEQ ID NO: 507701 - DNA, 268 bp, Homo sapiens
cccataaggttatgcgatgtaggtgactgggataatgttttcttttaggatgagtaagtgattctactgaaatcgcttcacatactctattgcctggagctgcacaacgattcacacaccgttcttgttagggctgtcatcccaggaacacagggcaccaggcagcagcatccgggcatgacacatgttcgcatcggtagcatggcaatgtgtccgcaagcacagcaggaagccccccgtgcaagccagcaccatccagacacatgtc

SEQ ID NO: 507702 - DNA, 325 bp, Homo sapiens
ctcctgtgcccaggtcctggaggagagacacttgtggggataggccagccgcgcatcagactgtgaaccccacgaaggagcccattgtggcctaagaggctgccctcctgtgctcagccctgaggacagatgcctccttcctcttttcctttccaaagaagcaagaggccgttgcttctgttggaaatggtactgtacagactggctctactttcccatggccctagcgagtggagttttcaaccaggatcccaaggactttaggggaaggatctgctgtcctcttcaatggtttctgtgactgaacaagtcggtcgaagatttt

SEQ ID NO: 507703 - DNA, 781 bp, Homo sapiens
gggagaccgcagctcctcaggcgcccggtgcgtgtatctgttgggtcggtcggcgtcagggattcgcagcgggcctgtggttggcgtcgtccggccactggtgcgcccccggcggcaggcggagctctcgctcctgtctcccgcggctgcgtccgcgggtctgggtccgccagcgctctgcactggcgagttccggagtgacgctgcagtcccggtgccggcagccacatgccaccgagcggactgcattgtgaggcacctgcgcttacgttcctgccggggtcacgtggtgcgggagcttcggccgcgggtccgagcagctgggcagtccccacagctaattttcctgagcaagtggtacgataatcttgcacgctgatagtatccactggtatttactagtggtttgggccagctgttggaagtggagatgtccactaagatggtggtgagcaataggattggagcccaatatttaccaggaatacgaatgaacgtctatggaaacggcatatcaatggctaccctctcatgagagggactctgatgggggaaattccgtcaaatgtgggccattgtgtgggataaccctgaggacccacgaaaggagaccctgtagaattcgtggttagcacgttcactttattttccagcgatttcccagggggcatcttgggacgcgcaagctaaggaagacggagttagacagtttacccaggaccctttcggagcattctacccgggacaacttcttgccagggtctaaaagcagcatgctcgg

SEQ ID NO: 507704 - DNA, 183 bp, Homo sapiens
caggttgtgtcaaatcaacgtcgggatgctttttggcaagttcttcagctgtcatattagctgtgtcccgtagcaatgcgatgtatttatcttcaaagttagccccatcttgttgggcacgtgcgtaaatacccgctgagaagagatagccgcagtataagggaagttgtagattggcacaga

SEQ ID NO: 507705 - DNA, 919 bp, Homo sapiens
ggcgggtacccgcagagggcctggaagaggtgctcactcatcgccgagatgactgtgtctcacaggccacacggagaagatctgctccctgtcgcttccacccactgagcagccaattgtgcgtggcactcgttcctcctatgacctcagctgttcgcagtctgggaccttcaggcgtggagctgatcgggcgtgaagcttgcgagggctcaccgaaggaccgaggatcgttctagctcgtggacctggagtccgtgatgggcagcagctgggcactgtctgcaaggatgggcgttgtgcggcgtctacaggccccggagtggccctgcagcccctgctaggaaggcccagggacccaaggggaggacgcgagagactcgcattgatctgggatatgtgatgagtcagcatgtcttgctggttgtctggtctttgatcatgcgcccacataatccgcccttggcacgtccaatatgtgaagcgccagactggtccgtattatgaagcttgaggccactgtggccgtgctggacgccttggcgaacgggtagggcgctggtagcgtggctcccgtcaacgctctgtctgcccagtgtacgtagccattgacacgtggcctaggtgcgtcctgacccgcggtcgaaggggcgaccatccgatggtaattccatgtacgatgcgtgcgtccccgatgtccaccattctcgttcctgcgagtgcagtcagctttcacgttcgccttgaactcccacataggggcctcggtcctcctgtgcgtaacgacggagtgcgacgtgcgggaagtggatgctgatgcgggtgccttgcggttgcggtgaggcctccgcgtggagcctgtgggccttccgggtgccccggagtccggaaggagttcttccagggatgacggtgttcccag

SEQ ID NO: 507706 - DNA, 108 bp, Homo sapiens
tcgcaagagatagtcttgttaagaaaataaataaagaagcggaaaggtgagcactttaaaaaagaaaaaataggccaggtgcggtggctcacacctgtaatcccagca

SEQ ID NO: 507707 - DNA, 257 bp, Homo sapiens
tgaagttcaggtttgtacgtggacacttataaaggtcaagcaaattggcaaagtagtccaggtttacaaggaagaaatatgtttatctacaattgaaccgggtccagccgggaaaaggctaatggcacaactgtttccacggtagggcatttaccccagcaaggttggttatcactaggctaaaacttggacaaaggaccgcaaaaaggatcctggacggaaagcaaaaacttgcaagatgggaaggaaaaggccaa

SEQ ID NO: 507708 - DNA, 168 bp, Homo sapiens
  misc_feature (107)..(107): n is a, c, g, or t
gtggtaaaggggacccttttccgtaaccccccacccccgcggttataggccgctccaggggccggctgagcgcggtttttccctacgcatctggcgggattacacgnatgatcgatacttgatagatcatatccgagtattattggatgggatctagacatctgcgac

SEQ ID NO: 507709 - DNA, 162 bp, Homo sapiens
gtatataactggaacatgtgcgttgaggtagtggaaatgatacatgcatctgttatatttccgtgaaacttggaaggggaaagatctgagggagtgggaggatcacataagatcaagggagaattgtaatgaagatgacagagacttgggagtgtgcatatg

SEQ ID NO: 507710 - DNA, 1047 bp, Homo sapiens
  misc_feature (462)..(462): n is a, c, g, or t
  misc_feature (714)..(714): n is a, c, g, or t
gcaaaaccccgagctctgcatcaagctgaacgcaaagtcagccagctttaagttaagctaagcccttactagacgcaagtgggacttagaacgcgcacaaactactgagttaacagcgtaagcgaccctaatcgaactggtcgttcaatctacttctcccgccgccggaaaaaaaggcgggagaagcccgcggctaggttggaatgcatgcgtgtcatgtcgcacatgtgcgaagtatccaagtaatgacaagaatcaccgtgcggagcgtggctacaaacagaggccctaacgcccgtgtgtcgaattagcacttgtacgatggtccgagagtgcggtatccacagtctaggtccccactctcttgaacgcttcatccctcctcagactagagtagtgtactgcacgaaccggtgtggagctatgtactgctgagcaagagcgcatcagagaaggatcatntgggtgacaccaactgataccctaacttaattctggcgcattgagctgggagtcctaggcacgagcatctagagcctccttgattcgaagccgacgcgtgggccagccgaggcaaccttctaggtaacgaccgacatctacaagcgtatatcgtcacagcccgatgcgaatttgtaatcaatcgttccttcgaataggtaaatacgccagtcgactaagtacgcgaggcgtcttggccaagcttggactagnttcccccgtaataatcgggtgcccccgatatggcgtttccccgcataaacaagataagcttctgactctaacctcgctctctcctactcctgctcgcatctgctatagtggaggccggagcaggaacaggttgaacagtctacctcccttagaggggacgactcgcaacctggagcttcgtagacctaaccatttctccttaacctagcagggggttccctaacgtaggggccacgattcatacacatgtccgtgtaaaacccggcatacgataccaaggcccctggagaaagcgaaaaggggcgaatccatatccgcaggggacaagacaag

SEQ ID NO: 507711 - DNA, 193 bp, Homo sapiens
cttcctcttctgcctatttttaaaattttgtggttttttgtttgtttgtttacttttcaaacttttttgttaaaaactaagacacaaacacacatgttagcctaggcctacacaaggtcaagatcattaatatcactgtcttccacctccacatcttgtcccactgaatgtcttcacgggcagaagcaggaag

SEQ ID NO: 507712 - DNA, 409 bp, Homo sapiens
ggtacgacaggttacaaaggatacaaacaggaagaggttagaggaatgagctgagtagggttgttatatggaaccctctcaccaaacccattcttcttcttctttttttttttttttggaaagggagttccgctcttttaggcccgggctgaagggcaggggcaggatctcagctcacggagttcctgcggcctcccaggtacaggcgattctccggcctcagcctcccaggtaagggggataacgaggcttgcgcaaccatgccgggctaatggggtattttttagtaaagcaggggtttctcaatgtgggccaggcgggtctcaaagtcccgagctcaggtgatctgcccgcctcggcctcccaaagggctgagataaaggcttgagccacgccccgggcctcaaaa

SEQ ID NO: 507713 - DNA, 305 bp, Homo sapiens
cacgctgaaatgcctgaaggtcgaatctagagtatccccattcaattgcgcgagccatcgtgcccagccgaaagcagtacgttttcaataacggcagtaatgtacaacggatagtgttcccatttgatcaaatgtgctattattcaaaatagccctaagcttagcacatgatatcttcagagtgcaatatatgtgcaccgaaatcacatttgtgtacttcaatcagtagtctcgattatatgcctttttgctgcatgtttgcattctcggtgatgatcctggcggatgtgcaggatagagcctcg

SEQ ID NO: 507714 - DNA, 147 bp, Homo sapiens
ctagcaggcggtacttagctctcaggccctcttggcttgctggaggagagctgcttcaccacacagaatgcctgtccctaggcaagtatgtgccagtgcctcatgattgagagtgagcatgctcgagcatattccagtagtagtagt

SEQ ID NO: 507715 - DNA, 802 bp, Homo sapiens
gcagacagcctagctggcactttgaggatgaggcggttcagccatgaggctggctgtgctttatctcgtgtgggccctgactgagtgctactggcagtagagcactgtaacaaccagccactggactaccaagagccacaaaaaccaccactcacaggacaaccaccacaagtgcgacctactcagtccatcgtgcacccgacgagtgccactcacaatcccctatcaccacctagcgcatggatagactgtcacttgttctatccaacaagccaatagcgctgcctcgcagcctagtggacgcctcaacctgctcgactcgacatgatcctgccattcacttagtctattggaacatgccacggttcagtcgcaacaagcaacagcactgcgcaccagcccgagtgagttcaccaagttctgcccacccaagataccagctccaccctctccgagtcctagcccgaagcctccaaggagaccattgggcgactactcgtgtaccgatggttcccagtcctgtgtccacctccgtgcccagattccgattcgagtcgtgtcactacccagggtggaggatgcggcctgggtgcactctctgtactgagtcccataaatagccaccggtccagggaaagctgtgagaggtggccatcgccagctgggttctctcattcccctatggacagcctctggttttggattcatggcagggctccaccgcaagttgctaccggagccccttggggcgggtccaagggtcttccccggcagccgggggttccgggccaaggtcctccgt

SEQ ID NO: 507716 - DNA, 737 bp, Homo sapiens
gggactgcacaactcctcatcctggcgagattgctgtcatcagcctagactccttcgcgctgctgtcccgctgtgctggaacaagccctatgactgtgttttggctgtttggctcacctgagaccatgcctcatctctgtgtggaacctgcacctgcatcggagatatcacctcctgctcgtgtgctgtgtgctcaacaagtgccttccatggatgtggagtcacgagaactgtcaactgtggtgaagcggctgttcaatgatccatgaacctcaagttgccatgcacctgtcctgcactgtgttgattggttgtgcctgacttgcatgcctgccttctgacatgcccatgaccttgctgcttggaagccggttgaccctgtgccactgtccccctggcctgctatctttgacccatgaggcacgcgacacaccgaggaagggtagggtgcgctaggccccatggcccccacgcacacccacagccacaccgcaggggctctagcgggcaacttcccatgggacccgccggttgccttgcgcccggtgggctgggggcagccacgcgcccaccaacgcctggctcccgcaacgccgccaattgcctaagcgacaacccgaccgggccgcgccccgaagactcgcctcgggcccccagagggcccacccccagagcccaaccctgaacgcggcaagctgacccccatgtcagacccccgaagcccagctacctccatc

SEQ ID NO: 507717 - DNA, 265 bp, Homo sapiens
tctgtagtcccagctactctggaggctcacttgatcctgggaggttgaggctacagtgaggcatgatacgcctctgtactccagcctgtgtgacacagtgagaccctgtctcaactaagtaaaaattaaactcaaatcggtttccttagtttggaaacttttcaaagaacatctccacgagagctaccttgtaagatgaaaaccagcctggtgcaggggttcacgcccataatcccaaaactctgtgaggcccaggagggtggat

SEQ ID NO: 507718 - DNA, 1566 bp, Homo sapiens
tggggggggaaaaaattataaaacccttttttgtgtctctcccccctcctctctctttgttttttctccctcctctgtgaaaaaaagagttgtgtgtgctacaacaaaaaatcacctgtgtgccccaccaccacaaaaatttgtctgtgtggggagagaggtgtgtgcgcccccgcggagagaagaaaaatggatgtgtgtgtctctctctctgtgtgtgtgtgtagatactctctcccgcgcggtggtgcagtttctctttgtgtgtgtgtgtgtctctcgcgcgcgcgcgccgcggtgtgcgataaaagttctcttatattatattttctctcccacacatacatatatcttcttctctctccccctacatcttattttctctatatataagagagtgtgtctctctctgtgtgtgtgctctacacctattgatatcgcgagctgatgatatctctcgcgcgcgggggcggaggcatatatatatattttttctatactacgatagagagagatatatttattattatcatctatgctctcttgtgtgtgtgtggagacacgcgtgtgtgtctctctctcactatatatatctctctacacgagatatgcggcgctatggtatctctctctcttatatgatgtgtgctgttgtgtgtatctctctcctcccatacaaaaacgaggtgcgcgctgagcacacacacaaaatacaaaacacacacacacaaagcgacgcgacgagagaggcgcggggtgtatatatttatctgctgtggtgtaaacgtgctcccctccgcgacgatgagatgaggtgggtgtcgtccactccactatatataatatataatgcggtggtggtggggtgaggacacccccaccatattattatatactctatgtggcgcggagcagcaaacaaaagcagaggtgtgtcttgtgttatatgttgctccaacaaacatggcgtggtggtgctggtgccgcgccgcactctatcacacaaccagaagagtagttggtggcgtgctgaccccctctggtgtgggtgcggcgccctcttctattagaacaaaacaacacaacaaagaggagcgggggggcgggggcgggccacgtatctactaaatatacagatgactctcctcctcgcggcggaggggggggggcccgccacaccatttctatagatcgtgcgagtcactactcaccccagtgggtttttttgtcttgtcccaaccacaagaggcggggcccccccccccaattacaagggagggccggcgtagcatactactaaaacgacgacgctacgcgcgaggcgggccgcccgcgcttgtatataacccccaccccgccctgcggcaggagcggcgcgacaaacccaccttgcgcgaccgctggagtcacaccgttgagggaggagcgagccccccaaacttagctgcgggggggcggagcacgccactctatgtgacggaccacacacccaccacggacgggagcaccatcccgcctcgggcggagtacgacatctaactaccccaggcgctaagcacgagccgc

SEQ ID NO: 507719 - DNA, 381 bp, Homo sapiens
aactggctgggcttcaccctctgcctctcgggaatatccctccacgttgccctcaaagcccttccagaagcctctgttttctgttcttctccctgtgactcttagtgattctgatgcaggaagtgtgcccggtggctctgctgccgtcccaccggggggcatatgcatgggacatctttccaatggttgtgaggttctctccgctactcaccccacattgccatcagagcaaaccaagaaaaccacgactgggcctgtaactgcggtctctgtctaccccatgaaggtgtacaaagacccccctgtccaagaacattggggagagaccacgaatttatctgctgttccggaactaccatccttaggaaggctacaatgagg

SEQ ID NO: 507720 - DNA, 669 bp, Homo sapiens
ggagagcgtgtgccagattgtgttccaatgccaaagaggacagtctaattttgtacagattatgcttacctcaggtaatcctttaggtgtgcttgaagtgcccttcttggccatataacacttatcttcttcttaagttcggcaatggaatatcttttaagttttaacaaaaactgggaataattatatctatctttattggccgtttactattctaggggtttctgtctgactaaaatcaagtctctggttgtggcttgctgaattaaatatttcatgagctggtgcatttttaagctatagtgaacaagacaccatattaagtacagtgataaagcatctatattctgtaaaaaacacaaaaaaatctgcctagtccagtttttttcaaagaaaaaaaaccgtggctgaattcggccgtgtagtgggaaccgcaaacgacgccttaaagggtccgcgacatattctgggaaaggtactggtataactggggcgtcaccttgactagtccgtctgaaagaagtgtcctaaacgtgccctttgcgaaatcattttggccaattccacaacaaaaaacgtctttggaagaaagcacctcacaggggggcgaacgtactatccttagacaaggttttagagaagattcaagcgttggtccatgtgcgcata

SEQ ID NO: 507721 - DNA, 167 bp, Homo sapiens
ccaccacaccgatccttgccgacgagagcgacggttgtagcgcggttggtgagcgtcaatgaggcgtagttcgcgtacccccgcttctagctgagtagagcactcgcgagctttgacgcccgtagctattcgcaccatctcgtccatgcggcgtcgtgtttccgatg

SEQ ID NO: 507722 - DNA, 878 bp, Homo sapiens
tacggtggctcacgcctgtaatcccaacactttgggaggccgaggcaggtggatcacctgaagtcgggagttcgagaccagcctgaccaacatggagaaaccccactctactaaaaaaatatttaaaaattagctgggcatgatggcgcatgccttgtaatcccatctactgggggaagctgaggcaggagaatcacttgaacctgggaggcggaggtggcggtgagctgagatcacgcattgattccagcctggacaacaggagcaaaatccgtctcaaaaaaagtactagtgagaaaatcatcaagaatatagaaaatctgaaaacaactcaaaaaatcaaattaaaagatacaagctatacacagaaaaaagtacccatggaatattcataagatagaccaagtcctgagccatgaaacaaatctcaacatatttcaaagagttaaatcaatatgaacatgttatctaaccataattggaatcaaactattaatcaataacagacggataatgggaaaatctctaagaaacttctaaatatccatgggtcaaagaagttacaaagaaagtctaaaaatcataaaactgatgacattaagacagaccaccaaatatgtttgatgcagtaaaatccagagggaaaaagaacttatattagtaactgcttacttgaaaaaagttttaataattgccctagttctatcttcagaaggtgaaaaaggaataacctagagggaggggggaccatagcgaacgccagattgggggacatggggaaccacaagaggtttgtgagggtataaacacggggaaaaagaaaaacacgggggaataaagagaggaacgggagaaaacccttaagaaaaagctagatg

SEQ ID NO: 507723 - DNA, 1755 bp, Homo sapiens
  misc_feature (168)..(168): n is a, c, g, or t
  misc_feature (1008)..(1008): n is a, c, g, or t
gctctagagcgtgtgcacgctgtccctgatagggccttccatcgggaggctggaccggccgcagaaccagtggtggagtgctgttggatgcaagcttccttgttgtgccgctagaggcgggaccatgttccctatactggctactatggtgtaacgacggcatggagntcatgcacgatcagtctcaggtatcgtggtggtgcacctctgacagtgctcatggactctaatgtcgtttctctcttgcttgaccagacacgccgtgtgacgcaaaagaggcgctgtggagacgatgtcatttgatgcacgtggcgtgcatgagcacgcggtgccagtgagtgtacccctgggaggcaggcgggggctccgcaggccctggcccgtgaaactctctccacacttcccccggggtagtacttgattgcacggcagagaagtcaacgcttctgcgatgtgcacacgattcacgcagagaagttgcacgatacctgaatgcgtcgcagcctgtggtcgcgtatcaccatggtcggaatgaatataaggagtggctacttccacgcgcagacaacacccatgtcccttgtgcacgaccttggcccattgcgcatattcttcgccgcggtttgaatcgcctgcaaagccatcggtatctctctctttaaagacatcggtgcggtggtcgaagcgtgcacatggcccacgcgttgggccctgggacctgtgggctccccattttgatagagggctagttggcctccttttgacccgacgtctgcgcggtgggcggacagtgcgcggacttcttaaggtccggtggctttcatagacttagtcatgggtgaagagaggggctgttgggccctcgcagcttgcccccatgggccagattcctaggccccccttccttgccggggtttgtcaggggcaccaagaatcacttgccagtttccttgtgcgggagtccattgcccattttgggcggagagcggtgtggcacgtgcgccaaantaccggtcccaaagcaggacttcttcacagaaggacattatttcccatccaagcgagatataagctcttttcaatgggcgttccccctacagggaacacgtggtcttagtttataaaaagtcccgttggtgctcaatctcggtgactctattccacggaagacttccttctataaagaagagtatctcgcgtagatagggcgactgcgtgtgacctatggtccgcggatacacaattaacggagcgcgaaataggggacatctcctgagtaaaggctagaaattcatggcggacaagggggcaagacatggctgagtatggcggaagcccacttggaggtaccaggtaggaacgcgagtcgtcgcgacagaccaggagggatctcggaggagagcgcagggttgagggtggccctccccttggggtcccatggcgggagcctgggcaaggactcgtggagaaaagagagagggctcacttgcctaaaggggagaagtagagaggagactctcacacaagcgcacaggaaaaaacaatgactatagtagagtacataggacgcaagactcaataagaagaaacacccgtgagtaaagacagagacttaattaacaagtagtcgtggagcgacacgaagaagtctctaacaccgagaggtagaccagacacaagaagaggcgcagcacctagtgtggtggtaactcagcgatagttcagaaagactaagagaaatacactacacagtct

SEQ ID NO: 507724 - DNA, 183 bp, Homo sapiens
  misc_feature (54)..(54): n is a, c, g, or t
  misc_feature (63)..(63): n is a, c, g, or t
  misc_feature (75)..(75): n is a, c, g, or t
  misc_feature (92)..(92): n is a, c, g, or t
  misc_feature (102)..(102): n is a, c, g, or t
  misc_feature (108)..(108): n is a, c, g, or t
  misc_feature (110)..(110): n is a, c, g, or t
  misc_feature (112)..(112): n is a, c, g, or t
  misc_feature (114)..(114): n is a, c, g, or t
  misc_feature (117)..(117): n is a, c, g, or t
  misc_feature (120)..(121): n is a, c, g, or t
  misc_feature (129)..(129): n is a, c, g, or t
ccgcctccccctctcgccccgaaccctttactcccgctcgcctcaaactatgcntcccccatnattgggccactntctggaaaaccggaacncaccttaacntccccnanantntcnaannccccgacnacccccgcgtctcggaaccccggactccgagcccaggaacgccaaaacggcaag

SEQ ID NO: 507725 - DNA, 144 bp, Homo sapiens
ccaacctgccatttggcaggctggtcttgaactcctgacctcaagtgatctgcctgccttggcctcccaaagtgctgggattacaggtatgagccaccgtgcccggccagaaacatacatttttactgaaattgccttcaactc

SEQ ID NO: 507726 - DNA, 322 bp, Homo sapiens
cggagcgttccacggcaggaacttcaccttctttccctattttcccagctgactgtcttcttgcatactagatagttagcacatgttgctaagcatatacttatcattaaacatattactgaggatatgaacatcatgacgtacaggacggaggtctgcccttacagaaaaagaacaccagatttgaactctagagaacctgcctcctagtctcacctctactcctaactagcctgcttaccttgggcttgtcccttttcctggaccgcagtttcgccacctgttaacagtgtggggctcgagcttggtgctcctaacatcc

SEQ ID NO: 507727 - DNA, 244 bp, Homo sapiens
ctcccgggcacctctgtttgtccatcagattttatgttttagggccacaactcgagtagccaaaaaaaaaaaaaaaaaaaagagagcgagagatttctaatatcatgtcagcttagagtcaaaaaagtaaacttggtttggtgttcctcactttacaataaagttataagggtggatggggttcctcctcccagaaaggggtagatccccagcagagaattgaccccttgttccaacagtttgt

SEQ ID NO: 507728 - DNA, 394 bp, Homo sapiens
ctcagaaatgtcttgtccaaatgtgtagcaagcaccacgtgtgtgaaataccccatccaccgcgttcatcggtatctgcccatccgagttcacacattgggccttcatgtgaaccttccgtgtaaccgtatccagggttctaatatgatccagtgtgtctatgatatgaagagagcccaccatgaagccagaatatcgtgtcctatctactaaacctgtaatgtgaaagatattcaaagagttctgtaaaatatttccaaccgttgccattcccacactttcgcagacattctctcataaaagccatacacgtgggtaatttgtcggctctcgtgatcccctctctatagtgtaatgcgttgtgtatcgcgcacctttaatgccacaaaaagag

SEQ ID NO: 507729 - DNA, 1104 bp, Homo sapiens
gccttttcggggccctcaccccgacccacaccgcttccattcttgggtgcaaagtggccttccattaacatgtcgtgctggcagctctggtggcctggcgcatttttttcatgtgtgtggtgacaccctggcacaagaatgggtggaggaatggggctgctgcgtcactcccacagcttcttagagagcctgttcgcaaggaggaccgagtgtcacagtgagtgagctggaggagtgtcacgttacctttccttccttgtaacgaagtgttcaaaccacaggttcagagattttcaccagatagtggacgacgaaagaaacacttcaggcgcgtgggcgcgggttggcgcctccttgttggccccaaggctacctcttggaggccgaaaacagggagtggatttgctttggtgccccggagatcggagggcttgcatgttgaaagcctgactttgtgttccacgtgcaacttcacatgacgcttgtgggcaaacatgaagcaaatgagtctccttgggccatagtggagggagaatgaggcgaacgcgaccgcacaacgcatcgcgcaacaccatcgtgacgagtgcgacaacaacacaggcagcacagcaacggacccagtgaccacgcacgccacgacaaacaaccgagccgcaccaccccgcaggcccccaccagcaaccagaaccggacaggaacgcagtagaacacaacaaacagacaagagaacaccaagacacacgcagcaacacagacaacgccgcacacacgcggactgcagaccgcacaagaaggcgccagaaacagagcacccgccagcagcaacgaccgcggggcacacaccagcgccaccgccaccaaacgctccacacgacaacgcgagggagagcacacacgcacgacagagaaccacgaccacacgcaccaacagcaacctgtccaaaggacatccacgcagcacgtacacgcacaggagaaacaacacacaccaggaacgccgcaccaagacgaacgcacgaacgacaacccgaaacagcggcacggaccctcacgcggcgtaggaacacccacgcacccacacacccccacacacatacacagaag

SEQ ID NO: 507730 - DNA, 716 bp, Homo sapiens
ttgttcctctatccgcctccttgctcgccgcagccgcctccgccgcgcgcctcctccggcgccgcggactccggcaggtttatcgccagcagtccctgaactctcgctttctttttaatcccctgcatcggatcgaccggcgtgccccaccatgtctagacgctagccgtatcacaccaagctccgcagacatcaccgaccatagggacttaagaggagatagtaacggaatggttgtggagagaggcagtacaaatgtgatagaagtagcgcccgctgactacacgggtagatgtctacatgaagtgagaagagtgggcgaagcaaggaaggtcgtgatcacatgaggtagtacgtacagaagaggcgaaggtaacggtggtgtgaggtagatgaggaggagtgatagagagagaggtgattggtgaggaaaaggtatggagaatgtcgattaggaaattgtgtcggctacgtggtcaagacgggtcagactgtagagatgatgtcggagttgcatcgactcggtcggataaccgaacgaaggcagagaggacctgacgacgttatgtctcctactgccgaccatggactccgttggctaagattgtcaattcgccgccttgcacttctgctgcccttcgcctccctgttcagattctaaagcctcgtgtcctcgagatcatgggtcctgcttgtccaggctggcaggccccctg

SEQ ID NO: 507731 - DNA, 1407 bp, Homo sapiens
ggacagccctgtcccactcactcttacccctggccgactcctgccggcagctccaaccatgggatggccgcgtcttctctcgcattctgtgtctggctgactcatgaccgtggagctgaaactccaggactccaggggcttgtgaccctggttggtagcccgtcgagaacatccttcagttgtgtcaagtgcctagccagcactgtcggcttgacaatccagggattcaggctcattgatcttgagatcgatccactctacctcctgacaggagtacttgtgacggactatcagaccgatgtgtgcacagaccagtcggacatacgtgtcgtatgcatcgaaaaattctctgggactcgctcggcaaccacacgacgcggcgcatgctacagcatctgcgtagttgcgtaagcacctgcggatcattgaagccctggtattcgtcgggtgccataaacacattcaacgcaatcgagcagccgaagtaacagcgctgttaccaatggatgtagcgaccgcatggtggcaagccgtcgctggcgcacgacgattccaagttgttgaacaggtcctcacagcgcggtacatggcttctacagaatcaacactggtggaggattttccataacactgcttggcgctggctttggaatcgctcacaagagggctggaaaaggctcccccatcgaaccgagcggggcagagtaccccgtagtagtcaatgccaaaaatatggggaacacaactcggttgcgttggttcgaagacggaactagttgaaacgtttttccttccgccaggcccattggggcataagcgcagcgggaccacccccatgctgacagggttcgcaagcgataggcccatggaacctgccgtttatctccccctgacagttgcccagtattgcgagaaagccagacacagggcatacaccaaaggggaacccccttgggcaggcgaaaggaacggaaaggtcccccaaacggaaacagacaacaagccgatacgggggccccggaaagtaggggtcgcaggccccatagatagcccaacagagaggtcgggcaccacaatctccgaaacaactaggcgacagggcgaaatagcgaaagacgcgttggacggtcggcgacaacgcggcatgtccatacggggaaggaaacgggttaagcaagacagggcagcccaccatggcggcccgaggaccacaaaacccagttgttacgccgagggacaacagcacagtctcgagagatagggacacacaagcgcccacagaaggaggtagggcgtcaccgcacccaacggtaaacgcccactatggggacaccgcgcaaatatagtaccaagaaataggtagggcaggaacaccctccgcatgggggcgacaccaagagagggaag

SEQ ID NO: 507732 - DNA, 137 bp, Homo sapiens
acaatagttctggaaaagccactggagacgagacaggtgctaaaattgaacgagcagatggataagaacaaccagtcaaagaaaaagattaaagttcagacttcaaaaaatgaaaaataaaaagtgataattaagaa

SEQ ID NO: 507733 - DNA, 352 bp, Homo sapiens
tcaattttaaaaaattattaatctggtggcgacttttaattcctatttcaaaatgggtttccttgaagaattcaggaaacaactttttggggaagacagctttccttcacacactatttttggggggggggaaaaatttgatttgggaagaatttaaaaaacacaaagctttttaatttgtttgaaacagactttttgcctgttacatttttggttttaaccaattaaaaaagccaagggcattttagttttaaattgggttttccacaagaaaatccccgttgatttgtttgggccttttattaaccgccattttttaaaatttttttcaaaaaaaggaaggaaaatgtga

SEQ ID NO: 507734 - DNA, 207 bp, Homo sapiens
ggaagtatcggcaaatagtgtaggcgaataggacatatcattcgtggcttgcatgtggggcaggggtatatacacgggtaggctcagggtataattgtactgggtcgcctcacaagtcccactacctaaacacataccgtattactcgcgaccaggcagtatcaactcacctgcagctcaccagtagtctaatagaaaacaaccgag

SEQ ID NO: 507735 - DNA, 112 bp, Homo sapiens
  misc_feature (28)..(28): n is a, c, g, or t
cagagggctgcattcgaagaaacccttnctgctttagtcccgagtaggtaatttgaccccgatatatttaagcattttagattctctccccctatttattgactttgcaatt

SEQ ID NO: 507736 - DNA, 709 bp, Homo sapiens
gtctcctttctgatatagaatctcgtttgctaataactcagccacgcaggtgtctaaagcaggtagcgagtaagctgtgccgctaccgtgcttgcgaccacggcaccccgtatgaagcagcaacgagattcccattgacaaaagtctatgtgaataacatggccagaatcaccgatgatagcgatgacatggttctatgcctatacatatcgcctgacctatcctcctcctgtaggtctcttagcagtcctttcagatagagtcacaactttgtcctgcgcttcatggagagagggcatgcagccttcctgggtaaacaaactctcgctccatcgctagagggctgcgcatctactctctactctcgtgttctacccctgagatacgagctgggctcggacgtggggtgcatagggtttccagagacttcatcactgtctcgcaatagttgaaattcttactcaacactacaagacaatagattacaatggggtgcagcgcggtggctcacgcctataatcccagcacctgggaggcatgaggagggcagatcacgaggtcaggagatcgagaccatcgttggctaacacggtgaaactgcgcctctataaaaatacaataaattagctgggcatggtggcgggcgcctgtagtcccagctactcaggaggtgaagcagaaatgcatgacaagagtcgagcttgcatga

SEQ ID NO: 507737 - DNA, 671 bp, Homo sapiens
  misc_feature (19)..(19): n is a, c, g, or t
  misc_feature (21)..(21): n is a, c, g, or t
  misc_feature (62)..(62): n is a, c, g, or t
  misc_feature (167)..(167): n is a, c, g, or t
  misc_feature (190)..(190): n is a, c, g, or t
  misc_feature (225)..(226): n is a, c, g, or t
  misc_feature (338)..(338): n is a, c, g, or t
  misc_feature (359)..(359): n is a, c, g, or t
  misc_feature (371)..(371): n is a, c, g, or t
  misc_feature (383)..(383): n is a, c, g, or t
  misc_feature (663)..(663): n is a, c, g, or t
cgttctctccttaatagtntnttcagattagtactcatgctgagccagttcatagctctacncaactgaactcctcatacactcacaagagtcattgtgtctgtgacacctgacatatccacgaagcgtagtacatagtgtcatttgtgtgatagctgtggttgacnaatgataatgcatgtgccgctantgtatattcagagtagctgcactgccctaaaatcnncctgtgctccatgaagataggtatgactattaatacagatgggctgaattgaatagatattaagtttaattgataaagatgtcttctggctttgattccttgtggttgatanatggctcaaagtgcaatgganaatgaggtaaanaagggagtaaanaaagaatgagatccagtcatttgcaacatgaatggaactgaagattattatgttaagtgaaataagcctgtcacagaatggcaaacatcacatattcttccacttatttgtgggatctaaaaatcgaaacagtagaactcatggacatagatagtagaaggatggttaccagaggctgttaagtgtcatggggggctgtgagggagaggtgaggatggttaatggttacaaaaatagacagaatgaataagatccactctcgtgccgaattcctgcagcncggggatc

SEQ ID NO: 507738 - DNA, 328 bp, Homo sapiens
gtaccgcacttatatgccgcaagggactcacagccagcaggtatattctcccctccctacccccaccaaaccctggaaaatcacagacagtcgtttctatcagctcctcttactcggtctccttcttcatggaaaggcagtcaggatgtctaggctcttctgcagcgcctcctactatccctgtcactcatcttgttctagcttatcattcttgctccctttgctctggcagcaattgtctgtgaactatccgagcgagtctgacctctgagatggccgtcatggaaaactatggctgcctttatcaggtaatctagtatcgtatcgc

SEQ ID NO: 507739 - DNA, 165 bp, Homo sapiens
  misc_feature (5)..(5): n is a, c, g, or t
  misc_feature (49)..(49): n is a, c, g, or t
  misc_feature (68)..(68): n is a, c, g, or t
  misc_feature (142)..(142): n is a, c, g, or t
ggtgnacgcctccctggacaagttcctggcttctgtgagcaccgtgctnacctccaaataccgttaanctggagcctcggtggccatgcttcttgccccttgggcctcacccccagcccctcctccccttcctgcacccgtncccccgtggtctttgaataaagt

SEQ ID NO: 507740 - DNA, 161 bp, Homo sapiens
taaactgcgcgtctgctatatctacatactgctattaaaaaacgcctcggacatgacgactcacacctatatcccagcactgtgggaggccaaggtgggcagatcgcttgagtccaggagttcgagaccagcctggacaacatggcaaaaccccatctctt

SEQ ID NO: 507741 - DNA, 130 bp, Homo sapiens
aaaaaaaacaataaaataaggaatccttttaaagcattgtggagaaagtatttttgggtatgaatgggtgacgggcctttaaatctttcaggaatacatataagcaggaatacttagccggtggttaaga

SEQ ID NO: 507742 - DNA, 364 bp, Homo sapiens
  misc_feature (81)..(81): n is a, c, g, or t
  misc_feature (159)..(159): n is a, c, g, or t
  misc_feature (172)..(173): n is a, c, g, or t
  misc_feature (224)..(224): n is a, c, g, or t
  misc_feature (226)..(226): n is a, c, g, or t
  misc_feature (228)..(228): n is a, c, g, or t
  misc_feature (238)..(238): n is a, c, g, or t
  misc_feature (268)..(268): n is a, c, g, or t
  misc_feature (294)..(294): n is a, c, g, or t
  misc_feature (296)..(296): n is a, c, g, or t
  misc_feature (311)..(311): n is a, c, g, or t
acaactgcagatggtaattatcccccaggatcactagtcaaaggctgcttttggtcaagaatctcaacctgcgtgcctgtntgtgtggcacaccctcctcaggaacagcctcgcaactttccctggaacctccccttccccactacacctggtcctggngaggatattattnncatcagtgaataaaatgctaattttagtggggggctgacaaacagttctcncncnccagtgtgcnccaacatcccctggagagtgtgttggagcncagactcctgtcggcccggcggctcncncctgtaaccccagcnctgtgataggccaaggcgggagggtaacgagaatgcatctctacaaaaaaaaa

SEQ ID NO: 507743 - DNA, 133 bp, Homo sapiens
tacggcagtgtgaggtgagagtgtatgtcgacagctcagacagcatgttcccatcatcatcacacttgaagtcaggtctcatgtatttctggctttattgcttccgagcgtgttctgctgtctgtagatcagt

SEQ ID NO: 507744 - DNA, 885 bp, Homo sapiens
gtgcctgaagtgctgccaccgaaggaagtggtcccagaaaagaagagtaccggtgcctcctggccagaaaagccagaagctccacctcctaaagtgcctgaggctcccaaagaagtgttcctgagaagaaagggccagtgcctcctcctaaaaagcctgaagtgccacccagaaaagtctcagaggtgccaaaggaaggttgtcccagaaaagaaggtgtctgaagctattcctcccaaaacggaagagtcctcccgctgaagtgctgagagtgtctgcaccgaaggaaagtggtcccagaaaagaaagtaccggtgcctcattgcaaagagagccagaagctcgagctcctagaggtgctgaggatcgccagagaatgtggtctcctggaaactgaatcgtgcagtgtctcatcgtaaaaggccggaagtgccagccactagtatgtcccagaggtgccgaagggcgaggtgtcccagaaaagagggtgcggatgggatattctccagagcggaaggtccctcccgtgaagtgacgtgaagggctgccacagcatgggacggggacccagaagtcagacacgcaccgggtgcctcagacacataggcaggaagcattcaacttccctaaaggtggcgtcagtactccccaaactaaaggtgcgcaggaacaaagaaagggggcagggcacctggaagaaactgcagaccgccctgtcacaggtgccgagcacctacaagggggtcctgaacaaaagcccgtggacctacagagcccgagccctggaagaccgagcaccaacggtccgacgagcgacagggcccaacagacacggcatcaccgccaaagcgagcaaacgaccaaagagagacgagccgggaaacc

SEQ ID NO: 507745 - DNA, 942 bp, Homo sapiens
  misc_feature (582)..(582): n is a, c, g, or t
gcggaaccaggaggatggagctgctcatcgccttcgaggtcatcggaggtgaccctgcacacaagggaccttgcaggtgcaggctgccgctctccacgtcgagtcaccaggatcaatcctgtggcccagtgatcgctcactctgctggtggactatacagctccagactctcgtcttagtcatggataaatcaccagtgcgtactagagctctcttttggagggggggacatgtcggcatcgaggtgatgtcttggacctatagataacactgtcgtgccaggatggttaggaatgcccccctcccacatggcctattgaatgacaagttgggtcgcaataggcgggaaggggctcgtctgggcactggggatcgcttggggcacgtacgtctcgcagtggcctctactgaagtctcaccctgggcaaaggtttgcggcgtggctgtagtacgcaaccgagagcatcgaccagtgctcaatgggtcatactgaggattccttggtcctctgaaccgaaaccaccctgtgggatgaattctctagtctagaaccacttcctcgaaaactcgacgtacttatantcgtagaacccttgtggagcaaacacgggtgcgatgcatcgcacctgacagtcgtaccagtcgggccgaacgatgtcgataggaatcgcgggcgagggaggctcgaaggagctctccgcacgaccctagttgcaccagtcatcgagcgtggggctttgtgcggaaaagaggagccaatggtcatgatggaacatgctgcttagaaggctggggggctagcgatgtgcagtgactaccaacatggcgagtgattgggttacccatttggagcggccaattccaccttggattgcccccacggtccgtacagggcaaaatggggcaacaatggaagataggagggtaccctaaggtaggtta

SEQ ID NO: 507746 - DNA, 663 bp, Homo sapiens
  misc_feature (285)..(285): n is a, c, g, or t
gcaattcggcggtcccgcgggtctgtctcttgcttcaacagatagtttggacagtgaacagatccggggactctcttccagcctccgaccgccctccggattgtcctctccggctgtgcttgcctccgggtaccactctattctcgtgccagtctcactgcttcgtgggacgctggcagacaccagttgttggtggctgtgggctcctgtctgtgcgcaagccaatcgccatgagctcccaggattctgtcatgacgttattcgcacgcgacgattggagtgtcnggcctgtctagatcatgcctgtgtcgaatgttgtagccgtgcagggcctctcctactacactagcgctctctcgtgggcgttttagtttcggaccggcggatgaatgtggcgtctgggataggccgtgagccatctttccttcccgcgagcttggccgtcggagcaaaacaagcggaggggcttaccgaagacagtctcccctggtaggaattgccataaccgcagcgtgtggggctgggcccgcagccatacttctttccaatggatcattccaaataaataggcccacggctgaaagaattgaaggttgggggttgaaaacccccaaggaacggcccattgtaaaatgcttgggcaatggtcccttggatgaacag

SEQ ID NO: 507747 - DNA, 632 bp, Homo sapiens
  misc_feature (185)..(185): n is a, c, g, or t
  misc_feature (281)..(281): n is a, c, g, or t
  misc_feature (309)..(309): n is a, c, g, or t
ggaagccggccctttgcacctctacattgggttcccattcagacccaaataatagatgtggattttcttacagacaaagagtgggactgggtcaacaattcccacctgccctgcagggatgtgattgggaaggaattgcaaaaacagggccgccaggaagctcttgagtgggtcatcagagagangcaacccatttcccaacagcattaataaaaccctccccgggtttgtttttgttaaatggtttggggggagggaagaaagggggcagatcccggaantttttcccctttcctttcctttttcccnaccccccctttttactttaggctttaagaagaacagaaaatttttttatcctctttgatattttattgcaaacccccagttttttatgattttttaattgttgagaacaagcccagaataaaattgctgccccagaaggagggtccctccaaagttgaacccttggggaaaggaaaatgcccccacttttttggccagtgatggggaatcagtgagggctccatgatggtcatgttccaagggggtaggacatcattcatgatccccttaatggtcatgagactaaatttatgatcagggaataaaaatgtcagaactgtgga

SEQ ID NO: 507748 - DNA, 797 bp, Homo sapiens
tcggagattggtgtgtaccctggcttgacgtgcgctcctcagaacgtcatgccaacctatgaaagggtcgtgaagatggctgagaaagaaacaccaactccttacttacctgcctgaagaaattctgcctttgataataaatgctataccagcaattaggttggtgaatgtcacggaatgctgcagttcaggggtcttcaaagtgtgttcggatataaaatatgtagtcttattgttgtaaggcattgatttgggcaaatgagctaaggagcttttagacatctgttaaacgtcttttcgtggtaatcgtagaagtcttttacatgttaatagtgtttgaagagaatctaggttaagcaaggagcaaagtgcgcattgttgtgcctttaagtaggggggtgggaagggaaagagggtacttgcacacatagtttgctttttaactgcagctttactttatataatcgttggcattagttacttgctagccctgagatactttcaggaagagtgacttaaatattcggggtgagtaagtagattgggtataagatctgaacttgtcatctgcagaggcaagaaacatatttgacatgtgtgacgttgactgtggaagatgatggtggcatgtacctagtttgtatagtgtctacagtcttcgtgataacgatgatgtagtaaatctctttaagtactttataaaggaacaaaagagacgggggggaggcaaaaatatgcccggaggggccaaagttacgggtcgcagtttttggtaagggggccaatgaaggggggaa

SEQ ID NO: 507749 - DNA, 1141 bp, Homo sapiens
ggacataacctgactgtgatggatgctgtgatggtccaaggacaaggaacaactgagaacttgagggtggcaggtcaagcttccaggtccaggaagctccttacgctttaaaatcacgcgaagcatcgttaagagattgtacatgatagtttaggaagctaatgagaacctaagatttcagattgaaaagaacatttacggtagagcaactacaggacaacttcaaattctcatagaaaccattgaaactcagtggactactcactgtgagaggatatggctttaacagttgttcattgtcaagagtattactcataatgtgccaaatgctgtctagagagtataagtcatagttgtatgtactccttgcatgtttacaggcttctagcacgtgtacttctggtgaagctgacagtatataacaatccagctggcttctggagttagtatttatatttgaatgcatcccgttccttaccatatgttagcaacctgtgcagaagacctacccagacctaactgggaactggctctgtatatcatcatctcaggaataatgagtgcactgttgcttacggtcacttggaacagcctatttggaaggtcacggaatatgggagccatttcgaaggcggctatcctttgaggctcgaaccgaccttcgatgttgggcaaggcccattgatctcaggagaatcgccgggatacaatctgaaggaaagttgcacgacactcagcttgtgaccgcggtcacagaggaggacctggtgagcaaggtaactcatccggaccgaagtggtcggggagctcataaggcggtgtggcccaatgggatccccccatctcgcagctcccgtcgcaaggactatcgtatgtgaaaaatgtactgcccaacaaggtggtcaaggatcactctgatgagaatttggtcgaatatcttccttcacggcgttgacgataaacagcccctgtgttcagttccgcgagccagggtcactaccgggacaacactcacggggaaaggacctagtgtatcacatacatcacgtaagaaccacacatagtcagcagagatagccaatgtcaatgtggtctcccgacatctacattggtagagtaggtccaatagagcacacttaat

SEQ ID NO: 507750 - DNA, 259 bp, Homo sapiens
  misc_feature (14)..(14): n is a, c, g, or t
  misc_feature (29)..(29): n is a, c, g, or t
  misc_feature (32)..(32): n is a, c, g, or t
  misc_feature (44)..(44): n is a, c, g, or t
  misc_feature (51)..(51): n is a, c, g, or t
  misc_feature (229)..(229): n is a, c, g, or t
  misc_feature (232)..(232): n is a, c, g, or t
aatcgtatttattncgcagaagttttttngtncgcaggattttngtgagcnttttccactccagccgtagccctaccccccaattaggagggcactggcccaacaggcatcaccccgctaaatccctagaagtccactcctaaacacatccgtattctcgcatcaggagtatcaatcacctgagtcaccatagtctaatagaaacaaccgaaaccaaataattcaagantgntcattacaattttactgggctctattt

SEQ ID NO: 507751 - DNA, 197 bp, Homo sapiens
  misc_feature (69)..(69): n is a, c, g, or t
tgggtgggagtcggaatgggtgcagctgattggttgggaatgcatcacatcactggaagactgtcctgntgcagtgaggccacctgtgggcagagccacagggaccagctgatgtcatgagtccagaatggactcagtctgaataaacatctaataaaaataaaaactccccagctcttaggtttctacaaccagtg

SEQ ID NO: 507752 - DNA, 176 bp, Homo sapiens
  misc_feature (169)..(169): n is a, c, g, or t
ggtacttgttactgcgtatatccagacaaaactttccttaaaaagacggatgcacctgcttgttcattgcagctctattcacaatagccaagtcatggaaacaacccaaatgtccacggcagatgattggattaggaagatgtggtatatacatgtaacagcgttaccntttccgt

SEQ ID NO: 507753 - DNA, 186 bp, Homo sapiens
ttttaccgttggatacgcatgtcttgcgttcgttgggatcaacgacgcctaaggacaggataagttcgctctcccacagccgggcccagtaccgttagccttcctcccatggaagtctgcgcttctggtccctatcgtaaaatgaactccgttctgccttgaaataaattttgttcctaaaaaaaa

SEQ ID NO: 507754 - DNA, 323 bp, Homo sapiens
ttttgctcttgaggcccagacaggaggagctcaatggcacagtctcggctccctgcggcctctgctcccgccatcaagcgattctcctacctcagcctcccgagcagctgggactacaggcgcatgccaacactcccagctaatccttgtattttcagtaaagatggggtttcaccacgttggcaggatggtctcgatctcccgacctggcgatccgcccgcctcggcctcccaaagtgctgggattacaggcgtgagccaccccgcccggccctattcctttactttcttaataaacttgctttcagattactccgtgcgat

SEQ ID NO: 507755 - DNA, 624 bp, Homo sapiens
  misc_feature (23)..(23): n is a, c, g, or t
  misc_feature (28)..(28): n is a, c, g, or t
  misc_feature (224)..(224): n is a, c, g, or t
cagttctgcgacgtgtatccaanaggangaggtactgttgataggataaagtcaacagacagaagctactatttctttttaagggaaacaagatggcaaacgaagggtgggtcaagaggcatggctttctcttcaattctacctccccttgctcacacgaccaacatcaaccccaaagaggccagtggcatttaagggcagaagaagtaaacttcaggccgggngtggtggctcacacctgtaatcccagcactttgggaggctgaggtgggcggatcacctgaggtcaggagtttgagaccagactggccaacatggtgaaaccctgtctctgctaaaaatacaaaaattaggccgggcacggtggctcatgcctgtgatcccagtactttgggaggccgaggagggcagatcatgaggtcaggagatcgagaccatcctggctaacacggggaagccacatctctactaaaaataaaaaaattagctgggtgtactggtgcatgcctgtagtcctagctacttgggaggctgaggcaggaaaatcgcttgaatcccggaggcgaaggttgcagtgagccgagatcacgccactgtactccaatctgggcaacagagtgagac

SEQ ID NO: 507756 - DNA, 309 bp, Homo sapiens
tgatgagaagggactttgcaataaggaaatgtaagaagtgctggcttaggccgggtgcagtggctcatgcctctaatcccagcattttgggaggccagggcaggtggatcatgaggtcaggagttcaagaccagcctggccaacatggtaaaaccctgtctctactaaaaatacaaaaattatctggatgcggtggcggcaggccccggtaatcccggctacttgggaggctgaggcgggaggattgcttgaaacttttagtgagccactgtactccaggctgggtgacagagcaagactccgtctcaa

SEQ ID NO: 507757 - DNA, 625 bp, Homo sapiens
  misc_feature (80)..(80): n is a, c, g, or t
  misc_feature (261)..(262): n is a, c, g, or t
  misc_feature (328)..(329): n is a, c, g, or t
  misc_feature (341)..(342): n is a, c, g, or t
  misc_feature (349)..(349): n is a, c, g, or t
  misc_feature (390)..(391): n is a, c, g, or t
aactaaggctagtcaggcccgtgttaatcggccgagggtcctcgccatcacatgactcttctcactacatgtgtcgccgnctctgcctgcgtagccccggccatggctctgtagcctcgacccctttgtgcccccggcccgtctccgcgctcaccacgcctgcgctctccgctcccaccttctttcttcagccgaggccgccgccgcctctccttgctgcagccatggatgtcttccactttcgccttggtgcctgtcttnngcccacctgagcatcctccagagcctcgtgccagctgctggtgcagcctctcctgtttgccatcanntgcccagcaccnngtgctancagccatgtcactcctgtgctgaccctgtgggctggagctnngacatgtggccctgctcccagctagtggtgctggtgatggctcgtagactatgggaaactccccccgtgcccctgcccccctggctccctatgaggtccttgtgtgggatgccctggatgggctgggcttccagtgggtgtggtgagcccctggcaggtgatggcttctctgactggatgacttgagcgagttgatttcacatgcttctacctccctctggaggcctccctacc

SEQ ID NO: 507758 - DNA, 376 bp, Homo sapiens
  misc_feature (23)..(23): n is a, c, g, or t
  misc_feature (28)..(28): n is a, c, g, or t
  misc_feature (224)..(224): n is a, c, g, or t
cagttctgcgacgtgtatccaanaggangaggtactgttgataggataaagtcaacagacagaagctactatttctttttaagggaaacaagatggcaaacgaagggtgggtcaagaggcatggctttctcttcaattctacctccccttgctcacacgaccaacatcaaccccaaagaggccagtggcatttaagggcagaagaagtaaacttcaggccgggngtggtggctcacacctgtaatcccagcactttgggaggctgatggctgggagaatggctgtgagccctgggaggtggatggttgcagtgctgctgggaccgtgccactgcgctccaaacctgggttgacagagcaagactccgtctcaaaaa

SEQ ID NO: 507759 - DNA, 131 bp, Homo sapiens
tcactccagactggtgtattgtaaaatcttgtcgtttcaactgtcactctgtgcccctcgcagaatgtgtcttcagtgaagagtgttccctgaaggctttcccacactggctgcattcaaagggcttctct

SEQ ID NO: 507760 - DNA, 229 bp, Homo sapiens
cacgagggcagagctggttttgctggggacgactctccccgggccgtgtttccttccatcgtcgggcgccccatacagcatggcgtcatgttgggcatgggccatttggactcctacctgggcgacgatgcccatggcaagcgtggcatcctgaccctgaagtaccccattggtcatggcatcgtcaccaactgggacgacatggcaactatctggcaccacaccttca

SEQ ID NO: 507761 - DNA, 235 bp, Homo sapiens
  misc_feature (45)..(45): n is a, c, g, or t
  misc_feature (90)..(90): n is a, c, g, or t
  misc_feature (135)..(135): n is a, c, g, or t
  misc_feature (142)..(142): n is a, c, g, or t
aaaaaagaggtcgggcgccttggctcaagcctataatcctaacanttggtgacttggaggtgggaggaggtttccttgagctcaggagtnagaaactagcttgggcaacagggagacctggtctctacaaaaaantaaaaanttagctgggtgtggtggcattcacctgtggtccaagctacttgggaggctgagacaaaaggatcctatgagcctgggaggtcaagactgcagt

SEQ ID NO: 507762 - DNA, 304 bp, Homo sapiens
tcccacggcagggttgtactgttccatgggtgaaggctctaacacggcctgtaaaaactgggtaaggagatgtaagagacatgggccaagtgctaaatggaggaagagggtaatggcagggcctaggaagggcagtagccagtgtgcccagagagttacgaacatcacctgtggccgtggaatcgtgaaagggcgcgtgccgtgactttcagccatgctgtttttctttttcttttgggaagatgggatgtctgggcctctggtcggcccagggctgggatgtggcaggggcgattcatcctct

SEQ ID NO: 507763 - DNA, 119 bp, Homo sapiens
ccgacttgatggctggttagtcccacaatcctaggccgtacccgctcgcagatactgatcattctatttccccctctataaatccgcgcagcctccaaatatctcatcaacaaccgatg

SEQ ID NO: 507764 - DNA, 323 bp, Homo sapiens
  misc_feature (11)..(11): n is a, c, g, or t
  misc_feature (302)..(302): n is a, c, g, or t
tgatacgcccntgtgcccgagagctgcattagtctatatggttctcccagaaactgaatggaatccattggagaagcggtgggataactagccagacgacaatttggcagaataccatcacacccaacgccgattccacgggacccataccagaggatgccttttctgtgattgggtgggatttttccctttttatgtgggatatagtagttacttgtcgaccaagaataattttggaataatttcttattaaataatcaactcttgaactaattttaactaatctgagattgtgtttgttncataataaaagtgaagtgaat

SEQ ID NO: 507765 - DNA, 286 bp, Homo sapiens
cgctcctcagcctcccagaggtagatatctgctgaaaaggtatgtagaaacaggtgggtaaatgggaaaaaggaccagatattgtatgatatcaagaaatgctcttaggagtaatcagttatttggatgatgtagaaaaatattataaatgcacatggtacaataccgggaaagtattgtattaaaaaactacaatacttttaaaatacgtcagtataaaaaatatttgagggccaggagcggtggctcatgcctgaaatcccagcacttggggaggctgaggagg

SEQ ID NO: 507766 - DNA, 233 bp, Homo sapiens
  misc_feature (93)..(93): n is a, c, g, or t
gaggtcgcatcggactctatgtcatagctgtgcctgtgtaaaatctagggcccgctgaaagaatgggtaatccactgaggaatcgcacttgtngaggtcctcacaactctcgatatcctcggcgccaacaccgtttctcaacgtcttgggcgagagcatgcggaagatagtgagagaatggagctcccatgtgtggaaatcgatatcttcttggcagtcgctcgtcatttgat

SEQ ID NO: 507767 - DNA, 353 bp, Homo sapiens
  misc_feature (213)..(213): n is a, c, g, or t
agctcggcccatcttgggcaggagcatccgactgagagtccaaggcggatgacacttgttgatgcatgtgttcaagaatgagacgaataggagataggaatctctctccggaccatcaggtgcccaatcaaacgtggtctttgcgaggagggaggtggcttgatctagggcccgctgaaagaatgggtaatccactgaggaatcgcacttgtngaggtcctcacaactctcgatatcctcggcgccaacaccgtttctcaacgtcttgggcgagagcatgcggaagatagtgagagaatggagctcccatgtgtggaaatcgatatcttcttggcagtcgctcgtcatttgat

SEQ ID NO: 507768 - DNA, 356 bp, Homo sapiens
tcccatccttctggccacgctgtgtcgcccagcgctgatctgcaaaggtgtgatcatagctcactgtagcctcgtacctccagggctcagccttcccaagtagctaggactacaggtgcgcaccaccacgcctggctagtttttaaatttcttgtctagatggatcctgccgtgtagcccaggctggtctttaacgtctaggctcaagctcaagctcttgccttgccctcccaaagtgctgggattacagacgtgagtcaccacgcctggccggtaatttctcattgtgaattgattgggtccctgtaagtcacagagcctgtcctgagtcccttcatctggcgtggccagaagga

SEQ ID NO: 507769 - DNA, 538 bp, Homo sapiens
tcctgcagcagaatgtaagtgtcatgaggtcagggactctgtctgtcctgttcacagatgtgtcctcagcataaggaatagtacctgacacttagcagatcctggataataacaagaataattccaaactaccacttgtacataaataattacatgaaaggcacaaggcagctatcattttctgaccatttaagtgttctatatatacttttttgcattgaattctcaagacaaagtaagatatacaacactaaccgcctttttttttcatagataagaggcatttaaggcttagagaagttaagtgacttgcccaaagccacacagctgatacttggctgaaggaataaaagtgattgggttacatatttaaattccccagggggcaaaaatcaactcaaagtggatcaaaaacttaaatcaaagacctgaaatcattaaaatcctacaagaaaacctggtagaaactctttcagacactgacctaggcaaagaatttacgactaagacctcaaaagcaaatgcaacaaaacaaaaa

SEQ ID NO: 507770 - DNA, 781 bp, Homo sapiens
  misc_feature (222)..(222): n is a, c, g, or t
acagacgatatctacttcgacggcgatatggcggtcgtgctatatcttgacgaggcctggtggcgaagactctgcatggatgatgatgtggacgatagcattcacaaactgaaagagaaagctactactcggaatggtccaggatttgcctccgatgagttgtcccaagcgcagatgcgttaggattatcacagcatcgtagcactatggcgatgaacccangccacaacgctctgtagaaggctggactatgtctgtactggagtccatgaggaagccaccgtagaatacatacacgacccattctcactgtatggggaagttaaaaacattcatgtcaacctccacaggcgaacgtgatatatgaaggggtatactctagctcgatctgaatcatacaatgaagcccaggctgctatagagggactctatggacaggatttgatgggacaacccatctactgtgactggccttttgtccggcgtccacccaaaggctaaatgacacggtggccaaaacgcagcacaagtccacatcggagacgtaattatccggactgtcgtggacaagtagtcttttaaaaatccatttgacctgcagccttggaacataagacttgtgaggaaactgctcgggcatattaaagcgttaccgaaaaacggggaattctagtcgcattaaaagtttcccctttttttttaaaaggaagagggcctttttttttcccctttggcggggcggccacacaatttttacttccaagtttttaaattccccatt

SEQ ID NO: 507771 - DNA, 761 bp, Homo sapiens
  misc_feature (8)..(8): n is a, c, g, or t
  misc_feature (138)..(138): n is a, c, g, or t
  misc_feature (210)..(210): n is a, c, g, or t
  misc_feature (234)..(234): n is a, c, g, or t
  misc_feature (244)..(244): n is a, c, g, or t
  misc_feature (252)..(252): n is a, c, g, or t
  misc_feature (258)..(258): n is a, c, g, or t
  misc_feature (269)..(269): n is a, c, g, or t
  misc_feature (272)..(272): n is a, c, g, or t
  misc_feature (274)..(274): n is a, c, g, or t
  misc_feature (282)..(282): n is a, c, g, or t
  misc_feature (295)..(295): n is a, c, g, or t
  misc_feature (298)..(298): n is a, c, g, or t
  misc_feature (310)..(310): n is a, c, g, or t
  misc_feature (315)..(315): n is a, c, g, or t
  misc_feature (354)..(354): n is a, c, g, or t
  misc_feature (373)..(373): n is a, c, g, or t
  misc_feature (451)..(451): n is a, c, g, or t
  misc_feature (645)..(645): n is a, c, g, or t
  misc_feature (679)..(679): n is a, c, g, or t
  misc_feature (717)..(717): n is a, c, g, or t
ccactggnagtcttctttaaactgtgtatttctgggtctactccagatctacctaatcagaatctctgagggtggtgtctacaactgatttttaaaaaacgctcccaggaattgtttttatactaaaatttgagagcnactggtttaaggtacaaaatatgaccttctgtggtttcactgtgggtctaaaagtgtatatcaaaattattngggaagtctagtcaaatgccatantggtctgtcnggcaatcnatgacncccgacgtccnccncncaccattnaataccccccccnccngcctcgacgtcnccccncccatcatgtacattaaatgttgatggaaacacatgtcnggcgtcccgagtccaaganccatgtcaacccagtcccagacgcattccagtggggtttcctcatatccagcaaacatggccgggtttgctaagagtnctcttgcaaccatcacaccatctgtcccagtcatccgccacacattttctgcttcctttaagcttctcatgtctccattagcaattacaggtatagacatattttccttaattattttaatggaattatagtgcactggctgatgtctttcttcagcagttcttccatggactgttatccatgaaactcctgtngcttcagcctttttgacaaagatctacagttctnttaaggtcatcatggatccttattttaatagaaactgnaaatccaggggtttccacttgattacttacttgtttcaccatgt

SEQ ID NO: 507772 - DNA, 130 bp, Homo sapiens
  misc_feature (5)..(5): n is a, c, g, or t
tgtantgatcgccatcatcatcactatcaccatcatcaccatcaccctccttaaattctacttctacctacgcctaatctactccacctcatcatcatgatcaccatcatcaccattatcaccatcaggt

SEQ ID NO: 507773 - DNA, 183 bp, Homo sapiens
  misc_feature (182)..(182): n is a, c, g, or t
caaacaaggctaagtcacgaacgcacacaaaattcgacaaatctgcgttcacttgacttagcagagcacccgagatgtggccacaggctaaaaagtgcttaagcaaagctgacgataggctggcaacttcagtaccgccaacccgcttcccaaagggcccggtcggctaacttttccggggnt

SEQ ID NO: 507774 - DNA, 621 bp, Homo sapiens
cctcttcatcacccccgctccaggacaggctcagcgattaagccgagcccttgcgtcctagtgaaggggccttgccaacctcagccctcctgccccacatctcctactgctggctcagaccaagggctcccgcctccctcccttcctcctcctgccctatggaacagccgggtgctcatgagtggggcgcgtgggaagagcatgcccgttgcgcctcccgaatagggggtagggagcccagagtcgcgacctcaaggcctaggtgcggctctccttccacacagtttattgcccctcgtccatccccctaatgctctgccatctttgaggtatatcgtcccattctgagtatcacaaccaccgtagagttagatcccatgaatactcgctgttggcggaatgttccgtggacctacagtgaacgtctcttaccgagacgcttgctgtaccgtgacctgtgaccccttccaactacatactggcccgctgtaggggtccatctgcccccctgcctgcacgcatccacgatgtaatccgcacaccctacacgcgcggccacctgtttgcgcgcaactgcgacacgaacatcagccatgcgcactgcagctccgctgccaatca

SEQ ID NO: 507775 - DNA, 114 bp, Homo sapiens
  misc_feature (5)..(5): n is a, c, g, or t
cgtanatgaaacagggcctttccaagtaggctctgggtgtactaagccagcgtgtgcctctggtttagtgagtgtaatagagtccctggcacctttcttatgcaaatagaggct

SEQ ID NO: 507776 - DNA, 1149 bp, Homo sapiens
  misc_feature (347)..(347): n is a, c, g, or t
  misc_feature (397)..(397): n is a, c, g, or t
gccactccacacttagtaccagacaagcttagccaacgcatttaccgcgacagatacggtataggcgatagaaattagtaaacctggcgctgaagtagatatagttcaccgccaagggaaacggactgagatgacagttagtaacactaagctataatactcagcgaagagactaactccgctaataccgtattctgcagtaatgtagatttaacctatcatagaatagaactttgcaatggagaagaccgaacacgacgtaaaggaaccgccacggataaccactacgaaacgcatggcctagcgcatagaaggagaacgaaggcataaccacagggacggcaagncacaccgttacttgatttgctcatgcaagagatactacgatggcgtaagngattctaagtgaaggatagaaatggcgagctaagaaccctatcgcgaagccatgggtgaattaggcttgggatgtcgttccagaggaacttagcagagtctgtacgttgttccaccacttcttatacaattgttgcccgcttacagcacatcacgcatgcgttagagagtacccgcctttgtcaaaaatttttgaacactggtgtgaggtccctagaagaggggaaatcagtggctcctgttgggcaaccccctgtatggtcaaacataatatcccatgtgatcaggtccgtaggaagataaacacaacgactttttaaacaacccccagtaaggtaagggcgcttacagacacggccaggacccatccaagtttaaacgaaaaagccggttcaaagacttccaaatcaagccccagcttaacgcgtaagaagaaatcccgccaaaaccataataaacttgaaacctccccttcaacaaccccaaaattgggacccaaaattctaattcaacgccctattaggacacgcaaactacatggttctagctaattaaaaggtaaagccattgcagaaacacaatttccttcgcttctcgagcggtaaaagcgctgcggtccagcaatctaaagaaagcacttggaaccctgtagcgaactgtaagcgaggcccgaaataattctaacaaatccgaaagccaacaaagggccatttattacccctccaactggtcaagccccaatcaacacgggca

SEQ ID NO: 507777 - DNA, 398 bp, Homo sapiens
ccgaagtggtgtaaggtgtgcactgggcaatatatgagatcatcactgttgaggacgttattgaagctacccccttctatacggacacacgcggtcagctgactgaactgatacttattgcaagagcgctcgaggtgagcatggggttagaccctggcagtgctactgacgtccggtctgcctattaagccactaatgctgatgctgacggtctgtaagacaggtagttcattacaggaaatgggctgtcgattaaagaccagtggggagtcgggctcggagactcacgcctgtgatcctagcactttgttatgccgaggcgggctcacgtggccaggtgatccagactccgcagaagactggcctgtctcctattgcagccatagctgagccctggg

SEQ ID NO: 507778 - DNA, 163 bp, Homo sapiens
  misc_feature (63)..(63): n is a, c, g, or t
  misc_feature (65)..(65): n is a, c, g, or t
  misc_feature (71)..(71): n is a, c, g, or t
  misc_feature (80)..(80): n is a, c, g, or t
  misc_feature (93)..(93): n is a, c, g, or t
  misc_feature (96)..(97): n is a, c, g, or t
  misc_feature (116)..(116): n is a, c, g, or t
  misc_feature (138)..(138): n is a, c, g, or t
  misc_feature (148)..(148): n is a, c, g, or t
ggaaaagactcatatcaacattgtcgtcattgggacacggtagagttgcgggcaaggtccacnangtacgncccacgctnatctatataatgnggnntgcattcgacagaaagaangacttgatatttttgatgaagnaggatgattnagattggttaaaggg

SEQ ID NO: 507779 - DNA, 441 bp, Homo sapiens
tttttttttaaaaaataacctagactatgcaaaacatcaaagtgaattttccatgaatgtttttaatattctcatctcaacattgtgatatatgggcctaacacccttttcatattcatctttccctcatttcaagtgaattattttaatctttttctctctttccaaaaatttaggaatgtttagtgtaattggatttcgctatccgttcccatccttaagttttgatattcaatatctgatagatacactgcatctttggtcatgtaagatttgttttcaaatgtccaaattatttagagcataggctttataagcatttaaaaaaactaatggaggttaaccctaaatccgatgtcccatcattttacgtgttgattcctgtatgtgtatttttattctaattaacttttgtgttccagaataaacaaaaaaaaaaaa

SEQ ID NO: 507780 - DNA, 156 bp, Homo sapiens
cacacacacttcacagcatatggggtgaagaaaaaatgccagagtctgcggtgtaacatggtgtttccactccgccgctgacacaagtgtgcagcagggatgaccttttgcacaaggactgcacagttcctgatcctagagaaagaggggatcctc

SEQ ID NO: 507781 - DNA, 296 bp, Homo sapiens
aaatatagaaatgaacaattactggtatctttccattcttatttaagctacagtagagtctctttagaaaagagcacatggaatagacacatatatatgctaaaaggttgagtgcagagttctcacaggggaagattctttcatatttttaaattttcttgaatctggtttgtggcatgggaaaatagattgtttcttctttgctttctgatttaacagttagctttctggtaacaataattaaagaataactatcaaatttcttttctttttttttttttttttgaggtcgacgc

SEQ ID NO: 507782 - DNA, 400 bp, Homo sapiens
  misc_feature (48)..(48): n is a, c, g, or t
ctagaggatccgcagttagggctacctccctctggtggtgggggatgngtctgcacacagttagacgacgaggtacaggaagaatcaaactcagtcaacattcttcaaccaactgggagtactgtgaggctggacacaggtgctcaataaacaattggggcattgaagaaagtgaaggaaccgatcttgttcatctctgtgccccagcactcggcatgtagcccatgatcgaaaatgcagactgaacaactgtcacactcttttgtatcactagtgcccggcacacagtcagtgctcttcaggtgtgtgggaaagaagccaatgagtgagaagttcccacaccgtctagcagtgaggaaaaaaagaaaaaagtgaaaagtaccttgtttactcccattcc

SEQ ID NO: 507783 - DNA, 710 bp, Homo sapiens
  misc_feature (481)..(481): n is a, c, g, or t
acttgttccttcacacgcctccacgaacgaataggtttccccaggtgcgcccccctgggttccccgccccgacattcctttttggggggccccaccacagagaagcctgtttgcgcgcagggaaccacacttcgggggggtatattttgccggccgagtcccgttctttggaggttggcttcgacggcgctacttagttgcgtgccgaggccagcgctatatctctctttgggtggggacacggcgcgttggatgatatactgggcgcggttcccctcgcccccaccggcgtcttattcgcgcagagaataaagaaagcagggcatagagtagcgagcgacagcgtgagtggtcgtagatagggcagagattcacattcgaggagcactcccacgcgctcgacgccccgggacagacgcttgggtttccccaatgcgccctgtaaggacccattccagccgggccgcacgctcgactcccntcctgtgcaggaccacgcactggcacctgcgaacaagggggctggctacgcccccctccatggaatgcacccaggacaaggcaggccccaccgcaccatcgatatgccccacgatcgcagacgcatgcgtgactgcgggagtaggcccccccgggcggacgggctcctaacagaggaacttaacaccagcattgcgccacacgtgtctcgacataagacagacaatcac

SEQ ID NO: 507784 - DNA, 117 bp, Homo sapiens
caggcagtctagcttcagagtccatcctctccatcatgctacaacctatactacagtcttccatttatattaccttctttttttccctatttttgttcttgtgaaaaagcatttcga

SEQ ID NO: 507785 - DNA, 356 bp, Homo sapiens
atctttctgagtttaacacttgtctctagaggtttgccaggcagcagctctcagaagtttccaatatgctttgcagacatctatagatctgggaattaaagaattcaagcccgaattggtgagaaccagattttactcaacagaaagctctttctaaggaatctgagctgttcatgggtggacagtggtggggcttgagtgctccttgtgaataggatgggccatgcaccctctctgtatatccaccagggcctcttcagaatagggttggtcctggctagaagcgtggtctagaagatggctaagctcttggccagctctcatggggagatatatgatggcacaaaatcgggtac

SEQ ID NO: 507786 - DNA, 566 bp, Homo sapiens
caggcagcccctcgcctgtgtgtgacgtggtcatttgtcaccctgacagtattgatagggctgctgctggcctgggatggaatccactctgctcagggcagtgcctgagagatcttgtccagaaggatgtgggacagtgagctgctcggggacagagttgccctttttttgggtatagaccatgctaccccctgcggtaatgttggctgttgacagaggactgctgtgagcccagcccgggccggagccccgcttgctgagtgtccactccgtgcctccctcctcctctgcacatctcccaccctggggcaggcaccattgtcattcttgaggttcttaggacccctctcaactccccagcgtaccccttcatccactcaccccctgtagccagagccattggtctaacctatgaatctgatcctgtccctctctgcctgttaaagcgccttgggggctccctggggaataacacccagcccgtcctgtcactcttctgtcccctctgagggtatcatgccctcatttcaaataaacaggcagaattgcaggtgcaaagcagctca

SEQ ID NO: 507787 - DNA, 607 bp, Homo sapiens
  misc_feature (585)..(585): n is a, c, g, or t
aagaactagagagaagagcagagatgattcatacggctagcagacggcgacgagaataactaagatcagaggggaaatgaaggacatatagacacaaaagacccttcataacaatcacggagtccaggagcaggttgatggaaaggatcaacagaatggatagactcgttatccagactaatgaagaagaaaagagaggagaatcgaatagaggcaataaacgatgagaaaggtgatatcaccaccgatcccacagaaatacaaactaccatcagagaatactataaacacctctatgcaaataaactagaaaatctagaagaaatggataaattcctcgacacatacagtctcccaagactaaatcaggaagaagttgaatctctgaatagaccaataacaggctctgaaattggggcaataattaagagcttactaaccaaaaacagtccaggaccagatggattcacagccaaattctaccagaggtacaaggaggagctggtaccattccttctgaaactattccaatcaatagaaaaagagggaatcttccctaactcattttatgacggcagcatcatnctgataccaaagccaggcagag

SEQ ID NO: 507788 - DNA, 701 bp, Homo sapiens
  misc_feature (60)..(60): n is a, c, g, or t
  misc_feature (120)..(120): n is a, c, g, or t
cgtcagccccgcaggccttcatggagatggggtccggcgcgcagcagggccagaaaaatnctggaattcagagatcccccccagaaccccgccggccaggagcccagcagcagggctcanaccccagcgagcgtgacccacccctgtgtacccagcaggcccgtagccctctgcccggtaaaaatcagactcggaaccgatgtgtgctttaaggaattttaagttgcatgcctttcagagcctttaagtcagttggtttttattagctgcttggtatccagtaacttgggtggaggcccacccctaattaaagggctaaaaaggaaaatgaggcttttcttctatattcttcctctggcccaataaagaagttgcttgttgtttgagaagtttaaccccgttgcttgttttgcagccctgtttacttgggccccccccccccctgttagctggggttgggccctgtcttttgtagctttgggctggaggggtagatggggggtccattacccctcccataaatatggaccctttttcagaaatggtgcccttttaatgagatggtttttttcctctcataattaaaaaccctggctttagagagggtaaaatgggcccggggccctaggaatttttgtttgttgggtgcctttaatgctccctttttaaaaaagaaaataaagttattattttactccgga

SEQ ID NO: 507789 - DNA, 218 bp, Homo sapiens
gttcacaatgtggcagattgtggtctgagaggattagctggggatctcaggtgcaggaggttatgtttggattgggaattgtaattatttgtttattttgtatcattgtcccactcatttccacataggacccttttctaaaaaaaaaaatacaagaatcttatggttgtaagtgaacatgtagggtacttcccgctccctcatggatgctggaggag

SEQ ID NO: 507790 - DNA, 302 bp, Homo sapiens
cagttgtgtagtctactggacagcactggacatctccttcctatgaactcccaaggcctgtgacctgaatttctttactgtcttttacctgtaggaaatgagggagatgcacagggctttatcccagtgattacaggactccactctcagcgttcagttttaccatccctgttccctcacattttggaacgtcatcgtggttatgaatatttctggttctctcaatgctgcaacccacggccatgcaccgtcgtctgcacaagcttgtcagaggggtaccgacgctcgacattcactcggcc

SEQ ID NO: 507791 - DNA, 277 bp, Homo sapiens
  misc_feature (260)..(260): n is a, c, g, or t
  misc_feature (264)..(264): n is a, c, g, or t
acacaactaagtgactgatgctttcactttcttcacactgcctcgtgggatttacattctggtgtggttgcagagaacagacgatgtgcgaaggatcaagggtaccagatgttgagggctgagaagcagatgggagaggttgtgtttatttttagggagtcacagtgtgttgatatgggggtggccagggaaagcctgtaagcaaaagcctgaagtgggcagtagagccagagggtgcgtcatcgaagaaccaattaggngtancgagctcgttgtc

SEQ ID NO: 507792 - DNA, 408 bp, Homo sapiens
catggctgagtgaagcagaggcttgtgtgtcccgggctctgggattggtcagtggccaggaagctggccctgacagggtggctggcctacagatgaccctggctgagctacgggattttctgggccagatgaacaacctgccctgtgccatgcaccagattggggatgtcaagggtattctggaacaggtggaagcctaccagactgaggcccgtgaggccctggtctcacagccttccagtccagggctgctgcagtccttgttggagagaggacaacagctgggtgttggaggtacctgaagcccagcagctccaaaggcaggttggaacaggcgccggtggctgcatgaggtaaaacgcacgcttggtccctctgcccaaggggtacccctggccatcaacggga

SEQ ID NO: 507793 - DNA, 332 bp, Homo sapiens
  misc_feature (144)..(144): n is a, c, g, or t
cacgaggtggagaccgggtcttgcaatgttttccagaccagtctcgaacttcaaggctccaataatccactcgccatggcctcccaaagccgggtgagccatgcgccaggactgcttttttttttttttaaagcaatcttacgnagctcactggtattaaacttccaaagcttgttaatcacgattttgcctcgtacccaccctgctttttttttttttttccttttgagacagggtctccttctgccacccagactggagtacagtggcacgatccgtgcaacctccatctcccgggttcgagcgattttcctgcctcagcctcccaagta

SEQ ID NO: 507794 - DNA, 969 bp, Homo sapiens
ccacgcgtccgaagctttgttatataggcatgactctcctctttgtgagcctgcagggacattccctttaatgtccatatttctaccagcagtctcttcaaggcagtctaggtttttcctaacatacacctcaaaattcttgcagctttggccaggcacagtgcctcacatctgtaatcctaacactttgagaggccaacatggacagattgcttgagctcaggagttcaagaccagcccgggcaacatagtgaaaccctgcctctacaaaaaatacaaaaattagcccagcatgctggcgcaggcctatagttccagctacccaggaggctgaggtgtgaggatcgcttgtgcctaggagattgaggctgcagtgagctgagattgggccactgcactccagcctgggagacagcaagaccctatctgaaaaaaaaaaaacaactaaagaaaaaaatttattcccagccctgatccatttcaaagccacctgttactttgaaccattttttttccagcagacccccacttttgttttttgggctgtggtaccaacggtcccacagtggggtggttaaaacacataatttatctctcatggtcccgaagggtaaaagtctgaaatcaggtgttgccaccagtgttcctgacactttgggggaaagaaacacctccggatttttctttcgtttggaacaaccacacagaagccgggcccatccttgtgggctccgctgtatccccgcttgggaggctaggggcgattccgaggcggggtcagacccctgtcccgtgggaccttctcttttaatacaaatatcgggtgggttgcgcttgcacgttcgggtgggaaaaacttacggggggtgtggacacaccgcaccgggagactacttcaaagaggggatctgcggcccctaggcgtattattgtcccggctctttctttctttttcttttctgctctctg

SEQ ID NO: 507795 - DNA, 808 bp, Homo sapiens
ccatggacaatactctgatttgctgcgactttttgagtacggtggtttcccaccagaaagcaactaccatgtatcttggggactatgtggacaggggacacagcagtccattggagacgatctgcctcttcactggcctacacaaatcaaaatatcctgcagacttttcttacttctccagagggacaccatgaatgtgcccagcatcacacagccacatttcatggcattttcatgcatgcacatgctcacacacagcacagcatcaccaacattcacaactcatggcacaaactcttcgacagcactgctcctgcacacgtgtttcaccagcatcagccagcacatccgtggcatgcagcacgcatcattctagctagtccatggcagtgtcctcatccaccccagcatcttccacatcatcatgcgcagccagcatatccggcgcaatctgatcgcgcacccaacatgcatgtcacccagcatccaaggtcctcctaccgctcgcactccaacaaagacgcgccctgcacaccccgccatcacacagcatgctccatccaggcctcggcggctgcaacacatgcaccagcaggcagtgacacctctcaacaatatgggatgccagcaaaagtgggatagccaacaaataaaatcccaataaaagccactcgacctccacgggcccctccacaccagtacctgctacgaaggcccccacgtcaaagggctgcgctcaggaccagcactgggaactcctcgaccatatcgcacaggcaccagacgaacgagcaccggtcggggaccc

SEQ ID NO: 507796 - DNA, 1154 bp, Homo sapiens
agccatctataaacagctgcaaggtctagcccttttttttgagtcaaaactgttctgtttaagttcatgaattgtatagttaagcattacctttctacattccagaagagcctttatttctctctctctctctctctctctctctctctctctctctctctctctctactgagtctgtaacaaagcctctttagtatcggtgtactccttggagaagcagtcctttctcatatagagatgtactgtgattcactgaggttatcatcacaagaagggagtgtctcttgtgccatctaaccatgatagtgtgctcaccatcactatgtgcttggaacagttacacatgcaccacaaccacaggctctatcaaacaggtacacgtctcgaagcgaagcgagcaaccgatcatctctcattgtgtgccgtgtggctcaaaaccggaaaacagatgaagcgtcggctctttcagcgggactcacagtcatctcttagagtatcccctctcaagcactttatggaccaatgtgaccgggtctcatgcacaatcctcctcatcctctaaaaactactactcatgatatacaacgtgctggtcgacgcattcatctacacctaacaagtgcccgaccgcgcgagaccagcaacagcaagacagagcaaggtactacctgcactcaggagcaactctggcgtatacaacagccgcggtgtcacacaacgagcgcggcaccgaccgcacacaccaggcgggacaactcgaccaatggcccaccaccacctctacagtcgtccaacgcaactacatcgtcacggtgggcgctgcaccacctaggagcaaccccacacagtgtgttacctccccatcacccttggccgccgctgagcgcgggccctagcatctcgcagctctccaacacagagcgcagatcggagacaagctcgtgcactgcttagctcagtctgactcacggcgcctgcgcaccccactccactcacaaacactaacggacaccacccgacatcgcatcagcgcaccgccgcacacatcgccgtgccccacgccatcaaccaaggcgggcggctcgccccaccagcgccagccgcccccggccccgcggccacaccacacacccgccacccccacgacgacccca

SEQ ID NO: 507797 - DNA, 441 bp, Homo sapiens
tagtcttgttgtagtaataatagtgtccacctaatgatcaccatatgagccacgacctccctgtattgcgaataatcagtatccggagccaccctgtgatccataagccatctgccattctgatgagcaccatgtatctattgcaaagtcccaagttatcatcagcacagaaacccatccatgccgtcttaacggtctccaggtctccctcttctgtcataggccatgaggctctccccctctaggtggtgctgttcggaggaagaggaagattcctgagctctgctatcaccccggccgtctcgtctgggatgcgggggagtctgtgtcctcgattagtgactcattatatcactatctctactagatggatgcatgtgacgcccaactccgagcagtaggcataccgtcaaaagcacctcttccccgcattggaacatc

SEQ ID NO: 507798 - DNA, 137 bp, Homo sapiens
tgtaactactcctaaaaaggttttgattcagatattatagggatgttcacttttgtttttttaagaaaaagaaaatgaaatggaacaaacaataaaagataccagtgtcttatcttaacaaaacaaacacacaaaag

SEQ ID NO: 507799 - DNA, 169 bp, Homo sapiens
tgtatggcaagcatctcaatgtgcagtctcctcctcctcaaattccaaaagacacacggtggcacttgagctcagcctgagagcctctgatgactgtcctggtggaggttctcaaccacagtcttggcagctggtggaggcagtgtggtggtcccaatctactaccaac

SEQ ID NO: 507800 - DNA, 1137 bp, Homo sapiens
gattgagagggatctatccccataaagcgcagctccatatgtacaggcatcaagagtcgctagctgtgctgcgctgcctgttgtgcaccgtactctagaaggactctacgtgatagcgcttgccgggagacctatctggtaaacatgctgcgcagatggtccacaagcgatggttctggccgtcagagcgtcgagcatcgtgttggtttacaagcatccgtacgatgtgatcaactaggtccagcagtaataatagagactttccagatctgttggcaacacctatcaatcagcatcatcatcagagcaagtgatcacacctttccgatcggaggaaaacgcaatcggaggcaaccgtgagattggattgtccctctaccctatttctagcttcgctctggtctgtacaccgtcatctcccggcccgtagtggcgtgaaagttggcctcattgtgctcgcacccaatctctaggtcgcttttcatggctgacatcaccttggtaagtggcattgcactggcccaactgatctatttaattaccgacatagccccgcaggttccctcctggacagcaagatgagcacatatgccacttgggttgcgcaattacaagcaaagggccaattgttaagcatcatcgcgaggttccacagaaggcgttaattttgggagggctaattactcgggtccgatggattggtatcaagcgtctctattattgccttgcctctccccatgacccacccgggacattgagctcgttgggaacgtacaaagtgggtgcgagtcgtggcagcgctatcaacgccagagtgtcgtagcgacctagccgcattcgttgggaggccttttgtcacagcgtttccgggctttttaacctcagtttgctcaaaacacgttccaacttaatttccccgcccgcaacagacgtctgaagtgaggtccaagtggccccagagtcccaggaatgccaaaacgtggccctgtgttgacagtgtgcaacccttatcggccggttttggaacttctcggaagaaggtttgggactttggaggacaaaccttggcgatgcccctccgagttgccagtccttgtggccccgcggttgtggtggttggcctgaccacagcactga

SEQ ID NO: 507801 - DNA, 115 bp, Homo sapiens
tcccttattgagttgtcatgtgactccctgaagcatcactgaaggctttcctacagctactgattacctgggcagctccccagtagatatttttttttttggtagggggaaagtt

SEQ ID NO: 507802 - DNA, 336 bp, Homo sapiens
aggttagagcctgactgagcaacagagagagagagagagagcgagagagagagagcgctgtaactcagggagaaccattagaagctggagggaagcagaaagaatagccaggctggatatcaggaggcagcttctggtacctctgcaccccattgcccacccccagtaggcagcatgaaatatgccagcaggctcaacaatttatcttcttggtatttttcacacgggagtcttcactcgtgtcacccaggcaggagtgcaggggctgcaaacacctaggcctcactgcagccctcgtgcctccggggcccatgccatttcctccggctcgccctc

SEQ ID NO: 507803 - DNA, 136 bp, Homo sapiens
tgtgtgtactggacatattgcactgtttcaggtgtgtctgatgagggaggcagtggtggtggaggaggtggcaaggtccgtgaggaagcgtgccccattggtgggtcccacatgagttacctggctaccacttctt

SEQ ID NO: 507804 - DNA, 291 bp, Homo sapiens
tcagagtttcactcttattgcccaggctggagtgcagtggcacaatctcggctcactgcaacctctgccttccggattcaagcgattctcctgccccggcctccagaggagctgggactacctgccaccacatctagctaactttctgcatttagttggtcgggctggtcttgaactcccgacctcaggtgatccacccatgtcagcctcccaaagtgctgggattacgtgtgtgaaacactgcacccggccttttgttaacttttagtttaagttcagcagtacctgccc

SEQ ID NO: 507805 - DNA, 278 bp, Homo sapiens
  misc_feature (19)..(19): n is a, c, g, or t
tttttatcggatgccaccntctatagtctaataacagaccggcctttactattcaaatcacccaagcagtttctcaggctcttgatattcaatgaaaccttcataccccttactgtcctcaatcttcaaaaaaggtagaacagacaaatggtcttttaaaaacacacctcaccaagctcagccacaaacttaaaaaggactggacaatacttttaccactttcccttctcagaattcgggcctgtcctctttaagtttgtggcatcgataaacaccgg

SEQ ID NO: 507806 - DNA, 1352 bp, Homo sapiens
cttaatcgtgttatcctgatggtggccctctggtggttgtgcccgatatatttcttcgcggccttccgcatgtaaggggtggcctgcccctgcgttgtaagatggaggtttctgcctgtggcggttgtgtccgtcccccactaattgggggggcgcattcgctcccctgccgcgctccccccggcccaccgcgttgtggggtgttgatcctccgcgcgtgttatttgttttggttgtatattaggtggtaccatgctaaggtcctgcgtcggtgagtcctcgcgctccaaacggggttgttttcgcggcctgtttcgtttcgtcccccgcggaagaggttggttgcccccccgctgggaattagcctccccatcaaggaaatattcgtcgccccaactatattgtgttggcaaccacctactggaggtgctgcccggcggagtataagtaaaaggacgcccgacacataatattgctggtaatattgaagatgtttgtctccccgccgctttttttggttggggccccccacaaacaattagggttctgtcctccacgacagtgaataataatataggtacgccccaacgcctggtgctccttgctcgagatacgcccccctgttgagagggtcgttgtccccgcgagatattttttggtgtgccccccatatatatagggacacacatgtgggtgagataaaattgttgttgtgcgcccacaaagagtttgggcttttcccacataatccccggggggttcacggcgttcccaaaccgccccctgtcacacccggtcaatctcgcacttctacacacacagagattttttgttctcctggtgtcttgtggggcctgatacacaggcttctccaacacacaggcacatttccagagggtgtccctgtgtgtgtaatagcgccccacaggggcacacctgttgggccacagggtgtcaccacgttggccacaagtgtatatcacatgtgccacatcccgcacccacatagctcgcacagaacacacacaggagagacacatggttagatttgagaggccccctgcggcacagggcgcacaagttcacacagtttctctggcccgccctagaaggatcccaccatttctcaaagaaagatggggcttctcacccaagattccaatagctgatgtaatttgtaagaacacatggtggctgaaaagcggcgttatccccagatggctgttggggtcaagtacaatctccccagttcctggccctttggacaaatggcgggccctgcactccatgagggcttcccatagtgctgcccccctcttaatactccaccccattaattttacttcccggtc

SEQ ID NO: 507807 - DNA, 790 bp, Homo sapiens
tccaataatcaagggtcttttggaatcctgtatggatttggcccccccatttcacggggaaccctattctggagctttctttcttgctggaattttatggaccagttaagaagctgctcttgtgttaggataaactgtatacccataatgggtgacaacccgtgatggagtggttgcatttaacctcttgtatcttttcccgtcctacctgatggccgtaatctataagggatctttatagtttgaaagtatttggataacttccgtatactttagggtctacttttttatttgactcaccacccttcttaggttctccagtattcccactgtgttttaaaagcctgaagtccgtgagatgaaattcacatccagaatttgaagtaaacttgtaagggaaaataatataaagatacccttggggccgtggctcacacctgtaatctcagcactttgggaggctgaggtggaaggatcgcttgaagcccgagtttgagacccgcctgtgccacacagccagaccccgtctctaccaaaactttaaaaattagctggctgtggtgttgctcaccccatagttccagctactcggggagctgaggccgtaagatcacttgagccccggaggccgatgctgcagtgaactgtgattgttcccctacagtccagcctgggtgacagagaaaagaaaaagaaacattacattatttggctagagcataattatttgattttctggtttttgaaaatttgagttgccataaaaggatatttcagtgtgcgatttcca

SEQ ID NO: 507808 - DNA, 1574 bp, Homo sapiens
ggacgcgtgggtcgacccacgcgtcaaaaaaaaaaaaaaaaaaaaaaaaaaaaaaaaaaaaaaaaaaaaaaaaaaaaaaaaaaaaaaaaaaaaaaaaaaaaaaaaaaaaaaagaacaaaaaaaaaaaaaaaaaaaaaaaaaaaaaaaaaaaaacaatgagagcaggagcgagagcgaggtagacaatgtagaggagtgaagagacaaggacagcagcagacgcaggagatacaagaggaggaggagacagagaacgaggaggggacgcgcaaatgacaccaacaaaggaggggaggacgcaacaaaacaaagaaagacgagaaaaggagaacacgagaggaggcggagaaagaaacaagaaagaagcaaaaacaagaaaagcagcagtgaaaaagagaaaaggaggagaaagggagacaaaaggcgggaaagcaagaacaaaagcaaaaaaagagagaaaaaaaagcacaggcgaaagacaaaaaaagaaaagaaaggcaaggacaaagagcgaaaaagaaaaggagaggaacacaaaaaggagcagaaaagacaaaggagcagcacaaaaggtgggagggagcgacgaacgcgacacgagtacgcgggggaggagagcagaggaaggaggaggaggaggagagacagaacacaagaaagaaagagagagaggggagggggaagacgggagggagcgagggacagaggggaagggaggagaagaagggagaaagaagaggagaaagagagagggccgggacgccaaggagggaggaaggagcgcgggaagggaggggagggagagaagagggagaggggagaagaagcaaagagaaaagagagagagaggcgaaagagagaagaggagaggagcgcagggagagaaaaagagaagaggacgaggggagagaagaaagagaagcaaagacggacgcggaggagagaggaggggagagggagaaacggagcagggaaggagcggagaacacgaagaacgaagcaggagcagaagaaaggagggagagaggaagggcggggagagggggcgagagggaagagaggaggaagggggagagaggggaagagaagagaaagagagaagaggggagaagaaaaggcggagcagggaaagtgagcgaggggaagaagagagaggaaggaagaagcgaagagagagaggacgacggaaagaacacagaagaggcaagagaaagaggaggagaagagggaggagggaagagagagagggggcgaggatagaagagggaggaagcgaggatagaaagggaaggaggagggaaggggggagagagagaaggaagaaagaaaggagaaaggggaagcaggagggacgaggagggcgaggaaggaatgaagagaaggaagagaggaggagggagagagagagaaaggagggacagaggagcagcaaggcggcgggagaaggagagagcaagacaagaggggaggcggagaggagagcagccagagaggggagagagcggcgagatgaggaggggagaggggaggagagaagcggagagaggagggggagaggcagagggaggcgaaga

SEQ ID NO: 507809 - DNA, 698 bp, Homo sapiens
aacccgtcatctactctaccatctttgcaggcacactcatcacagcgctaagctcgcactgattttttacctgagtaggccgtagaaataaacagtgcgtagcttattattcgcagttctaaccaagaaaaataaagcctacgcttccacagaagctgccatcgaagtatttcctcacagcaagcgaaccgcagtccgataatccgttcgtaataggctatcctcttcaacaatatactctccggatcaatgagagccataaccaatactagccaatcaatagctcatcatgtaagtaatcataagtggctatagcacataatacactaggaatagccccctttcacttcgtgagtccgcagaggttacccaaggcgacccctctgacagtccggccctgccgttgcttgctcacgatgacaaaagactagcccccgaatctgcaatcatatagccaaatctctccctcactaaatcgtaagtccgttctcctgcagctctgctgcaatcttagttccatcatagcaggcagttgaggtggattaaaccaaacccagctacggcaaaatcttaggcatagctcctcaagttacccacataggactgaataatagcagttctaccgtacaggcctaacataaccattcttaatttaactatttatattgtcctaactactagcgcattcctactactca

SEQ ID NO: 507810 - DNA, 338 bp, Homo sapiens
ctccgcttcaggttacgctttctcctgctcagctccgagtagtggactacaggcgccgccacacgcccagctaattttttgtatttttagtagagacgggttttcaccgtggtctcgatctcctgacctcaggatccgcccgtctgggtctcccagagtgctgggattacaggcgtgagccaccgcgcccggccctcgcccgactaattttttgtattttttagtagagacggggttcaccgtgttagccaggatggtctggatctcctgacctcgtgatccacccgcctcggcctcccaaaatgctgggactacagacgtgagccattgcactccgg

SEQ ID NO: 507811 - DNA, 244 bp, Homo sapiens
  misc_feature (6)..(6): n is a, c, g, or t
  misc_feature (24)..(24): n is a, c, g, or t
  misc_feature (53)..(53): n is a, c, g, or t
  misc_feature (66)..(66): n is a, c, g, or t
aacttnagccgctcctcctctganagtgccactggctcacccacacggagagnaggcgggggcccnaaatttggtgggtgggcccataggaaagccaagccaaggccctggtggaggtggtgggggtggcggaggaggcctgcagaggggggagtcccaaaggtggtggtggccatgggaattcccagggaagctgtgcccgaacatgggaaggtggagcggctttgtccccatcttcccctct

SEQ ID NO: 507812 - DNA, 439 bp, Homo sapiens
cagcacccccactctactggtaccaatttattgtattagtctgttctcacgctgctgatgaagaccatacccaaaactgggcaatttacaaaagaaagaggtttaatggacttacagttccacatggctggggatgcctcacaatcatgacggaaggcaaggaggaacaagtcacgtcttacatgggtggcagcaggcaaagcaagagaacttgtgcaggggaactccccttttcaaaaccatcaaatctcttgagacttattcactatcacaagaacagcattggaaagacttggccccatgactcaattacctcccaccagtccctcccacaacacatgggaattcaagatgagatttggctggggacacagccaaaccatatcacttgccaacagaaatacaatgcaagccacattagcaaaaagcaaaaaaaaaa

SEQ ID NO: 507813 - DNA, 112 bp, Homo sapiens
aaggtgactggcttgtttaatcgtgtgcatagaacgagccacctcgcttgcgctgaagtcacaacagagtgcagcgcacaagagctactgtggcggacttgtccggccctgc

SEQ ID NO: 507814 - DNA, 161 bp, Homo sapiens
ggtaggtggctttgctctaaacagaatcgtctcagtaatgtgacactgcacatgtataggtaggctcgctcatgggcataaccctctaaaacacaccttttatggagtgaaattcacttaacagccatcttgaagcatatacttcggcggcatttgctgga

SEQ ID NO: 507815 - DNA, 158 bp, Homo sapiens
gtgagcacggatcgggaggagtataggagcaggcgtcttgtgcagagtgtccgccatacttcgtagctacaaaacggctaaaatccggaagccaactttggatcagccctctccggagacgttgtgaagtctgcaattaaaacagtcggcctgcaatc

SEQ ID NO: 507816 - DNA, 671 bp, Homo sapiens
aacacgacggtgacaaggcttctcaacatcaaccccatggcctccatgactttttcaaaaaaaaaaaaaaaaaaaacaaaaaaaaaaaaaaaaaaaaaaaaaaaaaaaaaaaaaaaaaaaaaaaaaaaaaaaaaaaaaaaaaaaaaaaaaaaaaaaaaaaaaaaaaaagaagaaggggcgggggcgccgcgccgtcgacagtgacacatcagcagaaggcagcgcagcgcaggggggcggagaagaacctactccctgcggagggcaccccacacgggagtggtctgtaacactacactacctgcgcaacatcactaggcagaggggggctgaagtcgacgagaacacaactatacacccccaacgcgaatgacagcctagaacccaacacagaatgacggtgggggagaagcacaacctcccaaccggcgaggacgcacacccacccaacctcagagaggaggagaaaacacagcaacagcgacgacaagcgcaggaaaaaacacaatacgagagcagcgaacaaaagcgaacgggacgcaacaaagaaggacagccacacacaacgaggtgatggggaacaacagcacagcaccacacgagcgcatcttgacgagcgggacgaacccaaaccaggagcaccaagccaaacacaaacaagggagggaagg

SEQ ID NO: 507817 - DNA, 809 bp, Homo sapiens
cacgtctagggaggtcgagttttcgtcgcgcacagtcggttccctgcatactaggcgttggcgggcacaaagaactatccgcggttacaataatagctacttttctattatccgctctacacccatctcccttcttagcccgataatgtgcctgtttcccactactattgtcttttccgtccattcgtaagctagccgaattggcctagccctactacgtcatcaatctccaacacataatgtgcctagactacgtacaattacctctacctactccacatgctaatagctaagtcgatcccaacgatgatactactaccactgacatgactgtccattaaacacatgaatcgtgaatctacacaaccacccacggcctaattattagcatgcatccctgctactattttttaaccaaatcacaacaacctatttagctgttccccaaccttttcctccgaccccctgaacaacccccctcctaatactaagctacctgagctcctacccctgcacaatcactggtcaagccaatcgccacttatccagtgaaccactatcacgaaacaaactctacctctctatactaatctcccctacaaatctccttaatgtataacattcacagccacagaactatatcatatcttcttatatcttcttcgtaaccacacttatccccatccttggctatcatcacccgatcaggcaaccagccagaacgcctgaaccggcaggcacatacttcctattctacaccctagtaggctcccttcccctactcatcgcacaaattttaccctcacgac

SEQ ID NO: 507818 - DNA, 499 bp, Homo sapiens
tgggcccgggtgagaaattttttttttatttccaaaaaggtttaaccccccccgggggggaaaggggggccccggccccccccaaaaaacaaaaagggggccgaggggggaccccgggcggggggtaacgtcactataacaaaacaacaaatctcctcagaagagaaaaaaaacaaaaacaacaaacaacaaaaaaaaacaaacaggagggggcggcgcgcccccaaaggaatacacacccactgcggggggcgcgccacacagtcgtataggcagacacaccacccgacttcttttgtttagcacgaaagggtcgccccataatagtagagggcgctacttctaatacgagcgaacaacaggcccgacggcgcgctagcatacaaccacagcgccgtgcgggcgggacgaaaacacgggtccgagttgagaggctatcttgagagacaagacgcacacaactgtggggggagcgcgcacatcatggtgcccactaacg

SEQ ID NO: 507819 - DNA, 282 bp, Homo sapiens
acagtatacgaattgagctggtacggggatttgtacaggtgagtgtgtaggtgtctgtgttggtgctggcgggtgttacatatagcgtcatgattgtgtatatggttagtgtgttgtttatgtagtggttagtatgagtgagcgttatgtattggaattgatatcagatggttaggcgggaggtcattatgagggcttaaagggtccctgtgagggttcatgagctgcgatcactatatgataggcatgtgattggtgggtcatggccaaagacatccttcg

SEQ ID NO: 507820 - DNA, 359 bp, Homo sapiens
gagacagagtctcactctgtcgcccaggctggagtgcaacggcgcggtctccactcactgcagcctccagctcctgggctcaagtgatcctcccacctcagcacccccaagtagctgggattatgggtgcatgccaccatgccgggctaatttttgtatttttagtagagctggggtttcaccctgttggccaggctggtcttgaactcctgacctcagccgatgcacctgcctcagcctcccaaagtgctgggactataggtgtgagccactgtgcccggccagagcttgcatttttcttatcttcctttgctgtcttctcttctatctctttcttctttcccttctgtcgtcttctc

SEQ ID NO: 507821 - DNA, 521 bp, Homo sapiens
gtcatccagcactgctcgagcttaaatccagacttgacattggcctgaagaataatcttggtcaggttattcagcctctctgtgcctcaatttcctcatgcataaaatgaagattgtcatggcgcctactttgtatggtaaaaaatttagacaagttcctggcacttcataaagattatatcagagttgcttattataatttcttgattgtttgataaaaggtacatcccaagacatatgagtactctggaatgcttccttgtatgtggagtttaagaactaatgtaatatgatgctggatgactttttaagaaatgcctctaaattcagacaggaatacgctaacacatacccttatctatgcacaaaaggaaaaataaatccaggagtaagtggggaacttggcaggaaaattattttatgataaaataatctttccagtcagtttccctccctgactccttccctgcctccaacccctcctatccccacccagccccccttgctttgagaactttggg

SEQ ID NO: 507822 - DNA, 172 bp, Homo sapiens
  misc_feature (39)..(39): n is a, c, g, or t
  misc_feature (129)..(129): n is a, c, g, or t
cttgactacagcggctggaggtagggcacgagtcgcggnggatgaggacgcaggagcggctctccagtggcactggctcaggcttctcttgcactgcatagctgccggaggccttgatgtacatctggncgtactgctcctccaccatggtcagccgctgtagtcagcatcg

SEQ ID NO: 507823 - DNA, 920 bp, Homo sapiens
gtggtcgaagcgcggggggatatgacaggcggtcagtgcgacggtgcgggtggcgggggccctgggtgtgagtggtggtgagagcggaacactggcccagtcgttgcccgttgcggacatccctgtggcgccgagccggtggcgtctgtgcgctgctccgtggccaacacgtctaagtgagtggtccgcgcaacgttggccaggcctgcagaaggtggcaattcaggtcaatctcttggggggcaagggtacgcttggaaaatgggcagcgcgtggcaatcccggccgcccgtcgcggtcagcgtcggccctgctgcgttattgcgttccttaaaaatcgctcctcagaagacagcgaagaggtttccacctgggcactgtcggttgcacggggctttttctggagctttgttggtgagaggcgtctaatcgttcatctcctttcgtgagtttctccgacaaagttgtcagggaacccaacctctcctgccggtgatctgtccctcgcagcagccttccatccgccttccgtgatgttggtgatgatgtcacccacgctgatcgtcagctcatcatcgtgctgggcctggtagtcaaactccactatggcctccaccattggcgtcgagccgggccgggccgccgaggcagcgtgaaagttggcggaggcgggcgtgggggttggggcgccgggatcggggcgctgggatccaggcgcgagggtccggacgcggcggcggctgggccggcttcttcctcagtggcggcggcggcggctcagcgccgcccgctgctgcctctgctgctgctgccgctgctgccccggggcgactcctgctgctgctgttgcatcgcggcccaatgcgcccggctgcgccgggtttcctgctccccgcgagtggaaattgcgaaaaaaaaaa

SEQ ID NO: 507824 - DNA, 115 bp, Homo sapiens
agcggggaacagtcactttggctagcactagcaaaagtgaacaaataggattacatgaagtgaaaaagcttatgtacagcaaaggaaacaatcaacaaagtgattgttccccgct

SEQ ID NO: 507825 - DNA, 150 bp, Homo sapiens
ctgtttgtgcaattactgacaaccgcagttaccagagttttcaattccttacctgcaatctgaaacccaaaaagaaatctgaaaatgggggggggcggggggactgctggagcatgaaacctgacctgtggcaaaactcaacctgaattg

SEQ ID NO: 507826 - DNA, 166 bp, Homo sapiens
tgctccaggctcagccagaatggagacggcaggctctgcttctgagagactaccgagcgttgaagaagcagaggtgcccaagccactgccccagcctccaaagataggggacgaggacatccagagcatactcagaacacggcaggagcggaggcagaggcggcag

SEQ ID NO: 507827 - DNA, 221 bp, Homo sapiens
gagtcagactcataagagtgagtcccccttattcctgacacaaccaatctgcaggcgtagttgttcacacagttgtggacaagaagtaatgatgtgatgcattgatgcgcatgaaatcatgccgtccctgcgggattcgtgagtcaaaaaatctgaacagcctgctgaacaaatctctagactctgaattcccgcggggagagtatcatcgcctggcaacg

SEQ ID NO: 507828 - DNA, 257 bp, Homo sapiens
gggaccttacaaaccaaccgccttttagactcctggtgcgcagcatcatgcatatcttgctagtaagtcggaggtgtcaggcacgttgagaaccgctcccgagaacttgctcttgaagtagatcaagcgtggaggctcgcagttaaggaggttgagggtgccttcagagttcaggagccttatcctccgcaggccgatggtctgcacccactccatggtgcgcacatcaaagacgtccacgccaaaccctgcgtacg

SEQ ID NO: 507829 - DNA, 354 bp, Homo sapiens
  misc_feature (30)..(30): n is a, c, g, or t
  misc_feature (44)..(44): n is a, c, g, or t
  misc_feature (50)..(50): n is a, c, g, or t
  misc_feature (56)..(56): n is a, c, g, or t
  misc_feature (94)..(94): n is a, c, g, or t
  misc_feature (99)..(99): n is a, c, g, or t
  misc_feature (143)..(143): n is a, c, g, or t
  misc_feature (159)..(159): n is a, c, g, or t
  misc_feature (188)..(188): n is a, c, g, or t
  misc_feature (194)..(194): n is a, c, g, or t
  misc_feature (251)..(251): n is a, c, g, or t
  misc_feature (262)..(263): n is a, c, g, or t
  misc_feature (265)..(265): n is a, c, g, or t
  misc_feature (280)..(280): n is a, c, g, or t
  misc_feature (303)..(303): n is a, c, g, or t
  misc_feature (307)..(308): n is a, c, g, or t
  misc_feature (318)..(318): n is a, c, g, or t
  misc_feature (330)..(330): n is a, c, g, or t
  misc_feature (339)..(339): n is a, c, g, or t
taacaacaaagcatgctcagtattgagacnctgtcacgattcangttatnccatcnataagtgcattattgtcgactttttttctgtcaagatntaganacttctatatcatattcgtccttttcttcaaaaaagaatttcanaaaagatggatttganacactcaccatttaatcatttccagtcanaatatntatttggctgaaattatgtcaaatggactgtattatacggtttgtttgctgcttttngatggctacgnntncggagagagcaatcntgctgtgaaacagtgtggatgtntatnntattcggctnactcttactaancatcatttnccccttttttaattt

SEQ ID NO: 507830 - DNA, 288 bp, Homo sapiens
ctagttttagaagtttcaataggcaatccctcttctggggtatatccccgaaggggaatgagattatctctgcagctcccaagtttattgcagcacaattcacaatagtcaagatacagacacaacctaggtgttcatcaatgggcaaatggataaagaaactgtgatatagagagatcaatagatagataattagaatattatttagcctttaaaaagaaggcagtcctgtcattggccaaaacatggatagacctagaagacattatgctatggaaacttctaaaa

SEQ ID NO: 507831 - DNA, 299 bp, Homo sapiens
tgtatcgatgccaccactgaaaaatcaagagacaggagaaaatgctcagaatccagtataatccttcttgacttacacaaaatgagacaggaaaaagaatagaaaccctttgacttttgcttttagtctgcgccaggttgacaaagaataatcttagggcgtgcttaatcttggcttgggtgttagatgaagctttgaaaatgttttgaccctaatccatggctaagataccgatttgctattctgtaacaatgatcctgaaaagagccactctaccaagagaattctgcttccttcct

SEQ ID NO: 507832 - DNA, 293 bp, Homo sapiens
agataaaggtagaatttaccattgaatccccagaatgcagcatagggcctggctcaaagaagactcaaaaattatctagcgaaaagataagtggatgaacctgctgttgacgagagcacacaggctcctatgagggagctgcctccaggaggactgctgggatgaggggacagggagtgtggaatgacagatgtaaggaattcaagaggaccacacacattcagtgatgacgggactcagagttaaagaaacctaagtcacaataaccatgaggtgctgtgttttaacaggat

SEQ ID NO: 507833 - DNA, 265 bp, Homo sapiens
tgtcggtcacggtgttgcgctcccgccggtgttgcgctccgcgcgtgttgcgctcaggatagctggtctctcgcagacctgagccccccgcacgccagtttctccggtaaagcgaatgattagaggtcttggggccgaaacgatctcaacctattctcaaactttacctgggtaagaagcccggctcgctggcgttgagccggggtgtggcaatgtgagtgcctaggtgggccactttttggtaagcagaactggcgctggggga

SEQ ID NO: 507834 - DNA, 233 bp, Homo sapiens
gggaaaaaaaaaaaaggggcccttcctggggggttccttttttttcccccattggcccccccgcccggacttttggcccggcccccagggcccaatttggttttccctcgttccccttaaaaggtcccaaaccgggtttttaaaaaatttttttttgtttccttaactgaatttcccaatggcccccttcctttttaattttttttgggtaaaaaaaaggggcgtttttttta

SEQ ID NO: 507835 - DNA, 527 bp, Homo sapiens
  misc_feature (430)..(430): n is a, c, g, or t
  misc_feature (432)..(432): n is a, c, g, or t
  misc_feature (454)..(454): n is a, c, g, or t
agcacctgtccaggagccgcctccatggttcatcgaaatgtgatctcccctcactgtagaagcgccgtagaagcccacgatgtaccgcgagttgatctcgtgcatgacctgcagctcgctgatgatctggttcgcgatggccggcttgatctcaaggtggatcagcttcctgtccatgatgaggcgcgagggtctgtgctggactttggtgaccacccgcgccgttgcccgcgcccagctctgagatcctttcgaagtcatcgtctttgagttcgccgaccttggctttctgggtgagaatagttccagccgcttcttctgctgctcgtcaagttccagctcctccagcttcttctgcaggtccaccaggtttcctcggagggccctcgctggtaggggatggccctcggcgatggtagggttgatgggnangcggcagcacggcttctccggnagcatcgggctcgcgggcgggcgggcgcctctagccggggccatagggggcgggccgggagcggtacggccta

SEQ ID NO: 507836 - DNA, 602 bp, Homo sapiens
aactaccaccccatgcaatgtacatcgaagaggatatgggttatccaagtctacactctgaaactacagtgatatgtcattccaaaatgctagggtaaggggtggggggtatgagaggggggcgggtgcggggaggttaattttctcctaatacagaatatggaaatatttagatgagaagcagaatgactaaaatatcagggatccatttaatttttctctccaagaatagaaaacgtgtattataggcttccaaaataaaagaagtggatcaaaaatcgaaacacagaagagaagaaacaaatcctaagtgcgagtggtgctatggttacaatggattcagcacttcagacgcactggcatccaagggtcactggcttatttaagatgagctaagaagataaaaagccagacacagccttaactattggcattccaatgcagggctatatgtgctggtaaggcattaggaatggtcctatcactctactggaagcaccgggattttcttttctattattgaataagggggaaattcatataaatgacgtcaaggtatagcaaccactcccaagtgactactagttgccaatagaaatact

SEQ ID NO: 507837 - DNA, 145 bp, Homo sapiens
ctgagagaggagcaagaagttcttctgccagatggatcctggacttgctcctggacattcctgtcatcttagagatgctctggcacttgtgatgatggaattcacatcctttagaactgtgagaattaaattcccgttcagtata

SEQ ID NO: 507838 - DNA, 119 bp, Homo sapiens
aagccatgacatcccaaaaaaggccagtgaattactcctaggtcggcttttaaagaggggccaaagtgttttgtcaaaacacttgcttccattttcagagataaaaatcattcattcca

SEQ ID NO: 507839 - DNA, 592 bp, Homo sapiens
ggttttttttttccttaagagcgatatatttaatacattcacaagattcgaaatgaaaaacaaacattattcatgctacaggtttttaattttccttggacaacaccaaaaacacagtactcaaacggcatgtttttttttggttttttgggtttctttttgagatggaatcccactcctgtcgcccaggctggagcgcaatgggcgcgatcccggctcaccgcaacctccgcctcccgggttcaagagattcgcctgcctcacaggcgcccaccgccacacctggataattttggcttttggttttttttttggaaacgggtgtctcactctgtgttcgcccaggtttaaagttgcaggggcaccatctcagttcacgtgcaagctccgccttccaggttcatgccattctcctgggctcaggctctcgagtagctgggggactacaggggctcaccaccaggcccgcctaatttttctatttttcatagagaccgggggttccaccccgtggtacccggatggtctcgattccctgacctcgcgctcaaccgccatggcccccaaagtgctggcacccgggcatgacccg

SEQ ID NO: 507840 - DNA, 374 bp, Homo sapiens
tctgcgcttactgctattctatggtatacagcacatcagctagagaggcagaggatgacagcttacaatatgacgcaagagatcttcgagaatatgtggggtacctgcgagtaacccagtccttgtctatgaaaattcattatgagcaaatctcacctcacattaaactcctacatgatctaatttcactatattttctggccatcatttagggagtagtcgtcccttaagtacccttcggtatttcgaagttgccacgctcggtatcaaacaggggctgcttcactgtctgctctctgtcgggttagtgttctatcaagcctgtcagttgcaacttgtttgtttatttcttttttgttagaaatcgaattttg

SEQ ID NO: 507841 - DNA, 204 bp, Homo sapiens
gcctggagggatcgtaaatgaaggcgccactattcttccaccctttcaatgttatagctttaattggcaactgcgcagccttctaatctaggcttgtgctgtggtcttgtgcttctgttaagaaggttctggaagaagctcctctgacactttctaaccaagtgtagagccaattgctatttcgccgggttagagagaggtgag

SEQ ID NO: 507842 - DNA, 953 bp, Homo sapiens
  misc_feature (1)..(1): n is a, c, g, or t
  misc_feature (214)..(214): n is a, c, g, or t
  misc_feature (831)..(831): n is a, c, g, or t
ncccggcgtgggtgttggctttgagccccctggcccgtgcggtgccagccccgtttttatgtgggggatgtcttcccctgggccgcccgtgttgggagcgcccccttggcggtgtgccgagggtatcccccaaggtgtggatgttatctgaacgcggccctgtatttatagaccgttggttcgtggcacgccttgtcgcgtcttgtgcgaacancgcacacagtgctgcacggtctcgtccccgcaaccccccggttgggtgtgccttgtgctgccccgcggcgattagggtaccacgacgcctggcgcaccacgaaataggagggcgtggccccccgaaccccccggagttagcccacttggggccccgcccccgggtggttaccctcgtggtgaaaagaaaagatgtgtgcccgaaacatcgtgaataggcccgtttatgatgtttcccacgtgaggacaccccgggagccgggaagcccaatacccccccccggcgcccacctaggagagccaccagagtgattccagatgcgcccaccactgctgtgagcgccacccagagacctggcgccaggtgggttgggcgtgtgagtaatattggtgtgatattgttgaaaaaataacaccacgatcaccgggtggtacccccgggttgtttccagcttccattgacccctgaaagatagtgggatttcccatgaacccccagaggggggtcttgaggctgtgtgaaatcccactggcccatggaattctgatggagcgccgaccctccgcagggggtgtggacctgctttgggggaggtctttaaatctattgtgttaacntgtaccctcccgagcccccccgaagctatggatccattaaaattatgagaatttccaaaaaaaaggaaaaaaaactcgagcatcaacgtcggtccgaaagggtattgcccgcgtggtgggtg

SEQ ID NO: 507843 - DNA, 308 bp, Homo sapiens
cactattacttctttttctttcctcacaacagtgagtgcgcggtccacaaccatcagtggccctctccagattgacatgatctaggtgtgaccggcctctccctgctcttcagcaggttatcactctctccattcaatcctcgcaaagcagtcatttcaaaccttttccattcctcttaagtcttcaatgcattgggacttcagaaattacctatttactgataagactgagggcaggcgcttgtacgaagtgtctcctatttctgaaactttgtgttgttactccttcctgaatgcccctctgtctc

SEQ ID NO: 507844 - DNA, 521 bp, Homo sapiens
ccgcccccagcccacacaagatgtcagaggatttagcacagcagctggcaagctacaaagctcagctccagcacggtgaagctgcattatctggaaacggagaaaatgaagatttgctaaaattgaagaaagatttacaagaggttattgaactaaccaaagaccttctgtcaactcaaccttttgagacgcttgcaaggtcagacaggtttgcttctactcaacctactcattcatggaaagtacgagacaagtgtatggcagtctggagtgaagatggacagtgttatgaagcgcggattgaggccatagatgaagaacaaggcaccgctgcaatcacctttgctggatatggcaatgctgaagtgactccactggtgaacctcaagcctgtacaacaaggaacgaaggcaaaggaggacagtggctaccaacccatgtgagagacatgattggccagccagcgtgatatataaagacgaaagctttgaaactgctctaagaatagaagccttgtgccg

SEQ ID NO: 507845 - DNA, 674 bp, Homo sapiens
tgggccgtgcgcggcttgtcgggttgtcggcttggcggggtggcggctaccggggtgggggtgggccgggtgtgcttgttcgcgctcgtgtgtgtgtccgtgtccccctgcgggggtttaccccgggggggggcgacgcggtggtagccgttgggtggaggacgttggtgcgtggtgtgctgttggcgctgtgatggtgtgcgtcttttggcgtgccggcgagtggggctgtgttctgcccccctcggcaccgtgtgcaggctttcgctcgccagtgtgagggggccacggtgtttcgcggtaggaggtcaggggccgccttggatgcatggtgtgtgtctccctatggggctctctgctgctgtttctgcccgtgagtagggttcgtcttctcttgctccctctctttgctcatccctcgcccgcgtccagcctggtgtgtggcaggcgcggtacgttgcgccgccgaggtacgccgtgtgttcgcgggtatttgcacgagtggcgtcaagagttcggtcgcgtgggtggggatcacacgtggtcgcccccccgtgtgtctgcccccctcttgtttgcccccgctcgcgggtagtgccgccgcagtgccccccgtattggatggactgttggctgtttgtttaagaaaaaaagccacacgaaccaacataaca

SEQ ID NO: 507846 - DNA, 926 bp, Homo sapiens
gtgacctggatgtgagacatggagtcaaaggagaccattttggagctttaagatttaactgccctgctggatttcagacttgcatggggcctttaccacttcgttttggccaacttctcccacttgaaatgggtgtatttagccaatgcctgtacctccgttgtatctaggaagtaactaactagcctttgattttacaggctcataggtggaagggacttgccttgtttcagatgagactttggagtatggacttttgagttaatgctgaaatgagttaagactttgggggactgttgggaaggcatgattgatttttaaatgagaggacatgagatttgggaggggccaggagagaatgatatggtttggctgtgtccccatccaaatatcaccttaaattgtagctcccataattgtgggagggacctggtgggagataattgaatcataggggcagtttctcccatactgttctggtggtagtgaataagtctcacgagatctgatggtttaataaggggtttccccttttgcttggtctcattctctcttgtctgctgccatgtaagatgtgccttttgccttccaccatgattgtgaggcctcccagcacatggaactgtgagttcatttaaacctctttttctttcaaaaattacccagtctccgggtatggtctttatcagccagtgtggaaaaccagactaatataaccaatccttctaccttcttttattttctccagtgtggaaaaatgcctgatgaaaaggttgggggcctcaaaagattccaatcaagtgctggattcatactatttaccgcgctgtgaccctgaaaagcgttaacttgtaagccctgtttctccagtcaaagcggaaaaagccccccccggttgtaataatcccctttttggcggccaaacg

SEQ ID NO: 507847 - DNA, 246 bp, Homo sapiens
ctgactcagtctattagaccctgaaggcaggatactcttcagatatcgacgatatgcctttgattaatcattctaccctcttgccattccaagcattaccaactatgtggcacctcctgaaagagagaggccttcgaattctaggcagccacacttactaaaatccccaggtgctcatgaacggttcgcagctcgccccgctgagacgaacccacgttgtgagcggggatggtggggggtggtcca

SEQ ID NO: 507848 - DNA, 243 bp, Homo sapiens
cagatacgacgacactctgaacatgatcatattcaagatattttatgctgcagcttatgtggagacccgctctaactacccgaattctgcttcaaatgccaaactgatcatagaatggtcaacattgagtttttcagcaacttcttttatggtagataagaggatcagcttctgtgattgatctcccgaactggttcggttgtcaactgctgtatggccggtcatagcttatccttcatcttc

SEQ ID NO: 507849 - DNA, 227 bp, Homo sapiens
gaaaaagggccaaaaaaaatctatcccccctgaaggggggttaaaatttttggggaaaaaagaaaattggtttgtttttaggatttaggggaaagggccccacttcccgcaaatggatttgcaattatggggttgatgctttgggaaaaaaatggactttttcaagggaaactttcccttttaaaaagcctgttttggggtttccaataaatgatatgaacccccca

SEQ ID NO: 507850 - DNA, 282 bp, Homo sapiens
cacgagggctactgacacacacacagtagccattagttaaacacttcttactgaatatcaggaacatcccaactgtgcttaaccagaatccaacaagtcagcacacacgtgattttattgttattttgttgtaattacgtgcacttgtggtaattactttcacctgcagcatttggagtttataaataatgttaagggttctactacaaatagtgtcataaggccaattacctaccacacgaacaatcagcagatataattctggacgttagattccttata

SEQ ID NO: 507851 - DNA, 332 bp, Homo sapiens
  misc_feature (229)..(229): n is a, c, g, or t
  misc_feature (267)..(267): n is a, c, g, or t
  misc_feature (316)..(316): n is a, c, g, or t
aaagtcgctctgttacacaggctggagtgcagtggcatgatcttggctcactgcacctccgcttcccagattcaagtagttctcgtgcctcagcctcctgagtagctgggattacaggtatgtgccaccatgtctggctgatttttgtatttttagtagaggtggggtttcaccatgttggccaggctggtctcgaactcctgatctcaagtgatctgcctgccttggnctcccaaagtgctgggattacaggtgtgaccaccacgnccttgccttaagaattgttccaagaggaatctgggtgccacttgcaggngcccatttgaagtgca

SEQ ID NO: 507852 - DNA, 353 bp, Homo sapiens
ctcgatcttcattcctctgcgtcccagagggttaatgtagatcgagtatgtcacctctggctcctaaaggtctctgaagggccaggtgcggtggctcaagcctatcatcctagcactttgggaggccgaggtgggtggatcacctgaggtaaggagttcgagaccagcctggccaacaaggtgaaaccccatctctactaaaaacacaaaaattagccagacttggtggtgggcgcctgtaatcccagctactcaggaggctgaggtaggagaattgcttgaacccgggattgcagtgagccaagatcgcaccactacacttcagcctgggtgacagaatgagactccgtctt

SEQ ID NO: 507853 - DNA, 907 bp, Homo sapiens
ccgctggtacggccaggatttaggatgtatggaccctacgagcaggtcaaacgggacccggaagctgaaaggcgtcgcagagctgggagtgaccaagcgtgtgagcgcccgagggcccgcgggattccgctcttcatcccccttagaccttttctcgggacccctggccctgatcctccgtacccgccgccctcctcatgatctttttcccaggaagaagatacagcagcaaggacaatagacaaagctgaaactcctggcaagcaatgggaacgtagcataaaatgaagcgcaggaggcagaacgcggcgcggcctggacgaagtcggacccctggcccaggcggtccttctgacgaaaatgcatggagtaagcggctacaatggacaacggatccttaaacgatagtgccatcacaaaacccaaccaagctagcagagtgtgatggactctcaacccatgacttacctgcgacacacgtcacgtgcaccattcacgacgattctccaaagtcagcctggcacgaagttagccgcctgcccccatgtatcggagcacgctactcgacgggtgtcgcaacagaggccacgactggggcttgtgctgtgctgtccctttggtgatactgctgggaatacgtggctactcacacccttgcatcttgctgctacaagactgctttaccgaacctgtgtaccctcattctggaacttgattagacgtccgatcgtccttgtactcagtttaggctgccttgcgccgaccatacacgaaccactacccccttgtccgctccgtgcatgcgacacttccgtacgctttttccccgaggctgcgccccattgtggtgcctgtgtcgtggtgactcgtttcacccgacgtcgcttgtcctctctgcgcccccccc

SEQ ID NO: 507854 - DNA, 144 bp, Homo sapiens
agattatgttgtgcgacctatcccttcgcctctatcttgcaaactctctggatcctgctgctgctgcaggctggggatagagcctcctcaaatccaaatgctaccagctccagctcccaggatccagagagtttgcaagacaga

SEQ ID NO: 507855 - DNA, 690 bp, Homo sapiens
  misc_feature (29)..(29): n is a, c, g, or t
  misc_feature (35)..(35): n is a, c, g, or t
  misc_feature (61)..(61): n is a, c, g, or t
  misc_feature (64)..(64): n is a, c, g, or t
  misc_feature (68)..(68): n is a, c, g, or t
  misc_feature (84)..(85): n is a, c, g, or t
  misc_feature (98)..(99): n is a, c, g, or t
  misc_feature (108)..(108): n is a, c, g, or t
  misc_feature (115)..(115): n is a, c, g, or t
  misc_feature (137)..(137): n is a, c, g, or t
  misc_feature (143)..(143): n is a, c, g, or t
  misc_feature (152)..(152): n is a, c, g, or t
  misc_feature (163)..(163): n is a, c, g, or t
  misc_feature (211)..(211): n is a, c, g, or t
  misc_feature (216)..(216): n is a, c, g, or t
  misc_feature (222)..(222): n is a, c, g, or t
  misc_feature (224)..(224): n is a, c, g, or t
  misc_feature (228)..(229): n is a, c, g, or t
ctcataaagaaaaatagatatggttaggntaatgnccaggaaaatattttataaaagtctncanagtnacacgataggttcatnntgattgtgcaacnntgagctaanagctccnctttttggttgtggttggtgtngtggtngttttcagncagggtgtctntctcccaccccacccttgccccacctgcaatctctctctctctgtctngctcncaccangncagnngtacagtatgcagtcatggctcactgtagccttgacctcccgggctgaagtgatcctcctgcctcggcctcccaggtagctgagactgcagatgtgggccaccatgccctgctgattttttgtatggagttagatggagtttcaccattttgcccatgttcaccatgttgctcatgttgctggtcttgaactcttggctcaagcgagctgcccacctcacgcctgtaatcccaacactttgagaggccgaggcgggtggatcacctgaggtcaggagttcgagaccagcctggccaacatggcgaaaccccatctctactaaaaataaataaattagctgggagtggtggcgggcacctgtagtcccagctacttgggaggctgaggcgggagaattgcttgacccgggaggtggaggttgcagtgagctgagattgcaccattgcactccagcctgggtg

SEQ ID NO: 507856 - DNA, 165 bp, Homo sapiens
  misc_feature (72)..(72): n is a, c, g, or t
cgtggacgaatgtgtctggtgatgggattgtcactagcatgtgctctattcaatacgttactggctccacanctctatgctgctctgggggccatttgtttcaccctgttcctggctcacgacaactgcgctgcagtgagctacgatagtgccacggcactccaa

SEQ ID NO: 507857 - DNA, 110 bp, Homo sapiens
gagtctaagatccctgctgctcctcttaattctgctgctctctctccagcgtgaatctgctctgtagggcagagttctagagacatgcatgttactgatggtttttatgt

SEQ ID NO: 507858 - DNA, 325 bp, Homo sapiens
cacaccacctgagtccgtttataagcatttgcggtggacgatggaggggcccgactcgtcgtactcctgcttgctaatccacatgagcataacagattgcagtaaggcctggagggagccaccgatccacaccaagtacttggactctagggtggcgatgatcctgatcttcatggtgctgggcgtgcaatcccagcaccattggaggccactgtgggcaatgcacctatagttggtggtcacagaccacaccggccaatacggggaaaggtctttgcggctgtacacgctacacttaatgatggatttgagggtggtctcgtgg

SEQ ID NO: 507859 - DNA, 150 bp, Homo sapiens
  misc_feature (13)..(13): n is a, c, g, or t
  misc_feature (68)..(68): n is a, c, g, or t
gattttaaatgtnctcatcataaaaaagggtaagtaaggtgacagatatgttaattagcttgattttnatcatgtcatgatgcaaatatatttaaaaaacacaatataccccataaatatataccattatttctcaatttaaaataaaaa

SEQ ID NO: 507860 - DNA, 253 bp, Homo sapiens
  misc_feature (9)..(9): n is a, c, g, or t
ctataccanggcttgttcgtgggccctgcatcaccactgacctgtgtccaatcctgtgctgccatcacactaatttaatcaccacaactctgtgctatactttactatctaagtaaggttagcacccatcatcttttaaaacaattttagaattcttgcctactattctttcaagtgaactttatgaccatgttgacaaatctcaaaataaaactattctaaaagaaaaaagaaaactattttaatatgttgg

SEQ ID NO: 507861 - DNA, 224 bp, Homo sapiens
ggccggcccgctagaggtggcatatatattgtacgtatatatgtcaagaaatgagtggtagtactataccaactaaaagatgacatgtaagaaatataacaagaagaaacataacatagttctactaggggctcagcacaacacaccccgtcatataaaactaagcacactagaaattaaactaagcaactaatccggtagacactgcattagaaccaccatga

SEQ ID NO: 507862 - DNA, 167 bp, Homo sapiens
cacgagggacatttcagaacctactctgaattttcattcagctctcatattaataccagaactcattgtgatggcgaaagtggggatcaattttagaaacttgagtcatttgaacatctgtctcgcgtggctaaatgattctgccaactcagcgtgcctgatgccta

SEQ ID NO: 507863 - DNA, 273 bp, Homo sapiens
ggcctacagagacccaagggatgcccagaatagggccaacgagtagactgtcctgcagctaagagtcagttcctcgaggcagagtgctgtagagcagcacagacatagttggtcaccagatgacgcaagtagatacagggcgcgcattgtgggtagcgagtgagagagagtctgaaccacaccgcaggctatggtggggctatagctgctctcactgatgatgatgggacagctcagcatccgtaatcacaggagcatatgccttaaactctc

SEQ ID NO: 507864 - DNA, 249 bp, Homo sapiens
gaaaataacgggtgggtttcggttccaaataaggcccctatggatagtaaaccttgagaagcttttggggtcagatttctggaccatcatgtgatgaagctgccatttttaaaaatcaaatgatcctttatcttttcagaaattagtcaattttataaagaaaccaatattgaaattttgctctattttctgatcaggaaactgattgtaaagctttttgccaactaataaatgtcttggtaattgcta

SEQ ID NO: 507865 - DNA, 836 bp, Homo sapiens
ggccacggcatggagaatggctccgcttctgttgcagctggcggtgctcggcgcggcgctggcggccgcagccctcgtactgatttccatcgttgcatttacaactgctacaaaaatgccagcactccatcgacatgaacgaagagaaattcttcttaaatgccaaaggccagaaagaaactttacccagcatatgggactcacctaccaaacaactttctgtcgttgtgccttcatacaatgaagaaaaacggttgcctgtgatgatcggatgaagctctgagctatctagagaagagacagaaccgagatcctgcgtccacttactgaccgctgatcagtacgtcgatgatggcagtaccagatcagacctcaaagggtagcttcacactattgccagacactattggcacacgtgaccacagtacgctgtgataacccctggttgaagaatcgtggacaaaggtgcgacgcgattagcactgggtatatgcaggttctccgacggcagaccaagatccttatggcacactgctgaatggaggccacaaacgtttccagatgttcggagaacacttagacaaaggggctaccctgattctaacagcccttgggcctaactcaacatggctatagcattgtggatctcgaagctccattccagcagcacagaatcacttgctcagcgttctttacttccggtactcttctcatgtatgggttcccattttcctgctgtggtcctaagtgtcaaggcaactcagggacacacagtgctggtccacaacttatttactcgcaaagcagcttcacggcaccttcaacactctagacgt

SEQ ID NO: 507866 - DNA, 366 bp, Homo sapiens
tgcaggaagggtgaaaacccacgaagctgaagccctacacgctgtcgaggaaaacgcaacaccatggcgggtgcctcacgacaagagacacttacaatagaatcaaaactgattcaagtcatacactgaaaggacaaacggaaaaaggaaagagatcacatatgatccgaaacaatcgcaataagagtaagatgctgaccttctgctggccctccaccccgagatacctgagggtgagctggtgctcctgcacagggacgtcctcaacattaagcgcaccccgcctgttgcacacttctaatcctgaggtccaccaccaaactctggcttagcattgagcctgggaagtgcccagatggtgacagg

SEQ ID NO: 507867 - DNA, 142 bp, Homo sapiens
aatggggtcacacatcctcacggtagtccaatagagcaaccatgcatctggatacatgttttcaccaataaagaactggtagtattgaaattagcaaggatgtgctatgatttagttctgcagcccctgtcactaaaaggtt

SEQ ID NO: 507868 - DNA, 871 bp, Homo sapiens
catgcagaaagcttcaaattgatagaaacaataatgttctatacgagtgaccggattatggcgtttggttgggccgtacacttcgtttattctgcggtgaagtggaggcttataaggttaaaacggaaggaatctaacttagtgtccaccagtttatacagaactcacagtacctatgacttcttttaaactaggatctgttagcaaaagaatgtctgtttcaggagagatgaccgtgtacaataccgtgttggtgaaaaaggaattcagacttatgtaaattgatgaagcttgtttaatgcgtgtgctcagatgtctatttatcagcacaatattacacgaggatgaactgttgatggcagtattgaatagatttatcctgtaactatacacttgggtctggaacaagatgaaaaagcgaaggataagaataaaactaattagtgtgggggtgggcaagaggacgcttgatgaaaaggttggaaatagagtgacggagagtggagagggcggtacctttagtaggtaactgcattaactggaggcagataactggttgggccatagcgagagagacggtggggcaagaaaagagcgggcgcgaggtttttgggagcatgctgataaagaacgagtcgggggggtgaacttcacgtaagtttttctggaggaataattgccctggtgaggtgaatcgctgggcggagtcatctgtggggtaacatttcacggtgggggtgcatactgagtgatagacgaaatgaagaaaaagcccgggggtgtcccgggtaaaacaaccgttggacaagtgctggacagcatgagtatctatgacgatattgatgtggagttgtggcaaataaggaaggat

SEQ ID NO: 507869 - DNA, 367 bp, Homo sapiens
atcagcagataaagcaagaatagctgagtcactgactgccacagacaccttataaattatcttccctccctttcattgtttgtttcctttcctcacacctctccagcccctgtggcaccccccagcagtcaggacacatcccttgactaattacgttaatcttattatacattaaagccgagtctcagccctcaacaacctccgtagctgccagtgtaagacttaactcctaggctctcttgggtctcttcttctcctcgttccttctgtcactccaggtagaagctagatcctctgcaattctgctttcaacagccatggttcagaccggtgtttctcaagttttttttaatgccctttctggtgt

SEQ ID NO: 507870 - DNA, 719 bp, Homo sapiens
gtcgcccaggctgaactcctaccaggtcccggcccgccccgggccgcgaggacaccggaggcacccccgggggtggggagcggagccgcgggtcagctctgcgagcgccccgcgctggcctgtccggccgacagcgccgccacgtcggacccattctatctctatcaccaagctcatgcaacgcgcgaatccatcaccgctaccccgtccactctcagttcgaccgaatgcgtgcgcaacgatacccacaccccaagcctccgcctcaacccttcccctcccacacacactccatatcctctcctcagtcatccctctcctcccgccccaccatcctactcccctcgtccccccccacacacctccagcctatccacccattatccctatccaaacacctccagccccttactatcacgccacccacatctcttccaccacacaacatctttcctacaataaccgacgtctgctccctatcctatcacattcttttttaatctgttgctcaactcttctattaccttccaccccacaacactaaccacctcaccacacacgacacaccccacaaatccatccacgcaaccacacaaaccttcgccaacacttccatatcttttactcctccgcactcactaccctcctctcattaattccttataacccttatcccagctctatctcattatatacacctacctttatacacacactta

SEQ ID NO: 507871 - DNA, 1413 bp, Homo sapiens
acccacgtcgttcgcaagctctgactgagcagggacatgcgcactgtgtgggtgggacccagactgtctgacctggagggtttgcctggggacctctcccacccgtatgcccctaccagagcttgcgtagccatcatgagcgcctggcttctccggcctcccctcaccgcagagtttctggtcctgatgctcccgctcctgtgctggcacttctgtgcgtacagcaagagccagggcgacacatggactcgagccacccatcaaccggttggcatgcctaaacgtgttttgctgtgctccctgttcatgccgagccgttcgcgctagcccaacggctctggcttgacgacaccagattggcgactaggctactctagacgcgacgcattgccgagtttagcccgctcgctacttatgggcgcgctagcgctagtctttttcgttccgttgctctaggctcttctaggcttgtcctttgcttttctcgctcaggcatcgcgtatcgcccgcttaggggatgcggacactggggtggcgagttgcgccaccgtggcgacactatttgccaagtctacctatcgttcttatagcttcactttcggctaatcccctccaaccctctgtaccccggtcccagtcttccctcctttgtgccacctctctactgtttgccccatcttatcttggcttgggacccttttgagccgccttagtagaccgtagcgaggttgcgtgcggggcggagctacacagacgcacatgagccgagaaggtctcgtgggggacggaagtcttgggttggtccgaggccctgcatgcattgggtgccccactttccttgttaggcccccattaaccccgtctctttccatttcgggcttttttcaattatgaccccctcgatcgtaagagaccactaatggcagaagactttagaaccggcatgtcccagccaaccgaaacagcgggttcgcttattttacacggacatagtctcgcaaaccgtgcttgcgcgcccaacacgcgcactcggcggacaccattggtgcacccgggcttcccggtgcacttaagacacccaggcggtcaagagcggtcaaaacaaacaagaaaacagcaagaaccagaacaaccacaccagccacccgccagcaaccacaaccaacacaacgaagcgacagacacgcagcacaccaacagacgcgacgagaacacagaacaacaacacgcagaggacaggtgaacacacaccgcgcgaccgacacgactccgctacgagcatcacgacagatcaaggcggcggcgacacggggcacacgccagtcaggaaagggccacaaacccgctagcgaggccgtgaggcagtaaaatatgcccagagatgcaagatgacagaaatgacaaggggggaac

SEQ ID NO: 507872 - DNA, 362 bp, Homo sapiens
cctcctagctcccgagtagctgggaccacaggtgcacacgccaccacgccggggtcattcttgggtattttttgggggagatggggttttgggcacattcacccaaacttacactgcagaaggtaagtaaccggcttgaggtcacccagcaggctgggtgacagagtgaggttggggcagctcggggtgactcccagcggccaggccacctctgatgagatcacagcggctccccaggcacggggcttttcgttttctctcggcctctactaaccctactccatcctctggctctgaacagaagcaacgactccctcggtgctcccttggacctctgtggccccaggctcaggggtaccgag

SEQ ID NO: 507873 - DNA, 329 bp, Homo sapiens
tgtcccgaatgcggcaagggatttagtcgtagagcagatcttaaaattcactgtaggatccacacaggcgagaagccatacaaatgtgatgagtgtgggaagatcttcaggcaggcctcaaatcttttggcccatcagagagtccgcagtggagaaaaaccattcaaatgtgaagaatgtgggaagagtttcggtcggagtgcacatcttcaagcccatcaaaaagtccatacaggcgaaaagccatacaaatgtccggaatgtgggaaggcctttggtgatagctcttccttaattcaacatatgaggattcacaccggtgaaaagcc

SEQ ID NO: 507874 - DNA, 309 bp, Homo sapiens
ggggatgattgtgttgttgtgctgtgttcgttgtgtgttggcctgggtggttgtgggtggcgtgtggtggtttcgggtgtgggggtgcgtggttctgtgcgggcgttgcgtggccggttgtggtcgccgggggtcgtgtgtcgcgtgtcgcggggtgcttgcgttttgtgtttgcagcttggggctgtatcgcagtcggctgtggtggttttgggttcgcgctgtgtgcgtccttgtcgtcagggggccggggcgtccccatggtccccgtggactccccgttgcttggtgtggctaagggggggtact

SEQ ID NO: 507875 - DNA, 807 bp, Homo sapiens
  misc_feature (95)..(95): n is a, c, g, or t
gagtaaaatgctctcctagccaggagggtaaatgagatgatctaaagtccagttgcggtggtagtattggtatcatgttatgagtaaggaatccntagctcatataatggttctatttcaaagaggagttgtagctctccagagagataatgtgcgtagtacccagctctacaggtcctttaaccggtggagtgggaccgtctgtccttcttcctaggtagtgtcgacattagtagagccacgttctagaatttaagatcaggaagattgtgaaagtaatattattgggtggtcttctcatgtgagggtactgtattgaatcgagatcttgctaagcaaataagtgttgatatcgttgtgtctgattatgtacctccttaggaggagaagctaactcaaactataaggataaaactcactagttttgctcaactgctgtattcagcgagtagacagcaccgatgtacacatataacacggacattttacaaaatgagtctagcaaatctcattaggcaacatctccttaggaatactccagtgctgagtgccagtttaaatggtatagaacaagtacatctaatgagatgggacgcagttttctttgagtccgtcagtatcgtagagtgacaaactgtactaataagaagatgaatacgaaaagacatggacctatcgattagagagtatgaatcttgggaaaagataagaagattagaataaggagggaggaaggaagaagtagtcggtggtcaggtaatgtcccactatgcaaggttacagattcctggatatatgaggtgtaag

SEQ ID NO: 507876 - DNA, 169 bp, Homo sapiens
aggtcaccggttgaggcctggctggaaaagagccaggacagtgtagccgtgatgtggtcattgtcctgatgccagccttgaagatgcaaaaaaagagggaccatatgatgtggtggttctaccagagaggtaatctgaggcgcacatgaatttatcgtgagtcgtgctg

SEQ ID NO: 507877 - DNA, 111 bp, Homo sapiens
cactttgcacaacttgtactttgcctcttccactgtgatgcggtgaacagcaaaacggcccttggtgtcatagaccaggcggaaatgttcacctgtcttcttgatgctgga

SEQ ID NO: 507878 - DNA, 130 bp, Homo sapiens
tagtcggcggtcccttcataccattcattccatgcagtccatctttcctttccattccattcctttccaatcccattccattcccattccattccattccattccattccattccattccactctggttt

SEQ ID NO: 507879 - DNA, 424 bp, Homo sapiens
aatgaattgaaaacccaaatcgtagaatctgaatatgctctagagtattcctaagcattcactattacatccgatgggtaccttggcgtgccactgctgtcccatcaccctgacgctgacatcagtcccagactcccaatacctagtccatgctcatagactgtacatttcctgaactctgccagcaatgggcagttctgggcactggcctagagattaaacctcttgcttcttaagagcaatcattgccttgctccaacactgccatgaataacctgctgggttagattctctttcacactctgttgggcgacatgaatacacatcagcagcaaaaaattaacacaaactttcaaaatttaacagaatttgccatttatcaaggcatggaagggtgagaaccactggcctaggcacaccagtg

SEQ ID NO: 507880 - DNA, 304 bp, Homo sapiens
atattggtgacgaaagtgaatcagagagatgaaacaggaaatctctgtgttagtaacacatgagtgtcagtaggaagtaggaagagatcaagctagaaatatgacttgtgactattacatcagacatttgaggctcaaggggaagaggagtgtgtatgtaattcaccaggccatggggctcactggaaagttctgagtgaaagaggctttaggaagattaatctggtagtagtgtgtagtggaagcaggccaagtcactaaaagtcaattccctgcaagccagcttgatctcgtccaaccatat

SEQ ID NO: 507881 - DNA, 128 bp, Homo sapiens
ggccagtagcagcgtccagtatcacgcgtacgtccgtccagcgttgcgacctgccaagtgggccgttttaggttaaaccgggctaagtaaacgcatagtcgggttttaacccggttggccccacaatg

SEQ ID NO: 507882 - DNA, 679 bp, Homo sapiens
ggacggcggcgcgtgtgcccgggtagcacccccgccctgcaccagcccccgtccgaacccagcgggccctcacccatcacccggccggcgagcatcccgggtcccggtccgtcccgcgtgtctggcttgcctcgtccggcttttcccgagcgccgtcctgcagaaacatcaccagaagaccaagcaaactatacatcttggagacacatataagcattaaacaagacaacaataacaagtcagcatcgacaacacttaaagacaccatagatcaacacatcacatcacatacaatagaatggaactacaaccgaagtacataaaaacatatcacacgatgaattaatatatatataacacgttaacacaaaaaacaaacagaacataaaatgagtagccaagacagtgcaaatgcgataccattagaagaggaacatgaaaacccacgagcagagacacactcatcccatcacatggacttggacacagatagatatcccataagaaaaccaccaagacaaggataacgtgagtgagacacaaaaggagccaccaaaatcaaaaggatgagaaacatcagatgaaaaaaggaaaaaaacatacaaagaaagatgatagatagtagtaggccaaccagaaaaaaaaaaacaagaacacaaactaataaacagagatcaac

SEQ ID NO: 507883 - DNA, 1380 bp, Homo sapiens
ctgaagatccgggaaaactccgtagtgacgctggtttggaatcagacaccgcaactgaaaaaaggggcagacactgcgaaagcaaaccgaggagcaacagagaaaaaaagcagaagcctaaaatctgatcaagactgaagagatagcagcaagaggaccgaaactgttttccccaaagctaaacaagttaaaaagaaagcagtagccttctgcaagttgcacatgcaattcgtcctcaaatccgaaaaaggcaacagaagagaaagaggagccatcatcgaaacatgcacatttctcctcaaaacccaaaagtttgagaaagaaacaaggagcccatatgaaacaggaaagtacgtttctatcgtcacaacacccaaaacacagtgcacaaacaaatgcaggcagccgttctgcagcgcacagacaatcagcatgcgtcctcaagccccaaaagcaagcattgacagcaagagcaaacaggcacaatgaagtggcagcaacaatcagcagcagcaaaagccccgaaactagcacagcaatggcatttatcctcatcctgtaaccgggcactagtaaaccaccaaggtggacagcgtgccgaatggccacgaaacagtaaaacaagttagcagcattcagcagccagtgcacacatcaacctgggtgcgcacacgaagacaaacagcacagggcggcgtataaccgtacgtaaaatgtttagcccgcattaattccttggcacagccacagaactaatataaaacacttttctcatcccaacaacgggcccctgagggccaggatagacaccctattcccatgaattgatacccttagttaaccaacgagcaaaatggacccactcccccaataccaatggatatataaacaaggccgcgggcaaagggacacttttcacgtaggccaagaagggcagtagtgacacaggggaaaactaggggcacaggaacacttccatacacaataatggccaacaataccccaatatgggaaatcggacggcacaaacggaacacctcgcgggcgacgaacgcatggccaaacgacaccagtggcacgacctccacagagcacccgagtgaaccccccatcaaacgagaaaccatagggggacacataagcaccccccatagaacaagaaaacacacacataggagacaagaccaaaaggacaaaggaaaacgaaaacgaatcacagaagagaagacaacaacacaagaaacaaggaagtggacaaacagagagacctatggacacaaacaaaggacggagaccacacgacataaaaaacaaggcaccaaaatacagacacaacgaaccacaaagcagaatcaggagcgcaaacacccagacgcacgg

SEQ ID NO: 507884 - DNA, 310 bp, Homo sapiens
  misc_feature (51)..(51): n is a, c, g, or t
  misc_feature (69)..(70): n is a, c, g, or t
  misc_feature (109)..(109): n is a, c, g, or t
  misc_feature (161)..(161): n is a, c, g, or t
  misc_feature (186)..(186): n is a, c, g, or t
  misc_feature (191)..(191): n is a, c, g, or t
ctgtcgtccatcagtgaatgttattgaaggacaaggacagacaacaaatcnggaaaatgggttctctcnnaacacattgcaaagccacagaggctagtgcaggatgggngggcatcaggtcatcagatgtgggtccaatgccagaatattctgtgctcccnaaggccacttggtcagagtgtgtgnttgcngaggtggctctaaaagctcagcagtggaggcagtggttcgccatactcagggtgaactcacatcctctgtgtctgaagtatacagcagaggcttgaagggctgatgggagaagactgcg

SEQ ID NO: 507885 - DNA, 1233 bp, Homo sapiens
  misc_feature (1233)..(1233): n is a, c, g, or t
gcccccggctcgtctccatttgaagccccgtgactcttcactgctggtcaatcagagacccgtgctctccctagtgccggccaatgggaggtgcgctcgggctgcttccggctccgctgctccgcctcgcacccctcccaaggtctccccgcgactggcgggacgcatggggcgggcgtcgtgccgcggtgactgcgcagcgggcctggagtccaataatggggcgggctcggtgctgatggacgtgtgctggtggccagtggtagaggctgctggatcgcacattcccgctcaggtggagagaagtgataactatggcgaacgaccataggatatacctgattcaagctgactgcgtgatcggagggagcgtcgggggtgagggacagacactggtgtacatgttacccgatctactccagaggatcgctatgcaagttcagctcttgtcatcattgcgcacatcaacgacatgcgtacttctcagcacttatggagccagtaagagcatcgaatgcgccatggaagcacatacaaagcatgcgcgagtgatggggaacaacaaaggccgcgtcctagagaaactagttcacacgcatcggattcatcagacaggagcgtaggttacacgagcgcgttgccactaggcgctaatcgaatgcctggggtcatgacggaaccatccaccgatacatgaccacaaggcgctttctgagagagaagataccgggaaacttgggagtccacgccaacctttgtggacgtcagatcccgtcatcccttgtcaggaccggttcgtaaatacgcagttgaatactccagggcggaccaaaagttgttgacattgccagagaagtcgacgtatgccttcatccaaggtttgacacacaggcctaacttgggcgcaacaaccagaagggcatggcttacctgtgcgacactgcttgggaagcgttcgccatagattgcggttccgagacaagaacccacagcgtcagtagggggccaaggcaaggtccatccgcgaagtgaaagatatatgcgcagtatacccccaagaaaccttgggggacccccataaagaaggctccacaaggcgtccccaagggtctggagcagtaaaggccaatccgagaaaccgcgccaagaggaaccgcggcaacggggagagaagttccaagtgcgggagtcaaaggaaaccaccccccgggaacaccagttggcgttggatgn

SEQ ID NO: 507886 - DNA, 304 bp, Homo sapiens
gtaggagaatcacctgaacccaggaagtcaaggctgcagcagtgagctgtgactgcatcactgcactccagcctgggcaacagagcgagaccctgtctccaaaaaaaaaaaaagggagaaaggaaggaaaaaaggttcccttttaaattaacaaaactggccggcctgggggcctaaggtttgaaacccaagcttttgggaaggttgggaagggggatccccttgagatagggggttaaaaacaaccttgccaaattggggaaaccccattttccattaaaaaaaaaaattttacccggctttg

SEQ ID NO: 507887 - DNA, 651 bp, Homo sapiens
ggtgttgggccggaggaaatgcgggaagactcatctggagcgtgtggatttgagccgccgcgaagtcgattaaccctagatctctgaaatgcatcgcgatatcctgtccattggactgtaaggtttatgtaggcaatcttggaaacaatggctaatccagatcggcagattggtaacgtggctttaggctactgatgtgaccactctcgaagatgtgtgggtttgctcagaaaccgcgatcccggcttatgcttctttgtatgaattttgaagatcccccgcagatgactagctgatgcacgtccgagagctatgatggaacgaacactatgtggctgccgtgtaagagtgtgaaactgtcgaactggtgactgacaagaacgtagaacatcgtggcccatgctccctcttggggtcgtcggcctcgatgatgattactcgtaggaggagtcctcgcacgctcgtcgcagatctccaagaaggggaagcttctctcgcaagcccggatgcaggtcccctttctagagataggagaacgagagagatcggctgtcgtctgggagatgcaatcgccattgccgtcccgatccttctctattgtctcgaagtcgatctaggtccaaatgtaaacggagctttaacacaggttgc

SEQ ID NO: 507888 - DNA, 309 bp, Homo sapiens
tgctctagaggatcggacagatccctaaccagccctcaaagtcgcaagtcaagcatcacgcttccgtaaggggtcaggataaaattcaaatgatttggctgaatacacaagtctcttaatgaaagaggtgctgtcggccgggcgcagtggctcaggcctgtaaccccagcacttggggaggccgaggcaggcagatcacgaggctcaggagaatcgagaccagtccgggactaacagcggtgaaaccccggtctctactaaaaacaatacaaacaaatgtagccggggcgtggtggcggggtgcctgta

SEQ ID NO: 507889 - DNA, 121 bp, Homo sapiens
aacttttttaaaattcataatcttcaattttgtttgccacgacgtggttgacagagtgtcgcgaaaaaaaaaactaataaagtggcacctgcatgctgtggaggcccttaccgttcagaca

SEQ ID NO: 507890 - DNA, 2300 bp, Homo sapiens
  misc_feature (19)..(21): n is a, c, g, or t
  misc_feature (23)..(23): n is a, c, g, or t
  misc_feature (27)..(28): n is a, c, g, or t
  misc_feature (31)..(32): n is a, c, g, or t
  misc_feature (39)..(40): n is a, c, g, or t
  misc_feature (44)..(44): n is a, c, g, or t
  misc_feature (55)..(55): n is a, c, g, or t
  misc_feature (142)..(142): n is a, c, g, or t
  misc_feature (148)..(148): n is a, c, g, or t
  misc_feature (183)..(183): n is a, c, g, or t
  misc_feature (286)..(286): n is a, c, g, or t
  misc_feature (296)..(296): n is a, c, g, or t
  misc_feature (311)..(311): n is a, c, g, or t
  misc_feature (323)..(323): n is a, c, g, or t
agcgggccaccctggtgcnnntnctgnnccnngaatcgnntggntgacaaccagngcttttcccagccccagctaagagagggggctttagggcaagagcacctcagccctgcaatggggggatcttttttttttttttttnttgganacaggctggagtgcagtggtgcgatctcggttcgntgcaacctctgcttcccaggttcaagtgattctcctgcctcagcctcccaagtagctgggattacaggcacccaccaccacgctcggctaattttggtatttnagtagagacngggtttcactatgtnggccaggctgtncttgaactcctgacctcaggtgatccgcccaccttggcctcccaaagtgctgggattacaggcatgagataccccgccgggccaaggggattttgacgccacttcctgagtgaagcgcttgcatggggatgggaagaagcacccccaaccttctagtccgctccgagcagggcctggagcattggagacattggttagtgtaataggcagagcctgagtgaggccggggggcttctccaacagagaaaagacattggctttgggtaccatgctgagggagggggttaggcctggtgggggcccattcaaaggaggccgggctcggtggcttaggcctgtcatcccagcactttgggagaccaaggtgggaggatagcttgaggccaagatagcaagaccaccctggtcaacatagcaagaccctgcctctacaagaaaataacgaaagaggccccagggaaggaagccagccaggagcagcctggagcagaggcaggagcctgaggcctgagccatggcatccagggacagcctggtggccgagagagcttgtggctgtcactataagggaagaggagctatggaaattggaagtgcagggtggcctgtgtgctaggagtgggggtgcaggcctaggtgtgtttatgcacacgtttgtgcatgtacgtgtgagcgtggatgtgttcctatgcattagagtgtgtgcgtgcacgtgtgcagagcccacacctgagatatgggactggctcttggagtattttgagttctcagtagcagtcttgttgtcaggccttgagtgcagaaatgattaggtgagtgagggcaggactcgaatgcagaccctggctccaggggagagggtggggcgtctctggtaggacggcctcaccccacttgtcagaactactctggaggggggcaaaggtgtcaggaacagtttgagcagttctggctcagggtcactcatgaggttgctgttgtctgaaatcttagctaaggattggaggatgcacttctaagtgaggcctggctgtaggcaggaggcctcagtccttccccaggtgggccaacccacagggctgcttgagtgtcttcacaatatggcgctcggcttccccccagagcaagagattcaagggcccagggtaaaagccaacgtgttatttttatccctagcctcagaattcacacgccgttgcctccaccatgctctggtttgatacagcccagctctgattggaaggggctggggctgcccgtgctgactcttcaaaggcatcccatcctgcagatggtgttcacagggagagtttgtgggggccggcactccctcatctactggggctcattctggaagaaggtccagaagaattggagacccctgcccctcacccaaactttggaggtggcagggtgaacagcaggccaagttcaggtcccaagacaggccaaggccagtgcggtttcccttccactgcctcagtttacctgtattcagaagacagtctaggaagagttgagcagagttccctctaaaagagtagggagctgataacagtcccaagccctcctctttctctatgccaaaatcatttccgttatcctgagatgggggtgagtggatggatggtgtactgaggggcctctgccctgcccagagcccccaccatcgtagtgggggcaggggacttcctgcccacaaccccctccaaccctcacctggcgtgcccgggtcaccagcagcagcagcggcgttccatcgctcccaagatctgggtgaaggggagaacctgccatcttatccctacccccccggggccctcaagcttattttcttgttgaagaaacacaaaaccctcgagattcatgtactgtatgttggagaaaaaaaattacctaatgttcccccaaaaaagacagtatattttgtactttgtaaagtgttaattaaaatgaaaaaaaaaaaacaatgaaaaa

SEQ ID NO: 507891 - DNA, 1989 bp, Homo sapiens
  misc_feature (19)..(21): n is a, c, g, or t
  misc_feature (23)..(23): n is a, c, g, or t
  misc_feature (27)..(28): n is a, c, g, or t
  misc_feature (31)..(32): n is a, c, g, or t
  misc_feature (39)..(40): n is a, c, g, or t
  misc_feature (44)..(44): n is a, c, g, or t
  misc_feature (55)..(55): n is a, c, g, or t
  misc_feature (142)..(142): n is a, c, g, or t
  misc_feature (148)..(148): n is a, c, g, or t
  misc_feature (183)..(183): n is a, c, g, or t
  misc_feature (286)..(286): n is a, c, g, or t
  misc_feature (296)..(296): n is a, c, g, or t
  misc_feature (311)..(311): n is a, c, g, or t
  misc_feature (323)..(323): n is a, c, g, or t
agcgggccaccctggtgcnnntnctgnnccnngaatcgnntggntgacaaccagngcttttcccagccccagctaagagagggggctttagggcaagagcacctcagccctgcaatggggggatcttttttttttttttttnttgganacaggctggagtgcagtggtgcgatctcggttcgntgcaacctctgcttcccaggttcaagtgattctcctgcctcagcctcccaagtagctgggattacaggcacccaccaccacgctcggctaattttggtatttnagtagagacngggtttcactatgtnggccaggctgtncttgaactcctgacctcaggtgatccgcccacccagcactttgggagaccaaggtgggaggatagcttgaggccaagatagcaagaccaccctggtcaacatagcaagaccctgcctctacaagaaaataacgaaagaggccccagggaaggaagccagccaggagcagcctggagcagaggcaggagcctgaggcctgagccatggcatccagggacagcctggtggccgagagagcttgtggctgtcactataagggaagaggagctatggaaattggaagtgcagggtggcctgtgtgctaggagtgggggtgcaggcctaggtgtgtttatgcacacgtttgtgcatgtacgtgtgagcgtggatgtgttcctatgcattagagtgtgtgcgtgcacgtgtgcagagcccacacctgagatatgggactggctcttggagtattttgagttctcagtagcagtcttgttgtcaggccttgagtgcagaaatgattaggtgagtgagggcaggactcgaatgcagaccctggctccaggggagagggtggggcgtctctggtaggacggcctcaccccacttgtcagaactactctggaggggggcaaaggtgtcaggaacagtttgagcagttctggctcagggtcactcatgaggttgctgttgtctgaaatcttagctaaggattggaggatgcacttctaagtgaggcctggctgtaggcaggaggcctcagtccttccccaggtgggccaacccacagggctgcttgagtgtcttcacaatatggcgctcggcttccccccagagcaagagattcaagggcccagggtaaaagccaacgtgttatttttatccctagcctcagaattcacacgccgttgcctccaccatgctctggtttgatacagcccagctctgattggaaggggctggggctgcccgtgctgactcttcaaaggcatcccatcctgcagatggtgttcacagggagagtttgtgggggccggcactccctcatctactggggctcattctggaagaaggtccagaagaattggagacccctgcccctcacccaaactttggaggtggcagggtgaacagcaggccaagttcaggtcccaagacaggccaaggccagtgcggtttcccttccactgcctcagtttacctgtattcagaagacagtctaggaagagttgagcagagttccctctaaaagagtagggagctgataacagtcccaagccctcctctttctctatgccaaaatcatttccgttatcctgagatgggggtgagtggatggatggtgtactgaggggcctctgccctgcccagagcccccaccatcgtagtgggggcaggggacttcctgcccacaaccccctccaaccctcacctggcgtgcccgggtcaccagcagcagcagcggcgttccatcgctcccaagatctgggtgaaggggagaacctgccatcttatccctacccccccggggccctcaagcttattttcttgttgaagaaacacaaaaccctcgagattcatgtactgtatgttggagaaaaaaaattacctaatgttcccccaaaaaagacagtatattttgtactttgtaaagtgttaattaaaatgaaaaaaaaaaaacaatgaaaaa

SEQ ID NO: 507892 - DNA, 2106 bp, Homo sapiens
  misc_feature (19)..(21): n is a, c, g, or t
  misc_feature (23)..(23): n is a, c, g, or t
  misc_feature (27)..(28): n is a, c, g, or t
  misc_feature (31)..(32): n is a, c, g, or t
  misc_feature (39)..(40): n is a, c, g, or t
  misc_feature (44)..(44): n is a, c, g, or t
  misc_feature (55)..(55): n is a, c, g, or t
  misc_feature (142)..(142): n is a, c, g, or t
  misc_feature (148)..(148): n is a, c, g, or t
  misc_feature (183)..(183): n is a, c, g, or t
  misc_feature (286)..(286): n is a, c, g, or t
  misc_feature (296)..(296): n is a, c, g, or t
  misc_feature (311)..(311): n is a, c, g, or t
  misc_feature (323)..(323): n is a, c, g, or t
agcgggccaccctggtgcnnntnctgnnccnngaatcgnntggntgacaaccagngcttttcccagccccagctaagagagggggctttagggcaagagcacctcagccctgcaatggggggatcttttttttttttttttnttgganacaggctggagtgcagtggtgcgatctcggttcgntgcaacctctgcttcccaggttcaagtgattctcctgcctcagcctcccaagtagctgggattacaggcacccaccaccacgctcggctaattttggtatttnagtagagacngggtttcactatgtnggccaggctgtncttgaactcctgacctcaggtgatccgcccaccttggcctcccaaagtgctgggattacaggcatgagataccccgccgggccaaggggattttgacgccacttcctgagtgaagcgcttgcatggggatgggaagaagcacccccaaccttctagtccgctccgagcagggcctggagcattggagacattggttagtgtaataggcagagcctgagtgaggccggggggcttctccaacagagaaaagacattggctttgggtaccatgctgagggagggggttaggcctggtgggggcccattcaaaggaggccgggctcggtggcttaggcctgtcatcccagcactttgggagaccaaggtgggaggatagcttgaggccaagatagcaagaccaccctggtcaacatagcaagaccctgcctctacaagaaaataacgaaagaggccccagggaaggaagccagccaggagcagcctggagcagaggcaggagcctgaggcctgagccatggcatccagggacagcctggtggccgagagagcttgtggctgtcactataagggaagaggagctatggaaattggaagtgcagggtggcctgtgtgctaggagtgggggtgcaggcctaggtgtgtttatgcacacgtttgtgcatgtacgtgtgagcgtggatgtgttcctatgcattagagtgtgtgcgtgcacgtgtgcagagcccacacctgagatatgggactggctcttggagtattttgagttctcagtagcagtcttgttgtcaggccttgagtgcagaaatgattaggtgagtgagggcaggactcgaatgcagaccctggctccaggggagagggtggggcgtctctggtaggacggcctcaccccacttgtcagaactactctggaggggggcaaaggtgtcaggaacagtttgagcagttctggctcagggtcactcatgaggttgctgttgtctgaaatcttagctaaggattggaggatgcacttctaagtgaggcctggctgtaggcaggaggcctcagtccttccccaggtgggccaacccacagggctgcttgagtgtcttcacaatatggcgctcggcttccccccagagcaagagattcaagggcccagggtaaaagccaacgtgttatttttatccctagcctcagaattcacacgccgttgcctccaccatgctctggtttgatacagcccagctctgattggaaggggctggggctgcccgtgctgactcttcaaaggcatcccatcctgcagatggtgttcacagggagagtttgtgggggccggcactccctcatctactggggctcattctggaagaaggtccagaagaattggagacccctgcccctcacccaaactttggaggtggcagggtgaacagcaggccaagttcaggtcccaagacaggccaaggccagtgcggtttcccttccactgcctcagtttacctgtattcagaagacagtctaggaagagttgagcagagttccctctaaaagagtagggagctgataacagtcccaagccctcctctttctctatgccaaaatcatttccgttatccttatccctacccccccggggccctcaagcttattttcttgttgaagaaacacaaaaccctcgagattcatgtactgtatgttggagaaaaaaaattacctaatgttcccccaaaaaagacagtatattttgtactttgtaaagtgttaattaaaatgaaaaaaaaaaaacaatgaaaaa

SEQ ID NO: 507893 - DNA, 2118 bp, Homo sapiens
  misc_feature (19)..(21): n is a, c, g, or t
  misc_feature (23)..(23): n is a, c, g, or t
  misc_feature (27)..(28): n is a, c, g, or t
  misc_feature (31)..(32): n is a, c, g, or t
  misc_feature (39)..(40): n is a, c, g, or t
  misc_feature (44)..(44): n is a, c, g, or t
  misc_feature (55)..(55): n is a, c, g, or t
  misc_feature (142)..(142): n is a, c, g, or t
  misc_feature (148)..(148): n is a, c, g, or t
  misc_feature (183)..(183): n is a, c, g, or t
  misc_feature (286)..(286): n is a, c, g, or t
  misc_feature (296)..(296): n is a, c, g, or t
  misc_feature (311)..(311): n is a, c, g, or t
  misc_feature (323)..(323): n is a, c, g, or t
agcgggccaccctggtgcnnntnctgnnccnngaatcgnntggntgacaaccagngcttttcccagccccagctaagagagggggctttagggcaagagcacctcagccctgcaatggggggatcttttttttttttttttnttgganacaggctggagtgcagtggtgcgatctcggttcgntgcaacctctgcttcccaggttcaagtgattctcctgcctcagcctcccaagtagctgggattacaggcacccaccaccacgctcggctaattttggtatttnagtagagacngggtttcactatgtnggccaggctgtncttgaactcctgacctcaggtgatccgcccaccttggcctcccaaagtgctgggattacaggcatgagataccccgccgggccaaggggattttgacgccacttcctgagtgaagcgcttgcatggggatgggaagaagcacccccaaccttctagtccgctccgagcagggcctggagcattggagacattggttagtgtaataggcagagcctgagtgaggccggggggcttctccaacagagaaaagacattggctttgggtaccatgctgagggagggggttaggcctggtgggggcccattcaaaggaggccgggctcggtggcttaggcctgtcatcccagcactttgggagaccaaggtgggaggatagcttgaggccaagatagcaagaccaccctggtcaacatagcaagaccctgcctctacaagaaaataacgaaagaggccccagggaaggaagccagccaggagcagcctggagcagaggcaggagcctgaggcctgagccatggcatccagggacagcctggtggccgagagagcttgtggctgtcactataagggaagaggagctatggaaattggaagtgcagggtggcctgtgtgctaggagtgggggtgcaggcctaggtgtgtttatgcacacgtttgtgcatgtacgtgtgagcgtggatgtgttcctatgcattagagtgtgtgcgtgcacgtgtgcagagcccacacctgagatatgggactggctcttggagtattttgagttctcagtagcagtcttgttgtcaggccttgagtgcagaaatgattaggtgagtgagggcaggactcgaatgcagaccctggctccaggggagagggtggggcgtctctggtaggacggcctcaccccacttgtcagaactactctggaggggggcaaaggtgtcaggaacagtttgagcagttctggctcagggtcactcatgaggttgctgttgtctgaaatcttagctaaggattggaggatgcacttctaagtgaggcctggctgtaggcaggaggcctcagtccttccccaggtgggccaacccacagggctgcttgagtgtcttcacaatatggcgctcggcttccccccagagcaagagattcaagggcccagggtaaaagccaacgtgttatttttatccctagcctcagaattcacacgccgttgcctccaccatgctctggtttgatacagcccagctctgattggaaggggctggggctgcccgtgctgactcttcaaaggcatcccatcctgcagatggtgttcacagggagagtttgtgggggccggcactccctcatctactggggctcattctggaagaaggtccagaagaattggagacccctgcccctcacccaaactttggaggtggcagggtgaacagcaggccaagttcaggtcccaagacaggccaaggccagtgcggtttcccttccactgcctcagtttacctgtattcagaagacagtctaggaagagttgagcagagttccctctaaaagagtagggagctgataacagtcccaagccctcctctttctctatgccaagatctgggtgaaggggagaacctgccatcttatccctacccccccggggccctcaagcttattttcttgttgaagaaacacaaaaccctcgagattcatgtactgtatgttggagaaaaaaaattacctaatgttcccccaaaaaagacagtatattttgtactttgtaaagtgttaattaaaatgaaaaaaaaaaaacaatgaaaaa

SEQ ID NO: 507894 - DNA, 247 bp, Homo sapiens
ataaccggatcagctggattatacacagaccagactatgattagtctaaacattaagatattgcagtgtattgagccagctgtggctccagagtctgtgcccttcaccaccgtgccctactttttcacatgctgtgtttggtagtttttcctcgtgctctccttaataatggtggtgttaagcaaattgtattacataaatcaatattccattacatggattgagttatgttgcctttcggagaaga

SEQ ID NO: 507895 - DNA, 85 bp, Homo sapiens
  misc_feature (50)..(50): n is a, c, g, or t
  misc_feature (79)..(79): n is a, c, g, or t
gaccacggccatctggtaaaggacaagctacaagctctgtgtttctgtantgatgtgtcacttattaaatacttttgtnccatgt

SEQ ID NO: 507896 - DNA, 811 bp, Homo sapiens
  misc_feature (19)..(21): n is a, c, g, or t
  misc_feature (23)..(23): n is a, c, g, or t
  misc_feature (27)..(28): n is a, c, g, or t
  misc_feature (31)..(32): n is a, c, g, or t
  misc_feature (39)..(40): n is a, c, g, or t
  misc_feature (44)..(44): n is a, c, g, or t
  misc_feature (55)..(55): n is a, c, g, or t
  misc_feature (142)..(142): n is a, c, g, or t
  misc_feature (148)..(148): n is a, c, g, or t
  misc_feature (183)..(183): n is a, c, g, or t
  misc_feature (286)..(286): n is a, c, g, or t
  misc_feature (296)..(296): n is a, c, g, or t
  misc_feature (311)..(311): n is a, c, g, or t
  misc_feature (323)..(323): n is a, c, g, or t
agcgggccaccctggtgcnnntnctgnnccnngaatcgnntggntgacaaccagngcttttcccagccccagctaagagagggggctttagggcaagagcacctcagccctgcaatggggggatcttttttttttttttttnttgganacaggctggagtgcagtggtgcgatctcggttcgntgcaacctctgcttcccaggttcaagtgattctcctgcctcagcctcccaagtagctgggattacaggcacccaccaccacgctcggctaattttggtatttnagtagagacngggtttcactatgtnggccaggctgtncttgaactcctgacctcaggtgatccgcccaccttggcctcccaaagtgctgggattacaggcatgagataccccgccgggccaaggggattttgacgccacttcctgagtgaagcgcttgcatggggatgggaagaagcacccccaaccttctagtccgctccgagcagggcctggagcattggagacattggttagtgtaataggcagagcctgagtgaggccggggggcttctccaacagagaaaagacattggctttgggtaccatgctgagggagggggttaggcctggtgggggcccattcaaagtgctgggattacaggcatgagataccccgcctggccaatgggatttttgacgccacttcctgagtgaagcgctttgcatggggatgggaagaagcacccccaaccttctagtccgctccgagcagggcctggagcattggagacattggttagtgtaataggcagagcctgagtgag

SEQ ID NO: 507897 - DNA, 126 bp, Homo sapiens
gttactgacagacagaaaaaacagtcgcatcctgatcaccggagaatccggagacagagaagacagacaacaccaagagggatcatccagatactttgctgttcttgctggccaattggggaccgc

SEQ ID NO: 507898 - DNA, 314 bp, Homo sapiens
  misc_feature (21)..(21): n is a, c, g, or t
  misc_feature (45)..(45): n is a, c, g, or t
  misc_feature (110)..(110): n is a, c, g, or t
  misc_feature (202)..(202): n is a, c, g, or t
  misc_feature (274)..(274): n is a, c, g, or t
agctgctcttacactgtatanctgtgtctgagtactcagttcatncaccagtcagggtctgtgggacagactaggcaggtggtgccccgtgtgaggagcagcgcagtggnatcatgatggaaccctcgaaaatgaacgtgaagtgactgcgcagtcctctttggattccagtgcaatgcatcaaaccataccatggcatggntgggacccaatgcagtactggaaatgaagaatgtgagcctgtaggacccgcagccccggacaatgcagcttnctcggacaacacaggtcccggatggggaatgtggaattag

SEQ ID NO: 507899 - DNA, 259 bp, Homo sapiens
cttcactgcagggaacaccaaccacccgaggcaatcgtataaacctggccataattacccccataggcattacactatccctcatcacccaactaaaaatattaaacacaaactaccacctacctccctcaccagagcccataaaaataaaaaattataacaaaccctgagaaccaaaatgaacgaaaatctgttcgcttcattcattgcccccacaatcctaggcctacccgccgcagtactgatcattctatggttg

SEQ ID NO: 507900 - DNA, 107 bp, Homo sapiens
ccatgactcgttgtaaagattgcagactgcagagataatgtctggatcgctgagtcaccagtgtgtgaggaaactcccattgacatgcatcacactccacatatgaa

SEQ ID NO: 507901 - DNA, 249 bp, Homo sapiens
agaagcgcttgaatccggggggcgacttccaatgagccaagattgcactatttcaccccagcctggacaaaagaggaaaactacgtctcaaaaaaaaaaaaaaaaattctaggttggggcccccattccctgggaaggcctctttcctccggagggacctgtctaaaggtgctaaattgtcctaacccttaggctctgtccaatatgggtaagtttatcgattaaatttccaaataaaatattaacaat

SEQ ID NO: 507902 - DNA, 255 bp, Homo sapiens
tatctatgatactcttatagcctgccttcaattttgatcctttatatctttctatttgtcaggtgcacaagattaccttcctgttctagccttctgtcattgtcaccaaccatatcttactatggtggccatgtactatggaacaaaggccgcatgatctatatctggctccactacagtgtactaagagacaccctgacttccttatgtatgctaccccacagggagatccatctagacgtcgacctgacaggc

SEQ ID NO: 507903 - DNA, 441 bp, Homo sapiens
  misc_feature (11)..(11): n is a, c, g, or t
  misc_feature (20)..(20): n is a, c, g, or t
  misc_feature (22)..(23): n is a, c, g, or t
  misc_feature (25)..(25): n is a, c, g, or t
  misc_feature (328)..(328): n is a, c, g, or t
  misc_feature (360)..(360): n is a, c, g, or t
  misc_feature (383)..(383): n is a, c, g, or t
  misc_feature (392)..(392): n is a, c, g, or t
ctcgtgcaatntcggcagangnncnacgaggtcaatttttccagcttctttggaaaattgggaaaaaatgtcaacacagggcttccattccctcatggcagcaatagtctggagtggacagcagctactcccttaagatggggcatgagctctttaattagatacagttcttacctattcccttttttttttcattcctaagcaattttttaaaaaattactgtgcttacttacagactagtgcttttcaaacttttatctgtagatgaagcacctgaggaatcctattaaaatgccaactctgatccagtagatctgggtggggtcngaaattctgcaattcctgaccacatcaaaggngcccatggttcttggtccaaggnccacatttnaaataggcaaaggcagtatataatttcaggtttcaacctttccaggttt

SEQ ID NO: 507904 - DNA, 272 bp, Homo sapiens
ctgcgggctggtggtgcatgcctgtattcccagctactcaggagttgagtgggaggatcacttgagcccagaagttcaaggctgcaatgagccatgattacaccacggcactacaaccttggtggcacagtgagaacctgactcttaaaaaaaaaaaaaaaaaaaaaaagataactaaaacttctaaaacctcttgtaacacgttacccagaaactatccaagtggttaaccatgctttatcttacccaatccatccaaaagtctaatggcg

SEQ ID NO: 507905 - DNA, 124 bp, Homo sapiens
tgctgagaatgatggcttccagtttcatccatgtccctgcaaaggacatgaactcattcttttttatggctgcgtattttccatttctataacgatccatcagtaggactgcttatgacaaatt

SEQ ID NO: 507906 - DNA, 941 bp, Homo sapiens
  misc_feature (643)..(643): n is a, c, g, or t
gaagtccgagtgagacagcgagctgagtggtggtgtggtcgcgtctcggaaaccggtacgcttgcagcatggtgaccactctgactgaatgagcagtattgtcagaattcataagaagcttattcactattgtgtacaaagatgtgtgagtggaactataacatacaaaggaattgtggaactgtgctgagatctcttgggcagaatctgcacagaagcagagttacaggagcatgattaatgaagtagatgctgatggtaatgggcacgaaattgaggttcccgtgaatttctgactaatgatggcaacgtaatatatgaaagacacatgacgtgaagaaggaaattagagacgcatatccgtgtgttgatagaggatgggcaaatggctatactaagggcttgcggaacttcgccatgtgatgacaaacttggccgagaagcttaacagatgaagtcaccgttgctcaaacctgctcagggcaagcaggatatcgatggtgatggtcaggtccactatgacgagttcgtaccaaatgatgcctgcaaagtgaagaacgttgtacagaattgtgttaacgtttcttgtacaaaattgtttatttggcctgtgctatggtgcgtaacttatctgtaaaaaggnttccttcgctactggtcaatgcactatgctgtattagttaatgagcgacttcaattcctccagggttcttcccctttatcttactggcattgtctaaaaaccttattgaagaaaagtggcccagtacatgtgcgcggtgggtaaatgggaatatttaagcttcgggattaactacagggtgggcatccgggcacgcgttgctttacgcgtttcgaaacgcatgtgttcagacagccgggtggagacaattaatgctgtcagggtagtccccgggggggcacaatttatgaacgtaaca

SEQ ID NO: 507907 - DNA, 390 bp, Homo sapiens
cttatactgaaccatctgggacaagatagcgtctccctaccccggctctgagaagctccgctccctggtgctggccggcatccacattgcatgaggccacaggtaatgtggccacagggacccacaggatgttgagagggtcctgtgcccggtcatcagagtatcacgattcaagactgagtgcccttgtggctccacttccctcagctgttgtatgctggctctctggtgctctgcacaagaagaggaactctgagtctgtcctaccgctgaggacttactaagaacagctccaatgatgagatcatcgctggccagcagcgtaggccggtggcactgtgcaggaggagctggaggctgtgtgttggtcagaacatgtcgggtaccgag

SEQ ID NO: 507908 - DNA, 251 bp, Homo sapiens
ataacttccgtctgacactatttttttcctttattaccaaaattcccagaaggctcacaaatcatggttggcagtgcagcctttttcaattacttggacacattcccatgctaaggccctctgcacagatttttgtttactatcactggcgatcagcccaaactttctcaccccattttttcaacccaccccgattttgtacaccaggttactatgtgacccaccttactactggcttattgattgcaact

SEQ ID NO: 507909 - DNA, 340 bp, Homo sapiens
tcaccggtcctcccttcacctgacggggagtcaggccatgatcgacaccatgggcatgggaaaaacacaacagattaaagcgtgtgacgaacatcttccgacaaaacaattacaagcatgcctggcaccgaaccggcgcgttgtcattgaagttaaagggctgcaaaaataacagctacacaaaagactcaaactggtatgagatatgattaagctgctttaaatgcttttcttttaagaaaaatctacaactcccttccaccagctcaacattgtgccataaatcacaattgtgccagatgcattgccaatttactcaatactctgttctccaataatg

SEQ ID NO: 507910 - DNA, 251 bp, Homo sapiens
tcgtgcctgttctgctgccgcagcgtgccacccaggtaggccttgaggccatcggcaaccggctgcagcacatcgagattgagcacgcgcgagccgaactgcgctcgctcgaaaccgagggtgaactgatcggattgtgcgctgacggaaggctcgtagtcgacaatcccggtcggcgcgggaaagggatagccttgcgccgagatgcccacccgcactttgcttccgcgaataagccggttcgggaggcg

SEQ ID NO: 507911 - DNA, 963 bp, Homo sapiens
  misc_feature (472)..(472): n is a, c, g, or t
tgggggcggggtcttcctcttttttttaacaccctccccccccccacaaaatatttcccccgggggggggggcgcagagagacgccccacgagaggaggagaagcaaaagaggagcacccggggagaagaacaataatccaccccacacaacaagaccatcttcttcacaacaagagagaggtgaccacaatagattgagatatcacagcgagagcagaacagccaagcgatgaggcgcccgctccacactaatgcggtgcatgcacaccgcgatggagtaagaagagagccccccgagagttcccccgccgcgctcgctctgtgccacccctcgcgtggaaaagatatatatctctggttgggactcgttcgcgccgcgcgtgagagaacaaaaacggcggtgtgccctctcgtcgcggcgagcgcgctggtgcctcctctatatatcgctcccgcctctgtgttatttcnccccgcggggtgtgcgccctctctcgcgtcgcgagcccactcgtgcgaacttatatctgtcgagcgtcgccacagccccccgcctcgagagagagtgtttctctccagaacaacacccccgagtgtagatctctgctgcttgtgtgaggagataacacaccccggccaccacaaagatagattagttcctgtgttgcgccttaggtagttgtgcagcccccccacctaatcgatctgcgccggtcgaacaagaacaacacatatcttctcttcttcgctacaccaaccagcgccgcgaggcccacgaagagcatccttcacacaccagagacgttgtcgcgccagcaagcgagaggagaggggggccacacccaatcaacgacacaagggggcgcggccagcaaagggccccacccaacgagagggccgccccagaaaaaaacaaggaggggctacgcggctggccgcccccccgccaaaaaaaagccagg

SEQ ID NO: 507912 - DNA, 656 bp, Homo sapiens
cgacctttcggtgagatgacgggaaatgctgttagataaaatcaatttagcgattttctgagttcaaaataggttataaagcagcagagacaacacacaacatcaacaatgcattcggcccaggaactgctaatgaacatacagtgccgtgatggctcaagaagttttgcaaaggagactggagccttgaagatgaggagtgcagtggccagtcatcggaaattgataatgaccaattgagaacatcatcgaagctgatcctcttacaactataagagagctgcccaagaactcaatgttgaccattttatggtcgttcggcatttgaagcagatagaaaaggtgaaaaagctcaataaatgggtgcctcatgagctgagtgaaaaataaaaaaattcgtggtatggaagtgtcattctctctattctatgcaacaataatgaatcatttctctatcggattgtgatgtgtgccaaaaggtggattttatacgacaactggcgatgaccagctcagtggctggactgaaagaagctccaaagcacttcccaaagccaaacttgctccaaaaaatggtcatggtcatagtgtggtggtttgctgccagtctgatccactaaagctttctgcatccaggtgaaccattaatctgatag

SEQ ID NO: 507913 - DNA, 1144 bp, Homo sapiens
gaggatttaagtggcacgagaattgacaattgattccataatgaacaacagggagagacattaacaaactaagctttaaacaactgaacgaccttactgactgaactaagcttgcaactaacaactttcctgctgcatactacagaactgcaggctacatgcactgcgcacgggcttttctgtctgcttcatactccacagcaactttgcaatggctgtctggcacactgcactacacatcggcgaaactgctctaacccaaactctactgcactgactgcgcagaacaaacccagcaggcacctggcttgaggctctctgcctcctgccctcaacaacctagcacgcaacacaacacgctgcttccggcctacagcctgactgcctcctgtcttaacactaacagttgacttggctcgctctacacgctcacagacaactctgcaacggccgcttccccacagcattacaactatgcgccaacacatgaggagctcatttgcgcgtagcaactttccaaagctgagcactttttgccctcgacacctctcacacaacgcctactttcaccggaagccccacgcactgcagtgccaccggctgcaccttaactttctccaacactgcgcccaccaacgccaaaacctgcacacccacacactttctgcctcttctggctcccactattacttcgtctctctgccaccaaactctctgcacaccgtggttcaacaaaacgcgcttcaaactgcccacgacacacacacgtaacaaccaacctttccgttcaacaacacacggcctgctaagcaaaccgctgcgcaaggccaaggtcaaccaccactaacacacactggcctgtgcacacactttcgccccctgccgcgcacactcttcaacaaccccctcccgcaaccacacacacacgcaagcgcttggcctcgcttccaagcaagggcaagcggaaacacggcaaaacgacacttttcactaccagcgccagttccctaaccgggccaatttcaacccttggcccccaacgaaatcccatttctcccccgggatttcatctctgcgggctcgattatccccgcgacacctaggcgacacagcacagctggcggagattctccgcgacagggca

SEQ ID NO: 507914 - DNA, 764 bp, Homo sapiens
  misc_feature (434)..(435): n is a, c, g, or t
  misc_feature (677)..(677): n is a, c, g, or t
  misc_feature (706)..(706): n is a, c, g, or t
agcggagaattgcttgaccccgggaggcagaggttgcagtgagctgagatcgcgccattgtactccagcctgggcaacaagagcaaaactctgtctcaaaaaaaaaaaaaaaaaggaaaagaaaaaaagaaaaaagaatttctcaaaatgggcaacattaaggagcatttagagacccaaggctttgtgggcccgttcttggacagcagtgcccttgtttgcccacgtgtttgtgcacccctgtgattgtgccccaaagtggttccccaccgttagaggaagggggatagaactgtgagccgtcaaacgggggaaaacctagagcctagaggggcaacgaaaactaccggaccataaatgtggaggccagaaactcttggttacacaaggcccaatcattaggaagccaacctgggggccacacttagggttcnncccaaagttgtgtttcagagccagaaagggtgtgggcagcccacctttattagcagcactcttagtgggacttacattgggtgtaactgtgagtaagtttgcatctcttcagaaacacaagcgtctacactctgtttgccccaggcctggagagtaccaagggtggtcatcacacgagctcaacggcgacgcctttgaccctcctgggacaaagagagagcggatccctctttgcgctcaangcctcccggaagtagctggggcactatanggcgacattggccaccaagatcctgtggcgtaaatttttaaaatctctttctgagaga

SEQ ID NO: 507915 - DNA, 730 bp, Homo sapiens
gaagtgaatcctgacgctggggggcttgctcgtggcggcagcgcatgttgtgcggatgggagtggggcctggctcggcgcgcccatggagcgccacggcagggcttccttgcagacctaccgtctcgatcggatggggagcaggcgggccggggagccccgaaggggcggcggacagtgagaccacttgctggcgcacgggtcgagacagcgccgtcgggtggcccgcggaacgggggccctcggaatgaggtgcacgacggggggatccgacttgggctctatacaggaggacacccagcgttccgtgttcaaccccagaacaggcgccgatcggagaggggccttggaggtgaaaaaacaacgcggccgcgcgtttatgcgccgtgggatatgggcacctggcagttactacggatggaaaactacgtggatccgacagcctggccacgtacattatatggcagcccagagacggacatcgagtggacttgaaacgaacgaacaggagggaaggcaacaggcaggggacagcgtcctttagagaggccatatcgaggaaaatgttagcctaggaccgctccaaaagtgcgggcatgacatgggggcatagagagaggcgagataaccggggaaacggttgaagacgttggaacgctggagaaggggagccgtaggactcactgttgtgcgaccgcagcaaagaatagggtcgcgcgtccaagaatggg

SEQ ID NO: 507916 - DNA, 125 bp, Homo sapiens
tctagttccagaacatttatatcacccctaaaaagaaatcaattacccatcagcagtcacattcccataaccccaagcccaagacagccacaaatctgctttgtgtctacctagattcccctgtg

SEQ ID NO: 507917 - DNA, 623 bp, Homo sapiens
aaaattattttatttatgtatgcattttataagcaactgattaatttaaactgaaaaatgatgaagtaaaggcctacagctctaagaatcatttctaggctgggcgtggtggctcacacctgcaatcccagcactttgggaggctgaggcaggtggatcaactgaggtcaggagttcgagaccagcatattttcttccaaagccatcatatatatatatatatatatatatatatatatatatttaaacacattacacaaactacacgacataaaggatataaagaaagaaaataatcagaaataagttaattcagatgtacatattcagaaaacaatattgaagttaaagaatatgcgacttaaaaatcaatacagcgtccttttcgttcccaatctccatatcgggtaggttctgggcccctgggtccacctttttctttggtcactggattaacatcatctggaaatttttccagtggttctttctctaaatgggaatcctctggtgcatcaaaacgaccttctggtaacttcggtttcttaaggggaccgtttgacaagttcaaacttttcctccttgagaaagaacttgttttccttcagaaaattgacacaagaaga

SEQ ID NO: 507918 - DNA, 373 bp, Homo sapiens
  misc_feature (34)..(34): n is a, c, g, or t
  misc_feature (58)..(58): n is a, c, g, or t
  misc_feature (96)..(96): n is a, c, g, or t
  misc_feature (274)..(274): n is a, c, g, or t
aacaggggtaaaaggccgggaagacaattttttnatattgggaaaatttttgtatttnagttagagggcaaaataaaggcatttttaaatatgtgnaggattcaaagtttaccctttacccatcctgtatttatttttatttatatttttgatatatagtctcgctttgttgccccggggtggggtgcagtggtgcaatctctgctcactgcaacctctgctcccgggttcaggcaattctcgtgcctcagctactctagagcgtgaagtgggnggatctcttgatcccgggaacctgaggcagtagtgagccacgatcgtatccctgcagtccagcctgggagacagagtgagaccctgtctcaaaaaaaaa

SEQ ID NO: 507919 - DNA, 1485 bp, Homo sapiens
  misc_feature (1089)..(1089): n is a, c, g, or t
taggggtccggatcaatcttaaagggcgtaacgcagccttatttatgccccacgggcatgtcctttgcggacacaacaacacacatgccaggggcccctcacaacaacccggggtgggcctggcataagtctgccgcccggccgaaactggggtgggaaaaccgaacacacacgctcattaggtccacgctgtgacccttacttggagggtgtgacaacacacacaaagatagtgccccaccccccttcacatcgggcgaaccgttactacccccgttctggctgggcggtgacaaaagcacaaggcggcaaactattttcccaatgacaaaacggtccgttcgttcgccgcatctctgtcgtggcgatggccttaaatggcgaaaaaaaacggtcgggccgtactacacccggcgttcccaggtcattgtttggggccctcgcaaaagacaccaacctgtgtgatacttcaggtacatcggttttagtgcgcaacgcgtcgcgcttgggctcccacttaaaggagttgccggacagactcctgacatgacagaggcagacaagattggactcttgcgctgcgctgtgtgctccagacctcgggttctcaaatacttttcttgggccacaagacagatgagaaaggctctcatgagactttgtcacagacagagatgggtcagagttacgcaaatttcctgggagacacacggtcttagtgttctcgccagaaaagaccggagagatgtctttttacttacacagcgacagagttaggtagaaagaggaccgttggcacacgccactctgggcgagggaacacccaccacaacggcggggtttcaacgcgcaaggtaatattcggggtgctcccccacacgcgcgtagacaggatagtttagagaactttgtcaaattgccacagacgtaccccgaccgttaagacacacagggacatgtcacaagaacgccttctgtctcttctgggacacacacacaacacactgagagagacgttctctgtctggccgtctgcacaggctgttgtcttagcggtagttttgtgacacacttgctgtaaagacttanctacgactattacacccttactagagaaggtagtgcgatttgttgttaactctgtgatatttacagactaagaggttaacagattcaggttaagaataaagagaacagacaaaggaagtattctgtctatgggtgttgtgggagtccaaaacagataatactttggttgttatgcgacgcaagttgataggttgtatgtgaaatactgcatgttgtgtaggtgacctggatgtacaacagtgtcttcgttaaaagtcaaatgtaaatctaattacagattaacgaaaaagagcctgtatttaagctcatatgatctcccttcagcaacttattttgctttaatttgctgtaaatctaagcaatatttttttataaaccagtaggagaaattctgtc

SEQ ID NO: 507920 - DNA, 122 bp, Homo sapiens
ctctctctagagaggcactgacaaccatctcccagagctcactccgtcctgcccaatctgtattacatctctaactttgtacgcaagctctatccagtactactaacctcagtgcgatagac

SEQ ID NO: 507921 - DNA, 289 bp, Homo sapiens
  misc_feature (11)..(11): n is a, c, g, or t
  misc_feature (41)..(41): n is a, c, g, or t
acgggtcaacnagtctgccttgtctgtggagacggattacncctttcccctgctaaaaggtcaaggcctttttgggtgatccatctgcctttgtgggtgctgcccctgtgggtgctgcccccccaactgctcctgttgttgctgcagccccaggtaaggttgaacccaaggaaaagtcggaggagtcggtccaggatatgggatttggtctttttgactaatccccaaaaagcaacccacttagccagttttttttgcaaaacaaggaaataaaggggtacttttttta

SEQ ID NO: 507922 - DNA, 193 bp, Homo sapiens
gctttgttcaaggttaaaaagaaaaagtgggggtagggagatagtctctgtggtaggtaagtttgagaaatgctacatgccatattcctgtcttggaggcttataaggcacactaaaatattaaagactcttagaaacttaacctaatgtgtcctaaagatattgggacatgggattccttttttcatggcac

SEQ ID NO: 507923 - DNA, 341 bp, Homo sapiens
ttctaaacccatgtctcatcgttccctattagatgagtgaacgattccacacgctttggtgaattctgcttcacaagtgattggaagagccgacatcgaatgatcaataaagcgacgtcgctatcaacgcttggccgccataagccagttatccctctgttaaattttcttcccccaccagcttaaaacccaaaaggtcagaaggatcgtgaggccccgctttcacggtctgtattcgtactgaaaatcaagatcaagcgagcttttgcccttctgctccacgggaggtttctgtcctccctgagctcgccttaggacacctgcgttgctgatgtgccgat

SEQ ID NO: 507924 - DNA, 528 bp, Homo sapiens
gtgcacacagagaaagaagtgcatagaggtgttgtactcgcaagacgatccagtctattcaatctccatactacagctgtgaaccataggacaggggcccggcccagttaggactattggccaggcatgtcactttctgaacatcagttttattagctctaaaatacgactggtcgctcgtctattacaatagcagactacctttcatacagacctccatcctctgacacccatgcctgacacccatgacccgtcagtaacagcatgaggaggcaatgcgcaagtgtcgttgtacaaatggccccaccaggcagaaaatcaccagacaaggtgatttctcagcttcttttcagctctagttttatacatctcaagttggaaaggaactttcctcacattcatcatgttcccaaggtttctctttgagatgaatactgaagcttgaactctactaatgggttttcccagtttcactaaatttgaagagttgctctagcacaaattctctaatgtacaaattctctaacg

SEQ ID NO: 507925 - DNA, 582 bp, Homo sapiens
atgctccgtgatcactgaggtagctctccctcacggtcctatccccaactaactagagcgtccaaagtccatgactgcaggcagtctataaatgtcctctgtcttactggctcatctctcactagtatgcttgacacagaggtgaaacctcctgggtattctgttttaacccaggaggcggaggttgcagtggagccgagatggagccagtgcactctagtctgggcaacagagactctgatctcaacaaatgatatttagagaagaatcgataaaataaagtactgactttccaggctgagcaaggtgtctcatggcttgctggtcccagtcgacttggggaggccaaggccagggacacatcactcgaggccaggagatgcgagaccatccgggccagtgtggcaaaaacccatctctacaaaaaaaacgcacacatacttaggtgggtgtaatgccagcttgataggaggctgaggcctaagaatttgcgttgacccggaaggcagaggttgcagtgagctggatatgtctcactgcactccagcctgggcaacagagcaagactcatggtaggtgctc

SEQ ID NO: 507926 - DNA, 420 bp, Homo sapiens
acataatagacttattacacattaggagtacatctaaccgctactacctcaacccagacctaagccagactttattctagtaagaaggtcagatagtaaatatttcagccttgctgtccctgtggcagctctgccatagtagcaatgaaagcagtcatagaccatatgtaaatgaatgataatggctgtgccaataaaagtttatgaacactgcagatcgaatttcacatactttacaaattatcaattatatagtgtcgatcattagaaaaacaggtagtgtattggccagggtttgctgattcctggactagacaaagccaagttcacaaagatttgcctcttagatctagtagtggtcgtagttccacaccttcttttttcactgtttccttaaggtagagtgtacatatttataag

SEQ ID NO: 507927 - DNA, 822 bp, Homo sapiens
cagtctctacaagatctgtcctcgacacccatttccttgccgccaaatttcgtgagatctacaacggattcccccccccatttgctctccccggccatgttatgtgccccacccccgcaaaatcagcagctcgccagttcgcactagatactttccttacaccaaggctccaccgcttttttaccaaatctcccttaagtcggttactcacaccctctctcagtggtgggcccccatgtcgctgtcccctcgggagtgggccggtgtatcgcccccacaatgcgggctcttctccagatgtcgccccagtgttccgccggttcaacccttggcccgatcaattgcgcccgggccctggttctcctgtccatattgcctcgcggccgtaattttacttttggtctcacagccacgcaatcttgttggccgctatcccccggatagcgccccgccacgattccttgcggcggtaccccccgatggcgcattcacccgcccagtggaacacatccctcttctacctctcggggggcgccactaacacatcttgtcacaccgacgcgaatattgcataatatctttccccagttcggaccacccttttcgcttgtaaagccacaatgtactccctatggtttcagaacccctctccctcaaaccgcggcagtactaattgggagtacccccccccctctcacaccaccatcgcagaaaccccccttaacactgataattcgttaccccataatagggaggaggttcaatcaccccccaaatcgtgtttttacccccccccgggccccagattttccccaacataca

SEQ ID NO: 507928 - DNA, 190 bp, Homo sapiens
  misc_feature (7)..(7): n is a, c, g, or t
  misc_feature (130)..(130): n is a, c, g, or t
  misc_feature (145)..(145): n is a, c, g, or t
  misc_feature (163)..(163): n is a, c, g, or t
  misc_feature (173)..(173): n is a, c, g, or t
atgaatnataggcgatgcccattctttctctcaagctaatgaagtcctatggcattctaaccacaaccctcggacagactcctcctattcctccatggcattgtaaccacaaccctcggacagactcctnctattcctccatggnattgtaaccacaaccctngggcagactncttctactccttcatgg

SEQ ID NO: 507929 - DNA, 398 bp, Homo sapiens
tataatttgatcttcaagcactgataccctttcgtccactagatcgaatcggctactgaagcttgagcatgcgtcacgtagttctggcaccatggttttcagctccatcaggtcatctaaggtcttctctacactgctgattctagttagccattcgtctcatcttttttcaaggtttttagcttccttaccatggattcaaacatcttcctctagttcggagaagttggttattaccgactttctgaagcctacttctgtgcgaaacaggcagattgaaaaacttaagatgatcaaatccagcagggatcaagctttggctgaacattgtcttgctgcactaaccgaatgtgctgctagcggagatgggaaattcctggctcttgcagtggatgcat

SEQ ID NO: 507930 - DNA, 231 bp, Homo sapiens
atcccctcgcgaatcgtgtatccgtgattgttcgtataaatgttcagtacatatctgtaaagtccatttgttccaaggctatagttataatccattgtttctttgactttctatcttgataacctgtctagtactagtcagtgtattactgaaatcccccactattattgtgttgctgtctatctcatatcttaggtctattggttatatgttggatgacacgttcgcgag

SEQ ID NO: 507931 - DNA, 284 bp, Homo sapiens
ttttaaatcctgagtcaagccaaaaattttaaaaaaaacccaaaccaaaccaaaaagaccaattagggcctgcccaacctaatttggttttcggcccaggttggttttggcaaaaaaggggggaaccccaactaagcaatagcccgcctaaaacctttggcggggaacgagggggggcccgaactcgaaaaactctggttggcggacccaaatttgcgggagggggcccagcgagccaagaagggcccccccgacccacacggggtctttgccctaaggggggg

SEQ ID NO: 507932 - DNA, 301 bp, Homo sapiens
ggcaatggtcgtggaggccgagggcgaggagggacccatgggccgtgggaggcttccgagggggcccgggtggtggggacagaggtggcttttgccctgcaagatggattccagggtgagcacagacaggatcgcagggagaggccgtattaattagcctggctccccaggttctggacagctttttgtctgtaccagtgttacctcgttatttgtaaccttcaattctgatcaccaaggtttttttgtgctgctatgtattgtactatactctggtccattaaaggtaccattttagtaa

SEQ ID NO: 507933 - DNA, 451 bp, Homo sapiens
attttgtacttttcattctggatgggcttggccaaaacaggctcaggccaaagacctcccaagctgtatgtacttccagtatcctgaatcagtgtttggtgacataatgccaagggtaaacaagcctgatttaggcactgctttatccaggggcttcacccatgaaattaataaaacttatctgagtcccttgaaacttggttcccagaaaacccacttctggcttataatgtccttgtacggtcccccgacattgattatctgtccctcatgatgtgtttaaactgagtagcagaaaacagaggccacactttctgggaaattttaaaggaagaaaccatttttaacgcgatgccaaggttcaccttttccacgaacccaatgccaattgccaggaccggttcggcaagaaaaccgctatgtaatttaataaactgatttaatggatata

SEQ ID NO: 507934 - DNA, 114 bp, Homo sapiens
tgcggtgactctagaggactcccgacagggcccagcatgttgtgagcgaaccgacaggaccattgcgcaagggtcctgtcggttgctgccctccccacatgctgggcccgtggt

SEQ ID NO: 507935 - DNA, 359 bp, Homo sapiens
  misc_feature (82)..(82): n is a, c, g, or t
  misc_feature (87)..(87): n is a, c, g, or t
  misc_feature (159)..(160): n is a, c, g, or t
  misc_feature (184)..(184): n is a, c, g, or t
  misc_feature (190)..(190): n is a, c, g, or t
tccttcctgctcacatccacagtcagggcacggcgcccctcaagaactccagagtcacctgtttcatcggctcccagcaagngcctntttgtttatgatgtcccccttttttgaggcctggacccacccatttttgtccctggggcctgctcccagccnnttaggcccgctttggccagggganaaggantttccgtgggttttccctgtgccccgtctccctggttggttctcccctcccttccctggccggctgccatggccaggaggtaagtgcctttttgtgtgcaaccccttaccctttttttgaaaaacctgttttcaggaaggatttgataaactcatttactttcaggtga

SEQ ID NO: 507936 - DNA, 275 bp, Homo sapiens
cggaaagtgcgctcgcgaaattttggcagtctgggacatgaagcaccgaggtaatggtgttcaccgcgcccatgatctgtgtactgcatctacgtgcaacctttacagtttactgatcgtcgtttatactactgatatctggctgctgaagctatcttctaggtcaatggtgcgtcattgtcccccgctccatcctggccaccgctctccaagaatttcttaaaaccatctagtgtccgctcaccgttgtaatcaatgaccgttctgtctgcact

SEQ ID NO: 507937 - DNA, 196 bp, Homo sapiens
gttcattatcactaccaggctgtgcacagtggctcatgcatgttatcccagccagcactactgatgttttcggccacgttgattctttcttgtgggggctgtcctgtgccctataggatgttagcaacatccttagtctctctacctactagatggcagtagcaccccctctatgtgtgacacccaaaaatatctc

SEQ ID NO: 507938 - DNA, 212 bp, Homo sapiens
aaaaagacgaagaagaagaagagcaagggcttcgcagcagggaacaggaacctgataaagaatcaggagcctcagaggatgaaatcgtcattctaagtcaaagaaggcagacagacaagatcacacattatatgatcccatctaatgaaatgtccagaaatggcaaatccagagacagaatgcaggttcacagttgcccagggctaggggag

SEQ ID NO: 507939 - DNA, 401 bp, Homo sapiens
attcgcggccgcgtcgactgactaatacctgggcttagggccacaagtatgggcatgggtgcttacaaacatgattttagagtaaattgggcctctcatttatactggataaagcctttgagtagtatagtgtactaaccaggcgcagcggctcgcgcctgtaatcccagcactttgggaggccgaggtgggtgaaacgaggtcaggagttcaggaccagcctggccagcatgttgaaaccccgtgtctgctggaaaaaacaaaaaattggctgggcatgggggtgggcgcctgtgatcccagctacttgggagcctgaggcgggagggttgcttcaaccccggagggggaggtggcattgaattgaggacatgccactggactccagcctgggtgatagt

SEQ ID NO: 507940 - DNA, 581 bp, Homo sapiens
  misc_feature (140)..(141): n is a, c, g, or t
  misc_feature (154)..(155): n is a, c, g, or t
  misc_feature (164)..(165): n is a, c, g, or t
  misc_feature (185)..(185): n is a, c, g, or t
  misc_feature (203)..(203): n is a, c, g, or t
  misc_feature (218)..(220): n is a, c, g, or t
  misc_feature (262)..(262): n is a, c, g, or t
  misc_feature (326)..(327): n is a, c, g, or t
  misc_feature (380)..(380): n is a, c, g, or t
agcgggcggcgtcgccaggaggagcgcgcgggcacagggtgccgctgaccgaggcgtgcaaagactccagaattggaggcatgatgaacgactctggctgcatgtttgtggggctgctggctgaaacctgggagagtggnnggcaggtcctggnngggaccagnnacggtctcgagaccaatggnaagctccaggaacatggntccaatcaggggaannngtaagtacgtcaactaacggacaattcagaaatgcctgtcanagcggggtgaaagcagatagaagactctcagtagagaaaaacaagacggaagggagcggcaagnnacactgggctccgaggcagaccgttaggaaaggaaaagcccaagacgcacacnggaacacggaacaaacggaacaggcgaacttggcccccccctaagaaatcttggcaaagaaaacacccataggcgggacaaaaaattcacacgggcaaggaaaaccataaataaaaggccttggaaccacggggaacgctctttccccccaaggggagaacgttgggttgggccaaagtgggaacggaaacaccaaattag

SEQ ID NO: 507941 - DNA, 277 bp, Homo sapiens
  misc_feature (24)..(24): n is a, c, g, or t
  misc_feature (47)..(47): n is a, c, g, or t
  misc_feature (51)..(51): n is a, c, g, or t
  misc_feature (80)..(80): n is a, c, g, or t
  misc_feature (148)..(148): n is a, c, g, or t
  misc_feature (208)..(208): n is a, c, g, or t
  misc_feature (237)..(237): n is a, c, g, or t
aagagtccctgtttcttccttttnttccttttcacccagtaaaattntgtnttaccattcaaattgtctgcaagcctgantttttgtggccatgggacaaagaatgccatctttagcttcacgaaggaaaagtcctgcaacatttttnacccccaacatggggctcaagaagcgaaaattgtgttaaggaatggtactgaggcatttnactcctgggagaagccccctctgcctgtntatactcagttctatttcttcaatgtcaccaatccagagg

SEQ ID NO: 507942 - DNA, 936 bp, Homo sapiens
atgtctggagaaagctttatggagtgacgaccagattcagtccctcggtctttcgagcagccgtatacccagtctagtcagccttgtaagtgcccttaggcttgttcccccggtcatttcgagtgcagtatccccagtcaagtacgaccactcaagggacgaaagaattgcaagcacgtatagttccttggggattcctgcgccaatgcttagcgatctctagagtccattcgggcaagtatcgtcgctcatgagtctaacgctggagtcactgttcatgccttgcttggggaatacagtgccagtcctgccttgatgccagacatcactcttcacgggacagagcgcttaactccaacatgtgacctggactcgtctggaccttcgtcctccactagctctccaggaatcatcccgcctggggaccagctggagggccacaaggcacacacagccgtagctagcaccacaagggagctactgtctgcaccgttagacggccacatgcccattcgccacaggtgaagtcagggctcctgtcctaccaagcaacactcaagttcatcttccctacagtgttcttcattctgatctgtatgccaaacattttgcctgttttactgtttacacaacatgatacgcttgatatgagactgaaacccctgcggttgtggagggaaactggctcagagatggacaacctggcaagctgtagagttccctgcttcctgacatccagcctcattggaatatgcaagcaactccgtgtaccacagtaccacggtgttctggcagaccagggacacctgggccaatgggccatctggaccaaaggttggggtgtaggggccctggatggcagtctgctggcccagagcatgaatacctcgtgtgcctcctccctcaattactgtttcaccagagcataatcatagc

SEQ ID NO: 507943 - DNA, 462 bp, Homo sapiens
  misc_feature (14)..(14): n is a, c, g, or t
tcagaagagacccngtgccggagccacccagccgagccactgctgagatcctgaccctcagaaacagaagtaataaatattgttaatttaagctcctaaattgggggcagtttgttacacagtgatagataacgaattcatactccgtaattcccctcgcacatttgtggtgtctttttaaaaataccaattctcatatacacagtggtctgtttctgatcgctctgttgtgtttctcaggtatttttgtttctgtgcccgaactgataccgttctcactgttgtggctttgcagcctatcttaatatctggcagggtcggcctttcctctttgctcttatttttaaaaactgacctaagtttgggaggatggcttgagcccaggaggtcaaggctgctgtaagctgtggtcatgccactgcactcagcctggatgacagcaagaccctgtctcaaaaaaaa

SEQ ID NO: 507944 - DNA, 431 bp, Homo sapiens
gggacacggcagtgcacctgatcctgcatggtgactctatgagatcccctgaaccctcgagactagaggattcttattatcttcagtggacggatagtacacgtcgcagatctatccggaatttcgacctgcacttgagatatctatcaggctatgagacagacttcgactgtgcctatgatctcttctctgaggcctgtgtcagggaatataagggttttgagagaactatcttcgtccgggcaaaaactgaggttagcgggcctatcagctgtttcttctcactccaccactgctgctgactggaggagcagcctggatagcagccgccctcccgcaaacaggtaaaccacattacctattcctgtggcggaggcaaatggatggtcaaacctaacggggtagtgctgaagttcggggacaaaagccca

SEQ ID NO: 507945 - DNA, 101 bp, Homo sapiens
attttagcaacatgaatgaaaggcacctaatgttttaaattcccccttaaatctttggtgcctttcattcatgtttgctaaaatgccacttaatctaatat

SEQ ID NO: 507946 - DNA, 568 bp, Homo sapiens
taatctcctccttgataaagcaataacatgcttgagtctgtggcctaatagcatgtcagaatcctctcctggatggtgatttataggacagttgtatgcatatcaccagtctatcttttacaacttccgaccattacctgtatgctggaagtaatgacatatatgtggcatttatttcacaactcggggcaagttgcatatttttaccagtacgtgtcgagtacccacatcgcaggtactttttaaggcccccacattatatgccacagttacatcgacatatcagtcattcaccagtatcttgaatctaatggttctctcactcgcccacacatgcatgtatagcattcccttccatctcaagttccttgtgttgcctatgtggtccttcatatctccatgtatcgaagaaaccaacctatcttcccaccaccacgtcctcgctcattcgccctctcacctcccagcgtccacagtcacctcaagcctttctctacacccgaccctccacactaacattgcctctgcaaatccccatattgtggagccccacgtcgcatgcccgccc

SEQ ID NO: 507947 - DNA, 801 bp, Homo sapiens
tgcaagtacaagaaaatagctcttataaaagaatgtcttggtatgtctcaaggtaaattaaggatttactgaataaggtgtgaccaaatccagaccatttctattggatattctttatatttatttatttttggagatggagtctgtgcttggtcgcccaggctgtagtgcagtggcgtgatctcagctcagtgcaatctccacctccccgggttcacgccattctcctgcctcagcctcctgagtagctgggacctacaggcactgccacatgcctggcataaccttattggacatatttgagacgtacgaacactgggggtttcacacattgtttagccaggattggttctcaaatctccctgacctgtgtgattccgcctgcctgtggcttcccaaacagtgctgggacttacagtgcgtgatgccactggcgccttggccagaccattttaaaaaatgggcgacaattctaggtgagaacaaaatggcccttgtaacatatgcttaggtttaaattcagttgggatggcactacctaagcggaaaaatgggagaaaacttatatacgtttctcaggaggaaaattatcctgacatctaatgggtcatccaatgggataattattttaccccaagagattttcaagtaagttgacaaataaagttcttaagaactcaaggtgctgtggttacggggcataaatacttaaatctatttaaattttttaaaattgggcttttaggatccaaggcgtggaaaactttattaaaggattattactatgaatcactataacgg

SEQ ID NO: 507948 - DNA, 134 bp, Homo sapiens
tctagaggatccggtcggcgaaggggatgtaggcgtcattgccctgctcagtgtggctgcatttggctgcgtctggggtctggtcctttgtgcaaatgcttgggattccagttgtgagctgagagagatgatgg

SEQ ID NO: 507949 - DNA, 577 bp, Homo sapiens
actgatccaagatatgagtgtgaccatggatcaagtacaaatagcatttactttcagtgccgggcttatggggctaattttctattctcgtaaggaacatagtggatgaggaattaattagatggaagggagatattgacagctggaatttcatctttgcttttgtttaacatctatcatgggtagtgctcagggaggagcatgtgagggtgcagatcactaaaaaatcatatatatgtatatgtgtgtgtgtatcatatcacatatatatatacacacacaccagcaaaagaagtggacaatcagaaaattcagttcatgtcctaagtccttagcattacaggaaaatgcacagcatcaaaacctgaaataaaactaaccaggtcacctcaattagtcagcaagtcttataagaaaaaaataaataagagactcacttggaggttatactcttaacacggaatggctaagggtacacatctgattcttcatgagacccggacgactaaaaactccaatctcacctaggaagcctatctcctccactagtcatattacatcattcccttaagggcac

SEQ ID NO: 507950 - DNA, 914 bp, Homo sapiens
agcggagttcgcggtcgcagaggagacaccgccgcagattgccggtacatcgcgggatttcatggctctgtgtgcctcattgcgtccttaaatattcaggtgtgtctatttgatgaactaatcgagatagatgcagcagaaagcccaacgctatccaggcctagcgtttgtaaaacttaggaacaatacgagcatgagaacacgagagaggtttgacgcgctactcgagtttcgaatgcactgtagttgatctcgaaggactgtaacatgaagagccggagtagctagatttgcgaagcaagtatgctagagctttcgtatgatgcattcatggatgcataaactattgatataccggctgaagtatgcattgaaatcacggtcatttgaaacattcctggttgagcgtaggatgcgaactgcattggcccgcacggtaggatactacatggtctagcatggactattggatgcgataccagatcgtcttgcgatgtaatgccagcgctcaagcaacgattctagaagaaccaattgcaacagcatttttgcttcggaggttgtcttaacaaagctctaatccatggcgactatcaatataacgctggtaggacacacggttattgatagagtgacagtaaggaaagaagctgtgtagctagattctatgaaggcggtatttgcaagtagtacggagagggacagcaagcataagctagatgtagacgtgagtgattctttactggactaattggagacatctctaaattgtcagtaccgagttcttaagtgagacctttagtaactcgaacaatgtcgcggttgagcagaaaagagaggtttacagacagctatagagctgatgaaagcatctattaaaattcgattggaatatacatgagcacacggatagc

SEQ ID NO: 507951 - DNA, 431 bp, Homo sapiens
aagtcaagtatgattgtatttttagtagagatggggttttgccatgttggccaggctggcctctaactcctgatctcaagtgatcccccctgcctcagccacccaaagtactgggattacaggcatgagccactgcgccagccacctataaataattaagcccacatcccaagaatgacatttgcttacatcatcataataccattttaggtattataaatggtaatttcataatatcatctacaacccagatcatcgatttcttcaaatgaaggaatcatttttaactaggttataatcaaaaggttatttgggatggaagtatagtaatcctgtccctttatatccacaggggatggtttccaggaccctcacggataccaaaattcagatactcaagtctttatataacatggtgtaatatttgcata

SEQ ID NO: 507952 - DNA, 272 bp, Homo sapiens
cccaactgacacatgtaattctttgtacagtatttagaatccttcccttcattatagcagtcctctagatattcagtcttgtggctaatatagatcataaacatattttaaaactgtaaaagtaactgtatgactcatgcttcaagttctgaaatttgggagcgttatgaggtttccatgccatataccgctagatcatttgcattctctcacagagtacacggaagagaattgagaagacttgtaatcatcctgacttctttcatgagatg

SEQ ID NO: 507953 - DNA, 483 bp, Homo sapiens
tcaccaccttctgcctctgtttccccaactgtaaaatgagggaataggactagatttctaacttcacttgcagctctgaaagtctgtgatacatccgccttttccacaatgtctttgtctgttacctacaagtcttcaggagggataaaaattttggtaagtaccaaagcttttaagaaagaggacagaaacaaggccgggcgtgggtgctcacgcctgtgatcccggtactttgggaggccgaggtgggcggatcgcaaggccaggagttcgggaccagcctggccaatatggtgaaaccccatctctactaaaaatataaaaagttagctgcgtgtcgtgacacagacctgtggtcccagccacttggggggcttaggcaggagaattgcttgaacctgggaggcggaggttgcagtgagctgaggtcacgctactgtattccggcctgggcaacagagtgaatccgtctcaaaaaaaaaa

SEQ ID NO: 507954 - DNA, 109 bp, Homo sapiens
ggtatttagatcatgaaccttagctgtacctcctttacgatgccaacctccaagagaaactggcagatgttttttctttggtcaccttgaagctgaataacctctccgt

SEQ ID NO: 507955 - DNA, 255 bp, Homo sapiens
tgcgggtctcatatgacagcctcaaggtggcagaattggtcagattttgccatgtttcctgtgttccattttaacactgacagtcaagttgcctaacagcgtatgaacaacatactgacatgtaaagggagtttcatctctatgtcttcgtgacggaggaccttaaagagattttttttctgtattatacgtggatacagtacactgccaggtgaaacaggagccttaataaagcatgcttcgcccacacccctg

SEQ ID NO: 507956 - DNA, 186 bp, Homo sapiens
aatcaccattcctcaacaccattcaccatcatttggtgttggtgaactggtgttgaggaatgtgtgttcgtgaatggtgttggtgaatggtgttggagaatggtgttggtgaatggtgttggagaatggtggtggtgaatggtgttggtgaatgatggtgatattcgcacgggagtgttgaggaat

SEQ ID NO: 507957 - DNA, 321 bp, Homo sapiens
ttttatttattttctatattttaaactggttttaggcttttcatttactaggccatttattttaattattttgtaacacattcttattcatttaatcttttattgcttgtattccattgaaaatcatttaatattgaatcctgtatataatattttatttttaacgaattttgttgttttcactgttattttaactcttagtatttaagtaattaacttgagttattttaactcttaagtattattattggtgctgtattaatgtatatataatgcatgatgatcatgtatatgaatatagcatggtataaaccacaaaaa

SEQ ID NO: 507958 - DNA, 475 bp, Homo sapiens
attcggtgacctacagctcatagatagacggttgatatatgcctgactcacaggtgaacttttgccctatatcaactcatgttacttatgatcagtcttcatctctttctattattgcacattttgaattgtctaacttgcacccagattatatgtcatcgcccaactacttggtcaaatatccttttctctgtgcttggaaaaccccttctgggtggtgctcaaacggaggctgaggcaggcggatcatgaggtcaggagatcgagaccatcctggctaacgcggtgaaaccctgtctctactaaaaatacaaaaaaattagctgggtgtagtggagggcgcctgtagtcccagctactcgggaggctgaggcagaagaatggcgtgaacccgggaggcggaggttgcagtgagccgaggttgcaccactgcactccagcctgggcgattgagtgagactctatctcaaaaaaa

SEQ ID NO: 507959 - DNA, 336 bp, Homo sapiens
cgcgatgactggccctacgacagcaaccgtgatgccgggcttgagcaggtggccagcggtggcggctatccgtcctgcaggcagtggtgggccgatggcagcaatggcctgcgcgcacgcctgctggggcaggtagacccaagcctgctgaatcgcctggcgggctgggccggctttctgagccgagccgaggtggacgactcggtaatccgcaccatcgcctcgccgcggcagcagaaactgaaccagggcaacgtctatacggactacggcggccaaatcgacaagaccctcccaaacatcgtgacgcgggccacgggcggcgtcggcatggct

SEQ ID NO: 507960 - DNA, 688 bp, Homo sapiens
  misc_feature (1)..(1): n is a, c, g, or t
  misc_feature (175)..(175): n is a, c, g, or t
naaaggaattaattattttggtaagtaaaaacatccttttaaaaagagccactgttctttgggtggttccggttagtattccaaaaaagtctcaatttcctgccattaagacattttcttcctaatggtatctaccatgtgcctcaaaaatcttattaggaaccctttttcttcntgcccatgtctctgcgtgagccatcaaaatagtctagacccgtcatgtgaatatttcatttaatcttgagttagatagtatcagcttgtattttatcattaaaagaaactgagtttcagaggagttaagtcatttggacaagatcaataggaagccgagtcaaacgtaggtctaacaagcaaacccattctgtttccccataccaactgcctccctaaatttctggcgtgtctggccgggtgcggtgactcatatctgtaatcccagcactttgggaggccaaggtgggtagatcacgaagtcaggagatcgagaccatcctggctaacatggtgaaaccccatctctactaaaaatacaaaaaattagccggacgtggtggcgggtgcctgtagtcccacctactcaggaggctgaggcaggagaatggcatgaacctgggaggcggagcttgcagtgagccaagattgcaccactgcactccagcctgggcgacagagggagactccgtct

SEQ ID NO: 507961 - DNA, 750 bp, Homo sapiens
  misc_feature (111)..(111): n is a, c, g, or t
  misc_feature (134)..(134): n is a, c, g, or t
  misc_feature (148)..(148): n is a, c, g, or t
  misc_feature (157)..(157): n is a, c, g, or t
  misc_feature (191)..(191): n is a, c, g, or t
  misc_feature (208)..(208): n is a, c, g, or t
  misc_feature (221)..(222): n is a, c, g, or t
  misc_feature (247)..(247): n is a, c, g, or t
  misc_feature (333)..(335): n is a, c, g, or t
  misc_feature (389)..(389): n is a, c, g, or t
  misc_feature (391)..(391): n is a, c, g, or t
  misc_feature (443)..(443): n is a, c, g, or t
  misc_feature (501)..(501): n is a, c, g, or t
agcgggggggtggtccaagaatcacactttgagaaccagtgctttggccaatctccatgcagagaaagttctcaacctctgattgcaagtttattttgaccatttaccatnacttcaacttcaatgctcgtctngaagggcatgactngtcatcctnatataattagccccgtcttccagcgagatcaganccacaatacgccccagnctcgggaggacannagagagaatggaagtcgtggagaangaaaagagaaaagtctcagaggaccagggatataccctcaggactagcactgtgcctgccgtagaacggggcctgctcagtgtttnnngggttgagctgcatcttagaatgaaatcctacaactgagatggctaaaggaatnanaaatggtatctgtaatgttaaatttcagactgctgcacaatatgtcagtttnaggtactttttaaaagatgaacaagtacaagacttcaaagaagtctctcccttgtgangggtcccttccggcttcactttagagtctctgctagtttgagttcatctcatgtgggtgtttcaagggacacagagaagccctggtttagatgatgcagggttttctggatgccaaggtgagaatgataaaatgtctgaaggaagaacacgatgctatgcattccaggcagaatctggacttgaaaagcaatgaagcacaatacttttagatgaactgattcactttaatttcgtaacaatctagaaga

SEQ ID NO: 507962 - DNA, 113 bp, Homo sapiens
gtgctttctctgtctcccagattccttccctggttgactatgactcatgcttgtatcacttatcacatggaatttcccagtatatgaattaataaaaatcaatggtttaccac

SEQ ID NO: 507963 - DNA, 390 bp, Homo sapiens
acttgtctacttctctgcgccacaattggggacttgaatgttgcatgagaatacagtcagtcagggcagcaggtgtctgtcagggtgggcacagggtactctccaaaactgcttctccctcccttgtcaggcttcatacccaacaccctgcactgtacccttgacgcttggctcagagtgctacaggtgtgtggacacctggggatgtcactgtgttctactgtggccctcctctgcagtggccagcttggtgtctgagcctcttacaatgcagttactggcagggttgtaccaggccttggggaggacagtggctggtgggagggatttgacgggcgtcagaagtcactctagagcccaggtgccgaacaaaatggtcacatgacaggg

SEQ ID NO: 507964 - DNA, 441 bp, Homo sapiens
aagcagacctcagggtaatatgaaaattagccgggcatggtggcacacacctgtaatcccagctcctccggaggctgaggtgagaggatcgcttgaacctgggatttagaggttgcagtgagccaagattgcaccactgcactccagcctgggcgacacagtgagacaatgtctcaaaaaaaaaaaaaataagctgggtgtggtggcacacacttagaatcccagctaactcgaaaggctgatgcatgcaaaactgtttcaactatgggaggcggaggtaatagtagagccgagatcacaccgatacactccatccgtctcaaaaacaaaacaaaacaataatacagtcaacttaaagtctatccttctatgatcactaataagcgggataactctaaacaatgtccatgataaaaataatcttccccgggcggcattaaa

SEQ ID NO: 507965 - DNA, 544 bp, Homo sapiens
aggtggacagtctagttgcaggaaaacaagctcagagatcccactgagtctacgttatagtgagttgtagaatcatttcattatatattactatgtagtaataatagaaataaagtgcacaatatatgtaatgcacttgaatcatcctgaaattattccctcattcccagtctgtggaaaaattgtcttccacacattcactctgttttttggtagaggcagggtcttaatatattgcccagtctgatctcaaactcctggcctcaagtaatatacctctctcagcctcccaaagtgctgagattacaggcataagccaccaccctcaaccaagactttcttaaaccaaataaaaattaagtgagattacttgagccttgattgtctgggttccagtggttctcccacctcagcctccctagtagctgagactacatgcctgcaccaccacatctggctagtttcttttattttttgtatagatggggtcttgttgtgttggccaggctggccacaaattcctggtctcaagtgatcctcccac

SEQ ID NO: 507966 - DNA, 307 bp, Homo sapiens
  misc_feature (11)..(11): n is a, c, g, or t
  misc_feature (18)..(18): n is a, c, g, or t
  misc_feature (43)..(43): n is a, c, g, or t
  misc_feature (103)..(104): n is a, c, g, or t
  misc_feature (112)..(112): n is a, c, g, or t
  misc_feature (127)..(127): n is a, c, g, or t
  misc_feature (158)..(158): n is a, c, g, or t
  misc_feature (204)..(204): n is a, c, g, or t
  misc_feature (216)..(217): n is a, c, g, or t
  misc_feature (241)..(241): n is a, c, g, or t
  misc_feature (265)..(266): n is a, c, g, or t
  misc_feature (270)..(270): n is a, c, g, or t
ctgagaacgangcgatcncctctgcagagcttcggctcttccnggagcaggtggaccagggccctgattgggaaaggggcttccaccgtataaacatttatgnngttatgangcccccagcagaagncgtgcctgggcacctcatcacacgactactngacacgagactcgtccaccacaatgtgacacggtgggaaacttttnatgtgagcctgnntccttcgttggacccgggagaagnagccaaactatgggtagccattgnngtgntcacctccatcaagactcggaccaaccagggcagaat

SEQ ID NO: 507967 - DNA, 399 bp, Homo sapiens
tttagtagggcaattcccacacaactgcacccctagaggttctctttacccattttggtaactggcctcaaaaccaaatactctgcattttatcaaaataacttctgggctggtggggtggctcacacctgtaatcgcagcactttgggaggccgaggtgggcggatcacttgaggtcaggagtttgagaccagcctggtcaacatggtgaaaccgttctctaccaaaaatataaaaaattaccaagtgtcgtggagtgcacctgtaattccagttactcgggaggctgaggcaggcaaatcacttgaacccaggagacggagattgtggtgagccgagatcgtgccactgtactccagcctggatgacagagtgagactccgtctcaaaaaacaaaca

SEQ ID NO: 507968 - DNA, 248 bp, Homo sapiens
ttaaaatgaactgaaaaatgagattgaacatttaatattttggatgtaacttttgaagaaagtatgctttggtgcttaaaattgtatatgattttaggtaagaaactttgataatattggcataatttagatttattttctttcttttttttgagacagtctcactcagtcgcccaggctgaagtgcagtgagctgagattgtgccattgcactccagcctgggcaacatgagcgaaactccatctca

SEQ ID NO: 507969 - DNA, 256 bp, Homo sapiens
atggtccagggtgaagatgttgccactcgtcccattccacgtctagtgccacaggtcgcacatttgatggcactgtcttgggagagaagtgtgattgtggaatgtgttcgcattgcaggacgtctgattataatttccaatttcattgcccctgacaagtgggtgaccctacgagttctgtctgtcgagtcatgctcagcagagccttggacgtgatgcaatacaggacatgaacattcaaaccgcttgtcgctgg

SEQ ID NO: 507970 - DNA, 895 bp, Homo sapiens
  misc_feature (681)..(681): n is a, c, g, or t
  misc_feature (687)..(687): n is a, c, g, or t
ctgagatcagctgaggaaagctttgccaagcttcagaggatcaaaatgtgcatttgggaggggtaggcgggcagatggcgccagattaaaaagatgctgggctcgctcgctgctctgaggtctctgaattgcctccagcacagcagtgtgcaatcaggaactccatcacacgacctaaaaacttgttgagtctctccaaaaagacttagcctgctacaagatactgagggggattgagatgcacttccagagggcctgagattctagaagcccagcatccaccagatgcctgctgaagtcgatggctgctgcacactctgctgaggaatcagatttctgaaggtccttcataaatacttcagtctgcaaagatgaacaagaggagcccgaagaatgtcgtatgaaatgaagactgagatactgagattctctcaaaacagcctcaggtgaaccaggagaataagcaggttaataatctttagtgaggaggctgggagggagggggccacatgtgtgccgcatacctgtacaagagtacatatttcctgtctcttccatgtcacgttctcttaagccccgaggcgtctacactgacaatttccactgcacagaatgcctttctcctcttctctgcaatgagatcagctgctcctcagtgaagctttctcagaagcctcccanccccanaccgcacacacattgacagacacagaggacagacagccctgtgccaaacctcagcctgtgtctggggtcttctccaggcaggacctgaggttacctttctcttcctccctagtgcttagcacagtgccttggttcaaacatgcactcactgagcctaccctggccaaggtcccggcgctggctggactaggctggcagtgtgaagaga

SEQ ID NO: 507971 - DNA, 133 bp, Homo sapiens
attccaaagcgtggacttcatggacttcattacctgaatgttgccttcaatttccttatccaaaattagattagttaatatataatcacagaaataagctgaaaattattcttacaatataaatacgaccagg

SEQ ID NO: 507972 - DNA, 125 bp, Homo sapiens
  misc_feature (109)..(109): n is a, c, g, or t
ggcagtgccttgcggctgtaatggctgcccccagctggcgcggggctaggcttgttcaatcggtgttaagagactagcagggtggtcctcatgttgtgagggagcgggngatccctttttcctta

SEQ ID NO: 507973 - DNA, 193 bp, Homo sapiens
tcagtatcttcgacgtactgctccagggtggcttgccatgcactggcgtacaggcccagtcgatgttcttcttcgacagcttgtcgccaatatgctcgtgggtttgcggcaccagcacattgggcaggtctggcttggaataatccgggttttgcgggtcgcggatccaggtgggccagtagggtggggccag

SEQ ID NO: 507974 - DNA, 154 bp, Homo sapiens
tcaggttatactttgcaggagtgactggtggtgttgagtaagatgcacggaagaaaatgctggaatctctatcacagaatgaatcttggaacaagcacgtgcatttgagtcacttcgtacttttcagcataattgtctttcttggccatccacc

SEQ ID NO: 507975 - DNA, 337 bp, Homo sapiens
cgtactgtcgcagctggtggcctggtcgtcagtggaaaataataagggtggcaggactggagtcagttgaagagtgctagttgactagagtggcgacatcatgacattttaaaagtcaaacgggacacatccctgaggccatgagtttgaccttttgactataggcattgatgggtactgagacaaggaaggccaggaggtatacgtgatatcaagtataaatatgctagaggactcattgtaaaggccaggagttgactgaagactggggagaagggtccaccgttttgcagatgtcatttctccattccctgctacactctctttgtgccccacc

SEQ ID NO: 507976 - DNA, 857 bp, Homo sapiens
ggtggagcggccagtgggcaggatgacgagccagacccctctgccccagtccccccggcccagtgcgggcgacgatgtctactgtttgtggagctgaacgtcgggggtgagttccactaccagcacccgtggtgtaccctgaggaagtttccgggctcaaagctggcagatgatgttcgtctagtcgttagccaaggcctccatcggatcgcggagggccgcttcttcatcgagctcgccctcagtgacctatttcagacccatccgtggactaccatgcgcactgggcagagtgcccactagcgagcacatcccgtgaagtgtaccgtgaggctcagttcgtacgaagatcaagcctttggtcaagctgctggaggacatgccacagatctttggtgagcaggtgtctcggaagcacgtttctgctgcaagtgccgggctacagcagagaacctggagctcatggtgcgcctggcacgtgcagaagccataacatgcacggaacgtccagcgtgcttgtgtgcctggtggaaactgaggagcaggatgcagtatcacttcagagcgtcctgtagtcttctgcaggatcacgaagatgttcaaggtctgttgtcgggctttgggctccatgcgaaggccgggtcactgagacaatacgtgcgcatgatcagtagcgcctgccctggacagaatgcgcaccttgtacgggccccagggagttacgaaggcggcatatccttccacggtttcattagcctggaacgttagcccccaaccatgagaggacaacgaaacttcgcatacttggacccattgcacttccacttccagccgttctaccctgggtggatgaattc

SEQ ID NO: 507977 - DNA, 417 bp, Homo sapiens
gttgagcagccagcatcctatcactcctggggagccagacctgtgctgctggggttaggggacagccaaggggcccagccaggacatgctgggtgtcccagcctgcaggcaggctttgggaaagaaatttacttttgtttggatggacccactggtccctcatcaataaaggggccggagtccagccctgcacagctcactttgtccacatgctgctacagcctgaaccggtcaaggacacgggaagcagaaggagcctgttacagcccacgagggtgggagtgaggtggaggctgcccaggaacagtgcatcttgctctgcctctgtaagtacagggccccggagcagggcagacccctggggcacaggcctgatgctggaagagctggctaagctgggtaatcatcttcaattag

SEQ ID NO: 507978 - DNA, 328 bp, Homo sapiens
ggtgggggactgggcccacgtgttcctgtgtgagtcctggatgcccccaggccctggcaggggcttgtaatggagcaggggtaggtaggggtatgggttccagaactatacaactgggcccctctccagtgtccaggggcttggagagacctgctccctcccctccactctcccgggagtcgctgatcactgggacctggtctccagccgattgcaggggaggcgggtcggagaggcgtgtgcttgccgtgggtggcgcccttcccccgccctgcctggcttgatccttgtacttacttaattaaacaagcccctttttaaaccttga

SEQ ID NO: 507979 - DNA, 444 bp, Homo sapiens
ctgggctggcaggccgctgtcccccatctgccccccagatgccaggagccagagatacatgtgcgggaggggaggcacggccgatccctcaagggcggagccgtggtgtatgctgtgagctgagcagccaggactccagccccagacaagggctgctgcaagggggtattcccaaggagcccctggtgcggagagaggagctaggcagtacaacagtgtgatgcctgggcccacggggagttgtgcggcatcaaaaacggtgatcggtcccatcagacgacgcccatgtctgtccagaattagctatttgcacctgcaggatgctgttccagtgaaccgtgctcggatcaaaactcccctggagatacaggaggatgaagcagcgaggttgaggctgccgtgaactatgatggtgccactgcagtcaaggctcgacaagagagc

SEQ ID NO: 507980 - DNA, 201 bp, Homo sapiens
  misc_feature (109)..(109): n is a, c, g, or t
  misc_feature (117)..(117): n is a, c, g, or t
  misc_feature (186)..(186): n is a, c, g, or t
gggctgcacagcttctcaaagtgctgggattacaggcatgagcaccgtgaccggcggaaagtgttgggattacaggtgtgagccaccgcgcccggccccatgaaacctncttatatntgggtttgacgattaaagtccacaactggtcattgtagtgtattatactactacacacacagcacacancgcaatatgtattaa

SEQ ID NO: 507981 - DNA, 162 bp, Homo sapiens
tgagtatcccccagaggtattgagggaggattgctcagcccaagagctcaagaccagcctgagcacttggagaaatcctgtcacccaagctggagtgcagtggtgtgaccacagctcactgcagcctccacctccaggctcaattgattctcctgcctcaac

SEQ ID NO: 507982 - DNA, 115 bp, Homo sapiens
aacatatgcaactttaggaatagggatagatgataattttctgtattgtttcaaataagtgacttttcagccctgggtacacatagaatatatatttacacacgtcacaaatatt

SEQ ID NO: 507983 - DNA, 237 bp, Homo sapiens
ctctataatggtcagagagaaattcattttacaatccttttttctcccccgccaagatggagtttcgctcttgttgcccaagctggagtgcaatggcgctatctcggctcactgcaacctccgcctcccgggttcgggtgattctcctgccccagcctcccgagcagctgggattgcgggtgcccaccaccacacctggctaatttttttaatatttttaatagaggcggggtttcg

SEQ ID NO: 507984 - DNA, 370 bp, Homo sapiens
  misc_feature (257)..(257): n is a, c, g, or t
cctttaaaccaaaaaaaaaaaccccggttttgggcccccccgtgggggttagggggggggtttttggtttaaaccccttccggttttttttttaaggaagggccttgggtttggggggggacctctttaacccctattaggttatttgggggttgttttttaggggtttttttccccaattttgcccgggaaatttaaggggttggttaaaaaaaccccccccccccgtcccgggaaattttttcaggggcccaagnttttgggaaacccctttttattgcccccccggttttccccccccccttttaaattggggggttgttttcaccccgggggtttttttttttttttgtaaaaaaccccccgggga

SEQ ID NO: 507985 - DNA, 320 bp, Homo sapiens
tactgtcccgttctcctacagatgatcatgagcaaactgagcactaagcagcatcgagagcggggacactgacctggtgttcacggcgtagtctgcacctgaatgaactgagctgaagccgagaatattttttcatgacccttcgtaatcagcccatgtccctcagtttgtaccgacagttctgttagcatcaggagctacagacgctgaacgacctttacaatcaggatgacaatcaccaggaattgtgcagcttccacatccgagccagctatgctgcataatagcgtattgaggggcgagtagcagctctgcagaca

SEQ ID NO: 507986 - DNA, 882 bp, Homo sapiens
  misc_feature (33)..(33): n is a, c, g, or t
  misc_feature (83)..(84): n is a, c, g, or t
  misc_feature (86)..(86): n is a, c, g, or t
  misc_feature (91)..(91): n is a, c, g, or t
  misc_feature (114)..(114): n is a, c, g, or t
  misc_feature (131)..(131): n is a, c, g, or t
  misc_feature (144)..(145): n is a, c, g, or t
  misc_feature (148)..(148): n is a, c, g, or t
  misc_feature (162)..(162): n is a, c, g, or t
  misc_feature (190)..(190): n is a, c, g, or t
  misc_feature (194)..(194): n is a, c, g, or t
  misc_feature (209)..(209): n is a, c, g, or t
  misc_feature (214)..(214): n is a, c, g, or t
  misc_feature (259)..(259): n is a, c, g, or t
  misc_feature (292)..(292): n is a, c, g, or t
  misc_feature (296)..(297): n is a, c, g, or t
  misc_feature (307)..(307): n is a, c, g, or t
  misc_feature (311)..(311): n is a, c, g, or t
  misc_feature (320)..(320): n is a, c, g, or t
  misc_feature (328)..(328): n is a, c, g, or t
  misc_feature (331)..(331): n is a, c, g, or t
  misc_feature (338)..(338): n is a, c, g, or t
  misc_feature (355)..(355): n is a, c, g, or t
  misc_feature (370)..(370): n is a, c, g, or t
  misc_feature (372)..(372): n is a, c, g, or t
  misc_feature (376)..(376): n is a, c, g, or t
  misc_feature (378)..(378): n is a, c, g, or t
  misc_feature (383)..(383): n is a, c, g, or t
  misc_feature (407)..(407): n is a, c, g, or t
  misc_feature (418)..(418): n is a, c, g, or t
  misc_feature (424)..(425): n is a, c, g, or t
  misc_feature (429)..(429): n is a, c, g, or t
  misc_feature (435)..(435): n is a, c, g, or t
  misc_feature (442)..(442): n is a, c, g, or t
  misc_feature (445)..(445): n is a, c, g, or t
  misc_feature (452)..(452): n is a, c, g, or t
  misc_feature (462)..(462): n is a, c, g, or t
  misc_feature (465)..(465): n is a, c, g, or t
  misc_feature (470)..(470): n is a, c, g, or t
  misc_feature (533)..(533): n is a, c, g, or t
  misc_feature (554)..(554): n is a, c, g, or t
  misc_feature (569)..(569): n is a, c, g, or t
  misc_feature (572)..(572): n is a, c, g, or t
  misc_feature (732)..(732): n is a, c, g, or t
  misc_feature (817)..(817): n is a, c, g, or t
  misc_feature (822)..(822): n is a, c, g, or t
  misc_feature (875)..(875): n is a, c, g, or t
tatctcaaatgttacattgatgaaatcaatatnaaaaaaaagggaaaaaaagtgacaggcaaaagtgaagagcaccagacacnnancgcanacctaaagtagaccatgcttctntccttccactgacaggntatcgtcccgggnngtnccccaccccctcgntttcctcctccgctttccctaggccgtntagngggggcatctacgcntcgtnctcgccctcctcctcctcgaactccccttgttcgtcggccgtggngtcctggtactgctggtactcgggcaccaggtngttnntgttgttttnggcntcggtgaantccatttngtncatgttntcgcccgtgtaccagtnttggttggttttgtncnggantntggcngtgaactgttcggtgttgagcttntttagttcctngttggnngtgntgttgnagatganggnggccganatcttcaggncgnggggngggatgtcgcacacggccgtcttcacgttgttggggatccactccacgaagtagctgctgttnttgttctgcacgttgagcatntgctcgtccacctcnttnatggacatgcggccccggaagatgggagccaccgtcagtagcggccgtggcgcgggtcgcagggggccatcatgttcttggagtcgaacatctgctgggtgagctcgggcacgtgagcgcccggtactgctggctgccccggctggtcaggggcgcgaancggggcatgaagaagtgcaggcgagggaagggcaccatgttcaccgccagcttgcgcaggtctgcgttcagctggcccggggaancgcangcaggtggtgaccccgctcatggtggccgacacaaggtggttgaggtcccgtngtggggg

SEQ ID NO: 507987 - DNA, 834 bp, Homo sapiens
atagcataggtgttggcaagacattctttatggaatggctgtcctttctgtgcaactaatgcctttatggtgcatttacgtcagacatcattccccgtctagtttactactatgcttactcaacaaatgccacacagcctatgacaggatatgtgaataatagcctgtcagtattcctgatagctgattttccaaaccacactgcaccttcggaaaaacgagacttcatcactgtgcaggtacagagattacagatatcctcctgatgacgagaataaatattttcataatatgcaattctggcatgtccttgctgccaagaatgaccttcatcatgtgttatggaacatgtgtgttttagttaaattttgctggcctggatgatacctgatgttccaaaagatgtgtggagagaatcaagagagaaaagttaatgactatcaagattctccatgattttgagctcaacaaattaaaagagaacttgggaattaattctaatgaatttggcaagcatgtcatgattgaggaaaacaaagcacagtggtaaatcaacactctaatcagtatagggagggaagccagcagtgatctgcttattcactttatcctctgggtttagggggcagaagcaagaaagcatgtgttcattttacctttccttttttcttttttttaaacccaagtgtttaccacttgatagaggcccttggcctggggaaggtcacatctgtgcatagggggacccaaaggggttgggggaaaacttgagggggaacaaaagcataggttcgtataaaggggggcgcacagagaattgggttggggacccaa

SEQ ID NO: 507988 - DNA, 1218 bp, Homo sapiens
  misc_feature (224)..(224): n is a, c, g, or t
  misc_feature (318)..(318): n is a, c, g, or t
cgatgcagtgcactctagacgggtgagcctgttccgagaatgctgagagagtgagtggtgtgtgctccctggccatcatcatggcgaggagagtggactcgtttcctctgagaggcttccgcatatgccaggcaagcgcattatcccgagatataagtggtggcgcgactcgacaactactgtgcacactgtcctaggagtgcgaagtacgctccactctgatncactctgataccatgtgactcgtgtgtttgtactaattgccaatagaaagtacatgctatacgcaggcgcatccatagcgagtacggacacgtnactctttcgccagcgagagttctgctgctgcaagattgtggcttggcccagtagtagacatacaaccgggtgtggcaccgtgcatggtcgtttgaatagttgcctcccatgcggaatgtcatgagcgggacagccatgggagcctccgatcgaattgagaccgttggtgccccgcatcgcgcgatcgtccgcagaagcgcatcgtgcgcgaactttgagcgtggggccttgctgtcaccgtctcgtgcgcaaacgactcttagctatacaacgaagattgcgctagcgcgtagccccctttccctggcgaggagtgccgcactggggactatcgtcttgtggcgcctacgcttgagccgcctcatgggtgcttgggcttcctcgatgcgcatctttcgaacgggacgagggctccttgcatgtcttttgcgcatcaccccctgctctctttagtcctgggggggtttgggcccattgattccttccctcttctggaagccctaactggtgagagcccctgtagccctatggccaccatcccgtaaaagaccccggaggggggccatcgtcagacgtccccatgtgggtgttgggtatgggtcgggccgttgggttccctgcattcgctatgcgccgtgtgttggggacccgtggtgggtgggcctccttgtggcccgggatttgagaacccatgaggtggggtggcctttcgctcgttgcccacccaggacgaaaggtgcttcacagtctttggcaagcttatggtgtggcggaaatgcccggtaccacatcccaacggttccaccgggaacattccacaaacacttcagtcagagggatgcccgggtcgcaaatagaagggacttgctgtggcctttttccaaggcagaaaagtcctgc

SEQ ID NO: 507989 - DNA, 280 bp, Homo sapiens
  misc_feature (80)..(80): n is a, c, g, or t
  misc_feature (90)..(90): n is a, c, g, or t
  misc_feature (107)..(107): n is a, c, g, or t
  misc_feature (145)..(145): n is a, c, g, or t
  misc_feature (187)..(187): n is a, c, g, or t
  misc_feature (216)..(217): n is a, c, g, or t
  misc_feature (237)..(237): n is a, c, g, or t
ggccaacaccatgtggaagcttccaaaacctggggcttgcattctctgaagcaacagcctgggttgcaccttggccccgntttagccacncctggagctggagcagnaaaggaaacagggtgccatgtcccaaggttgcatagancacagggtcctaggcctgtcatagtcatttgtttccctcctnagggctaccaagggccctgccagtggggnnatggggctgcccttggaagngttcctcctgaaaattccccttggagagaacatctttttcccc

SEQ ID NO: 507990 - DNA, 110 bp, Homo sapiens
gcggccgcctactactactactactgctcgaattcaagcttctaacgatgtacggggacatgaatggattattcctaataattaataaaaaggtattttttctactaaaa

SEQ ID NO: 507991 - DNA, 788 bp, Homo sapiens
  misc_feature (229)..(229): n is a, c, g, or t
ccctctttgtgcacgtacacacacacacacacacacacacacacacacccctgctcaagagaggtatagtatacatgtctctgaactaaagtagtaccctcccaaattgtttttctctaataagctgagattcccctatttctctttaagggagacagcatcaccactagtagagatcgtcttttctcctttctcaccatctatcttatgagacgccagagtatatatngttcttgtgtcataaatcactagtgtagcttttgtgttccaagtgactttgcatctatcgtgctctcctttttgtgaatttttaacgagatagtaatgataatatgttgggtggattttctcccctgctgggcatcagatgtatggtaagaggggtgttaatcttatcagcccaggtagttgtagtggcagtcctgagggaatatttcgtggcccaatataaaccccagtaatctcaaatcttaacatttagaaatataagggctccagggccggacacagtggcccatgcctgtatatcccagcacttttggggggccaaggcaggctggtatcactctgaggacaggagttcgagaccagtctggccaatgtggggaaaccccgtctctatctaaatatacaaaaattaggcgggcatggaggggagcgcctgtaatcccagctactcagaagggtgaggaggagaatcacttgacctaggagggggagttgcagtgagccagatggcgccttgcactcccgcctgggtgacaagaggggaatccttttcaaaaaag

SEQ ID NO: 507992 - DNA, 543 bp, Homo sapiens
agcctggtccggaatggcgacatttcaaattctggatttgaggattagggatatcaacctatatttgcatttcttaaaaaaaacaatgcgttatttaaatttgaactagagctatgcaatgtgcctgaatatccttgttgttctttgtaagcatttgggcattatactcatttggcccaattattgggatttggctatgcgcatctcagatgccagaatgctcgtgggaagacgagctgctgttatgtgtgagcatgagaccagctggtaaacatgatgcccaaggggaactaaggtgcacatcttgccttaaaataaatacaatttaaggccgggcatggtggctcacgcctgtaaccccagcactttgggaggccaaggcaggcagatcacttgaaatcaggagttcaagaacagccaggccaacatagcaaaaccttgtctctactaaaaatacaaaaattagctgggtgtggtggtgcacgcctgtggtcccagctattcaggaggctgaggcaggagaatcgcctgaacctgggaggt

SEQ ID NO: 507993 - DNA, 318 bp, Homo sapiens
taaaaaatgtaaaaatttttttaaaaaaattttttttggtgaaaaaaaaaaaaaaatgctgtaaaaatttaagtgaaacgggtaccccaaaacggtgaactcccaaataaaatttttcccccctacaaaaaaaattttgcaaaaaaacctaaaagcctttaaaatttttgggggggaaaccccaaaaccttgggggaaaatccccaaaagggccttcttgaaaggaaggggaatttcaaaaaaaactttttttgggctttttgggggggggggtcccccgggttttttaaaaaaaccccctttttttttttttttaaa

SEQ ID NO: 507994 - DNA, 919 bp, Homo sapiens
tggtaaagcggcaaaggaggtggtggctgcttggggctccggaaacccgttcgggctggggctgtcggccgcggggcgaaggcactcgcgcgggggatggcccattgcgttgacctttggttcagcttgtccattttccttggtgaccatctctcatttgaccaaggacttcggcctccaatttctgacccacttctgcgttcctttaacagagatgtgcggagggggacagttggcgctgagctttggcccggatctgaacgtgttgcgagaactgtctcaagcccctgaagtttctccaagaatcttctacgagtcttgaagttaccgtctttgaagaacatgtccagaaagtctaacgccttgtggaatcttatgcactatagaacaacaagaacgccagaagtctgagggaatgatgacttcctataagggggtgctagagtgttcccttagagacacagtttgttgtccagccaggtactagatatcttcccctttagatgctagaacgccttggaaaacctgcttggcgcggggagaccatcacgggacttccgtggagaaaatcaagatccatttctggagttctacccgccaggttgatgggaaatggcccctggtgtacagatctgaggtcatcaagaaacaacctgaaccctacatggaagcgtttctcagtccccgttacagcaatttctgaggtggagaaccccagaaaacgctatccaggtgcaatgctccgattatgacagtgacggggtcacagtgatctcaatcggatacctttccaacaccagctttggcccaacctgtaaggacagtcccgagttaagttcgaatgcatccaccctgtaaaagcggcagaaaagaaacggtcaaaaacttctggaatttaccgggtcaaattgcgcgtaaa

SEQ ID NO: 507995 - DNA, 1155 bp, Homo sapiens
acggggtcctaaaatcgagggtccgcaatgggcggatagatacggcactataaaatgcttttttatattcctgaagtgcccatgttctgtatgcgccacatagtttggtcattcctaaacttcgtggtctccgcggcactatcgatccggaacaaagcctttgattccttgtaatagcacccttaattgtgcttccgatgcttgtattcggtccttcttgtccctgtgttccccttatggaagcttgcctcttaataatcgccaatacaaaagtcctattgggaccatgttaagatgctatattgatgcctcatattgcgttgaacattcaggtttgtcgcttaactttccaaggaatacgatatttgggtatctacggcgtctacaggcgtctgcgtttggggtccaaagtgtaatgggaccccctggcccttctagtcgagatgctggagcttcggacgacattaccccgttcatctagaaggaattttcggatgctctattcttagggaagactgtatctatggtacctatggaaagcagatgagacgactgggaacgcttcttctaggctctaggtgagtctgtcactgtgggtaacgttgaggcttatcttgcggataaaggcgctcttctaggggcactaaagctcacctactacggctcttatattgtactgtagcttatagtctctcttactaaggtgtcaccttagtaagcatctactaaattgacttctttttcttagttgtatggccaggcagtccccattttaggagttggcttctgcaaattcaagtccagttgagctaactgattggggagcaatttggtagttgtagacatttgcagggaagggagatgtctgattctaaatgggagttgatgctcaggtccccagccaggtttgcatccagccctgagacatgtaggaaacacctttcagagcccaggctctgaagattcccagaagccagcaaggattgaagggaaaaggtgatcctggtaactgttccaggattgctccaggtttgagatggtattgctaaaatattaaaattaaacaagaacccaacaaacagcttttaaagtgtcttctatctcattgtattttttttaactgccccaaataacagccgaggtcttttgctgaaa

SEQ ID NO: 507996 - DNA, 316 bp, Homo sapiens
  misc_feature (15)..(15): n is a, c, g, or t
cattcttaaagaccngtatctatgtatacttttggaaaaaaagattgctaagatccaaggatattccgaagtgcctctttttctgtaagagtgaccttttaaaccaatgtaaggttttggggaataagaatcgtccacattcccacaggaaatcattgctatggtctaccctaggaatgtgatagatagcttctataattatggcagcttatccatagtatgaaacctgtagttttaatggtttagaaatctatgtctcatttcatatctaactcatgtttttgatacgaatcaatatatatgttgatatcatgag

SEQ ID NO: 507997 - DNA, 500 bp, Homo sapiens
  misc_feature (20)..(20): n is a, c, g, or t
  misc_feature (404)..(404): n is a, c, g, or t
  misc_feature (440)..(441): n is a, c, g, or t
  misc_feature (447)..(447): n is a, c, g, or t
agacctcatctaagcatgcnctgagctactcatgacgctgccaagtcgacgcagtggagagtaaggtgccagacaaacctctccaccctcagtgacccggtgcagctagaagtccatatcggccctttcccgacccatgacctccatgttctctctttgtgaagtctgattacttggtgacatgatcgtgagaataagctctggcgatataagaatttcctctcttgaaggccatgctcagtaaattacttggtgacatgatcgtgagaataagctctggcgatacaagaatttcctctcttgaaggccatgctcagtaataaagttggtctcaccgaggccctgtgacaccttagaaaccacgaattgccaggctgagcaataccagtcccgcccttcccctncctggtgtttacattgagttctccttcacaatttcnngaccantccgtggccaccgtcaccttattcctgactgccacaagagtctttcaatattc

SEQ ID NO: 507998 - DNA, 570 bp, Homo sapiens
ctgatgataaataagtataagaaccatagacacctattatagcccagggcgcagatgaagtagactatcccagagtgcacgaagtaaagagagtagctctagcgcaaagtgaccccatccaaaaggatgatccaaagacaagctcattgtcaataacaccaagagatagaaccccatatagagtcaaactatctatgcctcccctacattctccactttgtagaggagatattcaaatcctctcttttcctgttgattactgagcagctgtggaatccgcctggctcacaattatgccttcctttggccggcataacatgcaagcagaagtagccacatagtgatcatggacttacttcagatgtataataaatgacatcccatgagaatgccttgacagcagctgatggcacttggcaaaggcattcttcatatgccataggatagaattatcacttaactaagagtaagtgtctacaagcaactggagatcaggaactagagaaataattccatgtcccaaattgaaggttacagcagaatatacagtggagtgactagcatcccgag

SEQ ID NO: 507999 - DNA, 333 bp, Homo sapiens
gcaaggccccaggggtcctccctcttaacccatgtaggtgccagagaaaccacccccactccatgagaagaggctcagacagcaggctccgggccacgcagcccagaccacacctgccacggtcttccaggaacggtgctcacggacggcaaaattggaagtaattgggagcgatcctcagagagtttacaatgtgctttttccgccaatcagaactgtggacaaaacttcctatttcctacaccgcagctgtctgttcaccttcagtcagagagcactcctgacctttcgtaatgaaatggaagcctccccttgtctataaactcagtgtct

SEQ ID NO: 508000 - DNA, 243 bp, Homo sapiens
gcttttgcaacccatgtccgtctgcgcgctatctcgacttacggcatccagtctggatccggatagttggtgcacgagtagtaagaatgttgtcaggctgaggtgatactctgtcagtcccggttcaataattcgtcagtgtggaagtctctcgggtaggaattaaagtctgtcactccggatggtaataagtccgcataagggggggaaaatccgtatgatggaggacctagcgaatgttca

SEQ ID NO: 508001 - DNA, 637 bp, Homo sapiens
tagtagggatgaggtctctctctcttgcccaggctggtctcgagctcctgggctcaaattgactccctccttttattgggcattgacgccaccattgccttatgcctttaattagaacgacagatttaactcacagaggtgtccactttcaaaggggtagcctcttgaaagagtagactcctgtggtggtaaggccctccgtgagcatttgcagcctcttggtgccccgcagtggaagtggcaaggcagtggcagtggcagtggcagtggcagtgcgactgcgcatgtggtatagacaatgaagaacgggcagcggcagaagcaaggtacaggaagcccccgttagggcgaagaaagaatttgtgcacgtttctaggatctctacttttccctcgagggccccccctttatccatatcatgtgccacgatgtgggccaccctgtggcctcttgcccgacatatatgacccgtggctctcttgtgggttttaccaggggcaaaccgtggggctctcatacacaaaccgctgtgtgccatctctattttaaaagagtttagcacgaaacagtaggccgaagcattggtgtggcctcatacccctgtgtttagctccccagacaccttgtgggaggccaa

SEQ ID NO: 508002 - DNA, 126 bp, Homo sapiens
tctgctgctcctcttcagcgcaacggacagagctagacagcgctccacggacacctttgaggaacgggagcgccagtcccaccaccaactggaccctcttacacaaaatattacacccattttggc

SEQ ID NO: 508003 - DNA, 426 bp, Homo sapiens
  misc_feature (143)..(143): n is a, c, g, or t
  misc_feature (304)..(304): n is a, c, g, or t
  misc_feature (361)..(361): n is a, c, g, or t
gaaacacaacagtataaatactatagtaaagttgggtgcagtggatcacggctataatcccagcactttgggagaccaaggagggatggtcacttgagcccaggagtttgagaccagcctaggcaacatagagagaccttgtntcaacaaaaaattttaaagttagccgggtgtggtggtttgcacctgtggtcccagctactcaggaggctgaggtgggaggttcgcttgagcttaggaggtcaaggctgcagtgagccatgattgtgccacttcaccctgggcaacagagaaagaccctgtntcaataaaaaaggaagagaaaaactgggagtgaggaactcttcctcctcttcataantcatagttttcccacgtttagggaaaatgctttctggaggagttaaactttaaaagttactgtgt

SEQ ID NO: 508004 - DNA, 649 bp, Homo sapiens
agcgggcgcaccccgttaaatcggctaaatgagagcaagggggcacccggaggggtcctgtgggtttcaagggtcttgagaggttgttcacggggctattgaggccccctttcctatggggcctttaaagcaggggcttaggctttttagggcataaggcttttttcggaacccaatgagggtgtcatggagaatgtcccggtaaaggattgttataagccttactgaggttgacagcccctttcactgtccctggtgcagaatttgatccttgacaacgtgattttggaagtgaaatgtgtgcataagttacacctctgggggcagttgcagggccacggtctgggcaagcggcctgtgaccgttctgtgaaggcagtaactgacaggcgaggctccggggtcaagcagtgaggctctgtgatctcggagggctgcacatctggcatcctgttatgggcagtgtccttcatctttgttcacacacaagaatcggcatggtggcagcctctcgcagtcaaacactaagtaaaaggggttgctctggcccctgacatgaatttagcacgacgaccctgactacgaagtaattgttttccttggcaagccctaagttgtggaacgactcgcctagttttgtgctaaaatga

SEQ ID NO: 508005 - DNA, 954 bp, Homo sapiens
  misc_feature (44)..(44): n is a, c, g, or t
  misc_feature (81)..(81): n is a, c, g, or t
  misc_feature (142)..(142): n is a, c, g, or t
  misc_feature (399)..(399): n is a, c, g, or t
  misc_feature (561)..(561): n is a, c, g, or t
  misc_feature (615)..(615): n is a, c, g, or t
  misc_feature (625)..(625): n is a, c, g, or t
  misc_feature (631)..(631): n is a, c, g, or t
  misc_feature (700)..(700): n is a, c, g, or t
  misc_feature (702)..(702): n is a, c, g, or t
  misc_feature (707)..(707): n is a, c, g, or t
  misc_feature (804)..(804): n is a, c, g, or t
  misc_feature (821)..(821): n is a, c, g, or t
  misc_feature (824)..(824): n is a, c, g, or t
  misc_feature (854)..(854): n is a, c, g, or t
  misc_feature (856)..(856): n is a, c, g, or t
  misc_feature (858)..(858): n is a, c, g, or t
  misc_feature (866)..(866): n is a, c, g, or t
  misc_feature (871)..(871): n is a, c, g, or t
  misc_feature (953)..(953): n is a, c, g, or t
gacacgcgcgtggggctggtgtggggagcaaagcgccgggcctncccgggaccctggtttccctgaggaccaacgtgaatnggggccccactggaaagaagcttggggctgcagagcggatggaatgcaggcccaggttgcngggtggtgccctcagctcctggcagggttgacgggtggtggccgccgggctctgccagccgatggtccgctggcacctgaccctgttttccagcttcacttccgggcctgcccgtagttgtaagttaaccaagcacaggtctccttcaccgcctgcttgaagggtgttaaccggaagtagggcaggaaggtcctcagcttgctgttactggctgttttcttaaactgcccaaccgactaggttgtttcaaaggtganttccccatggaagttcatggcctccaccaccgcctcggctgcctccttgaaggagaactcaactccctcgcccacggagaggatgaagggctccacttcattgtactcccgcagacccagaaaaagagctgggccaggaccagcgagtatataaactgcctncgcggattccctgttccccacaacgtcaggccgagccgctgctcttggccaggngcaccttgtngattangccaggaagcacgtggccatcctcgatgttgaagttgttgtggggcccgaagacgttggtggggatganancagtnaaggtgcagccgttctgctggaagtaggccctgttctgcacgttgataaacctcttggcaaaagagttcccaaaattgctgttgttgggaggccatngtggattaaggtctcanctnttgggtaggtcgtcttgttagggaagaaanangnggacaggnagganaccaccttgcgggcgcccaccttaaaggccgagttcaggacgtttgtggttcatgttcatccgggaattcggaccggtacanc

SEQ ID NO: 508006 - DNA, 231 bp, Homo sapiens
tttgcagactgctgagtagctgggactacaggcgcccaccaccacgcccggttaattttttatttttttgtattttatgtaagacgaagttttaccgtgttagccaggatggtctcgatctcctgacttcgtgatccacctgcctcggcctcccatagtactgggattacaggcgtgagccaccacagctggctggaagtcgcatttcgagatgatcagctctttccttct

SEQ ID NO: 508007 - DNA, 214 bp, Homo sapiens
atacatataaactactatatatattatacatgtataatatacataatctaatatatattatacatgtataatatataatctaatatatatattataaatgtataatacataatctaatatatatattataaatgtataatatataatctaatatatatactataaatgtataatacataatctaatatatatattataaatgggtagtcacaga

SEQ ID NO: 508008 - DNA, 546 bp, Homo sapiens
agtgggttgttgctggccccccccaaatgccacacgcggcccttttcccgcaggggatttttgggcctaatcatgttgttgccaagtcccgcttttgggcctttgtatttccgttaaaaaaaaaaaaaaagttttcaggggaaattgtttcttgtgggcaggggttttaaaagtcccccccgggggtgaaaaattttgggttttggttgggttattattcccggaggggcccccccaaaatgttccgggaataccgggaccttacccccccaggggtttttccccagtgtttccaaaaaatgggggcccggccccgggcccgggccccttccttttagttttttaaggtgggggagttccgggccaccaagtccccccggccgggttttaagcagtttcccgattccaaaattaagtttccgttgcccccccgggttttgggccgtcagcccaaaccccgttttccccccaaaaggccccaccccttttttttgggggggggcccttgtccgggggggccccaaataaatttaggaaggccccgga

SEQ ID NO: 508009 - DNA, 1143 bp, Homo sapiens
ggcgccatgccctgtgccccgcattgcttgccgcctggggccaggcctgtggatgctgggcttcgccgagtcggcgccggcgtggcgactgcgcagcgagcagttccccagcaatggtggtgctgtggctgtgcctggcatggcttgggctgctggccgtgtgctgcctggtggccccagtgccctggcctgctgagcttgtgctggtctgccctgctctccttcctgctgcaggtgtatgcgccgctgcctggccgcccggacgccttccacctgctgcatcttcctcttctgctgcctgcgagcatcctgtgcttgtgccgtgctgcgaagtattttcaggaatcaactacccaggaaaaacgatttttactcatatgagccaccttctgagaatcctcccccagaaacaggagaatcagtgtgtctccagcttaagtctggtgctcatctctgcagggtttgtggctgtttaggccccaaaacgtgctccagaatgccacaaagcatattactgcagcaaggagcatcagaccctagactggagattgggacataagcaggcttgtgcacaagcagatcatctggagcatataattccagagcacaacttcctttttccagaatttgaaattgtagtagaacagaagatgagattatgctgaggttgtggaagggaggatgatcagagatataggggagtggggactccaagcagtacgagccaacactcccaggtcgtcacactgacaggagacatacttgcggccgccccacactaacactatggggcgcgtcacgggcacactagaactgactagagtccgactacgtcttcctggcacagcagctacgctactcaagccggcctcaaggcacaccgcgtggacagcatacagtagagaaagaaataaatattatgcaaaccacagagaaggctagccaaggattgaagagaagagagagggagaggaaatacagtagggaaaaatagtcaggtgtaaataaataggagagaggcaagatcataagatgtaagacgagatacacaggtgaacgcagggaaagaaaacaacattactaagtaggcgcaggaaagaggaagagaacggagcagagagcaaggcctgctatctatagagg

SEQ ID NO: 508010 - DNA, 135 bp, Homo sapiens
tgaaaactgaatataggcaggagagtcatggatgtggaagtctgattctcaaagttttttcacttctctgtggctccgggaactgtctcatcctcacatgtgagctctgggttgttgttggtgtagatattggtg

SEQ ID NO: 508011 - DNA, 161 bp, Homo sapiens
tctcgtaccttacgtctacagtgttagagatatgtgatttcgatcatactgtgtgcccccaattatgtctaaaactaaatttggcttcaactatgctgtactcctgccatcggacttcaagccataactgctgtcagtacttcaagggagagacttctaga

SEQ ID NO: 508012 - DNA, 150 bp, Homo sapiens
gatccaacaacagcaaaacatttttacagtgtctgttaacccaaagttctcgtatacacattgaggaaactacagtatctctagcaatgctattaccgctctagagcgtagttaagtagatatgcaccttctgggtcccaatcttattgt

SEQ ID NO: 508013 - DNA, 122 bp, Homo sapiens
cctggtcccacccagaccataataccagccaggaagcgaagcagatgatgaataggaggctcatcgccatggcaatgaccaggcctatgataatccagtaccaagagacggtgtaatcttca

SEQ ID NO: 508014 - DNA, 135 bp, Homo sapiens
ggtgatgattaggaatgaggtcgaggtaaagcatcagtttgccactctggttgcttttattgatgcacgttcgtgagtgacgtgcaatgcgtcattctggaatgcgaattccttggtccgccggcaatttttcga

SEQ ID NO: 508015 - DNA, 343 bp, Homo sapiens
  misc_feature (68)..(68): n is a, c, g, or t
  misc_feature (282)..(282): n is a, c, g, or t
  misc_feature (308)..(308): n is a, c, g, or t
  misc_feature (310)..(310): n is a, c, g, or t
cacatattcatgatgaaagttttcaattaaaaaatacataaggccgggcacggtggctcacaccagtnatcccagagctttgggaggctgaggtgggaggatcgtctgcgctcaggagtacgtgaccaggctgggcaacatggcggaactctgtctcttccaggaatacaaaaagttggctgggcgtggtggctcatgccggtggccccagctgctggggaggctgaggtgggaggatcccttgggcctgggaggcaaaggttgcagtgacctgagattgtncctctgcactccaacctgggtgacanantgtgacctcgtctcaaaaaaaacacacacacat

SEQ ID NO: 508016 - DNA, 746 bp, Homo sapiens
  misc_feature (1)..(1): n is a, c, g, or t
  misc_feature (117)..(117): n is a, c, g, or t
  misc_feature (171)..(172): n is a, c, g, or t
  misc_feature (186)..(187): n is a, c, g, or t
  misc_feature (196)..(196): n is a, c, g, or t
  misc_feature (203)..(204): n is a, c, g, or t
  misc_feature (267)..(268): n is a, c, g, or t
  misc_feature (285)..(286): n is a, c, g, or t
  misc_feature (399)..(400): n is a, c, g, or t
naacttacggctaggtacgaggctgggtgtgctgaaggtcccctggcagtgctgagggaccgagcccagcagatctcatgtcctctatacctgtgtccgatgctggaggccctcgangaaggggggccgccgctgaccctgggcctggagggggagcaccagcggtccaanngccgccttgtgccnntgcatgctntgcccanntgcttggcttgcatgctggcagtgacctgccatggtgcttggtggatgccaaatggcatccanngccatgtggctcctgtnngcagctgcccctgtgcacctgtgttccagcccacatcccacatgcgtgctctggtgcttcgtgaacactggagtgtgcctgtggccggacgcatgtgtgctgctggctgctgnngcccctcacctgtgtaccttggactgtgttgctgcacacctgccatgcagcgcgcagtgcctgcgtgcgctggttccgccaggcgcttgcagtggcctggcgagaggccgatgctggttggccccgatggttcgatgtcttgctcttcaattgctacctggggacctggtgtgaccctggcggccctgcttgaagctgctgcagccctgccagtttgactatgccgtcttctgccctaacctgacagaggtgtcatccacaggcaacgcagaccaacagaacttcacagtgacactggaccatgtcctgctccgctgcctggaacaccagcagcactggagacaag

SEQ ID NO: 508017 - DNA, 107 bp, Homo sapiens
tctctccacactggcatctttaataaaagaggcaggtttcctcctggagtagtgaatatgttcctggttatgggcctacagcaggggcagcttctttgatcaacttg

SEQ ID NO: 508018 - DNA, 384 bp, Homo sapiens
  misc_feature (282)..(282): n is a, c, g, or t
  misc_feature (287)..(287): n is a, c, g, or t
  misc_feature (353)..(353): n is a, c, g, or t
cgcctgtcatcccagcacttccggaggccggggagggcggatcacctgaggtcgggagttcgaaaccagcccgatcgacatggagaagccccgtctccactaaaaatacgaaatcagccagacgtggcagcgcatgcccgcaatcccggctactcaggaggccgatgcaggagattcgcttgaaaccgggaggcagaggttgcggtgtgcctagatcgcgccaccgcactgcagtctcgaccacgaagaataaaactctgtcacggggaaaaaaaaaaccanttatncacaaaatagaaccagtgagcgtgaaaagataactggctcagtactaaaagaagaagttggtggancggataaaatcagaaggggggccaggtacaa

SEQ ID NO: 508019 - DNA, 399 bp, Homo sapiens
  misc_feature (17)..(17): n is a, c, g, or t
  misc_feature (55)..(55): n is a, c, g, or t
  misc_feature (93)..(93): n is a, c, g, or t
  misc_feature (123)..(123): n is a, c, g, or t
  misc_feature (207)..(207): n is a, c, g, or t
  misc_feature (226)..(226): n is a, c, g, or t
  misc_feature (264)..(264): n is a, c, g, or t
  misc_feature (327)..(327): n is a, c, g, or t
  misc_feature (336)..(336): n is a, c, g, or t
  misc_feature (377)..(377): n is a, c, g, or t
gtctgaagttcagaganccttaccacatgtctaagaccacataccttccatcagnccttctatgctcccttttcccattctcagatctctganctcaggatgctttttacaactggcagtgtnttacaatccagtggaagtatttttctgcttttagtggtatataaactaatgtatcttatattagcttagattcaatgaaatatngtagtcagtattgaagtcnaaattgaaacatatttcacaagtctgtacatcttcgcntttcaaggagtttattatctagttggagaaaaaaatacgtaggaaaactcccacaaatctttnctgcaaatnacagagtagggttttcatggaacactggagtgggagggccntcactaaagctggcaggggtgg

SEQ ID NO: 508020 - DNA, 88 bp, Homo sapiens
ggatttgctggtgcagtacaactaggcttaataggcttgaattcgagcttctaacgttagaagcttgaattcgagcagtagtagtagt

SEQ ID NO: 508021 - DNA, 1642 bp, Homo sapiens
taaattggtttggtttaaaaaaaagtaaaggggcagcccaaagttttctaacccaattggtcccctactccggtgtaaattttttccccccgcgggcagggggacccaggggtacacgcaaagggagaacaaaagcagggagtggagaaggtgagagggcggttccactcgggtggtgcaactacagcgccagggaggggctataaaggctccacaggcttaaaaggggttggtagagcccccttgggcggtgtccagggagaacctgagcttgcccagggtgcagtggtcgatgtggttagttggggcggcccccggggcgcacaagaggggcgaatgggtgacaccgcgcccaagatttcctcccaacatcccccagtggagatcctgggggctaaaacaggggggggtgtcgagaagaaactctgtgactcatcacaacacggtcactacagaggcgtgttgtgtggggcccccccgagaccctctcccatataatattgctgcccctgtgggagataaccccaaaggaagaggctcacccagagacaaagagggagagaccggtgagacagagaaagcgaaatcatctattgcgggagaaccgcgcgagaggctcccacaatggtttgtggatcacccaggggtgttccacaattatttccccaataatgaggcgtggggggggcgatcaccccacacggagagacagaagtgataacccacaaagttctaaccccacacgtcgggatcgtttcgcggctctctcaaacaactgggggcgggccccaatggaaggtctactacaaaccaaccacgtgggtggggcaccccctgatgtggaagagtcgtgtgtacccaccacagagtgcagcacatatggtccagacagcggcgcgccaacaccatctgagggagaaaccagccatgcgagagcagtcgagtcacaggatcagagagcgacacacaaccactccttaatacaccccaaagatggagggcggcaataggacgcacagacatctgcggctatggattcccccccaacaaaagccctctaagaaccggagcaagtggaggtcccccaagagaacaaccacatcaggtgcaccacactctgcttcggcgagaccgaacgggcgcacacaaagttcgggcgagcaaaccgcaccttacggacaaagcacccacgacgacggcgccttctcaaggagacgcaacaacaacaccctgatgctgcataatgcatgaacacaaaatgttacccggactgccgcccactactggtatgtcagagacgtgtgccgcgaccacgtagagaccaacgatacttacctcgcaccacaccaaacagacgccgccaatgacccacgaggaagcacaaaacaacaaaagaacacgtacgctctcctcactacttacgcgagaacgagcgaggtgaacaccccgtgtggggcgcctacaggcccccacaagcgcgaccggaagaagaaaatctaccacagcagagatcaccacgcaagtgaacacggggggcaccaacggacagagcagagatggtgatgtgcccacagcgaggggtggacgagccatattcagggagaaaccagtgtccgccggagtcccccagagtcattaccaa

SEQ ID NO: 508022 - DNA, 1349 bp, Homo sapiens
taattcggttcagtcgaatccttttggtagtccctcataggcccaaactttagggcttaggattgatgatttaattaagaagggaattgacattaacttatttagagtggcgaggtttagatgtgttgtgttagggcctcagtggataggggttaaaaggagggcaatttctataaactcaaattatattaagaaaggtgtaaataccctcctctacaaaagaaattttatatgtgggaaaagagggcacccgggcgcgtggggaatctattagggtctcgaaacccgcccccctcgcttagagggggtggaattttctcctattgttagccccgtgttgaagattgtggggggataggtctcacacagatgtgtgtaacacacaaaaaaaaacaaacaagagtgcggcgcgtggccgggtgtggtgccaccacgcgtttattttatctccccccacgcgcaacactctctagagacagacagtaccaccgaaggcgagagagaaaatctcaccctgtgtgaggccccccagagagagcgttcataaaaaggcggtttgacacagagagaccccagaaatatgctactcatattgtccccctgtgtggcccctctcacacactgtgtggggcatggaacaaccgtctgagcacacctctgtgttatctaataacaaacacaacaacaaccaaacaaagattttttttggtgccaaccaacaccgccgcaacttctttccaccacaccaactctcatttttcaactctcctttatatcacccgcgtggaacaacacaaacacaaaaaacacccaaccacacaaacaacaaacacaacaaacaaaccaccacacacaaaaacaaaaacaacaaacaacaccaacaacacacaccaacacacaccccaaacgacacacatacaagcactcccaccactcccatcatcacactaactcaaatcaaacaccctcaacaaaacacaaattaactctaattccagatccccctaccgtccatcctaaattatattaactacttcttcttcctcacgaacacgcccaaacaccctactaccaccacacacacatctacacaccaaagtcttacatacaaaagaaaaccaacctctcccacacctctgcatacaatcatactattaaaaaataaaaacaaatataaaaaaagaatacaatatactaacatactatccaatatacacatcacagaacaaaacaaatccagaataaatagtcaaatctatagaaaaaatcacacccccacctcaccaacaacaaatcaacaccacaaccaaaacacaccaaccacacaaacaaaaacaaacaaattaaaa

SEQ ID NO: 508023 - DNA, 1771 bp, Homo sapiens
  misc_feature (1752)..(1752): n is a, c, g, or t
aaacgacccgaagactcattgagttttgagtctgttaccttgtgactaaactaaagtgaagatgtttctggagtccctgatgaagagccttatttgttttcttcttccctacaggttgttttctgcatggaccgtgccctagaatttgcccctgcctgccatcgcttcaaaatcctcaaggcagaatgtttagcaatgctgggtcgttatccagaagcacagtctgtggctagtgacattctacgaatggattccaccaatgcagatgctctgtatgtacgaggtctttgcctttattacgaagattgtattgagaaggcagttcagtttttcgtacaggctctcaggatggctcctgaccacgagaaggcctgcattgcctgcagaaatgccaaagcactcaaagcaaagaaagaagatgggaataaagcatttaaggaaggaaattacaaactagcatatgaactgtacacagaagccctggggatagaccccaacaatataaaaacaaatgctaaactctactgtaatcggggtacggttaattccaagcttaggaaactagatgatgcaatagaagactgcacaaatgcagtgaagcttgatgacacttacataaaagcctacttgagaagagctcagtgttacatggacacagaacagtatgaagaagcagtacgagactatgaaaaagtataccagacagagaaaacaaaagaacacaaacagctcctaaaaaatgcgcagctggaactgaagaagagtaagaggaaagattactacaagattctaggagtggacaagaatgcctctgaggacgagatcaagaaagcttatcggaaacgggccttgatgcaccatccagatcggcatagtggagccagtgctgaggttcagaaggaggaggagaagaagttcaaggaagttggagaggcctttactatcctctctgatcccaagaaaaagactcgctatgacagtggacaggacctagatgaggagggcatgaatatgggtgattttgatccaaacaatatcttcaaggcattctttggcggtcctggcggcttcagctttgaagcatctggtccagggaatttcttttttcaatttggctaatgaagggcaaccacccagaacccagaaaatgcagattcactcagtttaatcttgaatgtggaaacagttcacctcctcccttcatcacgtctccgtgtgcttagagcagtttcgttttctcagttggatgccctgtgtctctgtgagtggggtggagcaaagggaaccaatgccgaagaccgagggcaggggagggaggcgggggtggacagggaggcagcttgtgaatttttgttttactgtttaactttattaaaaaagaaaaaaaaaaagagaataaaatgttttgacccttcctggccctttgctctggcatctgcattgtctccagtctgtgagccagagctgagcccgacctggacttggggtgcagcaagctgctgcatgcgggctgtgggcacccagcctagtggcaggtggggcactctgcctctcccagacctgtccagcatgtgagtgctaggcaggccccggctgtgcctctgggcccagcctaacatcagtcacagagaagcgagttcagaaagcatgctcactttacggtggggccccagaaatcactagaagctgtgtgtgtccaaagctcaggtgggtactaaaagctgtgtgcgtccaaagctcaggtgggtactnacctagacagggcagttta

SEQ ID NO: 508024 - DNA, 403 bp, Homo sapiens
tgctgtgttagaacataacatataaataaacgatgcaaatggagcagccattttaaactatatatatatagccactatttattgtgcaggtatttgagcggcttcctctgtcagctgccacccggctcttcttaacctgtattgtattctgctcagcacggttaacagcacaacgtgtgtggatcaaatataaaggccacacctttcagcacgaacctactcaaagatcctttactttgtaataatttgaactggagaaccaaagacgggagcagaatgcaagcaaagatgctcaaagacacaaaggaaagcactgaaggaatccacctgcataggccacgcgtaccactctgggtcaaatgcttccacgatgcagaaacctttttttaaaaaaaagtttctg

SEQ ID NO: 508025 - DNA, 2328 bp, Homo sapiens
ccggcctcccacccagctctctggtcccggcggtaagatggcggctgccgcggagtgcgatgtggtaatggcggcgaccgagccggagctgctcgacgaccaagaggcgaagagggaagcagagactttcaaggaacaaggaaatgcatactatgccaagaaagattacaatgaagcttataattattatacaaaagccatagatatgtgtcctaaaaatgctagctattatggtaatcgagcagccaccttgatgatgcttggaaggttccgggaagctcttggagatgcacaacagtcagtgaggttggatgacagttttgtccggggacatctacgagagggcaagtgccacctctctctggggaatgccatggcagcatgtcgcagcttccagagagccctagaactggatcataaaaatgctcaggcacaacaagagttcaagaatgctaatgcagtcatggaatatgagaaaatagcagaaacagattttgagaagcgagattttcggaaggttgttttctgcatggaccgtgccctagaatttgcccctgcctgccatcgcttcaaaatcctcaaggcagaatgtttagcaatgctgggtcgttatccagaagcacagtctgtggctagtgacattctacgaatggattccaccaatgcagatgctctgtatgtacgaggtctttgcctttattacgaagattgtattgagaaggcagttcagtttttcgtacaggctctcaggatggctcctgaccacgagaaggcctgcattgcctgcagaaatgccaaagcactcaaagcaaagaaagaagatgggaataaagcatttaaggaaggaaattacaaactagcatatgaactgtacacagaagccctggggatagaccccaacaatataaaaacaaatgctaaactctactgtaatcggggtacggttaattccaagcttaggaaactagatgatgcaatagaagactgcacaaatgcagtgaagcttgatgacacttacataaaagcctacttgagaagagctcagtggtaagtgcctctgatgggtagggggaagagggagttgccgctggcctcaggggaattgccttgtggatgacgaagcagacccagagatgttgtgaggtcatttggtccttccccctgcctctaggtgggattgttccagccctagactatctttatagacctccagcggaggagattgcacaagctccctcagtctcccatgcctgtgtctaacgcccctcacggtcagtaagtttcctctgatgcctgacccaaattccttttgttaaaaagtttaaatccatttcctttggagattttattttgtgttgtacacttatgctctaccctggcacagtgcttgacacataggtgctcactgaataaatgttttgttgaatgaatgtatggtgcttggaagagaaaacaactcttggagacagttgagagttgtacttcatcctgtttgttctgggcgagggaagacaatcttagagttggaagagatgtaatccggctcagcctcccaggataaaggaacttccttttgaaacaccctggatggctactctctgcttgagtgttttgagtggagggcactctgtgtctgacagggtgattatgagccaggatgtgcctacctctaatgctcacatttgccccagagtcagggtgctccctggcatggttgctcctcttactcttagacccaccagctggttttctccagataggaacagggctaggagaaatctttctcagaaatccatctcttctgatttcagattattctctaggcggagaaaaacttcccgtctttaaagttcttagagaagatgtatttattgtatactaatcctccagcacctgctccactccttattataaaatgtcatatccaaagaacagatgctgtcactgatgcctgatgagccagtagtttaagcttccttgtctcatcagtggtacagaatatctcatggactacctcccacttagttttctcaaaattatctcacttaaaataggaaaactgctgctgtgtgtgatgctttttttaaaagtgaatttctaagttgatgactaagtctgtccaacagaaacatacagggaattataacttctgtgagactgactgtcagtcattccatctttgcaaaccactggcacacagaagcagaagctttggaagacaaaaaaagcaccctttgattcagccaaagactgactttaacagacgcaaaatgctatatacatgaaggtgtttgctgcaattttatctataatagcaaaaaaaaaaaa

SEQ ID NO: 508026 - DNA, 2202 bp, Homo sapiens
ccggcctcccacccagctctctggtcccggcggtaagatggcggctgccgcggagtgcgatgtggtaatggcggcgaccgagccggagctgctcgacgaccaagaggcgaagagggaagcagagactttcaaggaacaaggaaatgcatactatgccaagaaagattacaatgaagcttataattattatacaaaagccatagatatgtgtcctaaaaatgctagctattatggtaatcgagcagccaccttgatgatgcttggaaggttccgggaagctcttggagatgcacaacagtcagtgaggttggatgacagttttgtccggggacatctacgagagggcaagtgccacctctctctggggaatgccatggcagcatgtcgcagcttccagagagccctagaactggatcataaaaatgctcaggcacaacaagagttcaagaatgctaatgcagtcatggaatatgagaaaatagcagaaacagattttgagaagcgagattttcggaaggttgttttctgcatggaccgtgccctagaatttgcccctgcctgccatcgcttcaaaatcctcaaggcagaatgtttagcaatgctgggtcgttatccagaagcacagtctgtggctagtgacattctacgaatggattccaccaatgcagatgctctgtatgtacgaggtctttgcctttattacgaagattgtattgagaaggcagttcagtttttcgtacaggctctcaggatggctcctgaccacgagaaggcctgcattgcctgcagaaatgccaaagcactcaaagcaaagaaagaagatgggaataaagcatttaaggaaggaaattacaaactagcatatgaactgtacacagaagccctggggatagaccccaacaatataaaaacaaatgctaaactctactgtaatcggggtacggttaattccaagcttaggaaactagatgatgcaatagaagactgcacaaatgcagtgaagcttgatgacacttacataaaagcctacttgagaagagctcagtggggattgttccagccctagactatctttatagacctccagcggaggagattgcacaagctccctcagtctcccatgcctgtgtctaacgcccctcacggtcagtaagtttcctctgatgcctgacccaaattccttttgttaaaaagtttaaatccatttcctttggagattttattttgtgttgtacacttatgctctaccctggcacagtgcttgacacataggtgctcactgaataaatgttttgttgaatgaatgtatggtgcttggaagagaaaacaactcttggagacagttgagagttgtacttcatcctgtttgttctgggcgagggaagacaatcttagagttggaagagatgtaatccggctcagcctcccaggataaaggaacttccttttgaaacaccctggatggctactctctgcttgagtgttttgagtggagggcactctgtgtctgacagggtgattatgagccaggatgtgcctacctctaatgctcacatttgccccagagtcagggtgctccctggcatggttgctcctcttactcttagacccaccagctggttttctccagataggaacagggctaggagaaatctttctcagaaatccatctcttctgatttcagattattctctaggcggagaaaaacttcccgtctttaaagttcttagagaagatgtatttattgtatactaatcctccagcacctgctccactccttattataaaatgtcatatccaaagaacagatgctgtcactgatgcctgatgagccagtagtttaagcttccttgtctcatcagtggtacagaatatctcatggactacctcccacttagttttctcaaaattatctcacttaaaataggaaaactgctgctgtgtgtgatgctttttttaaaagtgaatttctaagttgatgactaagtctgtccaacagaaacatacagggaattataacttctgtgagactgactgtcagtcattccatctttgcaaaccactggcacacagaagcagaagctttggaagacaaaaaaagcaccctttgattcagccaaagactgactttaacagacgcaaaatgctatatacatgaaggtgtttgctgcaattttatctataatagcaaaaaaaaaaaa

SEQ ID NO: 508027 - DNA, 837 bp, Homo sapiens
gtcaaccagtgaggctgccctgaacaaaaaaaacaaaatagaagaaagagacacagaggacaagaaggaatctgataacaagaggcatttccagcccctatgttattgatggaaaaagaataaagaagaaaagcaatctcgcagtacatgttacttgtcgaaaaaattccggacaagactaccctggtttttatgttttcagtattctgaaatataccagttgtgtggcagttctcgcagatgttacctaaaactgctgaacttgaccggcagaatgttctgccgtttctgctccctcgacacttgattgggagggctgtcgacctcttcctcccgtgggggcttccccagtgcctatcttctcgtgatagtcatggagaggttacacttaatttaatgggagatgtaagttggtgggatttggtattggtctggtttttagaaaaatatatttaaatatataatagatatctatcgctatagaataatgctttaataaaatgaggcttttttagaggaagaccaaaaaattcaatgtcttaaaaatatatttaatgggcaatgcaaaagtcttcctgcttaccgtgctgaacttttagaacagaggatggtattgcaagacaaagttgacttgtaaagtgatctccctgaacatttttaaggttgacttttctgaaatttataccataacagcagtgcattaggacatataatgttagctggaaggttcaattttacggggtattgaaatacgttaattaagaatgtttaaaaatcctgaaagtttatatagatattgggaataggattaatgggtggaatagattgtaatcccga

SEQ ID NO: 508028 - DNA, 488 bp, Homo sapiens
  misc_feature (14)..(14): n is a, c, g, or t
  misc_feature (60)..(60): n is a, c, g, or t
  misc_feature (111)..(111): n is a, c, g, or t
  misc_feature (139)..(139): n is a, c, g, or t
  misc_feature (153)..(153): n is a, c, g, or t
  misc_feature (341)..(341): n is a, c, g, or t
  misc_feature (483)..(483): n is a, c, g, or t
gccctgaatttganaaaacctggtaatttttgaaagccttggggtacctgccttattttncccccaaaagcaagcattttgggtgtcctccccttagggtttaaagcctanatttccttgggaacccccaggagtaacnggaatagggagcantgtagggataaaactttccccccttgattatcaaaaggagtcttttggctggcacccgaggctcatacctgtagtctcagcactttgggaggccacttgaggccagaagattgcttcagcaggagttcagcagcagcctgggcaacaaagtgagaccccatctcttcaaaaaaatttttaaaaattanccaggtggtggcatgcccctggtcccagctacacacgaggctgaagcaggaggattgcttgagcccgggaggttgagactacagtgagccgtgtttgtgccactgtactccagcctgagtgacagagtgagaccctgtcttntaaaa

SEQ ID NO: 508029 - DNA, 1759 bp, Homo sapiens
  misc_feature (1740)..(1740): n is a, c, g, or t
ccccaagcgcccttccctcttgtaccccccctcttctttatccccctagggcccttcagaacgggcgcaaacttggccctccggtttttttgccgccccctttttttgttttggatctgctctaattattttggaacattaagtggaacatttgaccttttagtagccgctccagcattatagggagacagagtatggggaaagtcttgtgtaagtgcaaatggcattccatttgttgagaaaacagcccaatgaagcaagctgaagcagagaaagcttcctttggggcagcagttggaaggagaagggaacatgtcctaggagtgggatcaggtagcatgttttgcacgggatggggcaggtttgctcacttgcagtctgaagtgttgggaaaggaggggagtgagactctccaggaaagctttggagatctgttctcagtgtcatcagttctcttcgaacatttctaatttttcaccttttcttcccttccatgttacttgccctgctctacagattttgatccaaacaatatcttcaaggcattctttggcggtcctggcggcttcagctttgaaggtaggtgggcctgctgttcttgggagttcccagatcacaagccaacacactcattgcctcttaggcagctctttgggagtcagaggggcccatgagcgggggcagctgaattctcatctagcagggcatctatccactcggctgttgctaaggatgaagacaggaaggttcccaggcaccccttgccttgggacctttagccaccgcatctctgcagggtcagggaggcatctctaactgcctagtaccaaggcttctctgcaagagcaaaggtactatatagataatgctgaggtcagaagctacccatgtataatacagtcacgtgctccctcttgcacccaaaaacagcctgagctgtttgatacccatagagtttctctctgtgtttgagtttgaagcagcccttgaagacttttccataatcagagcaaagtgatcttccttagaaaatccatagccaactaccaacccctcttttctctttcagcatctggtccagggaatttcttttttcaatttggctaatgaagggcaaccacccagaacccagaaaatgcagattcactcagtttaatcttgaatgtggaaacagttcacctcctcccttcatcacgtctccgtgtgcttagagcagtttcgttttctcagttggatgccctgtgtctctgtgagtggggtggagcaaagggaaccaatgccgaagaccgagggcaggggagggaggcgggggtggacagggaggcagcttgtgaatttttgttttactgtttaactttattaaaaaagaaaaaaaaaaagagaataaaatgttttgacccttcctggccctttgctctggcatctgcattgtctccagtctgtgagccagagctgagcccgacctggacttggggtgcagcaagctgctgcatgcgggctgtgggcacccagcctagtggcaggtggggcactctgcctctcccagacctgtccagcatgtgagtgctaggcaggccccggctgtgcctctgggcccagcctaacatcagtcacagagaagcgagttcagaaagcatgctcactttacggtggggccccagaaatcactagaagctgtgtgtgtccaaagctcaggtgggtactaaaagctgtgtgcgtccaaagctcaggtgggtactnacctagacagggcagttta

SEQ ID NO: 508030 - DNA, 1252 bp, Homo sapiens
  misc_feature (1233)..(1233): n is a, c, g, or t
cctacggatccccagtttgccttcgtaacttcaaggcattctttggcggtcctggcggcttcagctttgaaggtaggtgggcctgctgttcttgggagttcccagatcacaagccaacacactcattgcctcttaggcagctctttgggagtcagaggggcccatgagcgggggcagctgaattctcatctagcagggcatctatccactcggctgttgctaaggatgaagacaggaaggttcccaggcaccccttgccttgggacctttagccaccgcatctctgcagggtcagggaggcatctctaactgcctagtaccaaggcttctctgcaagagcaaaggtactatatagataatgctgaggtcagaagctacccatgtataatacagtcacgtgctccctcttgcacccaaaaacagcctgagctgtttgatacccatagagtttctctctgtgtttgagtttgaagcagcccttgaagacttttccataatcagagcaaagtgatcttccttagaaaatccatagccaactaccaacccctcttttctctttcagcatctggtccagggaatttcttttttcaatttggctaatgaagggcaaccacccagaacccagaaaatgcagattcactcagtttaatcttgaatgtggaaacagttcacctcctcccttcatcacgtctccgtgtgcttagagcagtttcgttttctcagttggatgccctgtgtctctgtgagtggggtggagcaaagggaaccaatgccgaagaccgagggcaggggagggaggcgggggtggacagggaggcagcttgtgaatttttgttttactgtttaactttattaaaaaagaaaaaaaaaaagagaataaaatgttttgacccttcctggccctttgctctggcatctgcattgtctccagtctgtgagccagagctgagcccgacctggacttggggtgcagcaagctgctgcatgcgggctgtgggcacccagcctagtggcaggtggggcactctgcctctcccagacctgtccagcatgtgagtgctaggcaggccccggctgtgcctctgggcccagcctaacatcagtcacagagaagcgagttcagaaagcatgctcactttacggtggggccccagaaatcactagaagctgtgtgtgtccaaagctcaggtgggtactaaaagctgtgtgcgtccaaagctcaggtgggtactnacctagacagggcagttta

SEQ ID NO: 508031 - DNA, 242 bp, Homo sapiens
ccctgtgaggagaagtcctcagttattggatgaacaaattcctattttagccaccagatctgaagttaaggataattctgccacagaaatgaattgtagcttgatgtgtgtgtgtgtgtgtgtgtgtgtgtgtgtgtgagagagagagagagagagagagagagagagagagagggttaagggctcgggagggtaaagggatcccgggagtgtaaggggctcgggtagagagctcgaatgcg

SEQ ID NO: 508032 - DNA, 123 bp, Homo sapiens
  misc_feature (16)..(16): n is a, c, g, or t
  misc_feature (67)..(67): n is a, c, g, or t
  misc_feature (95)..(95): n is a, c, g, or t
taattgagtcttgagnatttccaacagatgcacaccccggaaaaaaatgtatgccccgaaaaaactntgtatttttgctttagttttccagctgnttctatctatagctctgcaaacgagatc

SEQ ID NO: 508033 - DNA, 122 bp, Homo sapiens
caggcatgagctagacctcagtggtggggcctctgcttcaggccccgcctggctgacattctgagcccccctcggaggccccggccacagtcaacctgcccagttctttcctctgaggcttg

SEQ ID NO: 508034 - DNA, 102 bp, Homo sapiens
taactgatactgtgtatctagagctatacatcgacgggctgacccctgcggggggatcgttctttatcagatcaaaccacccgtcggccctctcggcccggc

SEQ ID NO: 508035 - DNA, 240 bp, Homo sapiens
gcgtcgacctattctctgagcttgtctgtaaccacagccaagcatgccttctaattttgtcaaatgggattagacatatgtaggctaagggaaaaagccactaatcccaaagcctagatggtacaaagtattgtagatggcttaatttctaagattttggtactattctagccctattgtcatttcagttattatgtgaagaaggtcatttaacagactatatgtaaggattttgtgatt

SEQ ID NO: 508036 - DNA, 629 bp, Homo sapiens
  misc_feature (10)..(10): n is a, c, g, or t
gacgaagtgntggggaagcagccgctccggagcctcgggcccatcaaaccggcagccgggaagaaacggacagagctggtcccatgaaggcagatgtggagatcccctttgaagaagtcctggagaaagccaaggctggagaccccaaagcacagactgaggtgggcaaacactacctacgccttgccaacgatgcagatgaagaactcaacagctgctcagccgtagcctggctaatccttcctgccctttccttactttgtgttggatttgttttccaaatatgtgtgtatgtagacttcatggtagtgtttcttatttatttggttgctgctaagccttgacagtggttcaccttcctgggctgtccccagtggtcacgtcctgcctggcttcctacttgggtatagcatgtccaaactgggctctgaacactacagcctgccttggagctggcctatctctgggggtgttagagagtttgtggggatctcttctgagtaccccaggacttgggaaataatgcaagagtatccctttcagtacataggtaagcttggctatgttcaatatgcagagccaaaagccaagttctaaggcagccgaaataaaaagctttgaaacctaaa

SEQ ID NO: 508037 - DNA, 1048 bp, Homo sapiens
gtctctctggtccgtgcctccaagatgacaaacgaaaagaaggaacaactggtcgtgccatacaaagggccgtcgagccacgtgcatgcctattcgtctgcacataatctgtgcccgatgcgctgaccaatggacaagggcgcattaagaaattcgatcaattcgaatacgatagtgcgaggccagtcgagcgagtcagggacagtttcatgagatgcggagcggtcttcagatgcctatgttgcttcccgaagctgtatgtgaatgctactttactgtgttgagttgtcgcaattcacaagttaacagtcagtcgatggcacatctgcatcgtccgttgcagagccctgcaataggcaacctgatacgtagcgctcgcgacccactagattttgacgcaccatagcagcgagttagctttggcgcccgacagatcaccacacgaatcaaaatgccacccattgacttacaatgagcaggtcgtgccatggctctcgtttcagagaggatcatgtagaagaagccaggggcatagtttacttccttggggcacgaacaaagacacttacacagagttaggccagaacgtgtagtttaaccgtgtaagagaaaccaaaccaacatcatacaccagatagagaacaatgctggacgcgacacagagaaactacccatcccagtaattttgcaaaggttgatgttggaagacacaaaacaacggaagaccgtggaatatacgccaatacaattaagtgccgaacacaaacatgagtgggtcatacacccacaataacgcatatgttggacaccatagacggccgtaggcattaggccaacgatccacaccccgtacggggagttcaaataaaaccaggggggatagacccccaatacctggtatgcgcagaggggcgctagctcggagttaccaataggcgagcgaattagagaaccaaatatacaaaagactcggtggacaataacaacagagggaacgattgtgcgaatatataggacaacgcgtcagcgaatttgaggcggtaccact

SEQ ID NO: 508038 - DNA, 550 bp, Homo sapiens
  misc_feature (24)..(24): n is a, c, g, or t
  misc_feature (28)..(28): n is a, c, g, or t
  misc_feature (56)..(56): n is a, c, g, or t
  misc_feature (79)..(79): n is a, c, g, or t
  misc_feature (81)..(81): n is a, c, g, or t
  misc_feature (93)..(93): n is a, c, g, or t
  misc_feature (98)..(98): n is a, c, g, or t
  misc_feature (228)..(228): n is a, c, g, or t
  misc_feature (231)..(231): n is a, c, g, or t
  misc_feature (249)..(249): n is a, c, g, or t
  misc_feature (263)..(263): n is a, c, g, or t
  misc_feature (294)..(294): n is a, c, g, or t
  misc_feature (298)..(298): n is a, c, g, or t
  misc_feature (302)..(302): n is a, c, g, or t
  misc_feature (305)..(306): n is a, c, g, or t
  misc_feature (308)..(308): n is a, c, g, or t
  misc_feature (319)..(319): n is a, c, g, or t
  misc_feature (331)..(331): n is a, c, g, or t
  misc_feature (344)..(344): n is a, c, g, or t
  misc_feature (370)..(370): n is a, c, g, or t
  misc_feature (378)..(378): n is a, c, g, or t
  misc_feature (404)..(404): n is a, c, g, or t
  misc_feature (407)..(409): n is a, c, g, or t
  misc_feature (417)..(417): n is a, c, g, or t
  misc_feature (419)..(419): n is a, c, g, or t
  misc_feature (422)..(423): n is a, c, g, or t
  misc_feature (443)..(443): n is a, c, g, or t
  misc_feature (464)..(464): n is a, c, g, or t
  misc_feature (470)..(470): n is a, c, g, or t
  misc_feature (473)..(473): n is a, c, g, or t
  misc_feature (543)..(543): n is a, c, g, or t
cgcgcggccccggcagcccctgcntcgnttctccgcgactcgcggacgccgcctcntccacttcgcgaacgccgggtgntngggggcggggcnttgcngctgcggaggccggagacgcggcggcgctggacgcggaggcgctgggcgcacggcgcggaccggccggagctcgaggccggcggcggcgggagagcgacccgggcggcctcgtagcggggccccgagatnccngtgtggcgtgccggagcntcgaaaagagattntcagcgctgattttgagatgatgggcttggnaaangggngtnntngcttgaagtcnccgcccctcgtnctggccgccctgntggcctgcatcatcgtcttgggcttnaactactngattgctagctcccggagcgtggacnatnnngacacggntnatnnagctggaaggcagggtccgnagggcggctgcagagagaggngccgtnganctgaagaagaacgagttccagggagagctggagaagcagcgggagcagcttgacaatatccagtccattnacttctt

SEQ ID NO: 508039 - DNA, 186 bp, Homo sapiens
  misc_feature (103)..(103): n is a, c, g, or t
gcccagactatggtctttttaatcagtcattgtttacacaatgaacagaatatgataattagtttaaaacaaaacaaatgatttcgactcattagactatganttacttcataattatcaagtgccattagtatacataaacatcttataacattcacgattgacggtaacaccacatataaggct

SEQ ID NO: 508040 - DNA, 350 bp, Homo sapiens
  misc_feature (189)..(191): n is a, c, g, or t
ttttttttttaaaaattgttttgaaaaaccaaaaatttgttttgttggggtcccaagggagaaaaaaaaaaaaaaaatgctttttttcccaaagaacggggccaattgccttttttggaaagggaaacctttctaggccagggaatttccggttggttttagccccccccattaattccctgtggtttnnnggaatttaccccctcaaattaacccctccttttttaaaaaaaccttttttttgtttggccatcaaaattaacttggggtttcccccctttttggaaatattgtttttgtggcccctttttttgaattgttttttagtctttaacccaaaatgggggcca

SEQ ID NO: 508041 - DNA, 643 bp, Homo sapiens
ttgcgcgggctcgttaactgctgcgtctagccgtacagccgcccctgtatatacggtgacctgcatgcgcggtccagagaccgtcccggccccaaaacgatcccgcagcaaactcatggcaccgacccgaatcgggacgcacaatggcaccttccactgcgacgaggcactggcatgcgcactgcttcgcctcctgccggagtaccggagatgcagagattgtgcggacccgggatcccgaaaaactcgcttcctgtgacatcgtggtggacgtggggggcgagtacgaccctcggagaaaccgatattgaccatcaccagaggtctttcacagagaccatgagctccctgtcccctgtggaagccgtggcacgaccaagctgagcacgattgcgggaactcatctatctgcacttcagggcacaaagcatgctggccccagtttgctgggccacatagtgaaagaggacagcatggtgggcaaccctctatgacaagatgtatgagcaactttgtggcaggaggtggaatgctgtggcacactgggatctcccaatgggccgagcggggagcctcgatatgcacttgaccataaacctgagtgcacgagttgctcgaacttaatcctacctggaaaccacac

SEQ ID NO: 508042 - DNA, 502 bp, Homo sapiens
gcgaggtcgatctaaggatccctatgtctcgatcgtaccagcaatggggggtaacctgagccccctctcctccccttcctcaaccacgggacgtttatatattataggcaggcatgcaatgggcacctagtcagatcttctcagcttgctagccagaaatgactgtgattctgctgggggctgctgagaaggtaatgtaggttgaaaaggggctctaagtttatttatttcgttagatggacacttccacacactcccgtgtagtccaggtagggcccagaaataggaaaggctaggatgggataatgctgcaaatgcttttttggtgtgagaaactggagagatgtgatttctcctttggggagagaatgtcccagaatcgattaggctgagccttgggaatagtttggcaggtttaacatcccaaggttaagctaacgtagttgggaaaggtagatggaatgagacatgtattctgtgcttctaagggttctgtccctta

SEQ ID NO: 508043 - DNA, 131 bp, Homo sapiens
attagtgatcacagaagaatacagggaagggccaagttcaagcctgtaatagaaaaaagagaagatgagaatcaggaagaggctcttgtagctttcagaagtcccgtttacgtttaagtttcgggtcaggt

SEQ ID NO: 508044 - DNA, 1397 bp, Homo sapiens
gctcctaatagtgtgggcttctccgtcctctgctatggagttggggcctgctccttttggtttgtcgcggcgcctttggatatagtgtgcacctgcttctatcctgggggttatctggagactccgggttttatgaattattgggtgaagattccctcctgtgcttgcccagattatctttcttcggatggtttctacacaggggccctttgtaccacgctgtgtataaaattggggatatatccccccctgtggaaaatgttgtgcccccacatatatgggccacagattgttttgaagtagagggtttcaggggcctaaaaggtgccccagtttgtgggtttccccccgagtaacatgtgtgtcacgagggaatagggccccccgcggagtaaatggtgggcccccaagtgtgtggaaccccaaaggagaattgttgggcaccacagttttttgggggggttgccaaactatgagaagaaagggttcttttaatatggaaagagttgtaaacaccccgcagttgaaagttttttccttcggccccccctggggggagcccccacacactgtggaggaccccccctcggggcccacacgggctttagagccccctctaagactgtgtgttgtatactgcagttgggataacgcggggaccacgtgtcatcctccctccccgccccaatgtgctcttcacgcggattaaaaaatgagtatgggtgtcctcggcacaccctcgtttcgttgtgtcttatatgaagagaaaagtttcacagaaaagcgctgatatatatacacgcctgtgagactatacccacctctcttatgcccccgcgagatatactgtgtctcccgcggggtgctcacaaaatgtgtgggtgttgggagaccccttccccacttatatgggagaatatggtgcccacattccaccccaccttttagcccacacctgtttacccacaaaaccacgcggttgtggtcacactggagaagaattttgagacacataatgttggaaatccactgagacgcctttgcacagccttgtttctgcggcacacatatagtgtttaaagaaactctgtgagtttaacaccccagagagaaaggtgcacaatatatttagaaggagagggggcgtaatatagccctggggccacaccctctttggagccatttggctgtctggatattttgtgacccctgggacacacacacacactggagagaatggcgccacgaaattcgtggtgttgccagcccctgtgccattgggggtgggatggggaaacgaccacaagtgtgttcagaagagaatgaattgctttaactttggaccacccccattttttttttaactaattaagtactagggtgccaaaagtggaaaa

SEQ ID NO: 508045 - DNA, 1202 bp, Homo sapiens
gagcggaatagatgcatagtgtctaaaatatatttgcattaaggccagggtatgctatactaataatctgctctccactctaaatatttaccacctatattcgttactacttgtgctagtgatctattgtgccataagatactggtttgtgatgccgtgtgctctatatacataggcttgccgaagtagttctcataaagtcggttttatgcactatatgttacccgtgctcaagtcgtctgaatgtgacctcatcacgccacttttcctaaacagcatcggctaaggatctcatttcagcttttgattattcttctgaatgaccaagatttaattagaagcacgactaggatagttgattgtgagttgaataatataacattgatgctagtacgcatgcattagggagagatgtcatttgtaaagtacatttttggatggcataatataagaaataactattgatgctcatcatcactcgctgaaatatagcgtgtatagtacaccttgtacctattcttagttccgaagctcatgctcattagggttctccaaaaattactaatttatagacgaccagatcggactccttggattactctgaactagttagtagtccgaaactgaactcggaagtcttacggctttaggggaggacatatcctttatataggcactcacatagaatggggtaacaggcctcaccacggtgctttctccttgatcagaccatttatttcatggctacttacaagtggcgcactcaacatacgagcatacagcagctgtgtttcgaaagtaggttacccatcaagagaaatcacgggatccgtcggaacgacggtctaggacacttgtcctcagactggacactacgctgaagctataccctccaacaacgctggcacacccagtgccaattacaaccgcgcagcgtaaggtcataaacgtccaatgaaagcagggcaccacccaatttacgtacttcgtgcggcaaccacctttgcgggccagtttgaggaccataccagggaccgctgacacaagccaaacctgtatcacaaacaaggggccaacaaggggcaacacagcgccgcgccacaacccgctccacgatcacacctgcaatagcgcagcaaggccccaaccaaggccccacgacagggcaccgcaccaccgacactcgcggacgagacacgagc

SEQ ID NO: 508046 - DNA, 333 bp, Homo sapiens
aatctgggcctggagagctgccgggagcgtaggagcatatgtagaatcagtgggcgtgtaagcttgtttcccgcaagtggatgttcccacgttttgctgtcacccctctggaatccacgtatacgagaattccaaatgttagttgggcatagtggcaagcacctgtagtctcagccacgtgggacgttgaggtgggaggatcgcttcagcctggaaggttgaggctgcagtcagctgcgatagcactactacactccagccttggacaccagagggagacccataatgtagaatcagtgggcgtgtaaagcttgttttcctgcaactggatgt

SEQ ID NO: 508047 - DNA, 866 bp, Homo sapiens
gtagctgcgcaaaggacctgacgacagtgctgcgtcgtatacttttgaaacgcttgtgcggggaatgtgctgttggagcctgctgtggttgctgtccgcggcagttgaaagcgcgtgacattatggttagggtgtcccctaggccaatgagcgcttgaggtactcaccggaggagcaagggaaattcacccttagcggctgggacgctgccaaaaattctgttgaccagaagtttactatcttcattacgagccattccaaacagtcaatttttcaactattccaggggttgtgccaattattattcccaatcgttgaagatcccttttttacttccgaggttggcaggaacaatccggggaacctcaccatctttggccttggctacaacattacttggattcctctgaaggcctacattgaaaccgattcaccactaaaaacttaacactcgtctgctattggctacgaacaaacctgtgtgcaacacagcgatttgggggattcaattcacaacagtcttgtcttacccaagactctccaaagaaacaaacttgggcgtcatggtacagcactaaagttccctccaacccacttctcttctcgcacacacgcttgccctcgcagggccttcccctttggggacaacagcacttcgggcagcggggcagtgctggataccttcaggaacgcgttagttagaccaaacaggatcattgggcaaagacacaagcattgaagcatgggctagctacccccaagggaacgaacaaaactggtctctcacacaaacagagcctaattcccagagggaatttgaaagactccaagggaaccaatgagtgaattcagagaagcagagatca

SEQ ID NO: 508048 - DNA, 145 bp, Homo sapiens
caccacttatgaggtggaagcacagaggcggaagggaaagtctgtgtgcccccaggaggaagagccctgagtcctgggatcagacaccccttcactgtgtattcccacacaaatgcaagctcaccaatggtcccctctcagtccc

SEQ ID NO: 508049 - DNA, 441 bp, Homo sapiens
aactagggacaatggaaagctccagtcattatcatgacctttagtctagggactccattgagagaaagctatgagtaagatgactaacacgcaatgaggacgaattgccctgtctgcccatctcagagccataaggccatctttgctagagctatttttacctatgtatttatcgctcttgatcataagccgcttatttatatcatgtatctctaaggacctaaacgcactttatgtagcttttaattaatcttaagatctcgttacggtaactaattaggggccccacttcccacttcattagggatgactgtggaaatacagacaaggctcttagctgatattccgggcttgtggcagcgcgggcttaggacaccccaagtgcgttggtaaagcacgagggacttgttgccctatagggagctcttcccaccgcacgcg

SEQ ID NO: 508050 - DNA, 912 bp, Homo sapiens
gctcattcataaaacaaacctatcaaaagcaagacaagagcattattcaagacttgaagaagaattttgaaatagtgaaattggtaacgggaagtttgatcgcttgtcatcggcttgcagctgctgtggccgggcctggaggcttaagtggctcgaactcctgacctcatgatccgcccacctcagcctcccaaagtgctgggattacagatgtgagccagctcgcctggccttaatgatagtaattataaaagatactgtaaagataatagtatagaagctctgaactaaggcctaacattaaaattaaggaatctagaaacaccaaaaaagagacaaaacaatcataacaaaagaaaagaaaaaaaaaaaaaatcgaaacaaacaaacaaaagaaaaaaaacaaaacacaaagacagacccagacataacaaaacaagaaaagaaaaaagaaaaataagagcgagagaaaaaaaagagaaccaagaacagaaacaaatagaatgtagagaccgagtgaagcggacaacatcttactggcagggcacttacgcctcatcaagacccttctttcactctgtggggcagaaaaggaaatgctgggttcatcactcattaaaccatggttagatgacttccttttccgagcttctagaattatttcaaatagtcattcctccagctggcagtgccgccatcagtcaacaggacttcatccaaagtatggaaaatgcccgtggtgtcagtcttgggtaacaaattctatttgaaactttcagtcccaaaagattcggtaaccttggagtttgggctcccatctgtgagaccgggatcgaatattatccactaatgagaactgtctgaagcgttacataagactgactgaacttagtagccgggacaagttctgaa

SEQ ID NO: 508051 - DNA, 1145 bp, Homo sapiens
  misc_feature (297)..(297): n is a, c, g, or t
  misc_feature (455)..(455): n is a, c, g, or t
gctattccgctctgcccgagcgtcgccaggtgtggtgctgtcctcttatttcccaggctccaggccttcaatactacgtagttgtctcgtgctacgtcaatgaggcgagacgcaccaggtgtacgagagatgtgattatatagcacagaccgtaggtcatcgcaacgatgaacccatcgcagggtagactgcaacagtggaagactcatcataaatacccgtgcgactgtccatgacggacattcaaaagttgtccggaccgatgaaatccgatggctctcagtatctgcatagccnagggaacttggatagttggctgcgatggctaagggacaaggtcaggagaatcagtcactttagttagtcatcaactgactcagaatacaatttgcgatgcggcgcaggaaggcacgatcagatgctaacgccaaggtgcttgatgatttgattccttncgcgccatcggtagttataccatacctcttcagaaacctgtggggttattgacaggaaaagacgtgggtaccgcaatgggcactctaagttgaaggcacaggcaatggcccgatgcctgcgcgacataccgcacattgacgaggagcgaggagggcgcttgttgggcctttttgcctcttgcaccatttggtagtacatggactccatcgagttccttgtataggcaacatttattcctcgacgagggggtgtgtgataccttaggctattagcccactaattcgaccttgagcgctcttgaagatagaagagcctccggttggctcctaacttttatccatagggcaatcttgtttcccgtgtgtttgagcgacctattgttcgaacaggaatttttgcattaaacgcattgcggcccccttagacccggtgggcgcagtttacgagtttgcgagcaccttatggtcactacaggtgctctgtctttgacgaaaaggcccaggaaaaccacgggagagatttcgggcagcggaacgcccaagagctttgtcgcacgaacaacatcgtttggtctcgttggggggggccaggctcggcgagttcgcgcactttgaaaggccatccttttttgtgttggcttagacctccccggggcggatttggggggtgtgccccgtgggggttccccc

SEQ ID NO: 508052 - DNA, 377 bp, Homo sapiens
actgcagtttttgatgagtgatttagtgtgtggccatggttgtaacatgggactgggggagcgagggggcctcgtgagaagagcccagcaacttctacgtggggaaatacgggatgatgcagatgcttcccagagcagccagtcagcgtgcatcgtcgcagaattcgagctctgttcaagaccttctagtcctagagaaagtatagttacatttctgcttcagatacacagagggttgggagcaggttttaaatatccttgtccctctacagagtgcacttgaattctgtgtgaaggtctgctatccaaatgtgtctgagcttcaaatgtgggttcagggagtgtatatacggggcaacttaactctatgctcccag

SEQ ID NO: 508053 - DNA, 117 bp, Homo sapiens
cttcggacgcttcttactaggtggtatgctttaggcctactatgagtgtgttaaatattttactctctctacaaggttatttcctagatgtcaaagagctgttcctctttggactaa

SEQ ID NO: 508054 - DNA, 532 bp, Homo sapiens
ggaaggttttccaagcaagatgaagcccaacatcgatcttgtgtactttccctggctccatcatctttggcagaagcaacgcagcgtgtgatgggacaagagacaggtggatcatagaaggccgacttaccaagtgatattttcccaatttccacgacgggagcaaagagggccgagcactatgtctggacaagaaaggccagcaagagactgaatccaaaggcaaggttgttccctatgtcaatacacattgtcatgtagcatgccatactgatcatggaccagtccgcgaaggagaggtcaggcaatatgacttcgaattgcccgtacataagacgacgaaaatcaacaaacgacatctaggtggaagtcaacaaactgctccataataaacaagaaggcagagaccatgataaatcaaaaggtcattttcacagggtagttatacaccataaaggaggcaaagctcatcgtgggacacaaaatccttctcaagatcaggcgaatagcccatctggaaagggaatatcca

SEQ ID NO: 508055 - DNA, 272 bp, Homo sapiens
cgcagatcgccgttaaattctactaaactcgatgttccccgggtgcgcggcggaagcaagcgtctgttatcgtctattaggtaacagtaaatagtgttacactaggtatgacagtgttgactcccggaaagttaagaaaattcgaatctctccgccgggtagggtattacgtcgcggcccttcgagctataaggagtgcgcgatgactgtgtgtcgcgagtctagtagagtagttgaggcgtatagctgagtatgcgtatatcagtttagtc

SEQ ID NO: 508056 - DNA, 381 bp, Homo sapiens
gtgactctacaggatctccacctcccgtagccaaccaggcttctactcgtatcaacagtgtcactgccagcaccaccacgccaggcctcagtgaggaatctaccaccgtctacagcagcagcccaggctcaactgaaaccacagtgtcccctcgcagcaccacaacctcagttcgtggtgaagagcctacgatcttccacagccggccagcctctactcacacaatcactgtccactgaggacagcagcacctcgggcctcactgatgaatctacagccttccccggtagcccagtctctcaccaaaacagggttacctgccacactcacaaccgcagacctcggtgaggaatcaactacctttcccagcagctcaggctc

SEQ ID NO: 508057 - DNA, 213 bp, Homo sapiens
cctttttttttttccccccccccaaaaggggggaggggggaaaaatgggttcccccgggggggggggggggttccggccccccgggggcccccccccttttgggggttttttttttttttttttcccgggcccccccccggggtcccccccaaggccccccccccccctgggggttttttttggccctttttttccgggggggggggggggta

SEQ ID NO: 508058 - DNA, 686 bp, Homo sapiens
caatttggcaaatgtgaggccgttgctcttcatcacaaaaggcggtgtcctgaccgtgttcgcaccgccggttcagtgaaggacggctatccgtgcctgtggcagcacccattccctaaacagtgaattatagggtttacggcgtgcaatgaactctccgtggggaagtcaacaaacagaccatggctatatacgctacctgcgctgtacagatgatgcatgccacaaacacatcgtaggtgggggcaacttcttcttgtacgtggagttagacttaattgcctgtttcgaggcccatttcaatttggaccagagccccttctatgagcttctctcatatgataaggcccgcattctgctcattccagatcaacgctgagccttggcaggtcaagatgtccttatggaagtccacgctgtcagaacccgtagatgtctgcactggcatcgcctgtgccggtcacctcatatgaagtcctacgaccccgtgtattcgcacccctgaagtggtggcccctgccttgtagaaggtctcaccatgtgcatgcagcagtagacagtcagtgtagtcaccagtcgtcctctgttgtagagggaggggttctgccctccttcattccgtcatgattatcatagccccggtgtcggtgcaaacaccctcacgtcgtgcaattaaatagcagcat

SEQ ID NO: 508059 - DNA, 243 bp, Homo sapiens
tacaaaaaagaagctgagagttcaaacttatcacacttgtcataaattctagttttattagttgtttttaagtttttgtctgtattttagactaaccctacttattctgtgaaccaaccagtgatctctggctgaagctcagaagaaacaagggatggttaatatagaaatctggatctggatcaatattctagaggaggcggaggttgccgtgagttgagatcatgccattgtactccagcc

SEQ ID NO: 508060 - DNA, 238 bp, Homo sapiens
aagtcggtaccactttcagagtagcttagattacaggtatgcaccactcatgatgcccaccaccacgcccagctaactttgtatattttagcagagacggagtttcaccatgttggccaggctggtcttgaactcctgacctcaggtgatctgcccacctcggcctcccaaagtgctgggattacaggcatgagccactgtgcccggtccccaatctttctaaccactctggaaagtg

SEQ ID NO: 508061 - DNA, 817 bp, Homo sapiens
agcatactcccgaaaccagtcctgataagagaggaagccagcatccccaagaagctgcagagcgacaggccttcagacagacagagcaagcgattgattcggtcagacaccagtcagtcagtggcaccgcaccatgaggtccctttttatcgtccacgtgcaagtcggaaggtggcgagcgtggaggacaagttaccagcgagccagctttcctttgccggcctttcctaccagccagcagcaccctcacctgaagtcgtgctggcctgggccgttaagggctggcactcggatatctggggacccccagaccttctacccctttccctgaccgagctagcatggtatttgccacagagtcctcacacttctactctgcctcagccatctacggaggcgtgccagttactctgcctacagctgcagccagtgacccacttgcggagaccaagtctatctgtgcgcaggcggcgaagccaagtgacagagctgactcgcgggcgaagctgggatgacgagagcccctttgacaaagcagtttaaaacgcaggaagctgccaaatggatttggagagagcatcagtgtccagagaacaggtcacggggaagagctggggaaatgtgggcagtcagactagcttttgcgggcagcgtgaactcatgagggctcctgagaagaaagaaacttgtgagttctataagacaagtttttcttgtcaaaagaaaatccctgtaagtctgaatatttttggtctactttttttttggaaggggcattgtgtggaaccagagggatacgggggtacacctaaatggt

SEQ ID NO: 508062 - DNA, 256 bp, Homo sapiens
gagataacccatgacctacataaagacagcaaaccaactggtaggaaactacgctcagctcttctaccctaagtcaaagacactatcaactgatgtgttagggatggattctgattggcagacaataaatcagctcccaatggaagcccacggaactaagtagggtcccaagaaaaaaaacggaagctatttcacagagcagagcttctagccaaatttcattcctcaaacctttagtagagggttaatacaccgg

SEQ ID NO: 508063 - DNA, 243 bp, Homo sapiens
ggttcattgctcgcgcgcccaaattgatgggctggacaagtggagcgagctctccaatccagcgcgatctggccaagattttttccacgcccgattacgctgcatggcgctcgctgcgcgaatccgaagactccaagtacatacggtctggccatgcctgctgcactgctctcgcgtctacctatactggcgctggccaccagcccatgtggaagacttcgatttcgatggaagacaccgcct

SEQ ID NO: 508064 - DNA, 429 bp, Homo sapiens
cgcacaggtgagcattgccctactttcaggagggtatgagccaaaagcttcatggtcgaaagggcactggactgggcccagggaaccatcaggcctgggattctcactgcataaatggagagtggattagtcgccacagattcttctgatctgacatttggaaatggtgagagaaactagatgactgtaaactgggtcacaggcctggttcgggcaggtctttgcggacttttctctagcataatgccaaataaacttgcagtctcagtgtgctctcgcttgtatgattatctagtcctttctgtggtgctcagccaagacgtaaaaactaggattcagagcagatacaatagcagttatgtttcggaacgagggcaaggagtccccgagccgggatctggtgctgctttactcacggtgggggaaggg

SEQ ID NO: 508065 - DNA, 794 bp, Homo sapiens
ggggagcgggagctggagaatactgcccagttactctagcgcgccagtgccgaaccgcagcttcttgtgcttagtgtacttctactcacagcgtgccgattcctgaggccaactccagcaatgtgcttttgcaaatctgctgtgaaatgtgctcatcaggtgacatgcctgggacccttgctttgcctgggaagatcttgcaaatgatgtgatggtgcttgcatgtgtgtgtgtgaaaatgcagaaccttagcacaatgatgtgatgcttgatatgctgtgagcttgcaggacgtgtgaaggtgccattatatgttactgctcttgccacacaatggtgacctgcttgatgtcatcaagctgcagctgacgaaactccatggtggttggtgcatgggcttggacacagtgtgtggacaattgtggatcttggatggcctgcaacatatggaatggggcatctatggttaattgaacacccccaaattggtgaacatgacctcagttgcctgcatgaaccttcacattgttgtgaattgactcaatgttgccttgtgcctagtgcatggattcccccatgtgcgactgtggctttcagacttgaagaggtgcacgggaaaaaagtggggaaggctggaagcaatgttccattggggaaacaagaagcttgaaactgtgaaaagaccccctggggaagttccttgtggctgtctcatgggatttgggagaccacggtagctccccggaatgcagtcctttggaatgataatatagggaatgaccacataataccca

SEQ ID NO: 508066 - DNA, 452 bp, Homo sapiens
gcacaggtagagaagcagttatcagagttgacatcgaaagggaacaaatgagagcaaaactagaaccgagaagagaaccggctcaaaaccctgaaagaagacctggaaagtataacgaagatagtgaaggacctagaggcttctcaccagcacagtagccctaatgagcaattagaagaaaccagtaacggtgtccaaaggcacaggaactgagcctctcatagctaatgtctgtgtatagtcaaacagagagttattacagcagaaagaacccatgggagcaacatagccaagatagacaaacactgggttatgctagtcctgccactcctgcttactcatattctaaaaccaatgggcctatgtgacccaaagatacaaactaccagggagctgactgcaggcaaacaaatgtagacaaccaaaggtgcgtaccacggggaaaatctgtg

SEQ ID NO: 508067 - DNA, 719 bp, Homo sapiens
gagagaactagtctcgcgtttttttttttggttttggagggaaagacaaaacgtatttattccaggccaggtcttaaaatgcacactgcacggtcccctgtggttatcagcaccagtaaggaaagaacgtgccttaaggggagccccacccaaagccgtgctgcggtggctgctgtgaggctccccagtgaatccaccgcagtcttcttcctcacggggtgcagtggggtgaggttttctaccctcacagcaaagggatccttaactataaattcacggtatgcagagaagaggacagaatctgatttactggatggtgcctctatttaaaccatgacttaaatctctatcttaaggatttaaactatcttaatttcctgggttaaaatttttaaaaaaagtgggggagaggtgtgagagtcggtaaggggcaatagcaatagagattacactggggctgacacaggagactaaattcctagtcagagtgaagaacccattataaagaggccggctgcagggtcacaaagggacgtaactacctggagtctaatcgagaacatctcatgagtcacatctccattattagccttagtaaggtaagaaaacaattctccaacaacactgggagtccacaagttggtcaagtatggctttctcaggcccggggtaggtaacaatgtctgggagaaacggggtcctctccaatgcccaataga

SEQ ID NO: 508068 - DNA, 544 bp, Homo sapiens
  misc_feature (1)..(1): n is a, c, g, or t
  misc_feature (14)..(14): n is a, c, g, or t
  misc_feature (22)..(22): n is a, c, g, or t
  misc_feature (52)..(52): n is a, c, g, or t
  misc_feature (81)..(81): n is a, c, g, or t
  misc_feature (102)..(102): n is a, c, g, or t
nccatgaaaacggnaatttttnaaagtgtaagccagaaggatgtccttctcnatttggaaaatgcattaagatgagaatgnaaaaaggaattccaataaatncaggccaggcacgttggcttacgcctgtaacccgagcactttggaggccaaggtgggaggatcacttaaagccacaaattcaagaccaacctgggtaacaaagcaagacatcctcaccatctctgcaacaaaaaaataaaaataaaaaatacataggctgggcgcggtgactcacacctgtaatcccagcactttaggaggccgaggtgatcagatcacttggggtccgtcgggagttaaagaccagcctggcaaacatagtaaaacaccatatctactaaaaaatacaaacattagctaggtgtggtggtacatgtctgtagtcccagccactcgggaggctgaggcaggagaatcgcttgagcctgggaggtggaggttgcagtgagccgagatcacaccactgcactccagcctgggtgacagaatgagactccgtttc

SEQ ID NO: 508069 - DNA, 717 bp, Homo sapiens
agcggacttccgcgctcgccccgacggcgtccggcggccgcgccgagggtctggcgggccgcaggatcagtctgggaagcgtgccgacccagacccaaccccccggtgcggaagagccgggcgctggagatggcgccgcgaggcccggaaggcggagagaggacgccatgaggcaaggtctacgggccgcgactggttacgcgcgcgcaaccggcgcatgcaccagcctcgagcgcttcagtagccagactatgggatgatctcacaagagaccgaagcacagaccagatgtgacagtgtgcggcatcaacagtggggcgttaccacactaggacgtaccatacacccagcgacatacctatgtcctgagcttcggagaacaagaaggaagaaggtcgagacgctccattaggaagacgaaatggtaacagtccaagaaagatgggagggctataacagcacaggtgtaaagacaatcctcccggaaagacacacagttcacatacacaagaagacatttaacctggaagtgggacaacctggcatgtatgacattagtcgagcacaccggaaagaagagatcctataacggtcgtgttacacccccacaaggctcggtttcccccttggaacacggcactacccgcggcaccagccatccacaacggaacgacaacccgcacggcaccaaactacaacctcgggctcataagagca

SEQ ID NO: 508070 - DNA, 443 bp, Homo sapiens
cgatcctggcgaccgtttcttagggaaaccgcgtttatcttcttcgtggggaaaatccttgtgcgtcttttgtggcgtggaacgcctgttttgtttctgtctccgggcaactacgccgttgtgttgctgggagtaccctggttcactgcaatgcgcatgtccctccccgcgtcgccctgagggcagtgcgcaggacttcgcccagccgaggcagttgtatgagttttagcttgcagcacttcgagaccgactgcgggaagtatcggaggaggaagcagagtcagcagaagttgaacggtgggcccggcggctcttgagggctaggtgtagtacttcgagaccgctttcgcttaatgtccttagatttacgtttgctctttggagtgggagacctatgcttacgtttcttggactcagattctgacctgtgcttcttcttcttt

SEQ ID NO: 508071 - DNA, 369 bp, Homo sapiens
  misc_feature (176)..(176): n is a, c, g, or t
  misc_feature (254)..(254): n is a, c, g, or t
  misc_feature (311)..(311): n is a, c, g, or t
  misc_feature (328)..(328): n is a, c, g, or t
gttagccaggatggtcttgatctcctgacctcgtgatccacccaccttggcctcccaaagtgctgggattacaggcatgagcctccgcacctggcccctctcattctttctcttcccaaagcacaggtttctatgagccacgggctcgaccagcaaatcccacttctgacactagntgtgtgaaaacacacacacacacaaactcaaaatactttctctattctttcactcaacaacaatcaacacagaatatntgtgtgaccaaatgtgtggggattcctccccaccaacaagcaaacaatcaattctgnaggaaataccaggtggntatactccaattcaattctgacaacatctacctggagatag

SEQ ID NO: 508072 - DNA, 696 bp, Homo sapiens
  misc_feature (288)..(288): n is a, c, g, or t
  misc_feature (661)..(661): n is a, c, g, or t
atgaggaaggctggtatctttcagagtgtaaagtaatcttggaatataaagggtctccctctgtcacccaggccgtagtgctgtagtgcgatcatggctcactgcagcctcaacctcccaggctcaagggatcttcctgcctcagcctcccaagaagctggcactataggcatgtgccaccacacctggctaacttctttatttttagtagagacagggtttcaccatattacctgggctgtgcttgaattcctgggctcaggcgatccgtccaccttggctcccaangtgttgggattacaggcgtgagccactgtgcctggcataatttggtattttttgatagtagccatcctaataggtatgaggtggtatcattgtggttttgatttgcatttccctgattatttgtgttcttgagcatcttttcatgtacttattggccatttgtatgttatctttggagaaatgtttattcagttctgctcattttcaaatttggttttttgtttattggttgagttgttctgtatatattctggatattaaccccttatcagatatgatttgtaaatattttctcccatttcataggttgccttttcactctgttgtgtcccttgatgcacagaaattttgatgtcgaatttattttattttngttctgtgtgcttttagtgtcatattcaataaatc

SEQ ID NO: 508073 - DNA, 225 bp, Homo sapiens
  misc_feature (195)..(195): n is a, c, g, or t
ttgaaggcattctccagattctttttaaaagattgttcatatttctctctctctctctctctctctctctctctctctctctctcttctttctctctgagggagagggagccctccaaacttcagatcgtgtgggttagtatcattatcttcagctcttgataccgtgtgcgagagtaatagtctagagaggagnttcgagtcaataaatacatacttatatcac

SEQ ID NO: 508074 - DNA, 181 bp, Homo sapiens
tggattagaaaaaggaccagaaataagatttcatctatgtcaataatttggtgtttataattgtactgtggttatgtaagatgttaacattagtaagagctgggtgaagggtacatgaaaacaattatttatgccacccttagaaagtcaaacttttttcgaaatgataagttttacaaat

SEQ ID NO: 508075 - DNA, 452 bp, Homo sapiens
  misc_feature (71)..(71): n is a, c, g, or t
  misc_feature (440)..(440): n is a, c, g, or t
  misc_feature (442)..(442): n is a, c, g, or t
tgctgcaaaactaaggcctgttaggccagttgagggctaaaggagccacaaggggccagactgctgctacntcctgaattttaataggacatgcatttttttccatataaacttagaactagcacgcctaaatttttttttaattttattttttttgaggcagagtctcactttgtcacctaggcgggaatgcagtggcacagtctcggcttactgcaacctctacctcctgggttcaagcaattctcctgccttagcctccctagtagctgggactacagacatctgccaccatgactggctaatttttttttttattagagacagggtttcaccatgttggccaggctggtctcaaactcctgacctcaagtgatctgcccgcctcagcctcctaaagtgctgggattacgggcgtgagccaatgcacctggcctcanantgcctaatta

SEQ ID NO: 508076 - DNA, 410 bp, Homo sapiens
gcaggaaagaaatcagactaacgactccatctggcttctaacccttaaacggtcctggtcattcctgggaggtcgggctgaactaacttgggggaggaatccagtgcatagtttaactctgaaacaaaactgataacagcacattcccaaaaagacccccttctggcctggggaccagtctgccttggcaggactaacaaataagctacaagatttgaaattacagttaaggggtctgcagcctcgggctccaagaatctgaacctccccaaatggctccgggggatgacatcagtactgtgaaccctaagatcagggcttgagatacttggcagaccctgcactccagggatcagctgacaccacccagaccggcagtcgggctcaaccagtccggccagctggctcag

SEQ ID NO: 508077 - DNA, 738 bp, Homo sapiens
  misc_feature (68)..(68): n is a, c, g, or t
  misc_feature (114)..(114): n is a, c, g, or t
tggtatttctcaactgacttccaagaagtattctgagctggctgggtggaggtaagaatggcctcacnagaacctgggttcccacctatctatagtggctcttttcttccctcntatatccttttcaaatctcctataaccataaatctggtcctctgaattcctacagaaggaatctggaggaatttcattctacgtgggaaaaatggtctttctggatttatatgggcttatcctggtgttggctaactaacctggctggggtttaatagctggttataaaaatctctgggatcttcagacctaacctccaaaatcatccgggaatttcaaggtggaaagatgaagaagagagggcatctaatacttacctcttataatactggggtctatttccataactggtgaacctaatacctggtgttccccgagtatgtttcctccactttctggtgtaatgggttaaaggaaaagatgtctgaagtattagctgggaactggggtagcactcatctttccaattctggatctaatctggattggagggatgccctaggatgaatgccttcgggaacggcgaaaagactctgaacggttcctcttatgttcttatgcctttggtgaccagaagaggacgcaggatgatgatgacgaccctggatccatcaggagaagaaacctttgcaagaagaaagttgattgctctacttaactcacatagagcctaaaaaaaaacag

SEQ ID NO: 508078 - DNA, 221 bp, Homo sapiens
  misc_feature (54)..(54): n is a, c, g, or t
gtcgctgtcgctggggtggagactggcggagcggtgatgactgccctgatcaangcgcaactccaccatccccaccaagcagacgcgatcttcaccacctactctgacaacaaccctgggtgctgatccaggtgtacgagggcgagagggccatgaggaaagacaacaatctgttggggcgcttcgagctgaaggtgcatccctcggacccccaggggcgt

SEQ ID NO: 508079 - DNA, 112 bp, Homo sapiens
ctaactttatttcttttgcaattctactagaaagcaattagagagagagagagagagagagaaacagagagagagagagaaaagagagtgtattggtcgttcttctctggta

SEQ ID NO: 508080 - DNA, 772 bp, Homo sapiens
caagacctgtgtcagactgtggttgagtatggcctacggggactatgtgcagtgacggcaaggtagccagcgggaccatgtcagatgtgtgtaccccgtacagtagtatctgattctaccccttccttcaggctcttatatccaacccatcagaaaatcctgatgatgctacctctagaacaaatctgctcgtgcctttaacacagccagtgtaaacccaaggccacactatattccattgggagtgcgtatatatccactcttgccttcgttacaatccattctcgtacacagcaagctaaagcaatcgtctgaaacctgtgtgctctgatgactgtacatccttgcttacacacaaatttcagtggcttgctattcaccacagtcaaataaaactcattcttggtctgacaaggtcttgcatcatgcgtggcccttaactaccactccagtatcatctcataccagtcttccccctcagtcatgatgcttgcattcccagtggtcttttgattcacagaacatagccaaactctttcccacctcaaggtactttgtaccttgccgtaccctttgcttataacatgttcataccaggttagacttgatctgtttcctgctctaacaattaggcttaaagccaagtaaacaagttaccaggttaaccacctaaaccttgacacaattaagttctaggcccagctatcttctcagagagcgatggcgttgacctatgagaagagtcaatggccccagttactctgtctcctaa

SEQ ID NO: 508081 - DNA, 185 bp, Homo sapiens
ttagggccagaaattatttcgggctatgttgagcaagctgtcttgcataaaagctatattgggctctagcagaaagttagaatggaacagaatttgagagatacgtgagacccaaagaaaacaaaaatatacattccaaaattttgctattaagccagtgccaagaagtcctttccacaacggta

SEQ ID NO: 508082 - DNA, 318 bp, Homo sapiens
ccagactagcccgacagcaggaacaccctcccgcaggcagtccctgaagctgccgggttctgctctccgcgactgagagccaccggtgtagagagctgcccacgtgtgcacgcaggcggacctgtgctcgtcatcacaggggctccacttttggggagactcacccgcacaccgtccgcgcacgcctgtcgggctagtcggggccccgactagcccgacagtggagaagggttccatgccccgactagctcgacagctcgcgaacgtgttatcccccccccccttgtggggcaagccgggggggtacggagctcgaat

SEQ ID NO: 508083 - DNA, 722 bp, Homo sapiens
  misc_feature (598)..(598): n is a, c, g, or t
gaagtcactgccgggctcgggtgagtcgctgcggggctgacggggtagcagtgcgcgggttacggcctggtcagaccataatgacttcagcgaaataaagcaactcgaagttacaactacaagtgaaacaaaatgcaagagtatttacaaagactttatgcgggatttagaaaagtgggaaacaagacattaagcacaaaacaggatatggaagctaagaagacagagtggtgtccctgaagagaatttacctcctattcgaaatggggaatttttaggaaaaacgaagaataggcgaacggttaaagagtcttccaaaaaaacaagagaggaaaacaaaaaaacagtgataaaatcttatgatatgaggcatgggcaaaattgatgtggaccgtatccttgatgagcttgacaaaagacgatagtacccatgagtctctgtctcaagaatcagagtcggaaagaagatgggattccatgtaagattccacagaaaggtctgtgtttttaaacgaaaaggggcactaagatactttcgaaacaagggagcaatattgattgaaggcaagtggattgtaacacaaaaaggcattggatngccggatccattaataatccgcgtgttgtgcaaggaaacaagaagggttcagcatatttcagacgtgaaaaaatttgggtgtgcgtgggtctgattggtatttagagttgcttgatagaagtta

SEQ ID NO: 508084 - DNA, 115 bp, Homo sapiens
agttagcacgaggagacagcagagactcagtgatggctgtcacgaccggaggggactcgcagccttaccagggactttaagtattcatcggagggtcaccccagttagcgagtga

SEQ ID NO: 508085 - DNA, 374 bp, Homo sapiens
ggataatagatgccatgcaggcaatccaaacggcagatactaatgcggtggacagtacacatggaacatgcctaagcgttgcacatatcatggcctagtctggttgaactgcatacgcccatgccactcaataaaatgactattaacatgagtcccttgttgccacactactgactggccctacagtgatgggctctcttgtgtatgcgacaacattcttggacattacgtcatcgtcttgtcttatacattatatttctatcagactctccagccaaggcgacattgacgatatgtacacagtctacgatgcattccatcccaatagcgcaagagcctccttgagggcacaatgcacctcgagtaccgacatc

SEQ ID NO: 508086 - DNA, 231 bp, Homo sapiens
tggggctccaagatcctgctctggttgccttttgtaggcatgatcacctatcctgtaggtattgctccctcaggatggctctgggcctgcccctaagggcctgtggcctatggtatatgtcctcctggctttgctcatctgatctcctcttctgtatggaaacccagtcatccctgtatcttgccactgtgatccgggtttcaggagctctctgtttcttagggatggact

SEQ ID NO: 508087 - DNA, 270 bp, Homo sapiens
aaataaattgatgatatatgtctatttagaagatcccaaggaatctacaagaaagcttctagaataaattgagtttatccaggttataggatatataggacagcgatatttccacgaacaaatacatgatatatatttttgagaacagaagtcttggctggtgctttgcgcccaaggctgggaagtgcagatgggcggcaatactatgggctacaactggaaatactacccaaactttcccaagagttcgctatctcatagctgtggcct

SEQ ID NO: 508088 - DNA, 946 bp, Homo sapiens
gtgtggggttttttcccaacgacaggtggtggagtctgtttgttgtgacctgtggcgtcaccgcccgataggggggttccccctggggggcccacccgatggggcgaacacccattgggggcgcggcggtggttgtggtgcgacgacagtgtttcgctgacgcccttggggcctgtcttcgggagcggcctttgtgggtaggatgtgtggagtgccccgcggctggctctctgggtcttgtctctcatggtgtggtggccgcccccgcccttgggtgtacactccatgtctcctctgcgctctgtcgcaccaatatgtggggggggggttctggttaatttgtgtggcccccggagatagtatctgcatgtggtggtctcgcatttctccctcggttgggcttttggggcgaccacggttggggagggcgtttaaagcgaattgggttgttacgatccgccggacaaatagggacggtcggttgggtgctttgtttctctgcgccgcccaggggtcggccccccccctcaggcggtcgctctggtgcacacgcccgtgttccctggtgcgcactttggggggggccacgccaccaccttgttgtgggactctctcttccctttctcctcaggtgagccccggagggctgtggcaccatctccctgctgttggcgccatccggtggggcgcggggttgttcttctctcccgaagcgtcttcctggagaaatttttctcgggacctttggtcacccgaggtggcgcccctgatagcgggtcgttttgcgctccctgaggggccctttgtcttctattcataccctggttttcccccaagggccatggggggggggtttaaatgccacttcttggttttggattcccgtggccccccccataggggtggttttttttcattaaagaaatccacggataaacccaaacga

SEQ ID NO: 508089 - DNA, 391 bp, Homo sapiens
ctgcttcatagaaatgagagttagtgggccaggcgtggtggctcacgcctgtatctcagcactttgggaggccgaggcaggcagatcacgaggtcaggagatcgagaccatcctggctaacacggtgaaaccccatctctactaaaaatacaaaaaattagccgggcgtggtggcgggtgcctgtagtcccagctacccgggaggctgaggcaggagaatggtctgggaggcagagcttgcagtgagccaagatcacgccactgcactccagcctgggcgacagagcaagactccgtttcaaaaaaagaacaaaaagaaaaagaaaatggaggagggccaccaggaaggggaataaggtggaaaataataagattaaaatagcaaaaaaca

SEQ ID NO: 508090 - DNA, 881 bp, Homo sapiens
  misc_feature (168)..(168): n is a, c, g, or t
cccacaggcgtttctcagaggaaatgtacacacaggttgtcgcccaaaattgcttgtggacgcatttggggccccttagtggctggtgttctttctcaaaaggggggggcggaaacaaaaacccttggttgtgcaacacacccttctcacgagagttagaccatactntttctcaccacggtttgacacgcctccgcgtgccgtattctcccctggtacacactggcccgctttggggtgacacccccacatatttaagagagcctttgagtccacggagggattcccgcggacccataactacctcttcctgcggaacacaacgtggtgcgcagagataccctccaacgtttccccccgcccctcatgggagatacccgtggtcgcaaagcacggcccacaatgggcgcttcgcactttattgtttttttgtccacgctatgatggaaattttgcacagccacactttggctcattggagagccaccccgagcacccccctgcgttatcacgcgcctggagtgtttcctcggaaagctgaactccactctggttcacctgcggtgaggctttgaagagtgagaataagattaaccccacggttctatttgagctcaccaccaccactgttttaatagagtggaaaagcctgtaacttttggtttccttggccaggacacctgcgagaaagggagggattcccaaaaatttcagcctccctcacaggcgtggccgctcatgcccgtaatctcagccctttgggaggctcaagcgggaggactgattgaatcccggtgttcacagggcccaactaggccaacccccgtgaggaactcatctctgtaaaaaaataaaaattaaaccattaaaaaaaacctgga

SEQ ID NO: 508091 - DNA, 824 bp, Homo sapiens
ggagcattaaaaaatgtctctcacagatccgctggcctctccattcctggaatgccctagaccctctttcacctggagacagatctccctctgtgcccagactgagtacagtggaatgatcacagcttactgcagcctcgacttcctgggctcaagcgatcctcccacctttgggctctggagtagctgggaccacagagaactgttgtgaagattaaagcagatcacagagacttaaagctctttgaaaaaaaaaaggaagaagagaatcagcctttgggtcaatagaactgtgcttgagaaggtttccaaccatggctcccatgggttggctgatgaaatgaacaaggaaaggctgacgacatgtggatcttttccatgggttacgatctcggcgatactgaacatgtgtcctacaagtttccctactgctggggggtgatatgggggtgccacaaccggatgaccttatcatctcctgaaaaggaggacagggaaagatcgggtccctgaggggcagagttcaaatgtatctctcactgtatcataccgtatctttcttcgaacagaaatcacagtcggttctggaggatgcattatcctgggatgatgggaaggggtggcctggttggatctgggctctggaaggggtgtaagactgtttccttccatggatttctaatttatgagtctttgaccatcttcaaatgagctaggtttaactattaatcaaaatagggggttggatctaattgacttatatgaaacggggggggatccaaaaacggtggcacgaagaaattggcaaaattggaaggaattca

SEQ ID NO: 508092 - DNA, 208 bp, Homo sapiens
cggtggtcgaaatattctgctcttgttgtttggatatatggaggatggggattattgctaggatgacggatggatagtaatagggcaaggacgcctcctagctttgttagggaccggcactcggagcaattgtgttacgctaatagcgaatattatcatctcgggccttcgatgtggaggcacgcgggctgatttataggcgcgttgg

SEQ ID NO: 508093 - DNA, 1560 bp, Homo sapiens
ctgtcctgtccaggtgcggtggctcacgcccggctaattttgtgggtattttcagtggcagacggtgttttaccatgttggccaggatggtctcgatctcctgacctcgtgatcctcccgtcctcggcctcccaaagtgctggcattacaggcgtgagccatcagttcctggctgggaagtccgaattttttcttttctcttgttaaacggatctttcgctctgtggttgcccactaccacgccccaggctaacttttgtggtacttattgggctaggagacagagatttcaccggtgatgggcgcaggctgggtgtcgaactccgtgtagcctcgagggtggtatcgcgcccggccacttcggacctacccgaacaggtgtcgtgtggcatgtcacagagcggtgaagacccaaccgagcggccccgggtccccgcacccgcggggacaacatgtaccataaacgcgcgttacaagacctacaaccccgtgcgacccgagtgccccgcaggatccgaggcgtgcttagacccatagggagggctatcccgcgaagacaccccctgtgtgctccgtgtgtcccttaggagaagagggtgggacaacccttcacagtcaggtatgtcacaatactttggcatgggcacacagaaagcccgtcggagagctacccctctcccatctaagaagtggggctcccacaaccgctggagaccagcggcaatagagcctgagcacccacgaaggagccatccagggcgaccggcgacccgcttcctacgagaagaccccccccatagtagtggcggccccaaaagcagaacagtgtcacacacaaccacaataggtgcctttcggcaacgtcatcgtgctctaacatgccgcaggaaaaagacttccaaattggccactgcttaacaagatcaagttgactccaaacgcggataacaacgtgagctacccgccccggggcatatcaggtagagaggcaacagtgcactaccagcgtatgacgcgcacggaggaacgacaaaagacaggagccaaaacccacctcaggatcagaacacaagaaaagaagagcaagcaccgacacacacacaaacaaaacaccaaaacagcaagacacaaaacaagaacacaaatcagacgaagcactaccacaacggttcccatccctcgatggtcgccgccccgccacgcacaccccaccccccaccgccctcgctctcgcaccacaccagcgccagcaccagtcggcgtcgcaccgactcataccctcgacgccaccgtgccagcgcatgtatcacacaaacgccgtggcagtctgcgaagaacagcactcaaaagatcggaaacaacagatatcgaagatcacaccaaccaggaggagtagcgataaagcacacgaggccgatccccacgaggacactaatgcaactcactctgctgaacacgaccagcatgtcctgcctaaagagtagatcatgtagttgccgtctcaacgaatgacgatccgaggagcgagtagacaatcagccacgaggtctcgctagctta

SEQ ID NO: 508094 - DNA, 133 bp, Homo sapiens
  misc_feature (62)..(62): n is a, c, g, or t
tcccgcagttggggcttggcacggactcatggcctgggcacagacatcgatgtctgtggctngagccacacctggggccaccacataaatgcggcgggacccagaaacccccagctccaggactgagtccagc

SEQ ID NO: 508095 - DNA, 188 bp, Homo sapiens
cccctcccccccccccccctgttaattaggggggtgcagcaagcagacctttgcatcaacccagcagacccccaaaaccagtgagggccccccttttttccgcccggccccagccctcgctagctttccttgcccctgggattgtggccctggcccccagcgggaaattaactcccaccagcccgtta

SEQ ID NO: 508096 - DNA, 114 bp, Homo sapiens
gacctgccgtctagaaaacctgccaaatatgatgacatcaaggaaggtggtgaagcagccgtccgaagggcccctcaaagggcaattccttgggctacaataagcaacaaggtg

SEQ ID NO: 508097 - DNA, 185 bp, Homo sapiens
tcacacggcacgccagctacagactgctttctaactcaggatgattttaatgaaattcactttcattttaactggatgcccctcaaacacagttcaccctccctgaaaacagtttagaagaccctatgcctttcttttttttttgggggagtctccctctatcacccgggcggggggtgcggggg

SEQ ID NO: 508098 - DNA, 121 bp, Homo sapiens
cttgcgtcctggctactgagggtttcactcaggtcgacactactgggaagtggaggtgggcgacaagacccactgggcaagtggtgtatgccgggactccgtgagccgtaaaggccgagtt

SEQ ID NO: 508099 - DNA, 226 bp, Homo sapiens
attactcgagacagactatacagagacaacaagttgtcaccagcagaagatagataatatgacctctattaacttgatgaattaacgggagaccaagaggaaatatgtaagttactacccaccctaaaactttctgtgtccggggaccctctgagtagacctataattcctacctagactgtgtgcatcatttgtaagctagcagatctatgaggtgaaaatgcac

SEQ ID NO: 508100 - DNA, 890 bp, Homo sapiens
  misc_feature (887)..(887): n is a, c, g, or t
  misc_feature (890)..(890): n is a, c, g, or t
ggactgcggggcgggccatgggggtgaacctgagcccggagcgggccagcgctggcaagaggcctacgtgcgggtggtcaccgagaagtccccgaccgactgggctctctttacctatgaatggcacacagcaatgactatccgcgtggtgctggcacaggagaggtgtggcctggcacgcgagatgggtggaggtgagctcagagcagcgggcaaggtgatgtacgccttctgcaagattgaaggacccctaactctggacgtgcccaaatttgtcctcatcaagctggacaggcgagggcgtgaacgatgtgcggaagggagcctgtgccagccacgtcagcagcatgggcagcgttcctgaagggggcccatgtgaccatcacgcacggggcgacgaggatgtggagcgctgtgagtgcatcatggtggaaggtggccaagcgcttcaggtgccatctacagctttcacgagaggagagtggcgcttccaggacgtgggaccccaggcccctagtgggctctgtgtaccagaagagcaatgcgcgtctgagattcacaagggtcggcagagacgcttctgggccacaagcggagaaaggaggaggagaacgcggtggaggtagacggcgggccgtgaggcccagagctggtggagcaggacgccgggagcgtgagctgcgtagtgcacgcggagagcgcttagagcggtggcggcgcccgaatcgagtggagccgcagactggtcggacccagtgcagttcggcccgggttcggcgaggggctgcccccctcgtccctgaaggggcctcggggccaccctgggggctcctgcgggtctggccctcgggagttcccccgcgggtctcgcgggccttgtctctccnagn

SEQ ID NO: 508101 - DNA, 1104 bp, Homo sapiens
tggcttcgtcatgtcttcacccaggcatccagcggacagcgaagggcacgagaaggccacactatgggcgacactcctctccctatccggagacagcgtccctcccttcttgcgccaggccatcaagataatggcgtccgctagaggtcagagatctacaggatcccccgccccaaatggcccgcggagatccgagtctccatcaccatccacgttctccgcccgagcaaacggagccctgctctacgaggacagcagctctacactgtctttgcagcggcctgtggatcactcctgaagccgcaatccgagtgttgacaggcatggacctctagagcgtgcttgcgactacgcttgcacgggagggccctgtccatcgatgtgcatgccccggaagggggacgacatcacaaaggcgatggcaaccacccgttaggcttacgtccgcgaggtcccaatggggggcaaagcttgtggaacgcaacaggtccctaacgttaatataatctggtgcgtgtggagttcgcgctagagtcgagtcggaacaccaagtggtacgccacgtatggccgcccgaattctccgttagggcggtcaccaacaagcaattggttccacaggtcagaggggactttccaaggactgaaaacaccccccgttaaacgatgggcccaatggcgctagggggcgcccaactttttgggaacgggccacagctgaggaggaggactaaacggaggccaagggaatgtggcccccaaaagagaggcagcagcacccacacagacaccccgccccaggacgcgggatgtcacccccacgagagagcgcagaattccagagcgcacagaatgcataaaaatgcgagcccattggggacgcggcgggcgtcggcaacgcgggggccaacacaccgagaaccaccacaaaagaaatcgcgccccgccggcaaaagaagggcacacaggcgcaaagagtgacaaccccgcgcccagaaagcacccggaggagaatccaggcgaccgaacgggggagcttcccaacaggtgtcccaaaagcggccacacatcaaagaggaaaagcccacaacactgtccgcagaag

SEQ ID NO: 508102 - DNA, 934 bp, Homo sapiens
cgggccgcaccgtgggtgtcaaaccttgcgcgcaaagacccgtggcgcgagcatgacaataacgcggggcgctagccctcaacaaaatacccggccacttcatttcccgaaacctctgggcccgcctgccccccggtggtgatgcccctggggccccgcggggccccccgtcccaaagggccgccccccggggaagccccgggcccacactcaggacgccaatttcgctgcgcgcccgcggttatgggtcgccacggggaaacactcccgcgtgtcgacaccgaaggatgctgtcaggtggccaccgggtgaacacacaagggcctgtcacaaccacccgggcagcaaacaaagtgaatagcccggccctcctcccccctgaggccgttgccttctactaaaaccccccctctggggcggcggcagattagaccccacaggaggaaggactcctccccgggcggtccctctccaccacacaggtgacgcagatatcacaacgcgggagaagttatacacaccacgaagagcccccacaagggtctctggggcgtttctcactcgcggaaaaccacgcgagagacccgcagaaaaaaccccctcggagatacatcggcgccccccccaccacaggtactggcgtgacataaccaagaggcgaactaatcttctggcgcacacaacctatggagcacccgtgccgctttccgcggcacacacaacgcccctgcgtgggtgaatactccgttccacccaaaacagtcgccccttgcgagtgagcacaccaagaaggtgggggcaaagagcacgaatcatctgatggcacccctgtgcataaggcgcttgagccccccaccaaatctcgtgtatcaaacatcccttggcgccgcccccgggttaccacagggccgcccccccctccttaaacataaca

SEQ ID NO: 508103 - DNA, 232 bp, Homo sapiens
ggaggctgaggcaggagaatggcgtgaacctgggaagcggagctcgcagtgagccgagatcacgccactgcactccagcctgggcaacagtgagactctgcataaagagcatacccatgtgtgtacctatctatctatctatctatctatctatctatctatctatctatctatctatctatctgtatatagatatattaaaatgtaaatggtggcatacctgctgttctgt

SEQ ID NO: 508104 - DNA, 721 bp, Homo sapiens
atctgtaatcccagcacttgggagactaaggcaggcggatcacctttggtcaggggttcgagaccaccctggccggcatggtgaaaccccatatctactaaaaataatttttttaaaaattggccagtcacgttggtgtctgcctgtggtcccagctactcggggggctcgggcacaagagtcacttgaacccaggaggcagagtgagccgaggttgtgccactgcactgcagcctgggctacagagagcaagactctgtctcaaaaaaaataaaataaaataaataaaaaaagatatagtattaatgcctgtatttatgaagacagggccatgtgcactgctgctatgctgaaatgaacttttataaagtattatggactatagccaactacagatggcatatgccgttaaagatgcattttctatgtatctaatatttgtgtacagtacaagtcagaacctcatttacaagacactttaagggatcctttagaacacatgttttacttaattgcaaatgagtgggctgagcatggtagacttagcagctttttatcaaaacccggcatggtcaggtgaacttcatacaatacgaattagtactactctgaactggtaaatgtagcctgtaacagtatgacggacttttacgacagcactagactagttcattatcctataagaccagcattccaagtgcggatcatcaggtccctccaa

SEQ ID NO: 508105 - DNA, 247 bp, Homo sapiens
atcaggtatccaatcaaatctagcctcagggatgagggatggggattgatctatggcccgctaagacaatggtttatccactgtggaatcgcacttgtagacggtcctcacaactctcgatatctctcggcgccaatacctgtttctcaacgtacttgggcgatgagcatgcggaagatagtgagagaatggagctcccatgtgtgcgacatcgatctcttctatggccagtcgctcgtcattagat

SEQ ID NO: 508106 - DNA, 902 bp, Homo sapiens
gtctcaagcctgtggcgttcgtctgatggggttaccacgcgggttcaacatgcgtatcgatgacagtgttatttctgttcggggcccatctatcctggcacgacggcactgagtgttcgtccgccaacgattgcaaggtgttcagattgttgcaaatctataatgtctagtaaaaaactttaacaaaagaagcgcaatcctcgcaacgttaggtggaccaagagcattccggaaagcagggtggtaaagagcttacagtggataattcattgtgacatttgataccaaaggtagaaatgaagcctatcaaataccagtcgatgagctatggaataaaactattgatgctgatgaacgagagttggcaagaaatcacacgagaagcgccaaggctaaatttaataatgaagcagattgcagaaaaataaagagcttacggaagggttcaggatatcacacagaagtcaaggcaaaaatcatccatctttatccggagaccccttcttgcatggcaaaagggaaacctacgttgcgacacgacgaacacatggtaccagcagttacacacgaggactgttgggcccttggaagatgctccttaaaaaatctctgtaaccattttcttttatgtacatttgaaaaatgccctttgggatacttgggaactgtaacattatttattttttaacataaggttcacttaaatgaaaagcgattaaaagacatgtttccctgcattgcccatttacattactattcagatattacggattgtaggattggcatctcaggtgtttaaattctttagtggatagatgtagctttaagtaaattcatggacaaatccttacttgtactatagaaagtgaattgtggacgcttaaagggttgggcaaaaggat

SEQ ID NO: 508107 - DNA, 1284 bp, Homo sapiens
gcctgctgctgcctcacggtgcctgcacgggactgcctgctcgatccccgagccccctcgcctgaccccgacagaccccccggctgccatgcaatccctggcttctactcctcggggcaccccggatggccacaggcggcccggcctcgctggcgcatgctggctgctcctgcggcagggtggtgcagctgcaggccgggtggctgacagggcagcttttcctggaggtcatcgactgtttgcacgcccggctctgggggccagacacaggtgatacagttaatattcgcgcaggatgtatcctacaagttgaccattcctaagcgaatccagaacttgtgcccaacagaactacattttcagactctcttggctcactcttgtagatacagcatctaaggatggataaatgcagcaacggatctatattgacggcaagatgtcactctaataggaccttcctggagcctcttcgacgctctattgcatatgcagagactaggagctgaccacaccgggaggtcgaatacatttgcccttgtcacgggacaccaactgacacctgatctcaaacagcgacgagacggatccgtgcaggcccaggctattacatttgctccagtgtgcagtacgtgcaacccacgagaagtgccacaacccctcatcttgcaacggtttggaaccagggcagctcagccagtgcaccgcctgctttcggccccaccttggctcgcaaaacagagagatgcagcttgcagcatggacgcctccactaaagtactgcctcacccgtactcaaacaagaccttactcaccaactacataatcaccccacaacaacaagtttgacaacctcctgaacaaatcacacccaagcaacaccaactacaatttccagcaacataatgccacatatcgtattgcatatatcacaccactaaactatgcgctcactcaaatcatctcccccactaaccatctcacaaccacaaacagcaccgactattacctacttaaccacacacaccacaccaccactaactgatcacaatctaccatggctcaccgactcacccgaaaccactccatcgcttcatctgcacaaacgaaacacatacaataaccgaatacgacaacactcctcatacaatagccacgcgcaacctatacaatactaatttaacaaccatccacgatctacaataaagcatagcagacaatcgacctcatcaacacccactacatatcataacacgatcacttacatatcttgatccacactac

SEQ ID NO: 508108 - DNA, 108 bp, Homo sapiens
gactacatgtagacccctaccacacctttctacccctactctggctacaggtaaaaatccagtggcagaacaaggagatgtggcggccgcctgtcagatgttcctgga

SEQ ID NO: 508109 - DNA, 260 bp, Homo sapiens
agccagtgtaacgactcatgaccacaagtccatgccatcattgccacctccataaactgtggatggccctctcctgcggaaactgtggcgtgatggccgcgtggctctccagtaacatcatccctgtctctactggcgctgcccaggtctgtgggcaaggtcatgcactgagataacccggacgctcactggcatggccttccgtgtccccactgccaacgtgtcagtggtggacctgacctgccgtctaggagcgtaat

SEQ ID NO: 508110 - DNA, 166 bp, Homo sapiens
ctcataatcattgtccttatctggcttcctagtcctgtatgcccttttcctaagcactcacaacaagaactaactaagtactaacatctcaggacgctcagtgaaattagaaagccgtctggaacgtatccgtgcgccgccagtcatgcctatgtccatcagtcgc

SEQ ID NO: 508111 - DNA, 197 bp, Homo sapiens
  misc_feature (124)..(124): n is a, c, g, or t
  misc_feature (188)..(188): n is a, c, g, or t
ggcccccctcccctgaggactcgagatatgagttttccatccatctccctggagaagcgccatgacggtgctctccaaggccctggggaagatcttggcgaggggactagccaagtcaggtctnccccctggagcccccctccccctgaggactcgatgataaggacaccaaaaaatctcatagaacntttaatgtt

SEQ ID NO: 508112 - DNA, 384 bp, Homo sapiens
attatgtgtaatctcttacgttctctttatgtagatggattacatttatagatttacatatattgaaccagccttgcatcccaggtatgaagccgacttgatagaggtggatagtttcatgatgtgctcctggattcggttctccagtgttttattgaggtttttcacatcagtgcacctcagggatattggtctgaagttatctttttttattgtgtctcttcccagttttggtatcagaatgatgctgtttttatataatgagctagaaaagaagtccctttttctcaatattttgaaataatattagaagtggtaccagctcttctttgtacatctggtagaattaatctgtaaatttgtctggttctatgctatttgtga

SEQ ID NO: 508113 - DNA, 935 bp, Homo sapiens
cacggtggctcacccctgtaatcccagcactttgggaggccgaggcaggtggatcacaaggtcaggagatcgagaccatcctggctaacacggtgaaaccccatctctactaaaaatacaaaaaaattagctgagcattgtggcacgtgcctgtaataccaggtactcgggaggctgaggcaggagaatcgctggaacccgggagttggaggttgcagtgaaccgagatcaccactgcactccagcctggcaacagagcgagacgccgtctcaaaaaaaaaaaagcagaagtcgtgaaaagagatgcataaagaggctcacacattggtattgacctgaaaatagcgaggacctaacatattttaccaaaaaaacttacacgagaaaatacacaagacaagagggaaggctcccaactggaaacgagatggcaaaagtcaggctaaagaagctggagggaactatagggagggtgctcagaccgtgcagaacgagggaggagcaagcactgattttaatttaccccgggacgtgctagaaatccaccagcagggtggcagaccaggaaaaatgtcgcttttaatctccccagacttttgtgggttcaggcctatggtaaatacggaagattgtacggcgaaaacagaatagttattgttccccacccaagtggaacatcttatttgtccttagctttaaatgctttggctaaccgtggcccatctgtattcagacattggagagccgcgggcgacacatagcagagtcgacagctggtattgtgtgacccctttgtaatacaaagtcgggcggggggacgccagcggtcaacactggggagagccgcaagtgtgtaaacaccggtggcgcgtcgcaacacggggtggacagtgagagacaacacgaggagttccaagagaaaacagcagagtgag

SEQ ID NO: 508114 - DNA, 420 bp, Homo sapiens
agacagagtcttgctgtgttgcccaggctggagtgcggtggcgcaatctcggctcactgcaaactccgcctcccgagttcacgccattctcctgcctcactacgcaagaggctgacgtgggaggatcacctgagcccaggaggcatagcttgcagtgagctgagattatgccactgcactgcagcctgggttacagagccagaccctgtctcagaacaaacaaacaaaactccacctatcctcccagagttaagttgatgtatgttaggtatttaactagttttattaattgcattataaaggctttttttttttttaaacttctagttctcctcagctaacatccccaaacttctttggccaattttttttttttttttgcctttattttggccaattttgttcttttttagctgcttt

SEQ ID NO: 508115 - DNA, 110 bp, Homo sapiens
tctgggagcgatgtgggcagattgtctgagctcaggagttcgagaccagcctgggcagcgtggtgaaaccccatctctgttaaaaagcagaaaaatttaaccgggcctgg

SEQ ID NO: 508116 - DNA, 814 bp, Homo sapiens
  misc_feature (1)..(1): n is a, c, g, or t
  misc_feature (85)..(85): n is a, c, g, or t
  misc_feature (191)..(191): n is a, c, g, or t
  misc_feature (209)..(209): n is a, c, g, or t
  misc_feature (219)..(219): n is a, c, g, or t
  misc_feature (274)..(274): n is a, c, g, or t
  misc_feature (277)..(277): n is a, c, g, or t
  misc_feature (309)..(309): n is a, c, g, or t
  misc_feature (336)..(336): n is a, c, g, or t
  misc_feature (355)..(355): n is a, c, g, or t
  misc_feature (357)..(357): n is a, c, g, or t
  misc_feature (380)..(380): n is a, c, g, or t
  misc_feature (424)..(425): n is a, c, g, or t
  misc_feature (429)..(429): n is a, c, g, or t
  misc_feature (454)..(454): n is a, c, g, or t
  misc_feature (472)..(472): n is a, c, g, or t
  misc_feature (533)..(533): n is a, c, g, or t
  misc_feature (547)..(547): n is a, c, g, or t
  misc_feature (550)..(550): n is a, c, g, or t
  misc_feature (555)..(555): n is a, c, g, or t
  misc_feature (605)..(605): n is a, c, g, or t
  misc_feature (617)..(617): n is a, c, g, or t
  misc_feature (667)..(667): n is a, c, g, or t
  misc_feature (677)..(677): n is a, c, g, or t
  misc_feature (681)..(681): n is a, c, g, or t
  misc_feature (683)..(683): n is a, c, g, or t
  misc_feature (686)..(686): n is a, c, g, or t
  misc_feature (689)..(689): n is a, c, g, or t
  misc_feature (712)..(712): n is a, c, g, or t
  misc_feature (725)..(725): n is a, c, g, or t
  misc_feature (748)..(748): n is a, c, g, or t
  misc_feature (775)..(775): n is a, c, g, or t
nccggggccggggatctggaagcgggggcggtcctccccctggaaacaccgtctctggaaggacacccttaggatcccctgaccncagggtgccacccacacgggcctggggtcctgggaggcccgggctggagttacccccagcccctccctacgtcccagggacccttgggtctgtcgagtcccttgcnggatgagggtcaagaccnaggtcaagcngacttcagccagggtgtgggggcccggcttcgtagcccccagacttacctccccnctnctatcccgggccaggaaggcaatgggagggcnccctagtcaggcacagccccctgaccngtggcaccgtgtgggtttntngggaggtcctgacgtgcccagcnggcatcactgccgtggtttcccagaggctgaggcagaccgcagnnggtncattcggaccaggactccgactccntcatggctaacgcgttangtttgggagaagcagtttctaagaatgaggacagaaggggaagccctgagggtgacaaggnggggggctgccccnctnctctnagggctccagaattcatgaggaggggtccctgggggaggctgggccaggnggtgccccaatnagtgccggtgggtgaagagggccggggtgcagttactgggcgcgcacacnctggcgggtntttncngtnctnggtggggacacggtgcgtgttancctgcagagtgcnggctgggctggagcggggccgcnggacacagaggggagggagacgcaggnttagacaaacgcagaacacagtcctggcagaccccgggt

SEQ ID NO: 508117 - DNA, 384 bp, Homo sapiens
atggacgtcttcaagaagggtttctccattgccaaggagggtgtggtgggtgccgtggaaaagaccaagcagggagtgacagaggcagctgagaagaccaaggagggtgtcatgtatgtgggagctaagaccaaagagggtgttgtgcagagtgtgacttcagtggctgagaagaccaaggagcaggccaacgccgtgagtgaggccgtggtctccagtgtcaacactgtggccaccaagactgtggaggaggtggagaacattgcagtcacctctggagtggtgcacaaggaggccctgaagcaacctgtcccctcacaggaggatgaggcagccaaagcggaagagcaagtggctgaggagaccaagagtgggggagattag

SEQ ID NO: 508118 - DNA, 281 bp, Homo sapiens
ttacccacccccctcgtgctataaatttccttcttaacaccaccttagctgtgcctcagagattctggaatgttgtatttttattctcattagttttgaataacttcttgatttctgcccttatttcatcatttacctaaaagtcattcagtgcaggttattcaatttccctgtaatgtatggttttgagtgaatttctcagtcttgatttctgatttgattgtgctgggctttgagatattggtgtgtggatggatgaggtgctggtgtgtggatggatg

SEQ ID NO: 508119 - DNA, 167 bp, Homo sapiens
agtactgaactgagttctcccagcgttatcctgagcagagttcctcccagacgttatccctgagcccgagttcctcccagcgttatccctgagcccgagttcctcccagcgttatccctgaggcccagttctgccaaactcattctcagcagcctaggaggtaatat

SEQ ID NO: 508120 - DNA, 864 bp, Homo sapiens
ggcccaacatggcggcggccgtaaggggcatgggtagagccttgatacatcatcagaaaggcatagtctttccaagatggtttatcagacatcacttgtgcttgtctgtaaacatccgagtgcccaaagacattttgctgctgctacaaagtctgcaaagaaaacaaaagagaaggtgctaaagaaaaagacaccagatgagaaagaaagatgaaatagaagacataaaagcatatccctatatggaaggcgaactgaggatgatgtctatgtaagagcttatacccgagacagatatatgaggtggagaaagctgtcacttactgaagaaattcaaattacttgagtttactagtccaaagcaaagtgtttatctgtgatttgacacgtggatatggcactgggaaagaagagaaacgtggagccatttaccaggggtcttaggttggcatacccatttgcttccgaaatcaatacagttgtgtatttacagagaatgcatcagaggtcagaatagggaagacaatggagctggattttgaggaggactagtctgatagggaggattgggatgatgaaattgtgcgaactcaaggtaacctggtgcaagaagtaatgctggacctgcagcgagtcaaggagaaatgcggtaaaagaggatcaagagatctcgcacgacccaggcgcgacatcccaaaggccgaatgtaaacgggcagaatcacggaaggcaacaggcaccggccaacagagaacggaagaggcagaccggccgacacacaaacgaggccacctggacggggggaacacacgcagcgaacagcaaacggccacggggaggacaacgcagagaagccgaggaaga

SEQ ID NO: 508121 - DNA, 333 bp, Homo sapiens
taataaaaaaaatacaatgaagagagtacttcatttcacaaattaagtatcaaattggagtgcttaaaaattaacaaggtgggctgggcgtggtggctcacgcctgcaatcccagcactttgggaagccgaggtgggtggaccacgagatcaggagattgagaccatcctagccaacacggtgaaacccgtctctaccaaaaatacaaaaaattagcagggcatggtggcacgtgcctatagttccagctacttgggaggctgaggcagaagattcacttgaacccagaggtgaaggctgctgtaagccgtgacagcaccactgcaccccagc

SEQ ID NO: 508122 - DNA, 792 bp, Homo sapiens
cggttaaaatagagttgatgacaaatattttaaaggtgcagaataccattagaaaatactatttgaaatgggcacttatcgcaatatatctgggcatgaatggccagaaaatatgtattgctgggccgcacaagaaggataaggtctagagaggaaagtagcagattagcagttgagtggcgtgtctcatttcacccagtataagcaaggtgcagtgtacaaagaagtatattctggaatacattatttccattcatttagcagaaataaatcattggtttcacttggcagtggagacacctgagtcactcttttcttaacaccgtgcaacatcttaatttgtgatttcagcagttgcgggtcatgtactgtggtagtaggaagtgatttttaccacctgtgtttgcatatttatatatgctgtggatgaaaataacttactagagaatgtatattttaatgacaagaatgtgtatctgtgggatataatcagagaagtgaaaagtaatttatcagtaatttttaagagtccatgtcgggtgacaagcatctctaatagccaactctttattaaagcacacctcctaaacaataaggaagccatggaacattgtagatagtctaagctaattgtgacagtagtaggaaagctccattttgggcttcgaagtgctattcaaggagtcaacagaatggccaccgacacagggctcggggggtaccagagggcgcgcaaccggttaacgaaagttcggcagtataggcgagcctgaggattgttccccccttctg

SEQ ID NO: 508123 - DNA, 414 bp, Homo sapiens
  misc_feature (373)..(373): n is a, c, g, or t
atgctactcgaggtaaaccattacttggtataataaataagcagatattctgtaaaaaaaaaacacagcctgggcatggtggcacatgcctagaaatcccatcactttggaaggctgaggtgggtggatcacaaagtcaggaataaaggtgttctacccctttgtatcattttcctggcgcacttaagtcggaaaaatcatgggctaagcttaattaagagaaccgtgagattaaagccaaatattttagttaaaaataggatcctataatttcgtggaaaactgagttccttcgtggattacacatttaggcctaggaggcagcaaagtctcacagaaatggcaaaatcttactaaagattacttacagggnaatgttctgaatgagcaacacattgaagtacttttaaaaga

SEQ ID NO: 508124 - DNA, 803 bp, Homo sapiens
gaacttctgcctctttggccagctagttcaggggaccttccacgtggcaagtaacaggaacaatcaggacattgcgcattctgaaggtcgcaggcatgcatccaacgtcatcataaagagcattagattactaatgtatcttttgctataaaagatagaccgtcatgtatccctcactggtatctggagaacctcgtctccgcacttaagcatttggcaccatcgtgataggttgtgcttatgggcgttgacatctcattgccccacgcagagcatcgtctgacatacctcgaagactttttcactgatggtgaggtgaaaggctgagtggagggcacctgggaggatcttaattgtggagctagaaactaaacacataggcttcactcacacaagttaagggccgaaccattgtaggttggcaccgagctccgtatcttgtgatttccatcctaggaccctggaagattggccagttggtctaattgattggtacaaggtcaccttttgggccccagaggcatggacctttcacgtgatggacgacatgtggattccagctggaaagtatctagtcaggcagttaacgaggagcgattgtggggttcgccaaccttttataggttttaacgtttaaaggtgcacaaacgcaagtgttatagtggggcacagcaaaggaaaagggaggttcgttccgtggtaagtgtgggaccgcgatacagattgagcgtttaccggagacatggagaatcgcgatatagcaaaggggaggccagaggataacaggatttttcacgttgtga

SEQ ID NO: 508125 - DNA, 334 bp, Homo sapiens
ctcgatctagagatcgcgtggtattagctaggtcagctctagcagatgtcacgcattaccaagataatgtaggtaagaagggcagatcagtaaagaagattgtgacaatgtgttgcagtgcgcagctcagcctagaatggactagctgccatgaggccagggctgggggacgtttttatagaggtctctgtgatgtgggagctctgtgtggaatgaggtcattgtgcccgcaggttgttagtgattagctgtctctaacaattgtacatacaataattgttcattattgttctcaacttggggctctccccaacctggggacccttccttattg

SEQ ID NO: 508126 - DNA, 152 bp, Homo sapiens
aataattaaattgtacctattatgaatatgtgagatgtgtaaataaattgtgaaaaaaattaaataaagcatgtgtggttctccaaaagaaaaaaaaaataatttcctgaagaataaaatagatatatggcacttggagtgcaaaaaaaaaa

SEQ ID NO: 508127 - DNA, 401 bp, Homo sapiens
  misc_feature (14)..(14): n is a, c, g, or t
  misc_feature (42)..(42): n is a, c, g, or t
  misc_feature (115)..(115): n is a, c, g, or t
gctagggccggggnagtcgggatgatcttgaacttgtcagcntctgcttggcttttaaaagttatcccaggccagatagatgcttgtgtcacgcctgtaatcccagtgctttggngagccaaggccgcaggattacttgagcccaggagtttgagaccagcctgggcaacgtggcgagacccccatctctacaaagattaaaaaaaaatttagccaggtatggtggcgtgcacctgtggtactagcatcaaaaaaatgcaaaaatttgctgggcgtggtggcatgtgcatgtagtcccaactactcgggaggctgaggtggggggattgcgtgaagcccgggaggtcgaggctgcagtaagccatgattgcaccacggcactccagctgatagagatccta

SEQ ID NO: 508128 - DNA, 395 bp, Homo sapiens
  misc_feature (144)..(144): n is a, c, g, or t
  misc_feature (203)..(203): n is a, c, g, or t
  misc_feature (234)..(234): n is a, c, g, or t
  misc_feature (350)..(350): n is a, c, g, or t
  misc_feature (368)..(368): n is a, c, g, or t
  misc_feature (390)..(390): n is a, c, g, or t
  misc_feature (395)..(395): n is a, c, g, or t
agtgttcctgccttgagtggaaggcagggccagccctccttggccaccaattccccttttttcctacctagaggaggactcagccatccccatcacagtccctggccgcctgcctgtgtccctggcgggccaccctgtgtcgangcctcaggcagcagctgtgcaagcagcagccgcccaagcagctgtggctaactaggcanttgccctggaacagctgcgggagaagctggnagtctgcagagcctccggagaagaagatggccctgggtagcgaattgagcagcaacggcttgattgcaacgtgcacttccagcagaaactttcctgggccatggcggcccaagctngcccattgaggcatttcngattcaacagccaaggtaattnaactn

SEQ ID NO: 508129 - DNA, 581 bp, Homo sapiens
aactttaaaaaaaaaaaaaaaaaaaaaaaaaaaaaaaaaaaaaaaaaaaaaaaaaaaaaaaaaaaaaaaaaaaaaaaaaaaaaaaaaaaaaaaaaaaaaaaaaaacccttgtgggcccccttgggccccatccatttttaacctggacaaactttttcctgggggccgaatttgggcctccttggcccattcccccttttgggggggcgtttacaattaaaggggccgggttttaccaccggggggcggggaaaaccctggggttccccaaatttattcccttggaagaaaatccccttttcccaggtggggtaaataccaaaggggcccccccgattcccctttccaaaaattgcccccccctgatgggcaaagggaatttgaaccccttaattttttgtaaaattccggataaaatttttgtaaaatcagcctcttttttaacccaatgggccgaaaagggcaaaaaccctttttaaataaaatttccccgaataggggtgaggggttgtcccctttgggaccaagggccccttttaccgggcctcccccgccgggggcgagttttttggggggtgggg

SEQ ID NO: 508130 - DNA, 431 bp, Homo sapiens
tgtctcatgatgctgtgaggcacatctgtctccaggggctcctgtgagtgtctcctgtccttcagggatctcctcaccttgtggaagagacatttgtgtccctcatcctccaaaatgaaagcccttactgttgggcatcctgatagttcagtcagtaagacataaaatccaattagaaatggctcaacccaaaaagggaatctgttgactcaggcaactgaaaggtggggcttcaggcatggtttgatctaggggatagtccagcccctggctgctctcaggttagatgtaccttgactgtcaggatccttgcaggaaattgatggttgcctcacgtggacacaggcagaatccaggagacctggtggacactgggcatccaggaagtgaattcaggagatttggcagacactgggcatccaggaagtggg

SEQ ID NO: 508131 - DNA, 110 bp, Homo sapiens
ttaagctgaaaggcatacatataagggtacctgagaatatctaaaggtaattcgggggggtaaaaattttacaaaaggcgtgttgggccggttaagcctccaggaagtta

SEQ ID NO: 508132 - DNA, 158 bp, Homo sapiens
gacctaacggatccccagattccggctgagaaaaaacaaagcaaaaggtacgaactatggctcgagatttatacgatgaccattttaaagctgttgaaagcagtgcctcgtggtagtatctggtaacactcatgaaatattgcaagctcagttagagt

SEQ ID NO: 508133 - DNA, 568 bp, Homo sapiens
tgtggtggctcttgcctgtaattccagcacttggagactgggacaggtggcttacctggggtcaggagtttgagaccagcctggtcagcatggtgaaaccctgtctctgcaaaggtgccaaaactagccagatgcagtggtgcggcctgtagtcccaactactcaggaggctgaggcgtgagaatggcttgagcctgggagatggaggttgaggtgagctgagatcacaccactgcactccagcctgggtgacagagtgagactccatctaaaaagaaagaacaattaataaggggaccagcagatttcccagacaaggcttttgctttgtttttttgaggtggagtcttgctctgttgcccgggctggagtgcagtggtgtgatctcagctcgctactgcaacctccacctcctgggttcaagcagttcccttcccttagcctcccaagtagctgggactgggggcatgcaccaacaaacctggctaattttgtatttttagtggagatggggtttctccatgttggccaggttttctcgaactcctgacctcaagtgatccccctg

SEQ ID NO: 508134 - DNA, 371 bp, Homo sapiens
aatcgagctcggacccctccatatgtgtgcccagccaacatagtgaaaccccatcgctactaaaaatacaaaaattaggtgtgcgtggcggcatgtgcctgtggtctgagctactcgggaggctgaggcacgagtatcacttgaacctgttaggtggaggctgcggtgagtcgagatcataccattgcactccagcctgggcgacacagtgagattctgtctcaaaaaaaaaaaaaaaacaccaccaatatggcaggggtactaaacaccttgcaaagaggttctgctgagaataggagatttcatttgaggcccatgtacttttttttttggaaaaaggtccagtttttttggtgggaaaaaacctcctt

SEQ ID NO: 508135 - DNA, 334 bp, Homo sapiens
atagaaacattttcagcataatgaccaatgaaatttcctgttgccattccaagatacgccagcatggatgacaatgcattataaaggacagcctgcttaacgggcatggccagcctttaggagaacagcaaagtcacctaattcatgaggcaactcatgacagaacacagcaacagacgtacttaaaccacttgatacgccttcagcagaagcagcaccaattgctaggccatcgctgaaatgcgtgcaggccatcacccattatcaccatccagaccaaagtggcgacgccgacatatgtcagctcctaccgagagtagcgctggctgtgact

SEQ ID NO: 508136 - DNA, 484 bp, Homo sapiens
aattctatcagatggatgtgcatatgagagtcacaatctcaccttcgttctgggtcctgttatgacactgtatcatttgagggctttatacaatatgccttgatatcataatacactatgacctttatttaagtaggagacccaggaccttatctgttgccctaagcctagatatcagagtcaaaatctgttctcttagctggatccaggtatgagagtcatcatctcacctgtgagctgtgaccatgtatatgtcgcaatttcacctgtcatcaggaagcagacatgagagtcctatcacctgggtgctggatgaaaaaagatgcaaagaagacatatttgctttttatccacacatcatttccaatcactatgctgagcaaagtcaatgtgagcagagctgagaatagcagttttctggcaggacggccacttctgagcaaaaaatgacacaataaaagtataaatatttaatagtaaaaaa

SEQ ID NO: 508137 - DNA, 183 bp, Homo sapiens
ccaggcagactccggggcggttggtgggtgagcatggggcagttgacctgggtctgaaagagtcgggagtgacacgctcagagagcatgaactgatgctggcatgacaggattccaggaagatcatggagacctgtccggtagctgtaacagagatggtggagtcacaggacacagcctgtct

SEQ ID NO: 508138 - DNA, 858 bp, Homo sapiens
ggagaagccgcagcgccgcctcttctctcgcgcctcgcctcttcctccgcctcctccttcgcctcttcctgcctcctcctggcttccgccgccgccactccagcctaatcccaaccccaggcgaagcgttcttatttatttccgttttctcgcactacagcctcctgacaaggtgatccgggcgggcccgcaggaattttatcccctcaccggctcacactagtatcgcatgtccactatccagaactccaatctttcgaccccttgtgtgatgcaaactaagggtgagacttactcccggcagggaactgagggatcacatttcatataagaatccagcaacggaacggaagaaaagacatgactaatgttcagggggcaatgcaggatgatttatgacaaaaagaaaatttggtgaaaaggctttcaaaaagaaatgtgcctgtaaatgttacttggtgattgaacatcctgaatacggaagaggttatgcagccttcaaggtgaccaaaggaaaaaatatctgccagtttctctggaggtgccatgtacaggaggaacagtaaggttcatggattctaaaatgacctaaatacgtggagaattcctgaaatagttaggtctctaaacccggttggtggctggtgaatgatcctgcagtaaggactttcatatttatcaatcaacttcatcactctgcgatacgaacatgggttgggctagtacctagaatgcgagaggaaccctatgtcagtcagacgtgggtatgacgacagacgaattgggctacactgcgtcacaacatttggtgtcctaaaaaaaaagggcaaaagggcgaagagatacatacacacaaag

SEQ ID NO: 508139 - DNA, 607 bp, Homo sapiens
aattctatcagatggatgtgcatatgagagtcacaatctcaccttcgttctgggtcctgttatgacactgtatcatttgagggctttatacaatatgccttgatatcataatacactatgacctttatttaagtaggagacccaggaccttatctgttgccctaagcctagatatcagagtcaaaatctgttctcttagctggatccaggtatgagagtcatcatctcacctgtgagctgtgaccatgtatatgtcgcaatttcacctgtcatcaggaagcagacatgagagtcctatcacctgggtgctggacgaagtttcgctcttgtttcccaggccggagcacaatggtgtgatctcgactcactgcaacctccgcctcccggattcaagcgattctcctgcctcagcctgccgagtagctgggattacagatgaaaaaagatgcaaagaagacatatttgctttttatccacacatcatttccaatcactatgctgagcaaagtcaatgtgagcagagctgagaatagcagttttctggcaggacggccacttctgagcaaaaaatgacacaataaaagtataaatatttaatagtaaaaaa

SEQ ID NO: 508140 - DNA, 238 bp, Homo sapiens
aaaattagctaggtgtggcggcatgccagctacttgggaggctgaggcaagagaattgcttgaacccagaggcagaggttgcagtgagctgagattgcactgctgcattccagcctggcaacagagtgagactctgtctcaaaaataaataaacatatgtctaaaatggggcaaacacatctctcagatctttatgctgggggggtaggtagaatgcattatagccagtgtgtgctca

SEQ ID NO: 508141 - DNA, 319 bp, Homo sapiens
ccattgagtgtgctacagcacctggcacagaatatgtactcaatacatattcatgtgcatttaatacatttggaataagttaatagatgaatgacataaatggatgagtggggagaaagagagagagagggagacaagaaagaggaagtggggagagagagatggggagagaaatgttaatcactgactctagagctaggactcagacatgtggaatatgggccaaacttcccattcaataggcctttggcttaaaaggaaactcttcaattcttagaataaaggatgatgtgtgtatgtgaaaaaagcaacctggagt

SEQ ID NO: 508142 - DNA, 252 bp, Homo sapiens
gaccttactagcagacaacagctctagaatctaagaacccagaagttagcagggcatgttggtgcacgcctgtaatcccggctactcaggaggctgaggcaggagaattgattgagcccagaaggcggaggttgcagtgagccaaaatcacgccactgcactccagcctgggccacagagtgagactttgtctcaaaaacaaaacaaaacaaaacaaaaaaagctgctggctcccatcctgtaatcccagca

SEQ ID NO: 508143 - DNA, 343 bp, Homo sapiens
cttctcggatccacaataagtgatgcaacctgtccgaaagctcatgtttgatgccaatatagagatggctttatttttatagtcgctcaaactaaacgcccgcttgttttgtttgtcgaaaatgcatgcaaagacttttaaaccttgaatttggcataaaaaggagtatttaaaaccgtttataatcacacaaagttgtcgcggtgttactttttttttcttttagaaaggttgtatttgatatttcttttgtccagttgatcgtagcatctgtttatattgaaaatgtagtatttttgtcattgcagaataacatgatattaaaaatctcttgtatgtatga

SEQ ID NO: 508144 - DNA, 375 bp, Homo sapiens
  misc_feature (161)..(161): n is a, c, g, or t
  misc_feature (165)..(165): n is a, c, g, or t
  misc_feature (369)..(369): n is a, c, g, or t
  misc_feature (371)..(373): n is a, c, g, or t
cgaatgagctgtcctccaccccacgtcggagacctcagcgcccgggccccggcctgttagcacctgcatgcctttgacggcaacccctggcatatgcctgggcctcacagctattagcggagcgcctactctgttccaggcacagggcacagcagcaaccntggnacccccaggggtggctcctcctccatcccggcttcctgctggaacatgagcaggcaattcacacaagaagcctgtaatcccagcactttgagaggtggaagcgggaggatggcttgagtcttgggagttcaaggctgcagtgggctgtgattgcaccactgcactccatcctgggtgacggagcaagaccctgtctcaaaaaanannnaa

SEQ ID NO: 508145 - DNA, 1321 bp, Homo sapiens
  misc_feature (96)..(96): n is a, c, g, or t
  misc_feature (280)..(280): n is a, c, g, or t
  misc_feature (304)..(304): n is a, c, g, or t
  misc_feature (318)..(318): n is a, c, g, or t
  misc_feature (328)..(328): n is a, c, g, or t
  misc_feature (340)..(340): n is a, c, g, or t
  misc_feature (348)..(348): n is a, c, g, or t
  misc_feature (350)..(350): n is a, c, g, or t
  misc_feature (356)..(356): n is a, c, g, or t
  misc_feature (382)..(383): n is a, c, g, or t
  misc_feature (386)..(386): n is a, c, g, or t
  misc_feature (403)..(403): n is a, c, g, or t
  misc_feature (405)..(405): n is a, c, g, or t
  misc_feature (422)..(422): n is a, c, g, or t
  misc_feature (446)..(446): n is a, c, g, or t
  misc_feature (451)..(452): n is a, c, g, or t
  misc_feature (456)..(456): n is a, c, g, or t
  misc_feature (469)..(470): n is a, c, g, or t
  misc_feature (476)..(476): n is a, c, g, or t
  misc_feature (487)..(487): n is a, c, g, or t
  misc_feature (489)..(489): n is a, c, g, or t
  misc_feature (497)..(498): n is a, c, g, or t
  misc_feature (508)..(508): n is a, c, g, or t
  misc_feature (514)..(514): n is a, c, g, or t
  misc_feature (518)..(520): n is a, c, g, or t
  misc_feature (527)..(527): n is a, c, g, or t
  misc_feature (556)..(556): n is a, c, g, or t
  misc_feature (561)..(561): n is a, c, g, or t
  misc_feature (616)..(616): n is a, c, g, or t
  misc_feature (618)..(620): n is a, c, g, or t
  misc_feature (892)..(892): n is a, c, g, or t
  misc_feature (1075)..(1075): n is a, c, g, or t
  misc_feature (1110)..(1110): n is a, c, g, or t
  misc_feature (1113)..(1113): n is a, c, g, or t
  misc_feature (1145)..(1145): n is a, c, g, or t
  misc_feature (1189)..(1189): n is a, c, g, or t
  misc_feature (1201)..(1201): n is a, c, g, or t
  misc_feature (1203)..(1203): n is a, c, g, or t
  misc_feature (1213)..(1213): n is a, c, g, or t
  misc_feature (1216)..(1216): n is a, c, g, or t
  misc_feature (1282)..(1282): n is a, c, g, or t
  misc_feature (1311)..(1311): n is a, c, g, or t
gtaccccaaaagtcatacagtgtcatgaacaaaggctgggatgggtatgatgtacagtgggaatgtaagacggacttagatattgcatacaaattnggaaaaactgtgtgagctgtgaaggctatgagtcctctgaagaccagtatgtactaagaggttcttgtggcttggagtataatttagattatacagaacttggcctgcagaaactgaaggagtctggaaagcagcacggctttgccctctttctctgattattcattcatcagtggtcctcgcnggtttcctgtaacatgagtggatngattaccatcgtgntactccttgngatcgcctttgnagtctatnangctgtncctgagtgaggggcagtattctcctnncancggtacttctgagtatncntccattttcccaccgtntaccagagattcaccaactcagcnaggannctcnctcccccaggctnnaagtcntgagttcacangnaccacagnnatactggccntggtgnaacnnnctggttnggcagtgcttttacaggacaacaaggatntgaanattcaggaccagggttctggacaggcttgggaactggtggaatactaggatattngnnnggcagcaatagagcggcaacacccttctcagactcgtggtactacccgtcctatcctccctcctaccctggcacgtggaatagggcttactcaccccttcatggaggctcgggcagctattcggtatgtcaaactcagacacgaaaaccagaactgcatcaggatatggtggtaccaggagacgataaagtagaaagtggagtcaaacactggatgcagaaattttggatttttcatcactttctctttagaaaaaaagtactacctgttancaattgggaaaaggggatattcaaaagttctgtggtgttatgtccagtgtagctttttgtattctattatttgaggctaaaagttgatgtgtgacaaaatacttatgtgttgtatgtcagtgtaacatgcagatgtatatgcagtttttgaaagtgatcattacgtggaatgctaaaaatacntaatttctcctgtgatgccctaagaagcttaagangangtgttgtactaatagaaactaagtacagaaanttcagttttaggtggttgtagctgatgagtatacctcatagagnctataatattcnantggtaataanatnattgatgttgctgtcctccaacatttccagcttggaacgaattatgctaatttgtgagtgccgaanactttgagctcggagcttggtcattcagnggggagtgcc

SEQ ID NO: 508146 - DNA, 583 bp, Homo sapiens
  misc_feature (240)..(240): n is a, c, g, or t
  misc_feature (250)..(250): n is a, c, g, or t
  misc_feature (317)..(317): n is a, c, g, or t
  misc_feature (327)..(327): n is a, c, g, or t
caggaacccgcgaaccctctcttgaccactatgagcctcccgtccagccgcgcggccgtgtcccgggtccttcgggctccttgtgcgcgctgctcgcgctgctgctcctgctgacgccgccggggcccctcgccagcgctggtcctgtctctgctgtgctgacagagctgcgttgcacttgtttacgcgttacgctgagagtaaaccccaaaacgattggtaaactgcaggtgttccccngcaggcccgncagtgctccaaggtggaagtggtagcacatccctgaagaacgggacagcaagctattgtctggaccncggaagcccncttttctaacagaaagtcatccgagaaaacttttggacagtggaaacaagaaaaactgagtaacaaaaaagacctatggcattcataacacatttgcccccagtcttcacgcggagcagttttctggagatccctgggaccccagtaagacataagaaggaagggttggtatatctttcccagtatttcttacccatggattcccatactttgcaagagtgtgggcggacaagcctacgcttctccctgaagttta

SEQ ID NO: 508147 - DNA, 337 bp, Homo sapiens
gctcttggactccaaaacctgttacggctggatttcatagcaaaggtagagcaaacaaactccgtttactcacttcactggtgcctctttatgacctgcttaaactaaacccacttcgcataaattgacactttggtttcctagatttaaactacttgtgttggactttggggtatatacgcctcagttttagaaatctctgagtcctattgaatctctaaatcaatgtgtttcaattcaattatttgttacagatgtgagagaaggcaaggttttctctctctctttgttgtatccactcgcaatgataaaacagcaaacagttctgcctcctcag

SEQ ID NO: 508148 - DNA, 122 bp, Homo sapiens
ctgtatttttatggcagaagggagaaaaagtgtttcaacggtttctaatgaagtccggtatttaaatgataaatgagtgatgtgtttagtagaggcaaaataaaccaataaatgatataaaa

SEQ ID NO: 508149 - DNA, 1665 bp, Homo sapiens
  misc_feature (384)..(384): n is a, c, g, or t
  misc_feature (458)..(458): n is a, c, g, or t
  misc_feature (1072)..(1072): n is a, c, g, or t
  misc_feature (1228)..(1228): n is a, c, g, or t
acccgggggtgtgcgtctcccgggttgtagccttgcgcacgggggggaggccaacttgtcagcccggggactcgcgttttgtgccccgttggcccctctttttgtggaagctacctatttggcacccacagtgtgtgtgttcccgaacacacgacgccgggggttaccccgtgtgtcgccggggtttccccggggggagattgtggtgcggccaccaaacgtgggttcgctcatcaacaagggtgcttcctcgtggccatcacggggcgttcccaactttcggcaatattttgtgtgggcagggcgccgctcaggagatgccccgccgttatatagggtaaagggcccttttccccctcccgcggggtacccacttacaagagngtggcgttccatattcccttgtgtggccacgaggggcataaaccacacaagttgtgtggaaaaacgaatggggngcacgacgaagactcttcttgtttgccgacgactttgccacaccacattttcccagcagaagaggggacttttcgtaagacccccttgagacaccaccactggggttccctcgcgccgtttctcttgtaaggaaaggggttggggttaattccccgccacgagatgttcgtttgctgtgtgacgacgggagaccctctcgtggccccgcgggcctcatggagtctgctctctcccccccccctgggagaaggtgtgtgaaggccgcacacagggggagacacccccacctcctgggaagaatattggtgggaaacagcgcgccacaaagaggttcccaccgggagatataatgagaagggcaacatctcccctccctcggagccacctcggtcacagagaggcagctacacaatgactgctgtgtgaccacaggggcacaaccgacacagctctcgtgagaaagaatgggcccggccacactctctgtgtgtctccgagtctctatacgccacacactcttctcacagagagagagagagtttccgagccccctctcgccacacctgcgggtgtctctcgggctgttttctcgagagagagtgtgggtgatatngccagcagagtgttcttttctgtggagagagagagcccctctgaggccccgggcaacaagagaccactctcacactctctcggagagagagtgtgggagagtcccaacagtggacggacacccgcgactctcggagaaaatatgttgggagagagngccgccacacagagtctccccacagcagagtaaagaggagagagggcgactctcccccaccccgcgacaccacacgagagagagcgtctcatatttttgccaagagccacagacacagacgtgtggaagaattgggcgccccgacacatcttttttctctgtgacgatcaccacacacactctcgcagagaaagagagatctggaccacctgccaccgctggttctcctgcggccctgtgagagggtggctgtttaatattttccagtccatggcgcatattcgccagtggccccagtggatggcgcatttacatttgccacatatatagcccatttgcccccacacatttaagattttagaaaattcacacaagatttccagttaatatagctgaacctgtttccaaatgttaataaaggtttccttgcatggtta

SEQ ID NO: 508150 - DNA, 322 bp, Homo sapiens
  misc_feature (30)..(30): n is a, c, g, or t
aaatttctttgagaaatggatttcccaggnaagtgtccatgggtgaggagcagcatcagtatctaggggtgcactttgggaggccgaggagggaggatcacttgagctcaggagttcaagaccagcctggccaacatggcgaaaccccacctctactaaaagtacaaaaattagccgggcgtggtggcaggtgcctgtaatgccaggtactcaaaagcctgaggcagaagaatttcttgaacccaggaggtggaggctgcagttagccgagattgtgccactacactctagcctgggtgacagagccagattcctccccccc

SEQ ID NO: 508151 - DNA, 240 bp, Homo sapiens
tctgagccgtcgcgaaaacgtggtggatagtacgtcggacacccactgtaacgctctcccgtcatcgcatggcgtgacgtgccacctcttcattccagatattcagtcccttcttccattgcggaccggtttcatcccctttccaggcttgctcgtaaggcgcaaaacgcccgccacgcgccaacatataacctacccgcagccgttcatcagctttcagcaccgtgtctagcgccggtt

SEQ ID NO: 508152 - DNA, 203 bp, Homo sapiens
gcccacgccgagcttcccccgcgccgccccaggccctcccgcgcctctcccatcatcgcgtctcccctgagcaccccccatctaaccctctaccttccccaggccctccgcaatctccccaaccatcgcctcatcccgctgaggaccccatatttccacccacgcgagcgagccagcggtagacagcggagctcatgagtcta

SEQ ID NO: 508153 - DNA, 552 bp, Homo sapiens
  misc_feature (334)..(334): n is a, c, g, or t
agaggttcccccctcacggatactcacacgtcaaaaataagagatgctggcaggttacagagacaaaggcaatgcttatacactgttgatgggagtgaaaattagttcattgtggaaagcagtatggcgattcctcaacgagctaaaagcagaactacctattcaacccagcaatcccattactgggtatataccctaaggactataaatcattctactataaagacacatgtatgtcaatgttgactgttgcaccattcgcaatagcagagacatggaatcaatgttaatgcccatcaatgacgaactgggtaaagaaaatgttgcacacatnaaccatggaatactatgcagcctttaaaaagaatgagatcatttcctttgcaggaatacgaatggagctggaggctattacccctattcaggaacagaaaacctaacactgcatgttctcaactataaataggagctaaatcatgagaactcatgaacacaaagaaaggaacagcaggctgagcatggtgactcatgcctgaaatctcagcactttgg

SEQ ID NO: 508154 - DNA, 108 bp, Homo sapiens
gcacacctgtgagacagaggcctgacctgggctctgcacagaagggcctgcaagtggatctgcagtctgacggggcagcagcagaagatatagtggcaagtgagcagt

SEQ ID NO: 508155 - DNA, 166 bp, Homo sapiens
gagcggtgttcttgctcatgccgggacagggctggggcgtttcccgtaccggctcggctgggcaacagctgtgagacaggcgtgtgtcggtcacggcctttggagtggtgacctggagccgtgctgggtcttgaggcgtcttgggaccgacggcgtggctggcttg

SEQ ID NO: 508156 - DNA, 140 bp, Homo sapiens
accgatgctccaccctgaatgctccatcctgatgctccaccctgatgctccaccctgatgctccaccctgatgctccaccctgatgctccaccctgatgctccaccctgatgctccaggctgggtacctgtgctctgaat

SEQ ID NO: 508157 - DNA, 170 bp, Homo sapiens
atctgtgtcatggagttccgggaagacctcctcgagttgattagtcgtcagcatgcccttgtagacgagcgtgcgcgaagagagcgaagcaaagtacaccccagcttcatgctgggcacgccgccgcagcacgaacgctaaacgttccaggtccatgccaacacgaccat

SEQ ID NO: 508158 - DNA, 305 bp, Homo sapiens
  misc_feature (47)..(47): n is a, c, g, or t
aaaaatccggctgcccctgggccagtcccaggacctttgcacaaganttatgggtataacttacccccacaaggaagcaggaaaacaaccaaaaacccccttgacacttttgaacatttccagttttgtaaagtttattgtcaattgcttttcaagtttaaccaacctcaacagtgtgcaaaaaccatttccaggagggtttgtccccaaaaggtttgcctcccgtttcaaaaaccacttatcctcagcttgcacaaactggttgaacggcaggaattaaaaaaaaaaaaaaatggcttttttta

SEQ ID NO: 508159 - DNA, 159 bp, Homo sapiens
gcaccgagatgacggagtttgtcgtttacgcaaaaggcgcgggcttcgcctcagccgtctaaggcaaagcgatagtgccaatcgccgttgccgcaggcttcggggcgcgcggtatgcggttgaatgttgttttcgctccggtggatttcgcagaccacg

SEQ ID NO: 508160 - DNA, 486 bp, Homo sapiens
ggcccccaaatggatccacagcggatagtcaccaaacttctttaccagcccggcctgagtggactggctacgatgtaacgtgcaatcccctcaaggctttcctctcgacgcacggcatagtcatgaaagcccggttgccagaggcgaccttgacggccagccaccgcattcaccactcgggtgctcttggatttaacttgtcgcatcaagtcggcaagtgaacctttctccagagaaacaagccaatggaaatggtcaggcattaccacccaggccaatgatgttgcgagccctttatattgggcgatcctgaattgttgtacgaccaggcggccgagtctgaagtcgctgaagatgggcccgcgttcaagggtgttggtggtgagcaggtaaatgcggttggactcgttatagcggccgatgcgcaggcgttttgaagcaggtaaatcaggcattccgtggcctctcttcagatggtgtcctgag

SEQ ID NO: 508161 - DNA, 337 bp, Homo sapiens
aactatatatccttccggggcctcggtttcaaaaccaccttctgcaacttcggtcagtggccactacagcttcctggcgttgctgacagcctggctagaagcgagcgtgattcccatagcgccaaaatgctcatcctcaggcccaattcccaccattgtttcactccatttcccttcataaggcccatcacagacagctttgcagccttcttcaaattcctcatgccgcagacccttcatcccgagaacgtccctatagacgcgcgccgtctgaaagcgtgtttcacactttgaatacagagtgcagagctgtgcctcgtgccgtactcggcgagag

SEQ ID NO: 508162 - DNA, 149 bp, Homo sapiens
ctggcaaatgcacacacctcagctagcctcacgaaacgggaataagccttcgaaaagaaatggtccttgaagctggtatctgatatcagcacgggatggtagaactggtggctgattttgaccttgtatggaagtgatggttccccgct

SEQ ID NO: 508163 - DNA, 1818 bp, Homo sapiens
  misc_feature (286)..(286): n is a, c, g, or t
  misc_feature (298)..(298): n is a, c, g, or t
  misc_feature (453)..(453): n is a, c, g, or t
  misc_feature (579)..(579): n is a, c, g, or t
  misc_feature (762)..(762): n is a, c, g, or t
  misc_feature (770)..(770): n is a, c, g, or t
  misc_feature (960)..(960): n is a, c, g, or t
  misc_feature (1811)..(1811): n is a, c, g, or t
ggcgcattcgcgatggcttccagtcctgggaactgtggataaacatcattctactctcatttagtgcttggccccactacagtacacgtctgcagagcgagcaagataattggggaattgttaagccaatggagcgtgaaattcgtgctagcgttgcacatggactgtgctcaaggatgttgggtcgataccgagaatcagagtgccaaacgtttcgttggcgaagggtgtattcgatggtgaaatgatagctataggggaatcggaagctcgctcgaacccgggncatcgcgtgacnccatcggggcggtagcgaagccggaacacttgtcgacgacatggagaacctcagtcaattccatcttcgatggttaatcctcatcgacaaatagtataggctcaatcccacgaggtagtggccactagaattagtcgttctactcgtccggtggnactccaatgccatagcgctcgagagtgcataagtaatcgcttggcgggcatcgcgatttggggagctttccttggtttgcagtcgtacgaggtggtaacccatgtatgtgtggccccacgaaatcnctttaagtaactcgaggtacacacgttctagtcagtttgtgggggtcacgatctaggtggtcatgcgtaaagcgaaacgtggtgggaccccatagagtgggcgccaactataccatctaaagaatagagtgcctagcccgaggaggcctctgcggtgtcagaacatattcgttctgtttcacnttgtgganttgattggttaaccggggacaaatgggaaggggccatagaagtagggctttggattggaaccgattggcccgtatggcaaggggggcttgttccccaagactaagaagcgacagcagcgttgccaaccttggggggaccaggggcgggggcctaaccaacggacattccttccgtgaaaatgagtgggcnaacctttcgttccgctttcaaatcccagggtcttagacggaatacccgtgacaggaaaaggaaattagcccccttaggaaatgccggccattccagtgctgagagtaagcgcctttccaggtatcagaggggtcgcccttttacacccccaagaaacgcgtggttctatgaatcaggccggggagaggtgccaggaagagcccctttgacagacattggcgctagtgcggctaccttacatgagttccgcaatcccacgcttatggcgtcatcgaaggcaaataaccgtggcatttgacgaagcgccttactttgggcatttttgagacacaactctgaatgtggcaccttccttaaatggaataattacttgggttcacctgggccacatcctgggaatgcattggacacaaacatagcaaagccgtaaaggggggatttctggaaaccacgcgtggaattcaagcgcaaccacttgacgtggggggtcacccagagctgggcccttccggaatcacccgtggggcacggtctcaagtggtgaacctcgtaccaagtatgggtgtgtcaacactgggttgccgtatcacagagatatccaataattaaatgcacagaggattggccgcttaacgacgtcggtaaacctcgagaggtcataggacatcacgggcgggaccaccacagaggtttgtgcgacaactagtgtggcgtcacgccacgcgcagaaaacgagcgatggtagctgagtagcaatcagcatgacgacagtggtagagacgactgatgttcacacagcgcataccaccgatccagacgtacatcgctgtcctcgggctgaacgtgtcgcntcggcac

SEQ ID NO: 508164 - DNA, 601 bp, Homo sapiens
  misc_feature (178)..(178): n is a, c, g, or t
cctttccaaacccctaaagagcaggatgaaggctggctcatgggcgtgaaggagagcgcctgacccagcccaaggagctggaaaagtgccgtggcgtcttcccccaaaacttcactaaaagggtcccataacggcggggcccaggcagcctccgggggtgtaaaaaaccctcctcccnaaaaatgtgtggttcttttttttgtttggttttcgtttttcttcttttgaaaagcaaagggaaatcaaaaggagcccccccggcaaaggggcgttctcccaaaaattaggtcgttttccaaaaaaccgggtcccggcaagtccgggggaattccccagtgttcctgaagctgctgggtcctctagttgagtttctggcgcccccgcctgggcccccatgtgtgcctggccccaggggggggttgggggctcccaaccccccatgcttgcctaaagcttcggccgccccccccgggcaagggtcctcttttcctggcagctgctggggggggggcccaaacccccccctagcctggctttcccccccaaccggtttgtgtgctgtttgaaaataaattttagggttccaacccaaatggaccca

SEQ ID NO: 508165 - DNA, 676 bp, Homo sapiens
  misc_feature (88)..(88): n is a, c, g, or t
gaagggaggcacactttctggcaaactgttttaaaatctgctttatcaaatgtgaagttcatcttgcaacatttactatgcacaaagnaataactattgaaatgacggtgttaattttgctaactgggttaaatattttgctaactggttaaatgttaatatgttaccaaagtagagctctaaagaggatgagaaggctccactgatttgacttttaagacttggtgtttggttcttcattcttttactcagatttaagccttacaaagggaatctctggtccagacccttgggcctggcaagggtggctgatggttaggctgcacacttaagaagcaaacgggagcagggaaggcttgccacacaggcacgcacagggtcaacctctggacacttggcttgggctacctggcctgggggggctgaactctggcatctggctgggtacacacccccccatatttctgtgctctgccacccgtgagctgccactttcctaaatagaaaatggcattatttttatttacttttttgtaaagtgatttccagtcttgtgttggcgttcagggtggccctgtctctgcactgtgtacaataatagattcacactgctgacgtgtcttgcagcgtaggtgggttgtacactgggcatcagctcacgtaatgcattgcctgt

SEQ ID NO: 508166 - DNA, 934 bp, Homo sapiens
ggacgcgtgggtcgacccacgcgtccgaatccatcacagaatgaggataacgtgaaaagcgcgcctccacagtcccggtctcccggatgccgagcggcgggttgattctttcatgtttctctgccttgttgtggtgtcgtcggtctcattcgtcgatcccgtgtccagtaccggccggtcgtcaactagcgaatgtggaggatagactacagtagccgcttgtgatctatgactttctggctgtggatgatatacccggggacaggatccaggatgttctttttctttatagaaacaccaacagcagcaacaatgttcacgcccgatcctgtgtggacggaccggcttagacctctccctgcaccttgtgcaagctgctgtgtcagggggccaagcggcagcacgctctgggagagacctgtggcccaagacgtggacctcgtggagtgtgctgtgacccaggccaagaggcagtgagggcatcttctgcctgcttcctggtgtggcagacccaggttctttcattgcaggacaacttgttcacagggagactaccctgtggaacacagcatgatgatgtttcagctgggaatgctgtccatcctgagcctctgctgcaggtgccctgatgttggactgagaattcggtgcccagatctgtgtggttctcagccaggatcggggaggaccgtgttcgaggcgcaactcataccttcgtgctgggaccggaacccccaagattggtaccccggagtcaccctggggtggacgtggaacgggggtgtcccccctttaacgcttccgtggtcggtgtccgctacttttctctttcccgtggaatgtcccctgaaggttcacttctcagggtccttaaaagcggtcctgcatgtgtcccttagaatgtaccccgttgtattcccatcgcccaccatgt

SEQ ID NO: 508167 - DNA, 83 bp, Homo sapiens
ggatttgctggtgcagtacaactaggcttaatagggacatgtttgtgcactgttaaaaaaaaaacgttagaagcttgaattcg

SEQ ID NO: 508168 - DNA, 1299 bp, Homo sapiens
  misc_feature (343)..(344): n is a, c, g, or t
  misc_feature (356)..(356): n is a, c, g, or t
  misc_feature (416)..(416): n is a, c, g, or t
  misc_feature (418)..(418): n is a, c, g, or t
  misc_feature (439)..(439): n is a, c, g, or t
  misc_feature (442)..(442): n is a, c, g, or t
  misc_feature (576)..(576): n is a, c, g, or t
  misc_feature (758)..(758): n is a, c, g, or t
  misc_feature (919)..(919): n is a, c, g, or t
  misc_feature (931)..(931): n is a, c, g, or t
  misc_feature (933)..(933): n is a, c, g, or t
gacacaggagtaatgctggtggctcttcctgaagaactagacctttggtggcccactcgtctgtccattatcgagggaaaccgttcagtaaactacaattagagtgaagcaagatattagctagacgttaagtatagaatatattagtcactctccacgtgtatctcgtacgttgcaaagcccattcagacgagaaggagctgtggttccgattgactacttcaaaagcatcttgaaggttcccttatttccaggttctctttcccgcccttctactatcctttccacagatcgcaggtcttctctcatctttttgtgtcttggggattggtcgctcctcccnntcttcacttggnagacatccataggcaaatataattgatcctaataggccttccttagatttccgtaccttntngtgatctcctttgttctcatnctnattgtccattctcgccgctcctgttatgatttcgcccgatggcctcactccctttatttgggttgggtttaccacggtaacatttgctatgaggtaaacccccagcttccagctctcctcggttcgttcccagnacttaacacacttaccattgattaagttacaggtccttagcataaaataacaacatgatattcttgttatcctttggtaaaccaatatacataggccgattaagagtgaacgtctatcctgctgcgtgatcgatatttggctagactaacatataatttggtgcgtggcagaaggagaactntcattacaagatgtcttcatgacatgtaggacatttggaaacacctctataatcccaaattgactgtgacacaactgtgcatcttggcaggattagaaaccaatccattcaatttaagcctgcacgggagacgaaacgcgacgtggctcttcactatatgnggctctcatagngnaccatttctgcttcagataactagtgagcagcacctttggcattcagaagcttgcacaatacccaggtgcttcaatttataggtacccccccatcgggagggttgaaactataagtttcctgggtcagcatagtcaaaggccccaggggtttgctcgcggactttgcgcacacactcggggacatttctttaaaaccacgagatggtgaactttggtcctctgaatttcattttctcatagatcctcccaaaattgatcatcagaagtttgtccatcaacgccgtttggggatgcgatctttggaacacaccttggctcgcgcgaaacacagatgccactcccatacgatgaaccggaataggtcc

SEQ ID NO: 508169 - DNA, 123 bp, Homo sapiens
gggtgacagagtgagactctgtcaaaaacaaaaaacaaaaacaatgatattttatccagactttatcttttggttaaatcttgtgcactctagaagatatattcaagatagttgtaaatggcg

SEQ ID NO: 508170 - DNA, 201 bp, Homo sapiens
ccatgttatcagaatggatcagagtcaggtacgattgtgctgcccagtgactaacagccgcttttctgtctggttccatggacatgtccaactccatcaggagtcgagcattgagtagccattgtccacgctggattttcaaaacagttgtatggtatacttcaaataccctcaggggaacagccatgcatggattgccag

SEQ ID NO: 508171 - DNA, 160 bp, Homo sapiens
tctgagcagctgggaactgctgagggttgtaggggatagtaggagacagggcgtggcagccatcagaggcgggccagcagtcgaggagcgctgcatccatcggcggggctgaggctggctggtgttgtccggagcgctgggatgacgggagccttttgct

SEQ ID NO: 508172 - DNA, 104 bp, Homo sapiens
gtggatgcataggtacgttttctgccatgaatttgcattcaggactcagggaggacacacttgccaggtgaagaccaatttttgttacctgtgcttttacatta

SEQ ID NO: 508173 - DNA, 352 bp, Homo sapiens
cagaacatctgttgagaccgacccctagtcattggttaccagtgtatcaggcaatctggactttcagtgatgcccactgagatgggcacctgtcaaaagagcagtggtccatttctagatagtggatcttcagataaatttctgccattttcatttcacttcctgaaagtcagggtcggcttgtgaaaaagttgttaaacaacatgctaaatgtgaaatgtcaaccctcactctatactttccctgttcagagcatcagatgaagacttcattgggttttataagtggcttactgatttttggtagtccattgaagaagggagtttgaaagttggtgtatactggtaacgat

SEQ ID NO: 508174 - DNA, 645 bp, Homo sapiens
ggatcgaccctgcttctgtcacggacaaggacacactcacgcattcactacctcatgctgccccgggttcgagaagaattgattgacaagaaaacagagagagcagtatctcagatgcagtctgtgattgaactggaagagtgagtcagagcaccgaaaaagctattcccatagaagtatccttgggaaagaaattgtggttagtccagtcaagcatccagaaaggcgtcttgaaagatatcaagtctgtggaggaagctagtatcacttgaggaactcaatgttcgaaaagttacactgtctacagataaaaacaagtatggcattcggctaagggcagaaccagatcacatggtcctggggaagcgtctagaagggagccttctaaggcagtgatgacgtccatcaagcagttgagcagtcgaggagctggagcagttccagaagactgggaccactggttgtggaaggccatgaatggcacgatgaagacatccgccacatgtacaccttcgatcacggacacaggtgggactgcgcacacctgacagcacactcagatgctcaggctcaaggcctcttagatgtacactccatgaccagtcaaaggtagatgacggcaatggccgcggacgtcacaccgca

SEQ ID NO: 508175 - DNA, 472 bp, Homo sapiens
accgtttgatctggggtaaatcgatacaacatgattctaaagaatcctgaatccataaattacacttttatttttcaaattcacaaaattcacagtggtgctgactgtgtaataaccactatgggaaaacatcccgtaaacctgcctgttgccatgccaatggagtgactgaacggttgacatctgtttgagcatgcttggtgtggctggtagaatgccaccgtagtgcatacacttggtacatcaggggtgaagggagggtttactaaataatggggggagggtaaaatggggatttttttgttgtcccttatttgatgagggtgtggaggtatagtcctcagcttatgccctaaaataacatgtataaaaacccctgaagtctggtgtgggtgtgtacgtgtgagtgtgtgtaggtatccgtcgggcaattaacgcttagtcttctggacatacatgaactctttcctct

SEQ ID NO: 508176 - DNA, 1040 bp, Homo sapiens
gagacaggaagattgtcttcaaaacaaaacaaaacaaaacaaaaaccttgctaagaagcggaggtacagaaagatacgaagaatgacagagacagacatacatagattgagtgatagatagaaagagagaaggattattcacatagaggtgacagaggcaaagaaggatggagggcaaaagagacaggccctagcagaaatatggagaaaggctgtcatagatcctgagagacaccaaagtcacagaactgataaaagggttataaacaaaaaggaccagaaaaatagaaatgaaggccgacaagaagagaccccaaggctgaaaggcacagagagtctagacagtgaaatagagtgagtgacaaggagaaacacccaggctcaggagtgatggaggaaatactggcagatagagagatcagaagagcaagaggagaggtgggaacagagaagagcggggacgagtccggggagctgagaagcagaaggcggaggaggcagtcagtgggaagattcactgacagaagagaccaggagatatggggacttggaggcaggcagaaagacaaaggacaaacagctgcagcgcaaaccctaaagacaggctgacagtaaccggtcggcagagactggtaggaagataaggacaagtcagaatcaggggtgtcaactgagatgcaaatataggcaaaggagctgacaaagagaatcacagagagaaaaaaaaggaggagagcacagaacaatttaaatatccaggctgggcatggtgggtcacgcctgtaatcccagcattttgggaggccgaggcgggcggatcacgaggtcaggagatgaccatcctggctaacatggtgaaacaccatctctactaaaaatgcaaaaaattggccgggcgtggtggcaggcgcccgtagtcccggctactgaggaggctgaggcgggagaatcgtttgaacctgggaggccgaggttgttataatgagccgagatagtgccactgcagtccagcaggggtgacagagtgagactccgtctca

SEQ ID NO: 508177 - DNA, 133 bp, Homo sapiens
ccccccccccgtttttgggggcaggaaaaaccccttttttagggtgggttttgtttttgtataggggcccccggccgggctaggacccgttttttaataaaaggcccccgggcctgttccattttttccccca

SEQ ID NO: 508178 - DNA, 193 bp, Homo sapiens
taaattcgcggccgcgtcgaccccaggaaaccagatctatttttacttttatggcaaggaaaagggacagagaaaaccataaggaaaaaacagctcacacattgaccatttaaaaaaatcacttaggggcccagcacagtggctcatacctgtaatcccagcactttgggagcccaagacaggtgaattactt

SEQ ID NO: 508179 - DNA, 244 bp, Homo sapiens
ccctttttggaatttttaaattttggttttaaaagcaaaacccccccttgttcctttatgggtccgggggaagccttttaaaccgacttttttttaaaaaccgaaaattttttaagcggtttggggccgattttatggtatctttataaggatggttttttaaaaaaaaccaaagccttagtttgtttgcccttaacctggagactaaacccaggtttgttaaattaaccccggttcccgttga

SEQ ID NO: 508180 - DNA, 623 bp, Homo sapiens
ggctggtccgatggtagtgggttatcagaacttatgtcttttcttttttgggtaaatttttgaaaaatatgctaaaagtgcatttaaggagatgggagacaattagcagaatggagaaagtaagtctttttttttcccaaattattaattggtcctggtgtctatgtacctctagctgttcttttgtgtacttttctgggttccaaaccagtttatcctgtggtcctatacataagtttggatataatctgggttcttaaaaacgtgtggtactcattaacaatatattgttctggcaagatttaaaacctggagtccatgaaaataccataggaaggacattaaaacttttaaaaggcaacctcaaagatgatggaaacgcatttacaagtgcggtgaccaaaattttaaggtgaagtcgagcactctaattagagaactgggagggaccacattataacacttaaattcccttacctggccttccccaaaagaagacatgaaaacctagttttaaaacactatttaagacagagattgacgtgtgggaatttatggcagcaaggaatgtgtccaagaccattgctgaggttttgaatacacacgtgacttgtgtaactggg

SEQ ID NO: 508181 - DNA, 119 bp, Homo sapiens
tgaaggctttcccgcattgcttacactcatagggtttctctccagtgtgagtcctttcatgatatcgaaaggaaccggaacgagtgaaggctttaccacattgcttgcatttatacgtt

SEQ ID NO: 508182 - DNA, 2005 bp, Homo sapiens
tggcacgagggccggagccccgccagagcccgacttcagccccagccagatcccgcgtcaacggaggcggaacggcggaccccgtaccctggcagcatcggagcaccggcgggtgaaggcaaggtccctggactggtcatatacctcttgtggccctggcagaatcaagatgaggccctgtcatgcctccccagtgaggcctacagtctgagcagacagcatggcctgccactggcagtgaacaccatgtctgcaggaggtggccgggcctttgcttggcaagtgttcccccccatgcccacttgccgggtctatggcacagtggcacaccaagatgggcacctgctggtgttggggggttgtggccgggctggactgcccctggacactgctgagacactggacatggcctcgcacacatggctggcactggcacccctgcccactgcccgggctggtgcagctgcggtagttctgggcaagcaggtgctagtggtgggtggtgtggatgaggtccagagcccggtagctgctgtagaggccttcctgatggatgagggccgctgggagcgtcgggccaccctccctcaagcagccatgggggttgcaactgtggagagagatggtatggtgtatgctctggggggaatgggccctgacacggccccccaggcccaggtacgtgtgtatgagccccgtcgggactgctggctttcgctaccctccatgcccacaccctgctatggggcctccaccttcctgcacgggaacaagatctatgtcctggggggccgccagggcaagctcccggtgactgcttttgaagcctttgatctggaggcccgtacatggacccggcatccaagcctacccagccgtcgggcctttgctggctgcgccatggctgaaggcagcgtctttagcctgggtggcctgcagcagcctgggccccacaacttctactctcgcccacactttgtcaacactgtggagatgtttgacctggagcatgggtcctggaccaaattgccccgcagcctgcgcatgagggataagagggcagactttgtggttgggtcccttgggggccacattgtggccattgggggccttggaaaccagccatgtcctttgggctctgtggagagctttagccttgcacggcggcgctgggaggcattgcctgccatgcccactgcccgctgctcctgctctagtctgcaggctgggccccggctgtttgttattgggggtgtggcccagggccccagtcaagccgtggaggcactgtgtctgcgtgatggggtctgaaggcttggtgggagctgtccactggagcagctcattgccagaggcagctatttctatggctccttttgctgctgaggacactcactgtggctctgtgggatgagagaggcatgggggtgagcacttgaaacactgccttggggccttgggttaggggagcctttgtctttagtgcaggacacacatatgcttacacctacctttatcaccattcgttcatgaatcatgcctagctccatccttgccctgggacctactaggccttccatccaactgggaaatggggagaagcaaagctggcctcatgctcttcagggtcagttcctatctggagttgaccaggcctaccccagttgccattcctgaaaaatctcagctgccaggctgcctttagggtccctgtagacccaggagagttgagagggtgggggacacagagagaatagagaggatgtgggaactgccagagggccggagcgcaggagttcaagtggaggaatgctggctttgagccctctacactgctggttgtatgaccttggacaagtcacttcacctctctgtgcctcagcatcctcatctataaatggggatctctgaaaccttcctaccctacctacctcacagggctgttgtgaggacccagggagtttggatgtggaagtaaaagtgctgctaaaacctaaaaaaaaaa

SEQ ID NO: 508183 - DNA, 2541 bp, Homo sapiens
tggcacgagggccggagccccgccagagcccgacttcagccccagccagatcccgcgtcaacggaggcggaacggcggaccccgtaccctggcagcatcggagcaccggcgggtgaaggcaaggtccctggactggtcatatacctcttgtggccctggcagaatcaagatgaggccctgtcatgcctccccagtgaggcctacagtctgagcagacagcatggcctgccactggcagtgaacaccatgtctgcaggaggtggccgggcctttgcttggcaagtgttcccccccatgcccacttgccgggtctatggcacagtggcacaccaagatgggcacctgctggtgttggggggttgtggccgggctggactgcccctggacactgctgagacactggacatggcctcgcacacatggctggcactggcacccctgcccactgcccgggctggtgcagctgcggtagttctgggcaagcaggtgctagtggtgggtggtgtggatgaggtccagagcccggtagctgctgtagaggccttcctgatggatgagggccgctgggagcgtcgggccaccctccctcaagcagccatgggggttgcaactgtggagagagatggtatggtgtatgctctggggggaatgggccctgacacggccccccaggcccaggtacgtgtgtatgagccccgtcgggactgctggctttcgctaccctccatgcccacaccctgctatggggcctccaccttcctgcacgggaacaagatctatgtcctggggggccgccagggcaagctcccggtgactgcttttgaagcctttgatctggaggcccgtacatggacccggcatccaagcctacccagccgtcgggcctttgctggctgcgccatggctgaaggcagcgtctttagcctgggtggcctgcagcagcctgggccccacaacttctactctcgcccacactttgtcaacactgtggagatgtttgacctggagcatggtgagcagtggctgttctgggctgtcctcccgctctctgtgggatggaggggcatagtgtgtacatgactagatctgacctcccctctcctgcagggtcctggaccaaattgccccgcagcctgcgcatgagggataagagggcagactttgtggttgggtcccttgggggccacattgtggccattgggggccttggtaagtctctatggggctggggagaggagggagtcccaagacaggaaagactagcccccagcatgtgtgtcaccttctgcccatctccaggcactccaggggtcagggctttgtgagctcttttccctatctatgaagtaggcaggatgtggtctgcctggcccagcactcagggtgttcctcagtgactgggggctctgtcaagcaccagcaagggtctacgagacagcagcaggacaaatgaccactgtatgcacagtcaagagaacatatagaaacataaatgaatgaacaaatgatgaacataggcaatgaggagcaaggccctgatagctcatcctggggtgataactactgggctattctctgggcttagggagcagaagggcctggagtccctacggcctgtgcctctcacagccttctctctccttcttgcaggaaaccagccatgtcctttgggctctgtggagagctttagccttgcacggcggcgctgggaggcattgcctgccatgcccactgcccgctgctcctgctctagtctgcaggctgggccccggctgtttgttattgggggtgtggcccagggccccagtcaagccgtggaggcactgtgtctgcgtgatggggtctgaaggcttggtgggagctgtccactggagcagctcattgccagaggcagctatttctatggctccttttgctgctgaggacactcactgtggctctgtgggatgagagaggcatgggggtgagcacttgaaacactgccttggggccttgggttaggggagcctttgtctttagtgcaggacacacatatgcttacacctacctttatcaccattcgttcatgaatcatgcctagctccatccttgccctgggacctactaggccttccatccaactgggaaatggggagaagcaaagctggcctcatgctcttcagggtcagttcctatctggagttgaccaggcctaccccagttgccattcctgaaaaatctcagctgccaggctgcctttagggtccctgtagacccaggagagttgagagggtgggggacacagagagaatagagaggatgtgggaactgccagagggccggagcgcaggagttcaagtggaggaatgctggctttgagccctctacactgctggttgtatgaccttggacaagtcacttcacctctctgtgcctcagcatcctcatctataaatggggatctctgaaaccttcctaccctacctacctcacagggctgttgtgaggacccagggagtttggatgtggaagtaaaagtgctgctaaaacctaaaaaaaaaa

SEQ ID NO: 508184 - DNA, 928 bp, Homo sapiens
  misc_feature (724)..(724): n is a, c, g, or t
gtgcacgccggtctgggcgagctgctgcgctcactcagggagctccacggcgcgcaacgtgacctggaagctgggcagccgacggtacggacccagctcagtgagcttcgctgatgactgtcgtgcgcaggcagcaagcagcactacaactgcgagcactccaagatcaacttccgcgacaagcgcagggcgctggagtccatcaacgagtgggtgcgcgcagaccaccgtacggcgtaggctgcccgaggtcaccaaggacgtggagcgcacggacgggccctgctagtcaacgccatgttcttcaagccacactgggatgagaaattccagccacaagatggtggacaatcgtggacttcatggtgactcggtcctataccgtgggtgtctatgatgatgcaccggactaggcctctatcgaactatctacgatggacagatggaaggataagctgcaaatcgtggaggatgcccctggccctcaagctctccaggctcgtcatcctcatgccccatcgacgtggagcctcttcgagcgccttgaaaagctagtgagccaaagagcagctgaagatctggatggggaagatgcaggaagaaggtgttgccatctccttggccaagggtgtggtggaggtgacccatgactggagaaaacctgttgtgtggcgctgactgagcattgacagaacagggccgacttgttggcatgtcgccaaangcctgttcctggcacgggtcccagccccgctttgaatggacgaatgggaccctttgcgggcactgggggaggaatgggagcccagtggtgtacgcacccttttctatggtgacccaaggcctcgattatggggcggcgcccagtggaatacaccaattgtgggcagaaagaggacatccaagataagggggacccacagggaaa

SEQ ID NO: 508185 - DNA, 1661 bp, Homo sapiens
tggcacgagggccggagccccgccagagcccgacttcagccccagccagatcccgcgtcaacggaggcggaacggcggaccccgtaccctggcagcatcggagcaccggcgggtgaaggcaaggtccctggactggtcatatacctcttgtggccctggcagaatcaagatgaggccctgtcatgcctccccagtgaggcctacagtctgagcagacagcatggcctgccactggcagtgaacaccatgtctgcaggaggtggccgggcctttgcttgatggtatggtgtatgctctggggggaatgggccctgacacggccccccaggcccaggtacgtgtgtatgagccccgtcgggactgctggctttcgctaccctccatgcccacaccctgctatggggcctccaccttcctgcacgggaacaagatctatgtcctggggggccgccagggcaagctcccggtgactgcttttgaagcctttgatctggaggcccgtacatggacccggcatccaagcctacccagccgtcgggcctttgctggctgcgccatggctgaaggcagcgtctttagcctgggtggcctgcagcagcctgggccccacaacttctactctcgcccacactttgtcaacactgtggagatgtttgacctggagcatgggtcctggaccaaattgccccgcagcctgcgcatgagggataagagggcagactttgtggttgggtcccttgggggccacattgtggccattgggggccttggaaaccagccatgtcctttgggctctgtggagagctttagccttgcacggcggcgctgggaggcattgcctgccatgcccactgcccgctgctcctgctctagtctgcaggctgggccccggctgtttgttattgggggtgtggcccagggccccagtcaagccgtggaggcactgtgtctgcgtgatggggtctgaaggcttggtgggagctgtccactggagcagctcattgccagaggcagctatttctatggctccttttgctgctgaggacactcactgtggctctgtgggatgagagaggcatgggggtgagcacttgaaacactgccttggggccttgggttaggggagcctttgtctttagtgcaggacacacatatgcttacacctacctttatcaccattcgttcatgaatcatgcctagctccatccttgccctgggacctactaggccttccatccaactgggaaatggggagaagcaaagctggcctcatgctcttcagggtcagttcctatctggagttgaccaggcctaccccagttgccattcctgaaaaatctcagctgccaggctgcctttagggtccctgtagacccaggagagttgagagggtgggggacacagagagaatagagaggatgtgggaactgccagagggccggagcgcaggagttcaagtggaggaatgctggctttgagccctctacactgctggttgtatgaccttggacaagtcacttcacctctctgtgcctcagcatcctcatctataaatggggatctctgaaaccttcctaccctacctacctcacagggctgttgtgaggacccagggagtttggatgtggaagtaaaagtgctgctaaaacctaaaaaaaaaa

SEQ ID NO: 508186 - DNA, 1496 bp, Homo sapiens
tggcacgagggccggagccccgccagagcccgacttcagccccagccagatcccgcgtcaacggaggcggaacggcggaccccgtaccctggcagcatcggagcaccggcgggatggtatggtgtatgctctggggggaatgggccctgacacggccccccaggcccaggtacgtgtgtatgagccccgtcgggactgctggctttcgctaccctccatgcccacaccctgctatggggcctccaccttcctgcacgggaacaagatctatgtcctggggggccgccagggcaagctcccggtgactgcttttgaagcctttgatctggaggcccgtacatggacccggcatccaagcctacccagccgtcgggcctttgctggctgcgccatggctgaaggcagcgtctttagcctgggtggcctgcagcagcctgggccccacaacttctactctcgcccacactttgtcaacactgtggagatgtttgacctggagcatgggtcctggaccaaattgccccgcagcctgcgcatgagggataagagggcagactttgtggttgggtcccttgggggccacattgtggccattgggggccttggaaaccagccatgtcctttgggctctgtggagagctttagccttgcacggcggcgctgggaggcattgcctgccatgcccactgcccgctgctcctgctctagtctgcaggctgggccccggctgtttgttattgggggtgtggcccagggccccagtcaagccgtggaggcactgtgtctgcgtgatggggtctgaaggcttggtgggagctgtccactggagcagctcattgccagaggcagctatttctatggctccttttgctgctgaggacactcactgtggctctgtgggatgagagaggcatgggggtgagcacttgaaacactgccttggggccttgggttaggggagcctttgtctttagtgcaggacacacatatgcttacacctacctttatcaccattcgttcatgaatcatgcctagctccatccttgccctgggacctactaggccttccatccaactgggaaatggggagaagcaaagctggcctcatgctcttcagggtcagttcctatctggagttgaccaggcctaccccagttgccattcctgaaaaatctcagctgccaggctgcctttagggtccctgtagacccaggagagttgagagggtgggggacacagagagaatagagaggatgtgggaactgccagagggccggagcgcaggagttcaagtggaggaatgctggctttgagccctctacactgctggttgtatgaccttggacaagtcacttcacctctctgtgcctcagcatcctcatctataaatggggatctctgaaaccttcctaccctacctacctcacagggctgttgtgaggacccagggagtttggatgtggaagtaaaagtgctgctaaaacctaaaaaaaaaa

SEQ ID NO: 508187 - DNA, 2026 bp, Homo sapiens
tggcacgagggccggagccccgccagagcccgacttcagccccagccagatcccgcgtcaacggaggcggaacggcggaccccgtaccctggcagcatcggagcaccggcgggtgaaggcaaggtccctggactggtcatatacctcttgtggccctggcagaatcaagatgaggccctgtcatgcctccccagtgaggcctacagtctgagcagacagcatggcctgccactggcagtgaacaccatgtctgcaggaggtggccgggcctttgcttggcaagtgttcccccccatgcccacttgccgggtctatggcacagtggcacaccaagatgggcacctgctggtgttggggggttgtggccgggctggactgcccctggacactgctgagacactggacatggcctcgcacacatggctggcactggcacccctgcccactgcccgggctggtgcagctgcggtagttctgggcaagcaggtgctagtggtgggtggtgtggatgaggtccagagcccggtagctgctgtagaggccttcctgatggatgagggccgctgggagcgtcgggccaccctccctcaagcagccatgggggttgcaactgtggagagagatggtatggtgtatgctctggggggaatgggccctgacacggccccccaggcccaggtacgtgtgtatgagccccgtcgggactgctggctttcgctaccctccatgcccacaccctgctatggggcctccaccttcctgcacgggaacaagatctatgtcctgggtaccccaattccattgacagggggccgccagggcaagctcccggtgactgcttttgaagcctttgatctggaggcccgtacatggacccggcatccaagcctacccagccgtcgggcctttgctggctgcgccatggctgaaggcagcgtctttagcctgggtggcctgcagcagcctgggccccacaacttctactctcgcccacactttgtcaacactgtggagatgtttgacctggagcatgggtcctggaccaaattgccccgcagcctgcgcatgagggataagagggcagactttgtggttgggtcccttgggggccacattgtggccattgggggccttggaaaccagccatgtcctttgggctctgtggagagctttagccttgcacggcggcgctgggaggcattgcctgccatgcccactgcccgctgctcctgctctagtctgcaggctgggccccggctgtttgttattgggggtgtggcccagggccccagtcaagccgtggaggcactgtgtctgcgtgatggggtctgaaggcttggtgggagctgtccactggagcagctcattgccagaggcagctatttctatggctccttttgctgctgaggacactcactgtggctctgtgggatgagagaggcatgggggtgagcacttgaaacactgccttggggccttgggttaggggagcctttgtctttagtgcaggacacacatatgcttacacctacctttatcaccattcgttcatgaatcatgcctagctccatccttgccctgggacctactaggccttccatccaactgggaaatggggagaagcaaagctggcctcatgctcttcagggtcagttcctatctggagttgaccaggcctaccccagttgccattcctgaaaaatctcagctgccaggctgcctttagggtccctgtagacccaggagagttgagagggtgggggacacagagagaatagagaggatgtgggaactgccagagggccggagcgcaggagttcaagtggaggaatgctggctttgagccctctacactgctggttgtatgaccttggacaagtcacttcacctctctgtgcctcagcatcctcatctataaatggggatctctgaaaccttcctaccctacctacctcacagggctgttgtgaggacccagggagtttggatgtggaagtaaaagtgctgctaaaacctaaaaaaaaaa

SEQ ID NO: 508188 - DNA, 275 bp, Homo sapiens
  misc_feature (42)..(42): n is a, c, g, or t
  misc_feature (125)..(125): n is a, c, g, or t
  misc_feature (138)..(138): n is a, c, g, or t
  misc_feature (144)..(144): n is a, c, g, or t
  misc_feature (218)..(218): n is a, c, g, or t
  misc_feature (225)..(225): n is a, c, g, or t
  misc_feature (233)..(233): n is a, c, g, or t
  misc_feature (235)..(235): n is a, c, g, or t
  misc_feature (240)..(240): n is a, c, g, or t
  misc_feature (253)..(253): n is a, c, g, or t
  misc_feature (255)..(255): n is a, c, g, or t
gtgtttaaaaaaaaccaaaattaaaaaaaaagattgtggccnggttttgtaaaagttttaggtaaaattccaattgattgttttaggaatcattattaaaaattttttgcaaatcataaagctanatcgaggggttgngcttancccctatgcccattgtaattattcattggggctgtccagttttataatgcattttggccttttgtaagctgctntgactancaaaaaananattcntttaatgtgttancnttggttaataaatgttttta

SEQ ID NO: 508189 - DNA, 1951 bp, Homo sapiens
tggcacgagggccggagccccgccagagcccgacttcagccccagccagatcccgcgtcaacggaggcggaacggcggaccccgtaccctggcagcatcggagcaccggcgggtgaaggcaaggtccctggactggtcatatacctcttgtggccctggcagaatcaagatgaggccctgtcatgcctccccagtgaggcctacagtctgagcagacagcatggcctgccactggcagtgaacaccatgtctgcaggaggtggccgggcctttgcttggcaagtgttcccccccatgcccacttgccgggtctatggcacagtggcacaccaagatgggcacctgctggtgttggggggttgtggccgggctggactgcccctggacactgctgagacactggacatggcctcgcacacatggctggcactggcacccctgcccactgcccgggctggtgcagctgcggtagttctgggcaagcaggtgctagtggtgggtggtgtggatgaggtccagagcccggtagctgctgtagaggccttcctgatggatgagggccgctgggagcgtcgggccaccctccctcaagcagccatgggggttgcaactgtggagagagatggtatggtgtatgctctggggggaatgggccctgacacggccccccaggcccaggtacgtgtgtatgagccccgtcgggactgctggctttcgctaccctccatgcccacaccctgctatggggcctccaccttcctgcacgggaacaagatctatgtcctggggggccgccagggcaagctcccggtgactgcttttgaagcctttgatctggaggcccgtacatggacccggcatccaagcctacccagccgtcgggcctttgctggctgcgccatggctgaaggcagcgtctttagcctgggtggcctgcagcagcctgggccccacaacttctactctcgcccacactttgtcaacactgtggagatgtttgacctggagcatgggtcctggaccaaattgccccgcagcctgcgcatgagggataagagggcagactttgtggttgggtcccttgggggccacattgtggccattgggggccttggaaaccagccatgtcctttgggctctgtggagagctttagccttgcacggcggcgctgggaggcattgcctgccatgcccactgcccgctgctcctgctctagtctgcaggctgggccccggctgtttgttattgggggtgtggcccagggccccagtcaagccgtggaggcactgtgtctgcgtgatggggtctgaaggcttggtgggagctgtccactggagcagctcattgccagaggcagctatttctatggctccttttgctgctgaggacactcactgtggctctgtgggatgagagaggcatgggggtgagcacttgaaacactgccttggggccttgggttaggggagcctttgtctttagtgcaggacacacatatgcttacacctacctttatcaccattcgttcatgaatcatgcctagctccatccttgccctgggacctactaggccttccatccaactgggaaatggggagaagcaaagctggcctcatgctcttcagggtcagttcctatctggagttgaccaggcctaccccagttgccattcctgagagggtgggggacacagagagaatagagaggatgtgggaactgccagagggccggagcgcaggagttcaagtggaggaatgctggctttgagccctctacactgctggttgtatgaccttggacaagtcacttcacctctctgtgcctcagcatcctcatctataaatggggatctctgaaaccttcctaccctacctacctcacagggctgttgtgaggacccagggagtttggatgtggaagtaaaagtgctgctaaaacctaaaaaaaaaa

SEQ ID NO: 508190 - DNA, 752 bp, Homo sapiens
taaggtgggaccaaattttcagaggtagtttccggaggttgtggttgtgaatattggaaactaaaaattgggcctatatacagacacacatatatacatatatattatacatatatggctaaaatgtggattatatgaaacttttatttgggaatactatgcccgccggttttcaggttggcttagggccggccgcactcacggtatttgaggggctactataaagaacaccacttattggtatacttggcggcctctattcttaactcaccaggcaccgtatgaagaatggattattaataatttaacaatctgggaacttctggggttggtgaagtatattttatattcatggccttctggttaggtaattaatctggtggtttattactaagtttataggtaaaggttaatactggggatatgggttcactttaagtatgggtttggcctaatggggaccatccggaaaaaattcctcttaagcaaagcatctccatgggtttccaccattcctggtaacccaaagggccggccggattttctaatatacctatattcctggttcctggtatatttcaaccgctgtggaccactggggaagcttctgggaggtccttagaggcccagtacatccttcccaatgaccctagaacttgttctggcaggaggtttccctggtcccccccgggttatcctgggaacgggggcccacaaagattgccccaggcggggcacgcgcatacctcgag

SEQ ID NO: 508191 - DNA, 1818 bp, Homo sapiens
tggcacgagggccggagccccgccagagcccgacttcagccccagccagatcccgcgtcaacggaggcggaacggcggaccccgtaccctggcagcatcggagcaccggcgggtgaaggcaaggtccctggactggtcatatacctcttgtggccctggcagaatcaagatgaggccctgtcatgcctccccagtgaggcctacagtctgagcagacagcatggcctgccactggcagtgaacaccatgtctgcaggaggtggccgggcctttgcttggcaagtgttcccccccatgcccacttgccgggtctatggcacagtggcacaccaagatgggcacctgctggtgttggggggttgtggccgggctggactgcccctggacactgctgagacactggacatggcctcgcacacatggctggcactggcacccctgcccactgcccgggctggtgcagctgcggtagttctgggcaagcaggtgctagtggtgggtggtgtggatgaggtccagagcccggtagctgctgtagaggccttcctgatggatgagggccgctgggagcgtcgggccaccctccctcaagcagccatgggggttgcaactgtggagagagatggtatggtgtatgctctggggggaatgggccctgacacggccccccaggcccaggtacgtgtgtatgagccccgtcgggactgctggctttcgctaccctccatgcccacaccctgctatggggcctccaccttcctgcacgggaacaagatctatgtcctggggggccgccagggcaagctcccggtgactgcttttgaagcctttgatctggaggcccgtacatggacccggcatccaagcctacccagccgtcgggcctttgctggctgcgccatggctgaaggcagcgtctttagcctgggtggcctgcagcagcctgggccccacaacttctactctcgcccacactttgtcaacactgtggagatgtttgacctggagcatggaaaccagccatgtcctttgggctctgtggagagctttagccttgcacggcggcgctgggaggcattgcctgccatgcccactgcccgctgctcctgctctagtctgcaggctgggccccggctgtttgttattgggggtgtggcccagggccccagtcaagccgtggaggcactgtgtctgcgtgatggggtctgaaggcttggtgggagctgtccactggagcagctcattgccagaggcagctatttctatggctccttttgctgctgaggacactcactgtggctctgtgggatgagagaggcatgggggtgagcacttgaaacactgccttggggccttgggttaggggagcctttgtctttagtgcaggacacacatatgcttacacctacctttatcaccattcgttcatgaatcatgcctagctccatccttgccctgggacctactaggccttccatccaactgggaaatggggagaagcaaagctggcctcatgctcttcagggtcagttcctatctggagttgaccaggcctaccccagttgccattcctgaaaaatctcagctgccaggctgcctttagggtccctgtagacccaggagagttgagaggggttgggggaccaccgcgacgaatcacgacgagggtgtggggacatgccttaggggccggagccgcaggagttccacgtcggggactgctgggtttggagccttctaattggttggttgttgacctgggcacgtccttcactttctgtggctcagtcctcctttttatggggttctgaacttcta

SEQ ID NO: 508192 - DNA, 1175 bp, Homo sapiens
tttttgatactgcgggtgttttgcccttcctgtgtaatgtttgacgcccgttgagtgttccggagtttttcgggctggttgtgggtttctatattcctagtgttcgaatcccggctctttatgaggccaagcgaggcgctgtggttataggagagaatgtgtaaaaagtttggttttcaacgccgcggtgaagtggcgagcctccctgagcgaccggtgctttaccccgtctggaagaaagggaaaataagggtaataccgcccccctggggatttaaggtaagcttggtatatggtccgcctggcccttcttggtcatccgcttatagtctaagtgctaagtagtgccacttaggtgttccagaaattatggataacccttattttttttaaaaggttatattaaactctggagttattgagaaattaagtattccccggtattattaacggggaaagccttttgcccagattgtggtctttccaaaatgtatagtgttacatcgtgtccctatatggcccacgaaatatagagtgctctatatttacaggagtgtaaaccccaaggggatattaagcccagagagagggagatcccccttataaacccccacagagatggcaccacgccattagaccccttggggatatagcccacggattaaccccactctctcttgtattattaagagaaaataggttttcctctgtctcctctagatggtgtagagggtgtggtgataactcgttggaaagagagactctttatatatatcttggttctcatatccactaggttatttataagagctcggtataatattcccccgcggatgaataagctctgagattgagaatcctcgtatatttatgtcaataataattaatttgcgctggcttcacatttgtgaatcacatgggcacaatctttatgagcccacccctatatttttaaaacttctgggacacgcactcacttttggacactatttcccacgctgcacgagaactagtaatcaccttattctcacgccaaagaggagttgtgttgcactggagaagagttatatagcacctgagattagagtttctaatattttgcacatttttgagaaatgtttgttttttacgtgattatattttaaactttagtaaatacttaccctgaaacccca

SEQ ID NO: 508193 - DNA, 630 bp, Homo sapiens
catattctatattttattctcacactttttttcactcaacattctaggctaaattacgggttaactttacacacacataacctaatatcaatatcatctcacttaataatacttaatttctctttaactaactatctcattctaataatacattatatctaccaaaaaattaactatccaattcatatactataaatctatattcttcaaattatatcatctttactaaaaaatcacatcctacactcctttatttctaaacactatatataccaataaataactaaatatatttccatactattataatacacaatatactattctaaattctcctccacatatataatttatctttaataatcttatatttcttattatccattatatcattcttactatacataactcttattaatatcacacctcaatatatacaaataacattttatcttctaaaatatcatcttatttatatcattactacacaacttctattatcatctacatattaacattcttaatatatcttcatactatcacctattccccaatctcctatttccatcttaacaatccttattttcatattatataatattattaactcacaataataatatattatcc

SEQ ID NO: 508194 - DNA, 1389 bp, Homo sapiens
  misc_feature (1352)..(1352): n is a, c, g, or t
  misc_feature (1383)..(1383): n is a, c, g, or t
tggcacgagggccggagccccgccagagcccgacttcagccccagccagatcccgcgtcaacggaggcggaacggcggaccccgtaccctggcagcatcggagcaccggcgggtgaaggcaaggtccctggactggtcatatacctcttgtggccctggcagaatcaagatgaggccctgtcatgcctccccagtgaggcctacagtctgagcagacagcatggcctgccactggcagtgaacaccatgtctgcaggaggtggccgggcctttgcttggcaagtgttcccccccatgcccacttgccgggtctatggcacagtggcacaccaagatgggcacctgctggtgttggggggttgtggccgggctggactgcccctggacactgctgagacactggacatggcctcgcacacatggctggcactggcacccctgcccactgcccgggctggtgcagctgcggtagttctgggcaagcaggtgctagtggtgggtggtgtggatgaggtccagagcccggtagctgctgtagaggccttcctgatggatgagggccgctgggagcgtcgggccaccctccctcaagcagccatgggggttgcaactgtggagagagatggtatggtgtatgctctggggggaatgggccctgacacggccccccaggcccaggtacgtgtgtatgagccccgtcgggactgctggctttcgctaccctccatgcccacaccctgctatggggcctccaccttcctgcacgggaacaagatctatgtcctggggggccgccagggcaagctcccggtgactgcttttgaagcctttgatctggaggcccgtacatggacccggcatccaagcctacccagccgtcgggcctttgctggctgcgccatggctgaaggcagcgtctttagcctgggtggcctgcagcagcctgggccccacaacttctactctcgcccacactttgtcaacactgtggagatgtttgacctggagcatggtgagcagtggctgttctgggctgtcctcccgctctctgtgggatggaggggcatagtgtgtacatgactagatctgacctcccctctcctgcagggtcctggaccaaattgccccgcagcctgcgcatgagggataagagggcagactttgtggttgggtcccttgggggccacattgtggccattgggggccttggtaagtctctatggggctggggagaggagggagtcccaagacaggaaagactagcccccagcatgtgtgtcaccttctgcccatctccaggcactccaggggtcagggctttgtgagctcttttcccctaatccaatgaaagntagggcaagggatggtgggtcctgccctttngggggg

SEQ ID NO: 508195 - DNA, 442 bp, Homo sapiens
  misc_feature (1)..(1): n is a, c, g, or t
ngacgacacggcacacacggctgggcctacactaggctgcatgcacgggtgcacgttcgcctactgctgtgaggaccagcgcgcgctagcgcgcgcagttgcgcgcattcctgaaaaatctcagctgccaggctgcctttagggtccctgtagacccaggagagttgagagggtgggggacacagagagaatagagaggatgtgggaactgccagagggccggagcgcaggagttcaagtggaggaatgctggctttgagccctctacactgctggttgtatgaccttggacaagtcacttcacctctctgtgcctcagcatcctcatctataaatggggatctctgaaaccttcctaccctacctacctcacagggctgttgtgaggacccagggagtttggatgtggaagtaaaagtgctgctaaaacctaaaaaaaaaa

SEQ ID NO: 508196 - DNA, 120 bp, Homo sapiens
tctatcacaggtgaattatcacactcgcagaatttgcagaataatttcattggtattatccctcttcctacaaacacatgtcgcagagcactctccattgttactgcagattctgaactg

SEQ ID NO: 508197 - DNA, 489 bp, Homo sapiens
gtggggctttttgtcttgtttttgtattttggttggtaggctatttattactgattctaattcagagctgattattggtccacttaaggattcagtctcttcctggttcagtcttaagggggatgtatgtgtctgggaatttatctgtttcttgtagattttctagtttatgtgcatagagttgttcatagtagtctctgacagttacttgtatttctgtgggatcaatggtaatgtcctctttgtcatttctaattgtgtttatttgaatcttctctgtttggttttgaatcttctctatatggttcaacatatgcaaattgataaatgtgattcatcacataaacagaactaaagataaaaactacctgattatctcaatagatgcaggaaagacttttgatagaattcaacatccttcattttaacaaccctcaataaactacacattgaaggaacatactccaaaataataagagccatctatta

SEQ ID NO: 508198 - DNA, 1885 bp, Homo sapiens
gcaaaatgcaaaaaaaaaaaaaaacctgctttcttcaaacaaaaaaaaattgcagggggaaaaatagacagaatgaggaagcagtatatgaaataatcaaattaaaaactgagggcagaggtgtggtaacacaggtctataatcctggggctttgggaggctgaggcaggaggatttcttgagcccaggagttgaaggctgaagtaagccacaatcatgccactgcactccagcctggatgacccagtcagactcttgtctctgcagaatataataataattttcatttaaaaactaactgggagcttttaaaaaaattgcaaatgggaggcaggactagcttgtggctccactcagagcagcatatggagacttgtaaacttttgctccaagaatgaccacagaaacataccaggaaagctcagagaatctacagaccctttgaaggaagcagcttgctgctgcagactccataagacagttgaaaagctgtaagtgcccaaagtgcaaaaggggaaacatccacccccctcccaatacacatcctcactggggtacctgaaggtccagatcatgggagaaggatttaacctttcctggagctgagacaaatataagagatgagcgaaatataggaatagaggaagcagaggaaagagccccgtgggcactcttggtccccagggaagccattgttgactttgtctcagaggggtccatggggagagatgccactagaattggggaaagactacagggagaaggaaacttccagctgaactttgtaacaatttcaagtaaactcaaagtttcctggacagaatctgggaaaggggtgacccaggagagaagatacagcacagaaactggggcaggtggggaggcacaaatcctgaaagctgcttgctttctcagtggagaggcttggagcctgagacaagttttcagccctgctcaccggctgcctggaaataaactcagtgctattggggtgcacagtgaaagtgagaccagcctttcaggctgcgttggagctggatgaggcctgtcactgcggcctttcccacttccctggccacctgtatgatgcagaagaggcagccataatccccctgagaacacaactccactgggctgagaaccacaaccccataccccacaggggctgaagcaggccctgcccaagaagagtctgagctaaaacatgcctaaccctgccctcacctgaaggtctctctctacctgccctggtagccaaagacaaagaacatagtctcttgggaactctatgccccaaaccacagcctgagacacccaaatacttatccaagcaaccctagggcaagcttgtattctccctatactactgcagctgatgctctcttgaaagcaccacttcctggctggaggccaaccaacagaaaacgagtatgctaaataaaaatacaaccaaggaccctcacagagtccacttcactcccctgctacctgcaccagagcaggtgctggtatccactgctgagagtcctgaaaatggatcacatcacaggaaatggatcatatcacaggactctttgcagacactccccagtaccagcccagagcccagtatctccactaggtggctagactgagaagagcagtaacaatcactgcagtccagctctcaggaagccctatccctaggggaagagggagagcaccacatcaaaggagcaccctatgggacacaagaatgtgaacagcagcccttaagtcaaatatcttccccctgacataatctacccaaatgagaaggaaccagaaaaaacagttctggtaatatgacaaaacaagattctttaacacccccaaaaaaatcacattagcttaccagcaatggatc

SEQ ID NO: 508199 - DNA, 376 bp, Homo sapiens
tctacacctgatggtgacagaagggatttaatagctgggaagtgatgcgataatacggggggataatccaggtgagtgaccctggaacggacaggatcggtcagctgaagctcactcaccagctcttctagcaacggcatggtttaatctctacctaaatatacaaggaccttcttcaccggtcacaaaagaaatcgtccaaaaaagaaaaagcaaagttttaatctcataaatttctccggagacaaacttaatcagagtaagtccaactttagggggtagatgaataaacacaatctaaatcaaaattagcacggatcaacaataagacattaatcagctttatcaatactggtcctcactacatgccaggggt

SEQ ID NO: 508200 - DNA, 127 bp, Homo sapiens
  misc_feature (18)..(18): n is a, c, g, or t
  misc_feature (21)..(21): n is a, c, g, or t
  misc_feature (26)..(26): n is a, c, g, or t
aggtccctgatgctaggnctngggtnggtggagtttgaagactcttgggaaagcctgtactggggccactgttgggggtgggagtgagcccacacagaggccacaggaggcccccacttcaggccca

SEQ ID NO: 508201 - DNA, 188 bp, Homo sapiens
  misc_feature (161)..(161): n is a, c, g, or t
ctagaggatcccttggtagcgcgagggcgcactaaggagcagttatgcttctcatcgatatcgagctggcttacatgaacaccataccatgaggacttcataggctttgccaatgctcagagaggagcaaccagatgaacaagaagaagacttcagggaanccaggatgagattctggtgagtaccca

SEQ ID NO: 508202 - DNA, 283 bp, Homo sapiens
ggaccggaggaccgaggacagaaagattggtggacaggagcagcggccggtggggagggcgctcggcggcggcctgcggccatggccaccgtgatggcagcgacggcggcggagcgggcggtgctggaggaggagttccgttggttgttgaccaacaggggcacgctgtgttgaaacaactggaggacattcctaagggaggcctttttgcgcttaattctgccgggctccggcactgaggggcccgccaagcaagagaacttcatcctaggcagctgtggca

SEQ ID NO: 508203 - DNA, 161 bp, Homo sapiens
ctcgacagtggtgcccccaattcaacagaatacacattcttctcagcaccacatagcacttattataaaatcgaccacataattggaaatgaaacaaaggttctattaagttaaactttataataataaacacatacaaattggcacaactggtcgagatt

SEQ ID NO: 508204 - DNA, 175 bp, Homo sapiens
  misc_feature (57)..(57): n is a, c, g, or t
  misc_feature (90)..(90): n is a, c, g, or t
  misc_feature (94)..(94): n is a, c, g, or t
  misc_feature (130)..(130): n is a, c, g, or t
  misc_feature (137)..(137): n is a, c, g, or t
ctccagcctgggcaacaggtaagactctgtctcaaaaaaaaacaaaaaagaagaagnaaagtacttctacagccatgtcctattccttgntcanccaaagcacctgcagagtccagtgaaatgatatatnctggctnggcacagtggctcacacctgtaatcctagcactttggg

SEQ ID NO: 508205 - DNA, 833 bp, Homo sapiens
  misc_feature (447)..(447): n is a, c, g, or t
  misc_feature (476)..(476): n is a, c, g, or t
  misc_feature (501)..(501): n is a, c, g, or t
  misc_feature (503)..(503): n is a, c, g, or t
  misc_feature (509)..(509): n is a, c, g, or t
  misc_feature (512)..(512): n is a, c, g, or t
  misc_feature (516)..(516): n is a, c, g, or t
  misc_feature (534)..(534): n is a, c, g, or t
  misc_feature (536)..(536): n is a, c, g, or t
  misc_feature (539)..(539): n is a, c, g, or t
  misc_feature (546)..(547): n is a, c, g, or t
  misc_feature (559)..(559): n is a, c, g, or t
  misc_feature (563)..(563): n is a, c, g, or t
  misc_feature (696)..(696): n is a, c, g, or t
ggtcttcaccggcacacccgctgaaccgcggccacttatcctcacctctgcgccaggctgcggatgaggatgacaaggggatgaggagcgagactcctccagtacctcgccccaccaccctatctggtccaggttatccaggcttgcctgagaatggagcccctgggtcgccccaatctctcgctgtgcctctggaggaaccagggcctccgtacgcactcctccgtggccccgcaggctagtgatgagagtgtgcaagatagcaaactccaccaaccaagaaggagccccctaaggaggagacgtgcgacatgctgactggggccagaagcaggccagaaagcctgcccgcggagtcgggagtggaggccagggccccccagcaccacgcagagagagtcgcacagagacccgctggggccctcgtccagggagcagtcgtcgtgnaatccctccagaggagccaggggccccancccgccgggctgggcctataaagananctccancanctanaaaagtagaagagctgcntnccnaagcccnncgacagggggangaanccccaaagccccgaagccagacccactcaagataaccaaggggaagctagggggccccaaggagacccagccaatggacactctttgcccctgtcccaaggcttcggagggactattccgtatgaaagagtgngtcctacctcttgccgggtccggggccgaggcgagtatctggccagagggaggggctaacggaggactatgggggacgagagcgggaaccgaagccgggaatacgaaggaaacgacacgtgcgacggcacatgatgc

SEQ ID NO: 508206 - DNA, 208 bp, Homo sapiens
gagaagcattcacgcagacggttagtctgaaacagcgtggggcacttagcaggtgttcaatgaaatatgtgttgcattaatacacaaacgaatgaaccatcaatgctaactgatgacacacataatgcaatcccattgtgataaacaccattgacatggggaactctggtcagagtgtggggtacctgagctctgaattctgtaatca

SEQ ID NO: 508207 - DNA, 217 bp, Homo sapiens
ccaggtagacctaacccagttagacctaacccaggtagcctcggacacacatctccatgaagccacttgagagggtgtggcctccatcttgtccccccatgatcatcaccatctcatctcgtcagcttgatgtaggggttcccagtccgagattgccgcccggctgagctttcaaagcatgaacgccaaagctcaatggtggtatgagtatggccct

SEQ ID NO: 508208 - DNA, 252 bp, Homo sapiens
agatgacatagcatcatacagaaataccactggataggaatgctataataatgctaaaactaaatctgaggatagggaatccatcgatcgatccaagagatattcattaagttctattatgtactggcatgcttttaggtactaaggcagaagatatggatgagtgtgtcagcagtccctgaccctggggtaggtcatgtccagcagatgtatgtgctacttgaaaccttctaagaagtagggggggatcct

SEQ ID NO: 508209 - DNA, 1026 bp, Homo sapiens
ttttggtgaatgatgttgaatggtgtcccgatggctcagagtagtggggtgggttttcagtgctggggtgcctccctatgtgccagcaggtgctgtgtggagtgggtgaatgctgctgctgtagaggagagtgcccacgggcagctctggccccccccagtgtggtaggtgaactgcctggaagctgggctgcccccaaggtcttctacatctgctggctggacatggcctccccgtgaggtgctggcccttgagcagtcgatgtgtgctatgttatgctgcttgtgacaagcttgggttgagtggtgctggtgcctgaagcctggagtcctgggaccgtggcctagtgccttagtggacagtgaccagaattgggcttgtggtgtgtggccacatgtaacagtgtgtctcagtggctggagacaaatgggtgactggtggtgcgtgggctggggtggatgtctcatttgcgtctgggggaagagctctgaactggggcctcgtaagaatgggaaccaaaccttgctagatccagggtgtaaggccaaggctgggtgtctttagatcgtagttgggagttacctggggctggagctcgctggaaccagcgctctggtgtggagctaaagctcggggggcgggggtattgatcagtattcctatgggggagtgggccatccgagaggcatgacacggcaggtataactggtgcccagtgcgggactggtattacctcgatgactgaacccaccagtctggctggctgacccccggggcgcaggcaagaggacaaagacccccggaaaggcgcgcccacaaaaggcaaaacaatcggcttgggactacaactgcaaaggggttggctacgaggactacccatccggccaagagaccaccgcagaccgcagcaccctatagaaagcgtacaagggaacgccagaaatggaagacgagagacgccgaacaggagagagacaccggcggaacaatggactacagcaacagagcaagtgggcgcaacacacc

SEQ ID NO: 508210 - DNA, 289 bp, Homo sapiens
gacaagaaaggtttctttcacttggtggcgtgatctattctcggaggccagtgtttgatatacctggccttgtggcctgaggagctgctgcctgtcttttttcccgttttaaagaatgcaggaatcaggcccggcgcagtggctcacacctgtaatcccagcactttgggaggccggatcacgaggacaggagactgagaccatcctggacaacatggtgaaacgctgtctctactaaaatccaaaaaattagccgggcgtggcggtgtgtgcctgtagtcccagctac

SEQ ID NO: 508211 - DNA, 708 bp, Homo sapiens
  misc_feature (126)..(126): n is a, c, g, or t
  misc_feature (154)..(154): n is a, c, g, or t
  misc_feature (170)..(170): n is a, c, g, or t
  misc_feature (325)..(325): n is a, c, g, or t
  misc_feature (361)..(361): n is a, c, g, or t
  misc_feature (368)..(368): n is a, c, g, or t
  misc_feature (394)..(394): n is a, c, g, or t
  misc_feature (424)..(424): n is a, c, g, or t
  misc_feature (431)..(431): n is a, c, g, or t
  misc_feature (445)..(445): n is a, c, g, or t
  misc_feature (491)..(491): n is a, c, g, or t
  misc_feature (497)..(497): n is a, c, g, or t
  misc_feature (505)..(505): n is a, c, g, or t
  misc_feature (529)..(529): n is a, c, g, or t
  misc_feature (557)..(557): n is a, c, g, or t
  misc_feature (603)..(603): n is a, c, g, or t
  misc_feature (613)..(613): n is a, c, g, or t
  misc_feature (620)..(620): n is a, c, g, or t
  misc_feature (627)..(627): n is a, c, g, or t
  misc_feature (633)..(633): n is a, c, g, or t
  misc_feature (638)..(638): n is a, c, g, or t
  misc_feature (653)..(653): n is a, c, g, or t
  misc_feature (657)..(657): n is a, c, g, or t
  misc_feature (659)..(659): n is a, c, g, or t
  misc_feature (661)..(662): n is a, c, g, or t
  misc_feature (675)..(675): n is a, c, g, or t
  misc_feature (677)..(677): n is a, c, g, or t
ggagccttggtcctgagcagccaacacaccagcccagacagctgcaagtcaccatggacgctgaaggcctggcgctgctgctgccgcccgtcaccctgtgcagccctgtgtggacagctggctccngagaggactgcccatgggctcaactacngcagccttggtcagcnggggcaggcccctcgcaggcggcgctgtgggccaaatcccctggggtactggcagggcagcctttcttcgatgccatatttacccaactcaactgccaagtctcctggttcctccccgagggatcgaagctggtgccggtgtgccagagtggccngaggtcctggggccctgcccactgcctgctgctggngggaacngggtggccctcaacactgctggcccngctgcagtggcattgccagtgctgccgccngctgcangtggaggccgccanggggggccggctggactgggcacgtggcaggcacgaggaagaccancgccanggcttccnggctggtggagaagtatgggctcnctggtgggcggggccgcctcgacaccgntacgacctgggagggctggtgatggtgacaggataaccatgtggtnggacgacggnggcgtgnagaaggnggtgcngggcnggacagacaggcggntgantncnnctctgaaggtggnangtggaaatggcagagagacctggaaggaagg

SEQ ID NO: 508212 - DNA, 906 bp, Homo sapiens
tacgtccgagacgcctcgaggccgccgctcgccgtggtgggatcgccggcgcccaaggccgccgcccagggcagcccgcccgcaatcgcccaggggggggactatcacagggccaaaaaaaccacgggatcctctggggcgctcgcccgccgcacgagtgtgaccccggcgcacattcagagggtggggtcggcaaccaccaaagagtccaacgccgttttgggcgccacacaaggaccaagctggcgcacctgagtagtcgattattggcaaatctctgcgtgtaccaagaacgcgcgcgtccccccacaaggagttgagaaaaccaccccaccggggcggaccacacaaaaagcgacttgcttgaggcgcacccgaagaatccccaccagggggcaccaactggggtccactacatccacacagaagggaggggacggcactctggtgcacatcaggaaacgtgcatcatcacgcacccaactgggagcataataaaactgcgccgaccccccgccgcgaggcggagacctgtggtaggcgcgccgcccgcacaccaaagcatgaccggccgaatgatgacaccctgctccccgggtaagatcacaacaccagggaagattcgccgtggatatatcgacctgccaaaagacgaccctctttttctcattgacatgacgtcgacagcgtgtttgggagcacaccagtcacaatactgtgctaggagccaccccggcagcccacgagctgtttggtggcaggcctctcctctccacgttgaagaaattccaggggcttttgaagcaatggctcacaactccttttggtaccctcaacattctctgactgtcgaccaccgcgcagacactggcaacgatcgcccccaatgaaaaacgcccccaaaca

SEQ ID NO: 508213 - DNA, 336 bp, Homo sapiens
tctcccgattagatgtgcgccgcgcaggctgctgttccagtagctgggatgctgggtgtggtgctggctcctgccatcagtgcgcacgtggtggcttcatgcatgaacagccgttgcggtatttgcttgggcgtgaagcttgtgttgccagcctgcgcatgctggccaggttccgttggaagcccgccagttcagcgcctgacgcgtggtaggtctcccccacaggctgtgctggcaatgggctgttttttggcagagcgctttccgtagcgacagtagcaggttacaggttgatcagcttggaacaacgttggttgaaggggcagggtccagaag

SEQ ID NO: 508214 - DNA, 181 bp, Homo sapiens
gctgtagaggatcgctctcgaatctatcagtcatcctttaaaattcatttcaaggctcggaaaaggatattttttggtgacatgggcaatttactttaagtacagtaaaaggttatgtgaatttctacagtatgttggccaaaatgaattatatccagaatacgcttaacaacatattctg

SEQ ID NO: 508215 - DNA, 194 bp, Homo sapiens
cacagggcctcagatagagagaatcagcatcaacaagaactcagcgccagagagtactctagaaggaaagatgtgagttaaccggagccaaaccagagatctgatgatagtggggggttccaagctagaatggttgtgtggtattctgtcctcaggggctttgaaatctgtgtgctaatgaggcctcaaattct

SEQ ID NO: 508216 - DNA, 248 bp, Homo sapiens
tggtgctgaggtcgatctagagatccctgcgggtctcttcctggacctctatccacctggcttgggcctcccaaagggctggggattacaggcatgagccaccgtgcccagccgggatttggcttttcaattggatgactatgtggcatagacagtggctgataagtggattaatttaaaaattcagaattgggtgggacatttccatggtagcattggtatgtagaaggtggatgggttaaagtcag

SEQ ID NO: 508217 - DNA, 865 bp, Homo sapiens
ggcccgggtcgcagccgccaccgcccgccccgactcccggacgccgcgggccacgggccgagccccggattcgcgctcggattcgcctcggtcggccgcgcgtatatttgccttccctccatgatctccaacactatccgataaagtagaagcaactgaggtaccgtgaaagagaaaggagctggaactgagaaaaagcagagccaaaccgtgtactctactgacccatgatcagtggctgttctcccaaacagcagcccatccatgtggcctccctaaacttagctgtggtgcttggatgcattaccttatcgtgatgtatgatggatgtatagtatcaagaaccaagttggagtgggattcccttaactcagctccaaggattcggacgggagagcgcgaggactcggcggctgagcgcgcccggaacagcagctagaggcgctgtcaaacaggactatgcgcattcggtgacagatggaccggacactggtcggctgcttcctctgcactgacgtgacttgcaatgtcatcctgggcctcggcgaaggagtccctccaaagcgcggaattccttctctgccggggagcccccgtgttgcggggctgggccatggtacccggaacaccacatcgttttccatgtgaggtgcagagggagagtctgaccgggcctcgtatctctgaccacgaaggccgttactttcagacttcattaactctgaccggaaaaaaaaaaaaaaaaaaaatttttggcgctcggcccggagaagtttaaacactgtgggggcgcccaagtaagacactgcaagcgccgaacacggtgaaggtggtcccaaaacgggggcggcggtgaaccgggtgc

SEQ ID NO: 508218 - DNA, 324 bp, Homo sapiens
ctagcgagagacaggatttcactacattggctaggctggtctcaaactcctggcctcagttgatccacctgccttggcctcccagagtactagggtagcgagtgtcagccaacgtgcccagctgagatctgatggtaatatacttgtttagacagttgctccttcacatagttcccactactctagtgcggccaccatgtaagtcggacctgcccttctgccatgattgtaagtatcctgaaggactaccccctctgccatgatagtaagtatcctgaggcctccccagccatgtgaaactgagtcagataaacctctaaccat

SEQ ID NO: 508219 - DNA, 384 bp, Homo sapiens
  misc_feature (69)..(69): n is a, c, g, or t
  misc_feature (130)..(130): n is a, c, g, or t
  misc_feature (138)..(138): n is a, c, g, or t
  misc_feature (288)..(288): n is a, c, g, or t
  misc_feature (331)..(332): n is a, c, g, or t
  misc_feature (337)..(337): n is a, c, g, or t
aaaggaaaagggccccacaggccaaagaaaacggcacgaggaaataacccaaaaaagttacaacttccnaaaaaaagggacagctcagccggtggggaagactcttacttttaaaaatcttttcaaatgnccctcggnggggcagagccctccaacccccagggttgaggggaccaaggtggcacggtggcactgggggtgcggcagggacacccgaccacaccagagcgtggcagccggagaaaattgtcccctgcctgagccagcctgggagttttggattcatcntggggaaagatgtggacatttaagacagtctttggggacccannttcantggaaaactatctgaaccattaaagtcgagcttttctaaacccacca

SEQ ID NO: 508220 - DNA, 121 bp, Homo sapiens
cgaggactcattcctcctcctcctccaagaaggtcattccatttgctgctgactgtgacctggatgatgtgcacctgccgggacccaatggcagaagaaaatcagtaactgtgggaacaag

SEQ ID NO: 508221 - DNA, 164 bp, Homo sapiens
actctgacacacaggcagacagagtgtgacattaaccaatgtgggacatgcaatgaattcaaagagtgccacgccatcctggaactacaccctctggagggtgggagactacgtgctcccttctctcggacgggagaatgatgagtggcagaatatctactgca

SEQ ID NO: 508222 - DNA, 200 bp, Homo sapiens
ctaattggttcttcgatgacgcttccttctaacctttgtataattggctccttagaatcattcacatctctactcaaaagcaatttccttagaaggtgtttatttgttgatttgtttggctgccccatggcatatggagttcccgggccagggatcaagtccaggctgcagttgtgacccgtcatcgaagaaccaattag

SEQ ID NO: 508223 - DNA, 275 bp, Homo sapiens
ttaaacttgaggaaaggcaaaaaaaggtttgggaactcccccacctgggggcatggggtggaaaaccctgggcaaagttggcccctttttggccagcttggccctcagcccaccaaaaagggcatcaaccaaggaaggggccatgttggggtgttgttcagttgttacaaaggcagggtccaccctccaggggggccccaggaggggttttggccagtcaagggtccccagggggccaccctttccccctcaaaataaagacctccccccttcca

SEQ ID NO: 508224 - DNA, 207 bp, Homo sapiens
atggctgtagagcgggtagtttaggtgctatagtggtaaatacgggccctaattcaaagatttttaggggaattcaattctagtgacgatgggccatgaaacttgtggtttgctccaccagatttcagcagcattgacctgtagtatacccccgtgtcgtgtagctggtgaaagtggtttggatcagacgtccgggcaatgcatctg

SEQ ID NO: 508225 - DNA, 682 bp, Homo sapiens
  misc_feature (610)..(610): n is a, c, g, or t
gctatgccaaagactggtctatggtggcttcagacatgatggttctccatgaacaccttcttcagttgccacaaagaattccacgacaagttccatctctacagttttctcaggagtcctatgcgagcgaaaaactggcagctgtgcattgtgtctaagagctttataacggccacttcagtagatgggagcatctaagtgcaaactttgcaggagggtatgccttgaggctgattccatgggatctccccttgttgattcagatgctctcctgtgggaccttatccgtgtacagcgatgatcttcttctcgaaagacgaaagtgtctggcagtagagtgatctaagcgttgcagagcaagtactgaatgctcgtaaataagagggctctacagatgaggcacacagagctgtgggggataacgcagaaatgatctagttgacaccagagacacaggatgggggtgaatctcttgtataagcactctatagactagagagagacgagctgcccgagcgtcgtacaactggaggtcgagctctaggaattcacaacagagagcacctagatttgtctgttgtccaggggcgcacggtgaggacacctacanacgagtatgccttacagccagcgtcatgaatggcgcccatcagaaagaagctcaaaattattcctgaggatc

SEQ ID NO: 508226 - DNA, 1083 bp, Homo sapiens
gactgcatgtcaatccgagcacagcttcttctatgatcccattgtgacttcacttgccatcacgttcgctacagacattcgcccagttgaacgcaacgaatgactgcggagcacatagctccttctgttaccgatagctagcaatattcccgagtgctcaatgaagcagtcgcagtcttaaaagtcttacgtggctaccatgagttggttcagactgttcggtggtcacagtaggatgtggacgcgcaagttgacgcctgggagttctaacgcctaggtccgacttgctagtaggaagagagcagcccacttttgacttcagggtactgtacttctttcatactattcacgggcttcgatctctgtatgtgcttgtcgtgcacacacggctatatagggtacacgacggaaagtggggaggcctggtgtgcactgctccttgggggagggctctacagtgattcgtacaggagcaacggctgttgttgatactggcatatgcagtgtgaatcctagatctgcacaagtgactaggtaccaggtgggagtattggggttcacatgattagcgcaattaagctgcctctaaatacatgctttgtggctttacctcttctttccaagagggccaaaacgtaagagagtgaaactacgagctgttctcaggactaaggttcacgcatcatgtactgcctgctacaggtttgaaccgaatcaagggtcctaagcacttactggctcagtgccttgctcattgctgtttaggacataaattaggggatcaaggtttctaaaaatccttccatccgtttccccttttctttatcctgggaacgttctttggaaggcgccccaagagatatagtcggaggaagaatgggttgatacaggaacggagtattggttacccgtggctattgtcgataccgagaattcaggcgaggtgtttgcacaaaacggtggcgttttaaaagccctgtgaggaaccttaatcttttgacgccaacttacactttcacacggatctctggttcggcctgtttcacaatttttggtgccacagggaacatgttgggcttccca

SEQ ID NO: 508227 - DNA, 546 bp, Homo sapiens
  misc_feature (6)..(6): n is a, c, g, or t
  misc_feature (77)..(78): n is a, c, g, or t
  misc_feature (95)..(95): n is a, c, g, or t
  misc_feature (102)..(102): n is a, c, g, or t
  misc_feature (109)..(110): n is a, c, g, or t
  misc_feature (139)..(139): n is a, c, g, or t
  misc_feature (141)..(141): n is a, c, g, or t
  misc_feature (176)..(177): n is a, c, g, or t
  misc_feature (191)..(191): n is a, c, g, or t
  misc_feature (217)..(219): n is a, c, g, or t
  misc_feature (222)..(222): n is a, c, g, or t
  misc_feature (226)..(226): n is a, c, g, or t
  misc_feature (231)..(232): n is a, c, g, or t
  misc_feature (246)..(246): n is a, c, g, or t
  misc_feature (248)..(248): n is a, c, g, or t
  misc_feature (255)..(257): n is a, c, g, or t
  misc_feature (261)..(261): n is a, c, g, or t
  misc_feature (277)..(278): n is a, c, g, or t
  misc_feature (280)..(280): n is a, c, g, or t
  misc_feature (289)..(289): n is a, c, g, or t
  misc_feature (291)..(291): n is a, c, g, or t
  misc_feature (293)..(293): n is a, c, g, or t
  misc_feature (301)..(301): n is a, c, g, or t
  misc_feature (308)..(309): n is a, c, g, or t
  misc_feature (316)..(317): n is a, c, g, or t
  misc_feature (325)..(325): n is a, c, g, or t
  misc_feature (351)..(351): n is a, c, g, or t
  misc_feature (360)..(360): n is a, c, g, or t
  misc_feature (367)..(367): n is a, c, g, or t
  misc_feature (381)..(381): n is a, c, g, or t
  misc_feature (411)..(411): n is a, c, g, or t
  misc_feature (426)..(426): n is a, c, g, or t
  misc_feature (430)..(430): n is a, c, g, or t
  misc_feature (463)..(463): n is a, c, g, or t
  misc_feature (512)..(512): n is a, c, g, or t
gaacanacttttagtaccatagaaacctttcaacatgtacaatgacatattattactatgtacaacttcaaaaacanncccctccagctgcaagncaactcntgttgannatcctgcctatatttcacctgtacgaaantncctggatggccaatggtctccttggcttggaaaannttatataaataagnccttcaatgagttgggaatcataaannnggnatcnggggnngggtgatctgggtntnggggggnnngggntggctctgggggttcnncnggcaaaatngnancctgtggntatttanncttcggnngtgcaggnggtcttgttggttcacggttggtctntcaaaaatnaaagctnttcctatggtggcnaacaaaacttggtatctggttccaataccntttttcaccagctcntganctccattctcatcggtgattagaggtgcatggnattctttatctgccacataactttctaatccttctccagcataggaganaggaggagagatttcacattggattggtaacatc

SEQ ID NO: 508228 - DNA, 163 bp, Homo sapiens
ccatcaggtgcagaatgataggtcaggagtgaatatcactgggatacagatttcttacctgtacacagacttccaaggatgcttccaatcatcaagaatctctgatactaagaaaaatggcggagatctatgatgaggaataacgcgaaatttataatcatga

SEQ ID NO: 508229 - DNA, 307 bp, Homo sapiens
ccgaccttagcctcccaaattgctgggattacaggaatgcgccattgtgcctggctctcaattttgtttttctacaaacccgtatttgtccactctaataaagaactaggattggaggagaaatggacaagagaaacaggtagagggaggtacagaagggaacatccagcatgtgtgtagatatttgaagttatttatcttgagttaatccaaggcaaatcttcaattttggtattacaatttataaaatgcatctttctcctaaaagaaatgttcccctacttttctttgatgaggatcacttgag

SEQ ID NO: 508230 - DNA, 277 bp, Homo sapiens
tttaaaaaaaaaaaaaaacccccccctttttggggcccctaaaacaaacttttttggtttaacaaaattgggtttttttttgccctcccccccccccggtttttttaaaaaaccccccccctggggggaatttttccggcccaaaggggattccccccttagggttgggggttttttttttaaaaggttttttttccccccccaaaaaaggggtttaaccccccgggccccccctttttttaaaccccttttaaaaaaaaaaaggggccccttttta

SEQ ID NO: 508231 - DNA, 135 bp, Homo sapiens
attcgagctcggcacccaatttccagtgaaatatgttgaagattctcgacttggagaactcaccagcggcatgtaaaattaaatataaatatttaatatgccacgacgaaatttaattttccttccgacagcgga

SEQ ID NO: 508232 - DNA, 378 bp, Homo sapiens
caggacacagtcccccaaaacaatagcaattcaaaaaattggaacaaacaactgatataacagatgttcagatatcaatgtaaggacaaagaaaaaatgaaaagcaagaaaatatgacacctccaaaggaacaaaataatcctccagaaacagatcccaatcaaaaacaaagtcatgaaatctcagaaaaagaatttaaattattgattctaaagacactcagtgagatacaaggcattctgaaaaacaatataaaagaatcagaaaaataatgcaggacgtgaatgaaacttttacgaaggagatatatatcacaagaaaaagaaccaaacagaaattctggagatgaattaattgactgaactacaaaatacattt

SEQ ID NO: 508233 - DNA, 111 bp, Homo sapiens
tttcaatccttcagacttgacagtatgaggctggggttggcagtctgcttaacaagatgctgggacacctctgaattagtgaatcaggagccgctgtgtattccgcgctgt

SEQ ID NO: 508234 - DNA, 100 bp, Homo sapiens
ggagaccccagtttctcaagaattcagctctgctcttgagcgtcctcggagcctttggggatgcagccaacctggccctgcactcgggtgttggagagga

SEQ ID NO: 508235 - DNA, 400 bp, Homo sapiens
  misc_feature (24)..(24): n is a, c, g, or t
  misc_feature (33)..(33): n is a, c, g, or t
  misc_feature (121)..(121): n is a, c, g, or t
  misc_feature (214)..(214): n is a, c, g, or t
  misc_feature (348)..(348): n is a, c, g, or t
gcacaagtcctcgctgcccgaggnatccgcctnggcacggtgctgagaattcgcggcttggttcctcccaatgccagcaggttccatgtaaacctgctgtgcggggaggagcagggctcantcgccgccctgcatttcaacccccggctggacacgtcggaggtggtcttcaacagcaaggagcaaggctctgggcggccgcgagagccggccngcgccgttcctttccagcgcgggcagccttcgaggtgctcatcatcgcgtcagacgacggcttcaaggccgtggtttggggacgcccagtaccaccactttccgccaccgcctgccgctgggcgccgtgcttgngttggaaggtgggcggggacgttgcagctggactccgtgagattcttctgag

SEQ ID NO: 508236 - DNA, 627 bp, Homo sapiens
ttggcaatgtgttcaggtggaattttcacccaacctgcgccccccggtgtattaggaaattctgtgttttcccactcaagggagggtggtgcatcccaaccttcctttaaagccacggatgaactgtcctctctttttcaagtccccccttgtgggggggctgttaacccaggcaattaggtgatttcttttgggatggtggtgaataactggtgtgccttttttgtgcctgggccccccccccccaaaactttccttggtggagagtttttttcaatttaattaagccccccctagccccctttccccccgcatggggggtttcctcttttacagcctccccttagtccccttcccagttgttccctggggtcctgggtttgggatttgggcccccttttccccctttcccccccttttttccggatttttgccgggggggtgcaaaaaaccctctttggtttatggggtgtggccccccacccttttcccctgtgtgttttttgccggggtttttcttttctgcaaaaaccttctttttttttttggctggccggccccttggtttctggctgagggttttttttttcttttcccccccctttaagtgccgttcccccccggcca

SEQ ID NO: 508237 - DNA, 320 bp, Homo sapiens
  misc_feature (45)..(45): n is a, c, g, or t
  misc_feature (168)..(168): n is a, c, g, or t
  misc_feature (173)..(174): n is a, c, g, or t
  misc_feature (243)..(243): n is a, c, g, or t
ggccaggcgacgggtccaggtaagtcggcgggtcgggagcagggnaacgtcttgccactgtacacagggcacctcaaccttcagcaaccaccactgttgaaggcaacatccttcagcagcagaaggattgactctctggggggggggacatggggcctcactatgttncacannctggtctaaaactcctgagctccagggatctgcctgcctccgcttcccaaagtggtgggattgtaggcntgagccatcatgcctggcctgctgtgagttttaaataaaaatgtgaatgctgtggggggggtcttacctgtgctttt

SEQ ID NO: 508238 - DNA, 960 bp, Homo sapiens
  misc_feature (17)..(17): n is a, c, g, or t
aagtggggagcataatntggtgggggcgtgtaccgagtcaagtccttaaacgatgtgcagacctttgagcttatgtggcagaagtgcatggaatagtgcttgataaatccattaattgaatatgtggagagaggcctgttgaatgtatgtgaagtcattcaagaatgaacgtccttgggcctctcttaacggagattctatccagagaaaagagatcgattgcagcgcgcgggtatcagattgaaagttccttctcagggtgcctgaaagccatgacattctaaatgaaaagactgattgggaagcaaccactttaaggaagcgggagtgggtaactcatctgtaagaattgcttttgtgccactatttaaggaccacccatgtgacaacagattactttgtgaaaatgcgaatctttcctgcatggaattggacggatttctgaacagaaggaacctattctaaaaccgacttagacaccttcaaaagtgtaaaacctagctttagaaaccatcttcttagaacagagagactacaaaccaaacaaggcgacaatttatccaggacaatgtgctagaacactctacctgataatgaccccgtgaaatactactcttaagacgaaggtattgaccaggacgcccatattccaagaactttctgggtttgtacagagtggacaggcaatccttggaaggcaaccgttttccaattagtaacgtgttatgagactacggatcaatctaaaggagcggaaacgaaagttgacaatgttaggcttgaacccgatatccagtgactggatcagatgcacaagggcttcgggtcaaaccagatgcaaatcggttaaggtcacgtaacaagcggcttgtgctgtacatctccagaggacgttaaccgcgcatgaatcaacggccaacatcacgacgaatacttgaatagtgaatatataaggtattt

SEQ ID NO: 508239 - DNA, 932 bp, Homo sapiens
gaccttcgccggttatgcctcgctccggatgttcctgcgctcttggctctgctttgggctctttgcccctcgcctcgctgagccgttgagatatgcgcccctctcttttggtccttcctcgtgttggccgcgcatttcgacagtgccctcctttcgagtgactctctggggccccgcgctaaggtctgtttgcacacgtcgcctggcgtttcccccacggccgggggctcctaagagtatggcgccgtcctcgcgtgctgtgcacgcttagggccacccttgggtgggttgggcgctgctagggccccttctactggttgtggaccccgccactcaccccagtttattgccgcggggttggttgttccatgagatttgggggggcgattctccacacagagggtcgccccacgcgcctcccccgcagtcggcggacaagcttcttgggagcgggctctggtttttcatacagtcgcatgtcggatgctcagtgggtctgctgttgttattctagtgtgggcccccccccctgttgaggaccccccccctgcctcctcccgcagttctcgcgcagtatgctcccaccctcgtcggtcactctcggtaggggcctctcctcccacctccggccctccgcggccccagtagctttctggcggtcctccacgccagggggctatcccttgcgctagcatcttccgcctcctctgcccctctggacaggccgcgctagcttctatgggccgtgtaggtgcaggcgattggctctgcctctccacaaggggtgttggagccccgcggcacccccgcaccaggtgggcccccccccgtgtgctccccgctctgtcccccacgcgcgcttgtccattatctcttctcgtgaagcccacccccaatcaaaaaaagcaaactttgggaaccccgacatgaca

SEQ ID NO: 508240 - DNA, 346 bp, Homo sapiens
caggtagatctagaggtccccgcacgtagtcgtggaaggaagggagaagtttggagcagtctacctctgggatagtggctcttctgtgggcgagagtacgggacacaacaaagtcatcaacagcgtgtacatcaagcagagccggccataccggttggccacgggaagcgatgaaaactgcgcggcattctattgaggtacccccattcaagttcacgttcacagttggcgaccacagccgcttggtcaactgtgtgcgatactctcctgatgggaacagatttgccacagcccagtgctgacggccagatatacatctatgacgggaagactgggcagaaggtgt

SEQ ID NO: 508241 - DNA, 1001 bp, Homo sapiens
tacctgcaggctcagcgcagcttcaacgacccagcctggcccaacactggggccaacccctgctctctacctaacgcaactacacacacaatctagcctgggctgctggctgcgcgtgtgccctgtaactcccatgactactcagcgacggcctgacgcacacggcagcaactcggctctgcaacaccgcggacggccgacagcgtctgcacgtcgacgccccaacgactccgcgaccacctgccacctctcgagcccctggcgctgcaacagcctacgacagcacctccgccatcgtccacacagaacacacaacaaaacacacagagtgagagagagagagaacacacagagagacacacctcacagacgcggcgcgcgtctcacaccatacccacaataccgccacacgtggcggacaaatcgagcgcacagctacctcgtgcgcacgacacacgtacacacatgtgagcacactgtgaccacacactaccaaacgagcacgacacacgcgacagcgcagcacaccaacgtcgtcgcgcaaccgtgaccacgccgcaacctaaccacacacaacacacacccggcggacgcaaacagacaggagagaaaaactagtgaggagacgacactcacatagcaatcaagacgcgcacaacaaccccagcacacaacacaacctgagacagcacacccatccatcatcatcatacgccaacgaactcgtggccaacgctggtcagacgacaacaacccgtcaacccagaaacgacagacagactgtagctagcgaacgcccacatggtggggcgcacaacaaacaaccaacaacacctcagattcgcgacgcagaacagcaccctgccgccagacaggaaagcgtgaggcgggcgaacgacacgcaccgatacaaacaaggaacacagataggacaagcaaagagggcagtcggccccgaacactgacagggtagagcaggatacgacggagggcacgcaaaa

SEQ ID NO: 508242 - DNA, 938 bp, Homo sapiens
  misc_feature (82)..(82): n is a, c, g, or t
  misc_feature (169)..(169): n is a, c, g, or t
  misc_feature (175)..(175): n is a, c, g, or t
  misc_feature (223)..(223): n is a, c, g, or t
  misc_feature (228)..(228): n is a, c, g, or t
  misc_feature (230)..(230): n is a, c, g, or t
  misc_feature (265)..(265): n is a, c, g, or t
  misc_feature (276)..(276): n is a, c, g, or t
  misc_feature (293)..(293): n is a, c, g, or t
  misc_feature (296)..(296): n is a, c, g, or t
  misc_feature (300)..(300): n is a, c, g, or t
  misc_feature (302)..(302): n is a, c, g, or t
  misc_feature (308)..(308): n is a, c, g, or t
  misc_feature (312)..(312): n is a, c, g, or t
  misc_feature (319)..(320): n is a, c, g, or t
  misc_feature (322)..(322): n is a, c, g, or t
  misc_feature (324)..(324): n is a, c, g, or t
  misc_feature (337)..(337): n is a, c, g, or t
  misc_feature (353)..(353): n is a, c, g, or t
  misc_feature (356)..(356): n is a, c, g, or t
  misc_feature (361)..(361): n is a, c, g, or t
  misc_feature (364)..(366): n is a, c, g, or t
  misc_feature (383)..(383): n is a, c, g, or t
  misc_feature (409)..(409): n is a, c, g, or t
  misc_feature (453)..(454): n is a, c, g, or t
  misc_feature (493)..(493): n is a, c, g, or t
  misc_feature (517)..(517): n is a, c, g, or t
  misc_feature (535)..(535): n is a, c, g, or t
  misc_feature (540)..(540): n is a, c, g, or t
  misc_feature (732)..(732): n is a, c, g, or t
  misc_feature (752)..(752): n is a, c, g, or t
  misc_feature (783)..(783): n is a, c, g, or t
  misc_feature (851)..(851): n is a, c, g, or t
agtgaaagtgaaagatattatgatttgggccttgcttcctactgttcacattagtttagtttagaagattaagtataataanagaaggagaaaagaagaaatgaatataaatatactcagggtagccaaatcctctaattaaataaaggatgaaccaaagtagttgganagattnacatttatgtgggagcctaaacaaattatgttccctttaactgttctnggggngnggggggggggggtgggcaacatttatattagatgngagtgattttnttgagagattttttttngtntaanantatgcntggngatattnntntnttgtttatgaatngggttaagtgtaagancgntattnggnnngggtgttatttgggaangtgggtctcttctttgctttattgtnggtttagagggataattttggggcaacctcaatctatctttaannatcttcctgccttcaaatgcgcagggacccttataaggnaggggggagcgctttgagagcaanattcatcattcaccaggnatgtngaaccacaagtgaacaacaacaacaacaacaacaagattaaatcattcccaacaattcctatttgcttttccaaagcatgctatgtctaattctgcctttctatgcagacaggtgggagagggagcccatagagtatattaatgttaattaaattaacttcctttaaaagctaacaggatggcttagtgtgnatgaggatgaactgctgtgnatgacactagcagataatgaagtaaactttnaacccagattagtaacatgtactccagtaactgaccagctcagatagagacttctcatttactctggntcacatgtacaatattttaccttccaattaaatatagtgccaaaatctttcaaaatagatagagcataggcttcttagaaattcaaa

SEQ ID NO: 508243 - DNA, 168 bp, Homo sapiens
gccagtgtgcgtaacagtgaggtatgcctcaaataagcctttaaaactttataaactgaactagaccatacccatgcagtaatatttttcagtgctactaatgaaaaaaaatttaagccttgcactggaattccaatatggcagatttgttacttttacctttgccct

SEQ ID NO: 508244 - DNA, 464 bp, Homo sapiens
aggttggtacagagcgagactccgtctcaaaaaaaaaacaaaaaacaaaaaacaaactagccgcgtgtggtggcgcgtgcctgtaattccagctgctggcagagggtgaggcatgagaattccttgaacctgggaggcagaggctgcagtgagctgagatcgtgccactgcactctaacctgggcgacagagcaagatccatctcaaatgaaaagaaaaaaaaaaaaagacaaaaaagcattcccagtgttttatccaattccttgaaaatattcggccaacacacggtggttcacccttgtattcccagcttttgggaaggccgaggcaggcggtatcacgaaggtcaggagtttgagaccatccgggtctaccttagtgaacccccttctctgctgaaattacagaatttcccagggcttggtgttggttgcctgtagtctcagctatgggggcgcgtgagg

SEQ ID NO: 508245 - DNA, 605 bp, Homo sapiens
ctgcgcatctggggctttaaacatacaaagggattgccaggacctgcggcggcggcggcggcggcgggggctggggcgcgggggccggaccatgagccgctgagccgggcaaaccccaggccaccgagccagcggaccctcggagcgcagccctgcgcctgcggagcaggctccaaccaggctggcgatggcggccacactgcaccgaggccagctgacccccggggcgacgctgcggggccagtggagcgctactgatggaggcgctaaatggcccggggctgctgctcactgggtccccttgagggcagctccttgtctcgctgggcttgccttgcttgagccactgcctgcctgcctggctgcctgtcgcccaatcgatcgagggttcccctgggcgattgtctgcccccgaaaggcgtgacagaagagtttggcagttgcaataccgtgaacaccttctatgtgcttgccccaaaggagatgctgcaacactgtttggtgctgaatggacacatctaaagaagatgcagaagttcttgtggactgccccagacaggtgatcttgaccagaataccatcgagaccatgcggaagccacgctg

SEQ ID NO: 508246 - DNA, 269 bp, Homo sapiens
  misc_feature (5)..(5): n is a, c, g, or t
  misc_feature (11)..(11): n is a, c, g, or t
  misc_feature (30)..(30): n is a, c, g, or t
  misc_feature (51)..(51): n is a, c, g, or t
  misc_feature (89)..(89): n is a, c, g, or t
  misc_feature (106)..(106): n is a, c, g, or t
  misc_feature (117)..(117): n is a, c, g, or t
  misc_feature (131)..(131): n is a, c, g, or t
  misc_feature (134)..(134): n is a, c, g, or t
  misc_feature (149)..(149): n is a, c, g, or t
  misc_feature (152)..(152): n is a, c, g, or t
  misc_feature (159)..(159): n is a, c, g, or t
  misc_feature (164)..(164): n is a, c, g, or t
  misc_feature (168)..(168): n is a, c, g, or t
  misc_feature (193)..(194): n is a, c, g, or t
  misc_feature (217)..(218): n is a, c, g, or t
  misc_feature (220)..(221): n is a, c, g, or t
  misc_feature (231)..(231): n is a, c, g, or t
  misc_feature (239)..(239): n is a, c, g, or t
  misc_feature (241)..(241): n is a, c, g, or t
ttttnactganattgtaaaatatccatctnaaagacatcaactattctaanaattgtgtacaggatattcctttagtggtggaattaanatgtacgaatacttgcnttttcaaaaanatgtattttctgtnaanagtttaaagattttngcnatatatnatggnaganaaatgtaatcgtaaatattaatttnntacctatattgtgcaatacttgnnannacggtataanagtatttncngtcagtgtcttacatgttaagagggact

SEQ ID NO: 508247 - DNA, 203 bp, Homo sapiens
agttatgatattaaagattatacatctatagtactgcctgtaatcctagcacttagagaggctgaggtgggcagatcacttgagctcaggagttagcggaccagcctgggcaacatggcgaaaccgtctctacaaaaatacaaaaattatctgagcatggtggcgcatgcctgtggtcccagctactcagggttctgaggtgg

SEQ ID NO: 508248 - DNA, 146 bp, Homo sapiens
cgatggtcgacacgccgcgatgaccgagtgagtacctgtattataaacagtaaagaatgagataacacgtgtgttcgccaggatggtctcgatttcctgcacctcatgatctgcctgcctcggcctcccaaagtgctgggattacc

SEQ ID NO: 508249 - DNA, 278 bp, Homo sapiens
tgtattgccgacgtggctttttacaattctgtgactcccactctcaggagaccattgcatcattggccgcacactggtggaccatgaaaaagcagatgacttgtggcaaaggtggaaatgaagaaagtacaaagacgggaaacgctggcaggtcgatttggcttgtggtgtaattgggatcgcccaataaacattcccttggatgtagtctggagggcccttagctcatctgttatcctgctaatgctgctataaatgtatcctgttggctggcgaca

SEQ ID NO: 508250 - DNA, 627 bp, Homo sapiens
tatttaagttacctccctctagtttaatgtgaaattagtaaaatcagggaggacgggacttatgcgggggtaggcaccagaaaaaaacttctatggatttaaatttaatatgaatactttaaagatcaacataccgatgtgaaatacaaagtgttaatatgtgaaaacctaggaagcatatttaaaagatattttagtgaaagaatatttgtgggtttaaacaagtgaaccatagtgaatatactgggtacagttataatttctccctcacgtgaggaccgtggtgaacatttctatatatattatatttacagtggtattattgtgaagaaaacattgggttagtgccaagtggcttgggtgataaaggtaactgggtgaagaactttctatgggtccttaatttttaaccaaagaattttcccataggttggaggcatttaaaggcaattaaaatcactaaaaagaaaaaaaaaaccacaaaaacaacacaaacaaacaaaacaacacaacaagggcgggccccgcccccccaaagagaaccacccacgcagcggggcccacaacccaacaagacgacgccagaccccaacatccagaagcacacagggggggccccaaaaaagg

SEQ ID NO: 508251 - DNA, 1085 bp, Homo sapiens
  misc_feature (929)..(929): n is a, c, g, or t
ttcctattcactccatcctaaaaaggtggcttttagttttgttttctgattttaaaactctgtaaattaggatctttatatccacaaattttaggtttgcatttgattttacacaatctgggggggggggtgagatggcgatatcacactttgttgggacaagagctacctcaaacacaaagaaaccccctcttgtgtcgctgaaaaataataaaaaaagaaacagaaacaatacataaaaaatcttccccagaaatatgtggggaatgtgggtttgaaaggtggttgcaaggtgtggttccagtggatgtgcctccctcctttccgagaaacagacctatagtttattctcaggggtggttcttctctccttaaaaactccctgtaagcttccttcagaaagcaaaaaggggttttacagagtcccgtgctacatctcggggttacttccatttttccttaattaaaaccccaatataattacttccccgacctataatctccatctcttggtttaccagacgggctccttaatacctcctcgttcaagaaaaatctctttagctcggtcttaacacacttttttttttctaaaattaacaaattgcaacccctgttatgtttgagaagaatttccacaacagtatagggggagaaagctaccaggactttagccacactcgggttgtgcatcatgattaaacccagtgtgggtttattggactgccacggggttggcgtccttttcaccactgagttgatttgccatttcgttaaagagtaatcaccccacatttagttgtccctttacacacaaattttcccgggataaaggaaattcgtggggcccacgaagtgtttccccagcaacaacacccccgtggggccacttaaaaactgtttgcggtcagaaccactaggagctcttnacgaagcacacttcacttatggttgagcaaagcgtctcgggatataggacggctgcccgttaactcaggaccctcttgatattttggtccaggataattgagacggaccggattgtgaccaaccttttccctatctgcgcgatgtcgcaatcaatt

SEQ ID NO: 508252 - DNA, 673 bp, Homo sapiens
  misc_feature (22)..(22): n is a, c, g, or t
  misc_feature (75)..(75): n is a, c, g, or t
  misc_feature (230)..(230): n is a, c, g, or t
  misc_feature (235)..(235): n is a, c, g, or t
  misc_feature (300)..(300): n is a, c, g, or t
  misc_feature (309)..(309): n is a, c, g, or t
  misc_feature (399)..(399): n is a, c, g, or t
  misc_feature (408)..(408): n is a, c, g, or t
  misc_feature (446)..(446): n is a, c, g, or t
  misc_feature (516)..(517): n is a, c, g, or t
  misc_feature (635)..(635): n is a, c, g, or t
gcagtgggggggcctccaatcnggggctcgccaagcctaaggggcaccccacaggcagcctagtccacacgtgcnaatcctgaggaggtcgggggccccccccccccagtcagcccaccgcctctcacgggggtccaggttgcggatcgccacccagtcccccccaggccgcatggccgaggtcctccaccgccgcccaaggggcctggtttccagagcccccaccaccnaagcncctcccccagtccacccagaagagaagcccctgccccagaggggggggggcgcagaacgggcccngggactacntgggggacaccccgcaggacccccccgtccccgcagtcttgccccccccgagtaacaggggaaacaggtgccccccagaggctccccggncccacaccncagagtggaagccaccagaacagccgccccccaatccncccacccctccccccccctccctcccatccacccccagcccccccccccacccctcccccccaacccccnncccagccaacagtggagaggggaggtccaccccggccaggttgcctgatggagctgccagcccccagggcaggtccacaaaacaaaacaactattggcaagctcagatagggagatanaccacaaaaattaggggtgcctttgtctacaaataact

SEQ ID NO: 508253 - DNA, 688 bp, Homo sapiens
gttggatgcggctattattgaggtcttcacttctagcgcttacatcaaggtgtgtggcaatggtgcagagccgtgtgagctcatgactgctactccatgacagttacccttgtagctaggggtccccatagagtgaatgacagttttgtggctgaaacctacacaaagaggaagaggaatgaggcaggaagacccgtacctaaccataccctctttggactgcagaaaaactgatggcaacatctcggggagtggctgcccaccaaagaggaccctgagaaagaaaagagcataacctgggaaatggactacatgggggcaagggacatggtgagcgggcaaagttgagatggtgttttccttgagtgaatgtctttcaaaactaacaacatactgtgtagttgtctaacatgctgatggaggaacactgctgggccctgaaatcctagctttgaatccattttttccctttaatatagtgagtagagggagaaaatgaccttatgttttcccccacgacacaagtcaccgtcattatggctttcatatcaagtatctgtttccctttgtcccaattatttgaccaaatttatgttcagaggttagacttgcaaacatcaaagcaccacaaatgtgtgtgacatctagtgacactgggttgaaaaatgcaatataatacataattcaa

SEQ ID NO: 508254 - DNA, 213 bp, Homo sapiens
gcgtcgacgaacagaatggaatggaatggaatggaacggaatggaatggaatgcaatggaatgggatcaacccgagtgcaggggaatggaatggaatggaatgcaatctaatggaatcaatcaacccgagtgcaatagaatgcagtggaatggaatggaatggaatggaaagtacccgaatggaatggaatgtaatggagtgtaagggaatta

SEQ ID NO: 508255 - DNA, 403 bp, Homo sapiens
  misc_feature (4)..(4): n is a, c, g, or t
  misc_feature (18)..(18): n is a, c, g, or t
  misc_feature (21)..(21): n is a, c, g, or t
  misc_feature (47)..(47): n is a, c, g, or t
  misc_feature (102)..(102): n is a, c, g, or t
  misc_feature (169)..(169): n is a, c, g, or t
  misc_feature (229)..(229): n is a, c, g, or t
taanagctactaactttnctnatctgtcctggattgattctaatttnccggtgaccctcttaaagtttagcactcaggactaaagacagtatcatgaatgangtctgataggactccttgttttggacactgtgcttctgtaatggtctccaaattcacaataattttnggcagtcttagcaagctgttgattcacagattcaagtctactaagatctttaattctttncttatgtactcctgttaagtttcatctggtgcttctaaaattgatttacttgcacatatccttaaatttcattttgttagatttaatgtgcactaccatttgttgagtcttatgtcccaagaattttacaaatattaccttttctcccctcttgcaatttgtgtagaaattgac

SEQ ID NO: 508256 - DNA, 212 bp, Homo sapiens
ttgtttgaatatcttgagtggcattgtagagccgagagaagtagagccgagagacaaggtagagctgagagacaaggtagagccgagagaaggtatagatgagagaaggtagatgggagggaatgtagaggtgagagagagggtagaggtgtgagagagtgtagaggctggagagagggtagaggcgagagacaaggtagaggtgagatgag

SEQ ID NO: 508257 - DNA, 893 bp, Homo sapiens
tccggcccagtgtacctgaaggcctttccgccccaggccacgctagcagacctaccacagaatggtggggatggtgagaccaagcccagtccaaggtcccgctgatggttcccggcctgagccccagtcgcccacgaaaccgcccctatcttccagcggaagacggtcgagcagtgcccctggaccgcccgagcagcgcccgcatggccaccacggaaagtcatctgacgagactcactcatgaatgcaccttgcgatttgcactcgtgatcgtgcaaggtagagggaacctcgcagcaaccaaactatttcgtggaaatgagtccacaatcgtacagactacagagtggaacagcaccctgagacatgaccgatacatgggtaaatgcatggctcaagaagtttgccttaattgaaacttgataaccacgtatcgccagttagccactggtctgcacctttttcccagtatgtgacgattgaaccgatacaagaacaactgcgcaggacctagttcagaccagttatctagcctcttgagaggaatgtctacggataagggaatccacaaagtgcagaccagaccccttatttttggccatggtcttaccattatgaattcaatatccccttgcacacacctttatcatcgcaaaggggaaattttcaatagggaggaaggtgccaacgcaccgagaacaccaattttaccttggggtttccgacgaacttaccaagagaacaagaggagatcgcaccaaacccacgggaaaagtagcaatacaaacggggcatggactgcaccaggggaaaaacccgtaagaccccatgcttccttaaaacactttcccagatgcacttgggaaaaggacgaaacacacatgggggccaag

SEQ ID NO: 508258 - DNA, 291 bp, Homo sapiens
  misc_feature (184)..(184): n is a, c, g, or t
gcacgagcaggaaggctctgacagagttaatgaattgggtctcagagggtaaagtccagtgtcatgaatacgtcactgaaggatttgagaaaatgcccgcagcatttatgggaatgttgaaaggagaaaatctggggaagaccatagtgaaagcatgaaaataaaaatggcccacggatcgtcnctggagggttagctttttaccattcagtgcaagtgtatactgtcctatgtaagatgtaacagcaatgcgtttgacctagctaataaaacatgtgtgtttttttttcc

SEQ ID NO: 508259 - DNA, 258 bp, Homo sapiens
tccatcagagacgcagtcccgaaatccgatggaataataaaagcattcctacacacacacctcattctgtcttaagatcaagaaactttccaagactcccgagaaagccccccagaccccagtccccagctaaagatgagatagagactgaatgcaacactcccacctgcagtcataatcccacacgtagcacggagctttaaatacatacaagcaccagaaaaaagcttagaacttggagctgcgtctgctgacgag

SEQ ID NO: 508260 - DNA, 93 bp, Homo sapiens
taagggcaggggtctcaaccttcggcttccccagctcaagcaattctcgtggcctcagcctcccaaggtagctggggataacagggggtgcac

SEQ ID NO: 508261 - DNA, 367 bp, Homo sapiens
ctgtccaaagatgcttaagctgaagacacttaagtatatttccaaggaaatagaaaatagattcttatctctaaggagcttacagtcaagccaagaaaatttggaaagtgtgtacggtgaaggggccaaagaaataaaggccaccaatcagcataaaaaagagaagccagaaagctgagagccagttacaggcatgacacaggaggcccagacaaaagggctttgatgaggaggcagcatcatttgctgcaggaagttctaagaaaatgagtcttctacaaagaaagtgattcttactagaaaaaaaaaaataactaggaatcaaggcatcttctcaaggaccaagcaaaatatatttttttctctc

SEQ ID NO: 508262 - DNA, 267 bp, Homo sapiens
  misc_feature (59)..(59): n is a, c, g, or t
  misc_feature (88)..(88): n is a, c, g, or t
  misc_feature (254)..(256): n is a, c, g, or t
  misc_feature (258)..(258): n is a, c, g, or t
gctcaggctatcccacttcaacattcccagaagttgcataaggaagcccaaaaacacgntctctggattttgctaagaagacattaantcattcattcactttttttttttttttttttggacataggttcttcttgttctgttctccaggctggattgcagtggcacaatcatagctcactgtaacttgaactcctgggctcaagcaatcctcccatctcagcctcatgaacagctgggactataggcacatnnnantatacccag

SEQ ID NO: 508263 - DNA, 113 bp, Homo sapiens
  misc_feature (90)..(90): n is a, c, g, or t
  misc_feature (98)..(98): n is a, c, g, or t
gtagattatacagaactaggcctacagaaactgaaggagtctggaaagcagcacagctttactctttctctgattattattataagtgtntcctcggnggattcctgtaacat

SEQ ID NO: 508264 - DNA, 144 bp, Homo sapiens
aggatcttagatgaggaacgtcactgggatgaggaattactgggatgaggaactgtcactgggattaggaacgtcacttggcaggtggtgtctctaaataagtggttgatgctagaaggtgattgtttttggtaaacagggcgg

SEQ ID NO: 508265 - DNA, 118 bp, Homo sapiens
ctctggcacgcggttgcttgcactggccgttcacgtgactcagccaaaggacggtggcttctgcgaagtgtgcaagaacgctggtgggatattgggatcgcctgggtaccggagctcg

SEQ ID NO: 508266 - DNA, 189 bp, Homo sapiens
ttatgtactgacccaccactgattaatacgtggggtggcagtgtattagtgtataatattcattcgagactcttctgagcttatcatggacagacttattgaccttgtccagctccagcagccttcttgtccactgctttgatgacagccaccgcaactgtctgtctcatatcacgaacagcaaagcga

SEQ ID NO: 508267 - DNA, 175 bp, Homo sapiens
gatccagtcggtctacatagagattatacactacttaaaaatatagtcataggttactaagatattgcttagcgttaagtttttaacggtaattttaatagcgttacgattttaacgagacaaatatgaacgcacttagaaagacgtagcatgaggaaagggaaaaggataaaag

SEQ ID NO: 508268 - DNA, 1010 bp, Homo sapiens
gagtctctcgaatgactctgtaagacccctggaattgaccacaaagatagatcgctgtgactccctcctaatgatgtctgcaatgtccgtgctgagtgcatctgccagtccaacttaggttcctgtttacttaggcgcttcatcttctccatgacccacgtaactctatattccaagctgaattaggcgctactagataaccaatgaggagatgcacgactatcgatggtctaccaactgagacgatctcgacgcatgtaacgcagccattgtcgtacggcaataggggagaagtcagtccgtattggtgagttcaaccgtcgagagatccttttatactcccttacagaccaggtgatttcctttcctgaagcacttttacaacactgttcctaggatcgtacgtctgagcgtaccaacaccacctatatgcgcactgggcaactgggccaccttatgtggcgcgatacggcaccgtctctagagtgcgtcataaacatcgattccatcgtactatgacgacgtacgagcatttgcgctcttagtgaacacggtacctgacgactgcaacggagggtcagtcctatctaaaatcggacttgttgccttacatctcgcttagcctcctaatagtaccgggcacttgtaaccgttcggattagtttcccacatacctaaagtgaccaaaagggcgaccccgctgtaccagtttcacctaccttttttcctactaagccggcgttcggtgcatcaaaatgtctcatttgcccactgccgtctcccattacggcgcttgctcaggaaagtttaactttattctaccagtgtacctgcacccaattattaatggcacctaatatccccatgaggcacgtggaccacatgtcgttgaatttgggtatcttgcctatgggcatttctgattgcctagtctgagtaagcgcccccacccctgtggccatcactctgagtagccgcaacgttggtacgcccactgtaccatgtaaata

SEQ ID NO: 508269 - DNA, 505 bp, Homo sapiens
gcatgcaggcatgacatcagacaatagggcaaaggcagcctccatcagatagttagaggcacgaatcggagcaatagtagtcaagcgacatcaggcaacatcatccatcagggcttgcatgtggggcaggggtcattacaaggggttcgctcagggtcatcaattgtcatgggtcgccctcaagcaggtctggtgcagcaatcagtgttcaatgtccattcacaggcagcagcaaggacagcagcacagtcaagccgagggcgtctttgcattgtgtcataagggtggcaaggtgcattttcatcggcacatgggcaaggtgcatcctcagggggtcggtttgcatcccgtttcgtgcacagcaataggcaggtggagtgctgctagggctgcaatcacatgcacagggccacgcatgacagtgcaaaggtaaagacatcgtgtgcagggtgggcatgtctcaatgagtcagcctcctcagatctcctcgggatctcctcaggag

SEQ ID NO: 508270 - DNA, 330 bp, Homo sapiens
ttttatttttttttccccctttttcccccccccccgcctggttaaccaaggatttttttggttggagggggttttcccttagggaaatccccccttgccccctgggccaaccccccgagctgtcctggttttttttttcccaacccccaaagtttgtcccccccctttgggtttgttggttccccggccccccttgggtccccccgggggttagtttttcccccggtttcccttcgcccgggccaaggggggccccccccccccttcctttttccgcccccccagggcccccctggggggccaagttcccccccgggtttttttttttta

SEQ ID NO: 508271 - DNA, 579 bp, Homo sapiens
tttcggagttggcatccgtgatgagcgaaatctggcactatggtccaaacagaggtattcccttgggtcagcagcactagagtgggtggtttggacaccttggtcaataaataagccagccttaaaatttgaatggacccggtggttataaaatatacccaagggagtgagttctggtttggccaagagctgcaatccacgggattccccagtgggttcctgggggaataaataccatattccagcatccggtgagccggcagcggcattattaatcagattatggtggggatgagcaatccagaaagtggaaacagccatacagtcagtagcaggcacaggaaggtaatttccaaacactttatctcgcatgggggtacacatggagtggttcctatcggggggcaggagagtacccggcttggtgaggagtcccagatggtggaacaaagtattcctcggttcaataccatcttccaaaaagaaacaatgacctagggtgtcaaacccaatggtgtcttttattagcaagccatttgtcccatgcacagggatgcaccttgagaagctgtgatgaat

SEQ ID NO: 508272 - DNA, 279 bp, Homo sapiens
  misc_feature (17)..(17): n is a, c, g, or t
  misc_feature (59)..(59): n is a, c, g, or t
  misc_feature (119)..(119): n is a, c, g, or t
  misc_feature (166)..(166): n is a, c, g, or t
  misc_feature (198)..(198): n is a, c, g, or t
  misc_feature (201)..(201): n is a, c, g, or t
  misc_feature (257)..(257): n is a, c, g, or t
tattttttgccaattgnattttttttccactgcgcctggcctgaagctattctttacanaagctcttagtttttgtttgtttgtttgtttttttcttttgcgacggactctctgtcgcnaaggctggagtgcagtggcctgatctcgggtcaatgcaacctctgcntcctgggttcgggcggttctcctgcttcagcntcnagggtagctgggattgcaggcgcctgccaccacgcccagctgatttttgtattttnagtagagatggcgtttcgcttt

SEQ ID NO: 508273 - DNA, 246 bp, Homo sapiens
  misc_feature (4)..(4): n is a, c, g, or t
  misc_feature (27)..(27): n is a, c, g, or t
  misc_feature (37)..(37): n is a, c, g, or t
  misc_feature (45)..(45): n is a, c, g, or t
tagngttcaggcctatggttacgaggncctgcggttngctgaaantcgccagtcgcagctcatgcagcatgtcatcatgtgcagcgagtgcagaaggatgacaaggacaagaaaaagaaatataactctgtcactaatgggaaagagagaaaacaaagggaccagatgctgccagcaaactgccactggtgactccctttccttttcttcttctcttctcttcttttcctccttcttttctttctc

SEQ ID NO: 508274 - DNA, 211 bp, Homo sapiens
tacgaagttcgagctttgtaccgcctgagatcctccctgatgtggatcatgacttgaatgcgctgccaagtatgtgaccggagaaggtgctggctgctgtctactaggctctgatgtgaccaccacatttacctggagggcaccttgctggaagcccaacatggtcaccccaggccagtgttggtgtcaagaagttttctcatgaggagat

SEQ ID NO: 508275 - DNA, 757 bp, Homo sapiens
gaggcgccggcgctgcgctgcaaatggggaaatggatccggtagccgagttcccccagcctcccggtgctgcgcgctgggctgaggttatggctcgcttcgcggccaggctgggcgcgcagggccggcgggtggtgttggttacgtcaggcggcaccaaggtcccatctgaagcgcggccgcgtgcgcttcctggacaacttcagcagcgggcggcgcggtgcaaaccctcgtgccggaggcccttcctagcccgcggctacggggggttcctgttcctttgtatcggcgctcgctcttgcctttcccccttatgcccaccgtttcccaccccagactgtggttgtcccgttctgcggccttccgggccaagccctttccgggctgtggtgagcctggaggccgagggagaatgcacttccgggttggctgaggctctgaggagctaccaggaggctgcgcgtgcaggcaccttcctgcagtagagttcaccacttgggggggacctattgtggcattctgttggagggctgcgcgcccaaggattcaaattcgggttaaaggccctttttgggaatgttttaacctgggttggggtggtgtcaagatttctaagtggtctctggtctttgaaagtggttgaacaaaaggaatccaggcatttggggggccacttggggattacattggagattggtggcaaagtggttttccttgggtttaagatgggtccaaagctttataattcttaagtggta

SEQ ID NO: 508276 - DNA, 1717 bp, Homo sapiens
  misc_feature (1)..(1): n is a, c, g, or t
  misc_feature (190)..(190): n is a, c, g, or t
  misc_feature (447)..(447): n is a, c, g, or t
  misc_feature (731)..(731): n is a, c, g, or t
  misc_feature (1070)..(1070): n is a, c, g, or t
  misc_feature (1328)..(1328): n is a, c, g, or t
ngcgaacacaacgaaatcgccaaacgggcgttttgttttgttaccacctgcccccgcccccccagcgtgtatcctgttatatattagcccgggttccttctttacaaaggggtgtatacccagagcaggccaccctatggggggttgtgcgaccataatttctctcggcgcccaccccaagaaggcggangacagaaatatttgtcgtgtggggagattgtctctccctccctctccctgcggagggcgcaccaacagatgttgggaaaacatttcctacagacgggttataagaagaatgctctccgtgttgtgcccgaacaagtgaccgcccacaatttgtggtgaagagacctctgcttcgctcttgttctcgcccgtcgtcgcttctttttttaagaaagagaagaagaagggggtttgctcaacacgaagaggggaagcgcntccccactagctggctctgttcgtggaggaggcagcacacctagttggtgtctggccgccgccccgccccccaccacattataagaaatacttctcgtgggggggaggatgagacgcctccttcttcttttatcttgcgccgcggagattgtgttccccacccagggagaagagcccctccttttgtggaggagtcccaccccaccacctctgtgtggggggtgacaccaccacaaggagagtctacttcttgtcgtcgccacccccaccccgacgggggagancctcctctcctcgaggatgggaggaaattatttctcctccgacgaggaggggggggatgatgcgccgctctcggtcgctgtatataggttatgctcgtcgcgcgaccccctgctcttctgtgcttgttgagaggagggcgcttcttttttaagggccgccccccccccttctcttcgtggagtagtggagaattattctccaccacagagccccccctcttcttccaccacacaagggtagattaatataatagtgtgtgttgtcccccccccagggtgtgtttgttgtcctcttatcccgagacttgttttctctcaaccacacaccacttctgtggngaggagacactccccccccagcagagagaatactacactgtgggagatctcctctatatattgtcgcccgacgagacaacaccccccaactattttgttgtgtggagatattgttgtgaaagatgactcttgtccaacagatgtatagtagagatatattctgctctcagcagcgacacaccctctcctcactaggagagagtgtgggtataataatgtgagagagaccacccacagtggtgtccactgtgagtgtgngcacaaatctgtgaaagagatagacacacagagacacttgtgtgtacacacctgtgatgtctcacccagcagtctgtggcgataattctcacgggcgtgtgttatgacgtggacacccacaagagtgtctcatgtctctctaaagaggtggctatataggtccacacttgcggtattatcccaccgcccagccccccgtataggtgagccagaaagccccacatgtgttgccacaatgacgtcaccattgccacacagggtctcacaccccggattctcaccgggcccagcccaccaggccttactccccttggctaccccccccatttagaaatccattttaaaatagtcctgtggggaaaccctttccaaaccaaaccgggaggaga

SEQ ID NO: 508277 - DNA, 375 bp, Homo sapiens
tttcctggccagtgccttgctgttgatcgtcggcctcgcgattcgcctgggtgtgaacgagtcgccggagttcctcgaagacaaggctctggcggaaaaagcgcgagcgatcaagcagggccaagcccccgtgctggaagtgatgaagaccgcttggcgtccactgttgttgtgcattggcgccaatacgttgggaattccggcgtgtatttcaccaacaccttcatgattgcctacagcactcagcaacttaatctgccgcgctcgttgattctggaatgcctgttcttcgtcgccataattcagttctgcgttcagccgctggccgcctgggtggcggagaaggtcggcgctacacagtttctgtgcgccatg

SEQ ID NO: 508278 - DNA, 1051 bp, Homo sapiens
gggaaggtcctactacggactcctggatgaagttcgcaggccatcctttcaaggtgcttcctctcagggggaaacctctccttgcgatagtgcgtttcatatttcacacccgataacgagttctcttggctgttcaatgtgcaatactcatttaatttcccacgcgaagttatcataagcgccatgtgtgtttcccccccaacgtccatgtgtgaatccggcccacctcatcccggccttatgtccaaaatttacccttgctcgggcgcgatttcacgtgaggaatgtcctcttacttgccatgggacacccctaggcattatgcatgggaatatgtctcgtgggtagtttcgtttggcacaatgcgttaaaattggggttactctacacgcccccttgtgggcacttgtcacctaacccacatcttacggcaagcaagcgttttgcataagtatgcaacatgtctaagccgggtatgttctgtagcacagaactatcgtagccaaggccatttcgcactgactggcgcaatagcgcgaatctaaatctcgcctataatgccgaaagtttcaccttcgcggttctcgaccgccccaaatgcgaggtcttaggccgagattcgtttgacgtttgtaacttcgagagacagtgccttcgttcaaccttgttgttcctgttgatcatgcatgaactaacttgctcgactgtttcttcatttctcgttccttcaactagtgtcttcaacagggtctgtagtctagattcagaaatgtaacagttctacataatgatatagactcaccctgtgactgcgtgttatttacacgggcacagtagcaagtgtctcttgttttctgagatgaaacaatcggtattaatataaatgcgcttattaatcagcttttgtaatgacaggacaagaagatgtggcattagagtaggaaatatctttggaaatcgtgaaagatccacagtagtgaaatatttgggatcagaagccagaggtgtaaaagtggtcaatttcttggtttacggtcacttgtaatcggtt

SEQ ID NO: 508279 - DNA, 213 bp, Homo sapiens
cctggtcccacgtagaaccaggcacctctagcactcgcttgcttcatatctcgcggctctcacagaagacttcatttgaagagaggattgattctagtaagtagaagagaagaaaagtttggaggccatgggcctaaggtctgtgctctacatttatctaggaaagggacctgatagtctagggcggttggcggagggctaggagaaccggct

SEQ ID NO: 508280 - DNA, 192 bp, Homo sapiens
aatgcagcggactcggcactccgagaacttctcatgcttgcccaaggttgcgcaggcttgatatgcacacctagccgcagcccggtgcccaggttggatggggcaggtgaggatgtagcccatggtggaggggttccaacaatgaaactcaataggtcctttaggactttgcaaggaaggagttttccaaat

SEQ ID NO: 508281 - DNA, 261 bp, Homo sapiens
atcctaatagaggcaggtagaatagcatcttttctgcttttctgctaaggaacaaatgccagctaggcatagtggctcacgcctgtaatcccaacacttggggaggcagaggcgggcagatggctttgagctcaggagtttgagaccagcctgggcaaaatggcaacgcctgcttttttttttttttttttgggaaatcgggagttgggctcggcggcccagggtcgagattgcagggccaggatctccggcctcatatgt

SEQ ID NO: 508282 - DNA, 615 bp, Homo sapiens
tacgcctgtcaccctggtgcttgcaggaaggaggactgtggcatcctggacccatggtggggtgcggttggtgtgtcctggagcctcacagtccggcctcccgccctgctgcatccccatggatgccgctcccactcaggggaccgctacagtgcggtggctggccggggcctcaggcaccacatgcagtagccgcagccgcagcagcttggtccctcagcccggtcccgcagtcgcagcctgactcgcagccgcaggcatagccccagccccagccagagccgaaggccgaaggcgcaggccggcaggccatgatgccccttcggccaattcgacccggcaagaagacgaacgctgcaccacgggccggccggctgttccccttgcatgttggagccagaggaaaggcttgaaaaagagaccggaacccttgccggctggttcacacgaggaacatgggatgctgcccaaaaccccaaggcgttgacggccatccaggggcagaagcgctgaacacttgagggattgcagaaagggcgcctgaagcagcggcagatacaggggcgggattaaagcaagggcgggcacacggacacacgcttgattccagcagga

SEQ ID NO: 508283 - DNA, 238 bp, Homo sapiens
agtttagcgggctggctgaggagaggatccacttagaggtggatggatacctgagcgaagccagagccacaaaaggcattacagcgcatcttcccacattcgcagtgaattcatttccaaagaactgaaaaagaagcagcgctggatacatgccataccgagaggataatagaagttcagggtatgtgggaggacactagtaaagggtatagcatactgtcatagtccgcgtgtacgg

SEQ ID NO: 508284 - DNA, 291 bp, Homo sapiens
attctctacattaaaggacatactttctgagctgctgtgaataaatttggaatggtactgtatattttcatctaatggagaactagctgtactttgaataaggattgctgcactggacgactttagaacacccttcacaaattcgtcaacccggagccagaaccccccacggcctgaggcagattggcctggaccagacttggacgacctaggcccggcatcagcagggttcaaacggcaggccattggccaaggtccggtttttggggtttcaccttggtttctacctcc

SEQ ID NO: 508285 - DNA, 596 bp, Homo sapiens
ggggagaacatcatccccctgtttttcatgtgcacccccaaggtggatttccccaggaccaacttcagcatctccttgggcggatccagaaggccggcacggaggtggtcaaggctaaaaccggagcaggcttttccaccctttccatggggtatgccggggcccgctttgttttttcccttgtggatgcaatgaatggaaaggaaggggttgtggaatgttccttcgttaagtcccaggaaacggaatggacctacttttccccccccctgctgcttgggaaaaagggcatcgaaaaaaacctgggcatcggcaaagtttcctctttttaggagaaaatgtatttcggatgccatcccccagctgaaggcctccctcaaaaagggggaagattttgttaagacccttaaatgaaccccttttacggggggccccgttcccttaatttttgaaggcctcatgtccctgcaaaaccgttgcaaataaactttggtttttaatttgctttggggatgatttctgttttgacatcctcatcccctcccaattgggggggggtctgggggggcaccaataaaaaccgcccttttttttta

SEQ ID NO: 508286 - DNA, 150 bp, Homo sapiens
gagattagagaggactggtttatgtgtacacactttgtttaaaatatcactggactcttcttgccccaattgctcctagaacgtccctctgtcactccccttccgggccagcctagtccatctgcatcgccatgagcgtgcgcgttcggc

SEQ ID NO: 508287 - DNA, 106 bp, Homo sapiens
cgtctttgctttcagtgcctccagtgagaagcagggtttcctgttctgtccactcacgagtggactggctgagcttgctcttggagggaagatacttttattgtgt

SEQ ID NO: 508288 - DNA, 365 bp, Homo sapiens
attatgtaaatttgcatttcacctactgatttaatctgcttgaaggatttccttttacatttcttataataccagtgtgctagtgacaaatatttttagcttttgtatgtctgaaaaagtctttaatttgccttgctgcttgaataataatttaactgggcaaggattttgggtgatagttttcctcccgttttacttctaaggatattccttgtcttctgacttgcattgtttttcctgaaaaatctgctatcatccttttctttgtatataatgtcttccgtatatgtctttttctaatctctggtcacttgtaatgttttgctctttatctccggtttttatattgtgccgtggggtaggag

SEQ ID NO: 508289 - DNA, 311 bp, Homo sapiens
tccacaaaagccatctctctttattttccatccctgccgtccaaccagttggtgcaagctgaggataaggggttttggaaacggaaggcaaagcttctgggaacaaaccctccgtgaaaatggtctatgcaccctgctgaggctggttaaacttgaaaagcactgtgacaataacctctacagaacgtgaatgtgtcaaaagtgtcaagggtgcttcgtgctgatttccggccctcccgtgggggtgtcagttttccccatcagtccggtgcaagggtccggggactgtgcccaggggcagccggattctg

SEQ ID NO: 508290 - DNA, 568 bp, Homo sapiens
  misc_feature (455)..(455): n is a, c, g, or t
tcaacgctttatacttcaacagtaattaacaatttttaggggaagtacacaggtgtttaatagagatcctaacttggagttagagagattcaagcttttctacttctagatatgtgacaaggtcaggtaaggcaggtttcttggttgtcccctttggcactgtaaacagagttttcattcaccgtctgttggggtcttagcttcattcacgagtctcctgttacagctggtgcctgcctgaggtagggaagtcgatcttctaccccttgcacaatcattaagggagaaagctccaagtgtccattctttggtaagaatcatgagggaaaaaaaagggcttccgcacttctctctcagtattcctgcttttatttcattttttgaccttggtggaatccttttcatgtctgtttatcaaaagatactaaccttatccatcatttttcttcattttngtgatttcaatttggaggataaccacagaaattaccttctggtatacataaatctagaattaatatagtggcgtcattaccaaaagtcagaaaacttctaagtacagagaaga

SEQ ID NO: 508291 - DNA, 898 bp, Homo sapiens
  misc_feature (1)..(1): n is a, c, g, or t
  misc_feature (3)..(3): n is a, c, g, or t
nanatgataggagctgaggtggggagggcaaaagaaaggacagcataatttatgaatgatctgcgatgttcccatcttggtgttaaaactttctggaagttgtcctaccgctgcgtgaattggtgttggttaaagtatttcccggggtccaagtgtgctctcaacaactgtgagaaagttacccgaggagatatgagctcaccaaatggttcgaggtttaccagacgacgcgacaatgctagtacattaaacggttttccgctaacgaatttaggactaacgccgccgtcccctgaaattttgtcctcttccaaaggcctccttctgtaacccgcacatcaaatcattgtccccccccccccgtttgtattaatgcattgtctcccaagtcagaaagtgaatcaaacatctagtcttataattgccaaccacccaaaggtggaatgtcttccccccacacacccccagctgcgctcacaaacttttatgagagtccccacccctcctcttgaacattatcgcggttctctagaggagaaaacacaaaatttttccaccaccacttactatcagaaagaggttcttagatcctatttcaacctggagccccatctctgcaaaggccccgtgggtacatacaaaatattcttcattctgtccttttcgcagccaccaaaaggtccccagttatttctattatacatgccccccgtacaacaccagtggtggaatcactatgcggccccacaaagaattccccgtcaccttttatgtcgaccacacatcatccgcttctgaaatggcaccgtttgtgtcccttagacacgccacacacccaacgcatgtttgccccgtgccaaaacaaaaacaaaaacaaccctttttggaaaacaaaaca

SEQ ID NO: 508292 - DNA, 196 bp, Homo sapiens
catctgtgatggcttgaagaaacagtgtaaaccggccgtgtaaacaagagtagggcatttataagtagttgagaatggagaataggagtatgaccagacagaagatagtaggtgatgactagttttttggggctcggcctaagtggtggttcgggttggagtgctggttccagctggatgtgctggtttggggtgg

SEQ ID NO: 508293 - DNA, 838 bp, Homo sapiens
gtcacggaagaacgctcgacctctctatatgtaatctccctacaaatgtccttaataataacattcagagccatggaactaatcagatccaatgtctgcttcgaaaccgcacttatccccaccttgggtatgagtcaccccgatgaggccaaccagccagaacgccctgaagcgcaggcaccatatcggcctaattctacacccttagtaggctccgcttaccccgttacctgcattcgacattctgatattcaagactcacagacaccccttagggctgcagtaacacgattgctacataactacaactctcgaactgctccaatgaactatctaatagctccctgaggccaacgaacttaattatgactagtcttacacaaatagctgttagatagttaaagataccgtcttatacggatctcgcagttatgagctccctacaagcccatgtcgaagcccccatcgcatgggtcagaaaagtagcttgcggagagctatctcgtatagaaggactaggcgggtatgggataatacgcctcacactcataactcgatcccctgagagaagcacatagcctaccccttcctgtgtgactatcccgtatgaggcataattgataacagggctcgatctgcgtacgacaagatagacctaaaagcgctcatggataactcgtcaatcaggcagatagccctcgtagtgacagccatctcatgcagagccccctgaagcttaacgggcaagtcctgctcgataatcgccacgggcttcattcgcattacaatttgctaggagatcaatacgaagcccggaggggaaaaaccccctcagggc

SEQ ID NO: 508294 - DNA, 207 bp, Homo sapiens
aagccctgtctcatccgctacccaacagtctggacaccaccagctgggcatggaggggtcctggagtactcaaagtcctctcgctcacagcctctcagccctgcagcattgtggatgtggagtaccttcctgtgtatcacctcctcctcagggcagcgctaggggcctccctatgcctaagcccaatcttgctccgtttgattagta

SEQ ID NO: 508295 - DNA, 242 bp, Homo sapiens
ttaaaaactaatccttcccttttcccctttttttttgtaaaagagtttgattttgttttgagcctggaggaaaaggaacccagttaacttagatactgctgctggaatgggcgagacattgctgcaaaaaagtccagcttttttcaaacaaaaggtgtgagggggcctgcttggtatgcttacctgggcttgtgtaccccagtggtttttgtgtacttttttccataaaatatcaaagttga

SEQ ID NO: 508296 - DNA, 697 bp, Homo sapiens
  misc_feature (518)..(518): n is a, c, g, or t
gcagacccgccgccatgacgctgcgcgcggccgtcttcgatccttacggggtgctggcgctgccagcggtgttcggcgtcctcgtgccgcacggaggaggccctggcgctgcccagaggacttctgaatgatgctttccagaaagggggaccagaagggtgccactacccggcttatgaaaggagagtatcacacgtttcccagtggcataccgactcatgggaagaaaactgccgtgaagttgctccgtagtaccgcttaaagttctgcctccccaaggcctttctcgcatgaaagaacatctttgacaaggtcgtatttcagcctagaaagatcaactcgcctccatgctccaggtcagctctcatgctcaggaagaaaggattcacctactgccatcctcaccaacatcctggctggtgcgaccgtgctgagagagcatggcctggcccagctgactgtgtgagctgcaagatgcactttgacgttcctgatacgtagtcgtgtcaggtgggaantggtcaaaacctgcaacctcagatctacagagtttcgtgcgtggacatccctgaaggccagcgcccagtgaggtcgtttgtttcggctcacatcggggctaatctgaagccagccgtgacttgggaatggtcaccatcctggtcccaggagactgacacggcctgaaagaactggagaa

SEQ ID NO: 508297 - DNA, 759 bp, Homo sapiens
gaaaattttagtaatttaataaaaggatcatgtttatttaagaaactgacttctccagagtaattttgttaagcacatacatgtttattgaagtggactaatttctataatgcaaatcagagttaaatattaaagaatggtgtaagatacaagttgacataggaattacattacaatattaggaagaaacaaggacaaatttagacgcttgaatcctgaagagataaagctttacttgacgtttccgaaatggagagatgatgaaaagccactcattcagtcgtttcagaacgaaaaagacatgtcatctgagtaagagtagtgacatggagtgaaatgccctacaggggcctgtggacatctttaatttcgtgcgattatgtgaagatgaggtggacatctacagataatggagcatgaatgccgaagcattagtaaaaggaatccctaagttcttccacatagaattagaaacatgtgaacgtgcaagtaaacttcttgtgcaaattaccatgcatcagagagcttcccattgtgcatctagaccttgaattcatattgtattgatcaatgttctaagtttgtatgtatattgcgtgcatattcaccaataacagttaataattaatttatgtgttagtagttaatagtatgcagcctatccttcttccgttcatgtgcatcagtaaatgtgtcattttggtcatttctccaacagagagtgtcgagggtttgacccatgtagttcgttccttgata

SEQ ID NO: 508298 - DNA, 1468 bp, Homo sapiens
ctccgctgaatacgcccgcgcgtcgccgcgtcgtcgccgcccccgtccggccccctgggttcctcagccagccctgtccagcccggttccgggaggatgaagttcgtgtaccagaagagcatccgttcgagaagcgcctgttctgagggcgagacagatccgaatgaaatacccggacctgggtgccggtgatagtcacgaaaatggctcccaatgctcggatagtgagactggactataagagataccgtggtgccttctgatctcacagattggtcagtactacttcttgatccggtgaagcgaattcgtctccgagcctgaggattgccattgtattccttattgtccgaactaatgtcagttccacaccatacaggtgctcactaatgggatcacgtcttgtaacctattgaagcactcaattgacagaaggactatcatttactcgtaccattgccttaccagttgatcggagaagggtgtcatacgagttctgctgaaagccttgcatgcgcacctggagcatgtgagggagggtcctcgattcttactaaatgagacgagggtggagccgccacgtattactttgaggctctctcctcccaatcaaggctcgagacaactcaaacgtccgcattaaatttcaagtgaacccctgtggaacattttcttttaagactggtttagcggtagcggcgtttgtacattcgttcgccattgacacttactccgattagaagaacgcagagtgatacagctcagtatcgcgacggatattgcggcacattcgtatgtttaaaagttcagtacactatttatccgtccctgtactacttatccgcccgtatattatccatgcacactgtccatattccccgaaatatccgttgacttagttaagaaccatatccttatggacgattaggatcctaccggttaccttagtgtggattaatagtatttcgcaagtttgtgacatattgcaacatagtgggtaactagcgtgggatgacccccgttatacttgaatcattggacctcataaaggaggggctatacaagagataactcacctaaaagaaagatcacgtatataccattattctagcgtaagcccatatctatatatattaaatggtgggtacggcattaggttcaagtgaaatagtggtgagcttgacagacgttagtggttggcagtgacggaaaaggtggaatagaagtaggggagcagaagatcgaaagttttaaagtaagtggtatagaacgcagagcatctagggctgtgtgaataaacgaagatatagataagctatagaagaatggaacaacgaataatagtgtgtaggagccagtcgaggatacagtatatagtactcgatatatgtaaggtatgcagaatatatgttatagctgtttataacaaggactgattcttgattagcgaatgtagtgttggtgcaca

SEQ ID NO: 508299 - DNA, 155 bp, Homo sapiens
agcggggaacaatcacttccagaacagtcgttaacagaaaatagtattcttgctcagtttgcaggtgaagacccagtggtagcttgggaagctgttggcagtttgaagacacccgggaatccatgcacgcatttggtgtgggccagtattgggag

SEQ ID NO: 508300 - DNA, 147 bp, Homo sapiens
agctcttgcccttattggtgctacatttctagaccggggagacagacagcaggcaaatcattaatagatactatgtgccagatagtgataaatgccatgaaaaccataaatgagagacgttcacctggagcaaagatactttacgtg

SEQ ID NO: 508301 - DNA, 168 bp, Homo sapiens
gaatatcagcgatgacgtggtggtatgcaagctggggtctcgagaggctcgaggtaggctgagagtggaggatcccaggagcccaggagttcgaggctgcaagggagctatgatcacatgactgcattcctgtctgggcaacagagtgagaccctgtgtctttattct

SEQ ID NO: 508302 - DNA, 1147 bp, Homo sapiens
gaaacgaatgcatcagatcatcagaatgaaccccaggttaggcctgaaagacctgcaggttctagatgtaatgagctatgcacgtcttattttcaaagagcatcgttagacttatgagagttcatttacgcagcacagaagggcggatgcgatgctgacgctcatcatgcggatacatggattgacccatctgcaatggattttgtcacctctgctgtaaacctcaggatgcatattttcagtatgaattattaagcagtagatttgatatcgagtcaaatggctgggaacgattattcctgcttattgcctacatatctatactgctaggtaattgctggcgttgatcagttattggaagtgcattgaaatcattatctacagagaaacctggaaccagtagccgatgatgatgacgaagatctactgcagttcgacaccaacggtgtgaataaggaacgtttcgtgtggctttcgtatagatagcactagagatcaactccacaaaaaccaccacagctgattatcgttcatcgtagactcgatccaccgtcagacaagtgtcgagacgctgctggcctccgagattttacctattaagtctatacttggttgggtctacgctttcgctgagggatcacagtatcatgtgcacaaatcacattgacttcatgcttgaatgctcaagaacgagccaagcatgaacgcgagaagttgaacacgcaatgcgaggaaacgcggcaacttgaaatcccgtaatatcacttgtcactccgtacagccacgagtgcagcaagagcgagcattaggcatacaatatacttccaaggcagaattgaacaggtttaggtcagaacggacactttggtttgggacgccattgtcaaggcactagactagcggcgaaaagggaaggttcctttatgccagcacgtctctggacatgcgacactctgggtacagcttcaacgaaagaggtacttacagttaacataatcatttctgtgggaataccacacacaaattacgccattgtccactctttagccgtcgacaaacgcaccctttcagtctgaaggcttggcatctggccaaagaccattagcagaagaaagtttaggatcgcgacatgcgttgaggacaccag

SEQ ID NO: 508303 - DNA, 476 bp, Homo sapiens
ggatatctgataccagtttgagctcttagctattgtgtgttcagatatgttaaagccacttatcgtagtctattttgtgtcacactggagttttttacaacctcaggtgagtttaacgctttattaggggacgggggtagatctacaaacactctattacgctcggcttctattgcacttgcggttaatcgtcgtgaccgcggatggctgtgcacgcagattgaccaacccctggaggttacagtataggcttagtataacactttcgatttatgtgctaacaggttaatcactgactgtttcccagtgggagatgtggctagagctcaagcgttttgcagctagcattgcgtgcgtgctatgatgcttgtcccttattgatcgtggtgatttagagggtgaactcactggaacggggatgcttgcatgtgtaatcttactaagagctaatagaaaggccagaaccacaaatatcg

SEQ ID NO: 508304 - DNA, 134 bp, Homo sapiens
gtggattgctccttgacgacgccagcatgagctccttctccaccaccaccgtggagcttcctccttatactggcaattccaggctcctaggtcaagaccagagctaatcccatgtacaatggcgtgtccaacgg

SEQ ID NO: 508305 - DNA, 853 bp, Homo sapiens
gaagctccttggccctcctaaagctgaagccaaagcgatggctttacaaggccaagaaggcagctgttgataaggtgtccacagtcaccaacatagaagaatatccgctactgtcatccaccttccggcggacgaagtacactgcgactccggacgacagtccaaatatcctcggaatgagcagctcccaggagaaacaagcttgaccactatgctatcatcaaggtttccgctgaccactgagtctgccatgaagaagatagaatgacaacagacacagcttgtgtgcactagtggcatgttaatagccaacaagtcaccacgatttaacacacggctgtgaccgaaggctgtatgacattcgatgtggccaaaggatcatccacccatgattcggcctgactggagagaagtaaggcagtatgttcgactggctcctgataacgatgcttgtggagtgattgccaacgaaaattgggagtcatctaaagctgagtccagctgcctaattgctgaatagtctagtatcatatatatcctggtcaacaacagtatagcatgcgctgctcgtgtcgacattaccgtggtcaagggctagggagagccacaatacacgagacccttgaccattgacaggccctttgggacaagaactccttgactctagtttatacctatatgaaatacgcctcgaccacttgcacagcatccagccatgttattgcatcagttccaatcacgaatctacagaagaactacaagcttccgaggtccatagggaaaaaaccaggacaatccagcaactaggacataccagggggaggaagcacatccaggcatggtgggagtacac

SEQ ID NO: 508306 - DNA, 352 bp, Homo sapiens
ccgtacgactggagagcagatcttttccgcgtctcaggtctgaaggatttctaggaaaattaacatatgccaaggcccccatgtggggaagggaggggtttctgggtaattgtctctttttttcttctttcttgagacagggtctcgctgtgtcgcccaggctgaagtgcaatggtgtgatcatagctcactgtagcctcgacctccagggctcagcctcccaagtagctgggtctacaggcgcgcaccaccacgcctggctagtttttaaatttcttgtagagatgggtcttgctgtgttgcccaggctggtctttaacgtctaggctcaagctcaagctcttgccttgcc

SEQ ID NO: 508307 - DNA, 204 bp, Homo sapiens
  misc_feature (171)..(171): n is a, c, g, or t
gcctagcacttccatgcacagctctgcttttctgtcagctcacaatgctgctcagcgcacagcagtacaggcgagcattatctgcacaacttacactgccaaacttctcaagctactaattatactgtggctcctgctctcaacctggaatggtccaacgcaacctgtggnctatcaaccaagaccaggtttacttcacttcct

SEQ ID NO: 508308 - DNA, 108 bp, Homo sapiens
  misc_feature (18)..(18): n is a, c, g, or t
tggcagctatcgggttanttttgttggtttagaatcccaccattcctggctccctgtcctccaatgtagacatatcacctctggctttgcagaagaaacctgagcttg

SEQ ID NO: 508309 - DNA, 306 bp, Homo sapiens
  misc_feature (21)..(21): n is a, c, g, or t
  misc_feature (158)..(159): n is a, c, g, or t
cgtagccgcgcaccggggganaaaaaataggcaatgagaggttctgtcttttgagaagatgggggaaattagaatgaagaagtgagtaactttactcatgttagtaacttactgctaaagatgacatatcaggaactgcaaggagagccaacagtggnncaactgcaccgtacttaataaccaagtctcggaacactgagccatcacctgaaaaaaaaggcaagattaattctatttttttttgtttagtgagacggagtttttctttgtcgcccagcttggagtgcaggggcgcgatctcgtttc

SEQ ID NO: 508310 - DNA, 916 bp, Homo sapiens
gctgcagcccccctcgccctgagccagagcaccccgggtcctgccagaccctcacactcccagcaaaatgggcaaggagaagacccacatcaacatcgtggtcatctggccacgtggactcctggaaagtccaccaccacgggccacctcatctacaaatgctggaggtatttgacaaaacggaccattgagaacgttctgaagaatggaggccggctgaggatggggaacggtgatccttcaagtatgcctgtgggtgctggacaagctgaatgtgcggaagctgtgagcgcggcatcaccatccgacatctccctctggaagttcgagaccaccaagtactaacatcaccatcatcgatgcccccgtgcaccgcgactacatcaacgaacatgatcacggtgtacatcccaagtgcggacttgctgcaacgtgctgatcgtggctggcgggcgtgggcgagtacgaggcgggcatctccaagaatgggcatgacgcgggagcatgccctgctggcctacactgctgggtgtgaaacgcatgctcatcgtgcgctgtgaacaacatggactccacagacgcctggcctacagcgagaacgcgctacgacagaagatcgtcacaggagagtcacgcgccctacatccagaaagaatcggctacaaacccagggccagcctgttgaccatattgtagccccatctccggcttgcacactggttgacaaacaattgctagaagccctcacacaaaatgccgtggttcacagggctgcaaaggtcgatcctctacagatggcaagccaagcgcggtgtactgctgcagcctgaagcaatactgacccaatgcccaaggacaaccccagaccacgcaaaagccttacacactgcgatgcaccaccatcccgacgcaacaa

SEQ ID NO: 508311 - DNA, 111 bp, Homo sapiens
gagatccctcccaagatgagaaactgcccaaggatgagaatatagccgcctcaagccacctccgtattactgtttctgacttcacggatcccccaattcctcatccttggg

SEQ ID NO: 508312 - DNA, 413 bp, Homo sapiens
  misc_feature (11)..(11): n is a, c, g, or t
  misc_feature (302)..(302): n is a, c, g, or t
gcggtcgccgngcgtacccttgcaccgagagtcgcgtttttggccgcgatttgcgtgccgtagcagttttgcgcccgcttctttttacagtatgcatatcgctatggatatccatattgatattgcaatcatattcattggcattttaatatgcgtatggtgtcgattgcgatatcgacattttgcagcgagggctgtatccatcgccgcctgtataggagcgcatcatgccagcaatctcagtggccaatcccaagggcggtgcggcaagaccacgttgacgctggtgctccgccagcganttggccggaggcgcccgcgggtcacccgtgaatcgacgccgaacccaatgcgattcatcgccggctggggcgcaagcgccaatgagcagggcaaggccttgcgtttcgaca

SEQ ID NO: 508313 - DNA, 659 bp, Homo sapiens
tgctcagagcagtgtaggccgcgccacctgcgtggcctggcctggagcgggcagccccagtgccccctccccgtgtgcaccctgtgttcatgcaacgcctggtgtgcctggtgacccagcatgtctccccctgccgcctgccgcctgccatgccatttaaatccatggcaagtggccaatctatctactactgaagtgccggactcgctatgtgcttgctgcgtaccggcaggccacggccgtgccgacaccgagtaaggcaccccctggcagagaccatcacccagaggcactgacgcaccacacccgcaccgggcgagactcgggtccgaagcgacgtcacgagaggagccaaacaggacgcagcccgcgcagcatcacgaacagtttcgcgctcaacaggatagccctttgggaaggacccaatctgcggccgccagccccctcccgggcgctcactagggtaggcacccgggctagttcggggcacacactggcgcagcaccccaatctcctcgaagggaccgccaatcgctacgcaagctgccacataacacccacccataaaccactgctctaatctcgtcatcataataaatcggcgcacgaccgaaaataactaagcacctcaactgctatcgaagatagctaggccaagt

SEQ ID NO: 508314 - DNA, 165 bp, Homo sapiens
acccgagtcgtgaatggcatatgctgcctgtgaagaccagcggataaagcccctgacacacagtaggtcctcagtatccatgggccattcaacgccacgggccattcaacgcctccgggccattcaacgcctccgggccattcaacgcctccgggccattcaacg

SEQ ID NO: 508315 - DNA, 411 bp, Homo sapiens
tatttcaacgtgctctatgaccgcgatgcccagggtggcgagttgttccacgtctacacggagccgttcggtgaccgctttttcttcgagatcctgcaacgtaagaagggttatgtcggctatggcgcggccaaagtagcggtgcgactggccgcgatggccaagtcccgtagaggtgccgcgcgccaggccaggctctgaatgagacttccttccgggagacgctcagcccataatcgggcgactccaacgcggtcgtgagcccagaatgacgaatttcgccgatgccggtgcacctcaacccctcgaagcacggcacaaaggccgaaaaaacagcccggaacaaacccgcaaggacatcctccaggcagccattgtcgagtttgtcagcctgggtttgtccggtgcgcg

SEQ ID NO: 508316 - DNA, 184 bp, Homo sapiens
ggtgggaggggagcgcttggatgtctactatgttgagcacctctgcaatgttcttttttctttttttgacagaatttcactctttttgcccaggctggagtgcaacggcgcgatcctggctcaccgcaacctccgcctcccaggttcaagcgactctcctgcctcagcctcccgagtagctggg

SEQ ID NO: 508317 - DNA, 354 bp, Homo sapiens
agagttccagcgatctcattacagtctctattcctatccgtacaactctccaatgtcattgtattgcaacatgcatctcgaccagtaatatctctgcgtaattactagtccccacaatctcagtgatcattttcacaagacttatacccacagtaatcctgccaatggtattcaaattccagacttggaaataccgtggcctttatgtgacccatttgagatttacattgaaactccagtggtttataccatgccccagttgcgcatagccggaggttgtgaacgctcgaatgcacacggccgaatctagctccgtgtgttcccgtattgtctttagcgcacaaggcatatact

SEQ ID NO: 508318 - DNA, 637 bp, Homo sapiens
agggaattaaaaaaaggtttgttgagcggggccattaatgggaggaagtttggaaatcctgggtctgaaagccactaaagtacaaaggcaagtgaaagaaatgaaaagccccactgaacaaaggtatcaatattggggcatgatatggttagaagaagaatttttcaaatcacttgaacaaaagtgaaatgcagagcaaaagggccaccagcaggattaaattacattgggaataaaatcatgtggccaattgtcatagccacagatgcgagagaataccacactcatgccaggtgtagcagacaacaccattgtctgtattagccgtgtagaggccgctgtagtatgcgccattcaggtatgcagagtgacacctgttaaacaaccagccagcctgatctatttgtgggcagtgcccctcatagtagcagggaaatgtgagcacggagatgaatttcatcacttggagaaagcacaccacaagggtaataggaagaaaattccacgcaagggaatcttcacgcgctcacacaatctctctctatcactctctcgcactaactctctctatctcactctctctctctctctctctgtctctctctctaactacatcccctggtgcggaatcctgcag

SEQ ID NO: 508319 - DNA, 519 bp, Homo sapiens
  misc_feature (66)..(66): n is a, c, g, or t
  misc_feature (72)..(72): n is a, c, g, or t
  misc_feature (353)..(353): n is a, c, g, or t
attcgcggccgcgtcgaccttgaggatcgccgactcggtgcgatcatccccatccttggcgcggcnttcgcntgggcgatccagatcgactggcagtcattgcgaatcgaatggttgatgtacgccgacagcagttgataagccgccatcttctctttgcgcccggtaatcgagcggtgcacgatgaaactcttgttcaggcgcatcaggtcgctgacaaacggcttttgcagcaggttgtcaccgatggcgatacgtggcgtgggcaggccggcgtggtacacgcgtagttgacgaaggccgggtccatcacgatgtcgcggtggttggccaggaacaggtaggcgctgcgnacttgaactgctcgacgccggtataagtcaccccgtcggtcgcgcgctcgatggtgtggtcgacgtaaaactcgacttttgtcctgtagcgtggccacggtggtgaccccggcgaactcacggcgcagtttatgggcgatcattggcttgagccgccaacccgaag

SEQ ID NO: 508320 - DNA, 436 bp, Homo sapiens
tacgaatcgagctggtaccgaacgggtgatgcggtggtagagtgcggcatattcatatcacaagctaggagggttttgtgtccgggattcaagggcgcaggcttgacgcgtgtagcaccgatttctttcatgttgtgggttctgggagcccagagggcagccatagtgtgccgactccgtggaggaagtaaagaaacagacccgcttcttgccgcagccccaccagcctaaggtgttcaggaaggccggacgcgcctcctctgtcctcgccgtcacaccggaccatgtcatgtcctgcttgtcacgtccaccggacctggcgtcttggccttcggcagctggtgggcacgtccaccccagctggagacctggcctcgtctccagcccgaacgctgaggcaccgatcccggctccgtcgccaaccgcatcacccgtt

SEQ ID NO: 508321 - DNA, 188 bp, Homo sapiens
  misc_feature (17)..(17): n is a, c, g, or t
  misc_feature (31)..(31): n is a, c, g, or t
ccccgtctcctacaaancaaccaaaaccaanaaaaaaattagccaggcctggtagtgcatgccccgtagttctacgtactcaggaggctaaggtgggaggattgcttgagtccaggatgtcgaggctatagtgagccataatcatgccaccgcacttcagcctgggcaacagagtgaggccttgtctt

SEQ ID NO: 508322 - DNA, 426 bp, Homo sapiens
ggctgtgttatgatttaccgcccagtgggcctcttccagtgcgtggaccgcagcacccatcctgactgtgccttaagagatcgcggcagccgctactcaaagaaagcccccaggtctttatacagaacaaggggcgggtcttatcattcccctctctctggtgctggcttccaggactcgactgtgactggaaactgtgttgctctggccctcctcctgccctgcagcctccccttgcagtcatcgttcgtgttctgtgtatcccagatgattctgttatctaaagacgctttttgctgggaaaacggtgtcctgcggtggtatttcaatgcggcatgtgttcaggatttcgggcgcaagggattagttctatttcgcgggttgaaaatgctgcgttgggattggggcaagttattttcttgtttg

SEQ ID NO: 508323 - DNA, 261 bp, Homo sapiens
gtcggactttttgttttgttttttacgacaggccactgatctacaaaaattttaaaatgagccgggcgcggtgactcacgcctgtaatcccagcactttgggaggccaaagcaggcggatcatgaggtcaggagatcaagaccatcctggctaacacggtgaaacccgtctctactaaaaatacaaaaaattagccgggtgtggtggcgggcacctgtagtcccagctactcgggaggctgaggcaggagaatggcgtgaa

SEQ ID NO: 508324 - DNA, 265 bp, Homo sapiens
tggagaacataagcaattttattcagactacagtatttcctttaacactatatggttgtcaaaacaccattcccagtttctttgcttttgacagctgagtctttcttaaatatacccaaatcggaactctttacactaaatagtaaacccgagataggagcaagtgccttccggggtggtgtaaaaaaagcattataaaaattggacaaatctatcacttctctgtgttatcatggggttgggggtgggggagagcaaggtaatg

SEQ ID NO: 508325 - DNA, 187 bp, Homo sapiens
ctatcggcccgggtaggtacagctgaagggcttgactgcacacacacagggtgacctgcctgaagctcaccacaatgtacctgctttaagactgagagatgctgggtgggcatagtgggtcacgtttgttatccctacacttttgggaggctgaggtgggtggatcgcttaaagtcaggagttcctg

SEQ ID NO: 508326 - DNA, 294 bp, Homo sapiens
ctgcagtccgactctacagtgatccccaatgcagcggactctgctacataccctacatagccagaaagtagagtgggggccactattcaagcattcttgagagtaaatagaattttcaacccagaatttcatatcctgtcaaactaagcttcattacttaaggagaaataacaatactttgatatacaggttaatgctgagatatattgtcaccacccggcctgcccttaaatatctcctcaaggacgtgctagacatggaaaggaacaaccggtgccgagtccgttgcatttc

SEQ ID NO: 508327 - DNA, 191 bp, Homo sapiens
cttaactgcaccttgtgaatggtagtataggtcttcatacagttcaggctctagaaggtgacaaatcagccaattggattcgaaacaaagaagactatagtaaaactcacccatcacacttaggagactactcactggattggaagtaatatagtattagcagctaaatcctgatatgaaagcagagatgt

SEQ ID NO: 508328 - DNA, 455 bp, Homo sapiens
tcacgcccacagactgacgagtatgacctgccacccaatcaggcctgtcagggtaggggatgtcacttgtgtgagtgcttgtccctggcttaaattctcttccaatgtgttaaagattagggagttatggaaagagaggtagtggagagaccgtgcttaaaaaaaaaaaaaaaaagtcttctaaaatacaaatgaaatatatctttgcctctatagctacgacctttaaattttttattctgaacgtggggctcttatgatcatgatgctgtaggaccgaacggttctgtgtctctgatctttgtccttggtgctgtgccttgagagaagctggatggatacagcggtcttccctgggcgtcaggacgtgaacctggctcctgcatctgatctctacctttctgtataagtctcatgtctcttaagagactttggcctgtatagatggctgactg

SEQ ID NO: 508329 - DNA, 156 bp, Homo sapiens
cccgcccgaggtagacatgagtgaccgggcatctccaacatgctggatgtcaacggcctctttaccttatcccatatcacacaacttgtcctagccataacacgctaacaatggtgccaccgaacatcggagaacttgaggatttggagtcttact

SEQ ID NO: 508330 - DNA, 166 bp, Homo sapiens
cgagcagtagcccagacaatctcatatgaagtcagcctagccagcattctacgatcaacattagtaataagtggctcctgtaacctctccacccttatcacaacgcaagaacagctctgattactcctgccatcatgacccttggacataatatgatttatctcca

SEQ ID NO: 508331 - DNA, 201 bp, Homo sapiens
gaaggatcaaggacggatgatgaggtagtacagagagaggaggaggctattacagtttggatggattaaatgacatacacacataggagaccttagagagatgtcggaaaagtttgccttccatgccgaaggttaaccagagtgatgaaccttatcatcaacttcattgtataaaaataatgagattttcctaagagacct

SEQ ID NO: 508332 - DNA, 196 bp, Homo sapiens
ggacagatgttttgaattgtagcaatcgatatttccaaactatttggagaagtgaaagcacgtgatagagtatagtattaagtaggtctcaatatcgatgtatgtcactagacatcctagagtcgaaactagcagtggatagatcgcatgtagctctgttattcagtctgtggcactcatatttcacagaagattg

SEQ ID NO: 508333 - DNA, 410 bp, Homo sapiens
cttctgcctcccactcacctccacccgttcatgcaactgtagttttcttagcccctgaaaccgggttgggctgccgcaggggccatcaggctgtgagggacggtgacgcggacaacagagcaagactccgtctcaaaaaaaaaaaaaaaaagttttcttcagattgtcaaattctgacttgaaacagttatcataagctgagcctggtggttcacacctgtaatcccagcactttgggagactgaggtgggagaatcgcttgggtccagtagcgagaccttgtctcaaaaacaaatcaaacaaacaaaacacaaaaacacaaccacaaaaagcaaacaacacccccctaaaacccaaagaaaaagaaatggtaactacctgggtgacagagcaatactccatctcgaaga

SEQ ID NO: 508334 - DNA, 548 bp, Homo sapiens
  misc_feature (165)..(165): n is a, c, g, or t
  misc_feature (548)..(548): n is a, c, g, or t
ttaccgacaagactgtgaaactttcgggatggtggtgaaaatgctgattgaaaaagatccttcattagaaaagtctatacagtttgcattgaggcagaatttacatgaaataggtgagcggtagagtgaagaactcaagcatttcattgcagagtatgatacttncactcaagattttggagagcctttgtagatttttctgctcaggctaaaaaaaataaaaacagtttctataaattttttttcctggattgtgtaaatccttaatatatggaagtttttgcgatgcatagaaatactttttgatagtctgaaacatttgagtatataataaccatctaaaataccccgtttaaaatgtctgattcgaatttttgaattttgttgagaaagggggttcaccatgttggccagtctattttctaacatcctggcctgaagagaacctgcctgcctgagcctttcatagcggtgagattaaaggcaggagccaccccggcccatctgtccctctgggttatacctttcggaacgagattaactaaatn

SEQ ID NO: 508335 - DNA, 246 bp, Homo sapiens
agcccgggcttggtttcgggcatccctcctattacgtcgccagatacaaccagataagcatcattaaggaaagaccagagggtcaccaggttaagagccagtgctacaacactccacaagcgagaggcggagacgggtgagagaaagagagagaaagagggagagggcgagagagagaggagacagagcgagacagagagagagagagagaacgagagagagactctcactgggtaaagaccgtcg

SEQ ID NO: 508336 - DNA, 697 bp, Homo sapiens
tactctcataaccctcaacacccagctccctcttagccaatattgtgcccattgccaggtactagtctttgccgcctgcgaagcagcggtgggcctagccctactagatctccaatcgtccaacacatatggcctagactacgtacataacctaaaccatactccagatgcttaaagaagctaatcgtcccaacaattatattactaccagctgacatgactttccaaaaaacacataatgtgaatcaacacaaccacccacagcctaattattagcatcatccctctactagttttttaaccaaatcaacaacagacctatttgggctgttccccgaagcttttcctccgaccccgctaacaacccctcactcctaatactaagctacctgacgtcctacccctcgacaatcatggcaagccagggccacttatccggtgaaccactatcacgatagaatagaaagagtacttacgcgaaaaggtctgtggggccggactagaccctaagaggaagccattatagcaccccatctggggggcggcgcccatggataaagggacacagtggccacaaagggcccccaaggaacgtggtcaaagcagcgggtttcccaacaagaaaaaccccggggccagagcgttcggacacgcagaggggttggagcgcaggacaagaacgggcccagacgcatta

SEQ ID NO: 508337 - DNA, 304 bp, Homo sapiens
gccaaggccaaaaagtttttttcccctttccttaaaattttagttccaaaagaaaagaaaggggcccctggaccataaaaaccccccgggggacgggaacccccccaattttttttccgggttgggtaaaccccccgggccccagtaaaatttcgaaggcgtaaaaaaaggggggttttccccttttgggccccccccccaaagggaactaatttaaacccttcattttttggcccggggacagcaatttttggtttgggaatttaaaaaaactgggctttgtccagtatttttacataaaagg

SEQ ID NO: 508338 - DNA, 1373 bp, Homo sapiens
  misc_feature (1207)..(1207): n is a, c, g, or t
  misc_feature (1218)..(1218): n is a, c, g, or t
  misc_feature (1235)..(1235): n is a, c, g, or t
  misc_feature (1243)..(1243): n is a, c, g, or t
  misc_feature (1255)..(1255): n is a, c, g, or t
cttgtgttagtctatagtatttacaaatccgtgtcctacctgcttcttggatgttttctaccccgtgtgtcgggagggagatccttactactcaaatgacgacgccgtggtgagcacatctcaagagtttttcctttgtgcactttatgtgaatccctttatggggtcatacgagagagtcctattctttcacaagatgttgctttgtgcagaacacccactttggtgattcaacaaccgcggtgggcgcctccgggttctcaaataaccaagggggattatctcgaaaggctgtcgacaacatgtcgtgttctcaaccacggaaggttttacagtgcccctttcttctctcctatatggagtacttcgggaatatctcctgccaaagggtcccacgcgcccttcgacgggcaaagacgggttgtttataaacgggggcctttgtccgtgattttcttccccccaccttggggaggccacctgctcttgggaatgacacgcccaaaaggagtttttgtcaaacccgggtttcaaaagggctgttgttgtttccccccagaaggcaactgggaatggaccccttgggggttcccccacggggcgtttcaaccttggaaattctccccactttgagaggaatttttctcaacacaacaccggtttctacatgagagcctcgtagttttgagagcccaggttgggagaaaaaacacgaacccttctcgtgggccccgaaacctagcttggcgctccccctctgcacaagagccccgagggcacccctccccgaactgacaccctctcgtgggtgtcttaaacaccgacggctagctacacacactccgggggtaacctcgcacaggcgccgagagaggcacaagttttctttcgggagcacctcttcattccgagttggttggagcggcagctcttctcacaaggagatttttttgcccacccacaggaaggtgggagagcccactatgtggccacacagagagagaggcggagccacacataccacacatatcacttgcgctggcccacaggccctccacgggtggtgccacacccacggtgggaggaaacactggagccccggcgagagggcggcacccacccacaaccgcaacatattttccccgagagggctcccgagagcccaaggtttaccttttttaccggcctggacactacgatatccttnacaaatagggntgggtccagcccgctgntgccctgntgcccccctttnccaggcgctaaacatgtacaaaggtttttttgtggttgtaaatggtcctatttcaccccctttttcctgtcacatgaccccccccccatgttttattaaaagggggggctggtggtga

SEQ ID NO: 508339 - DNA, 854 bp, Homo sapiens
tttggccgcaaccagttttatttaattgcaaataaattgtttttaagtaagtaatcggtttttatgacataaattttgtgttttcgggtgggaggtcttaaaccatcaacatttgaattacctagttcgctgggcatgggcccagaagtttgccttttagcaagcatctagttggtaacttcgcacactaaatgggcaagaagcccaatatgggtctctgaatgggaagggttatttttttcttgggggggggcttttttctgaaccaaaaccagtatcttttattttctgcaggatataattttcttaaaacaaatggtgtatttgtgaatctacattgtagaattcccctaatgtgatcctattgtaccaaagagggtggaattaaggaacggaaaagggaatactcggcttggaataagatgataggaaatgcccaggtggggatgttggtgtcccttgtctgtggggaacggaaccgtgaaagagtagggtgtcggagctctcttccaggagccctgcgtgggggaaggggtgatatattgaaggttggctggcggggtgttgcgaggcgagtacttcgcgaagcctaatacggtgggggtgccgttttcttgggcggggcacgagagggcacaaacgggcccactcagaacaatgcttattttttttgccgaacgtggaggatgcggagtgggggccgcgtggcaataaggagtggcgagccgcgtgataaacggaaaagaacgtgagggtgatgtgcgtgtgccgtgtcgcgggaactatttggtgcggggggcgcgccggcgctaggaagaccactcaatgagaaggtgcgctggcctgtaggcggg

SEQ ID NO: 508340 - DNA, 872 bp, Homo sapiens
ggacaggaacatgagcttatcgagagcatgcccctgtcggaatggtccgctaccgactataagaaatttgggagctacggtggaaatacgtcacagatatatcactagaagggtctcagtttgtgaaacggatttgatcggaattgggggtatcttgcggttacctgagtaagaatttccaggacatcgcgattaccatggacggaccgacagatgatatttttggaccttgatcgactactagagtagtcagtacatgggtccggcaaagacagtgcctcgacctttccagtatccgaatccaaggaagcatacccgattgggggtagagtccgacaaaatgattcgctgctcgttacaaggtggcacattgtccagaacttacatccactgatgcagtgggtttttgataaggaaatacgaataaaaagctatgacccaggaccgtaccaacttggcgtttgtcatgtgtggtcagccgcgagaactttaaaactaaagtgccataaaagcctattgttggactactgtaggccagactcccagattgctttagctttactgtatggtgaactaggtcgctcttgatatttcattgcaacatagcatgtgctttgtaaccttcatacgtttgaaggcaaccatagcttttaacttgttgtaaccctttcatatgttgaataggacgcgacatccgactggggaatcatatgttggtggggaccgataaattgccgacattcggccctggccagttacttggcattgtcaggctaagtgggtagagactgttttgggcaccgtggccctttcttggggcccgcaaggtgaaaggggcgaaaggggtaattattccgtccaccgccccaagg

SEQ ID NO: 508341 - DNA, 358 bp, Homo sapiens
ggaagggacccatgacagcattagatttgaccaattcaccacattgcaggtgggttcctcctggactgtaaaaacaagtgaactttgcatgaggaaagaggctccatgtctcacagccagctatgcccacattgcacttgcttttgcaaaataatcattccctgcctagcacttctcttctggccatggactaagtacagtggcactgtttgaggaccagtgttccggggctctgtgtcccttatttctctggacttttcatttaagctcaagcccaaatctgggggctagttagaacttcctcacctagttagaactctacccatctttaatacttgaatgtttgacccacttttac

SEQ ID NO: 508342 - DNA, 565 bp, Homo sapiens
  misc_feature (1)..(1): n is a, c, g, or t
  misc_feature (23)..(23): n is a, c, g, or t
  misc_feature (41)..(41): n is a, c, g, or t
  misc_feature (64)..(64): n is a, c, g, or t
  misc_feature (81)..(83): n is a, c, g, or t
  misc_feature (90)..(90): n is a, c, g, or t
  misc_feature (99)..(99): n is a, c, g, or t
  misc_feature (108)..(108): n is a, c, g, or t
  misc_feature (115)..(115): n is a, c, g, or t
  misc_feature (128)..(128): n is a, c, g, or t
  misc_feature (139)..(139): n is a, c, g, or t
  misc_feature (144)..(144): n is a, c, g, or t
  misc_feature (208)..(208): n is a, c, g, or t
  misc_feature (216)..(216): n is a, c, g, or t
  misc_feature (225)..(226): n is a, c, g, or t
  misc_feature (228)..(229): n is a, c, g, or t
  misc_feature (535)..(535): n is a, c, g, or t
  misc_feature (542)..(542): n is a, c, g, or t
  misc_feature (556)..(556): n is a, c, g, or t
nctcgggccgatctcgctttatnttttttaagccagtagancaatcccaaaaatagtggggatnattttttgtgtgcaggnnngggaaanaggagtaancaagaactnaaaattnaagacgaaggtanagcaacagggngtgtncattatacatattggttttgaaaatggccacatcacaccaggaaaatcaatacttcatattgcngtatcagncaatagganncnnacctacataatgtattaactatttattgccacatggcaatataccccaaaacctcacaacataaaaccacaaatatttattatctcacaatctgtgtggttcaaaaattttagtgcagcttaactgggtgcctctggctaaggactctcaaaggttgcagtcaaactgtcagcaggggctgtggtctcatctgaatgctcaacttgggagtctgtttccaagctcactcatgtggttgttgacagcccttgatcttgtgccacatgtgtctctccacatagctgcctccacaatagctgttagcgntggtagntaagagagtcagtnacgcatgac

SEQ ID NO: 508343 - DNA, 201 bp, Homo sapiens
ggcaggcctatcctcctgtgcttacacagtgcagcacttggatatgccattgagcttttctgagtttccattctctcgtctataaaatagaaattttagaaaatttgctccacctacctcacacagctattgtgagaaatcaatgagatgaggggatttgaaattgtctgaaattggcagccacagctgatggagaaatct

SEQ ID NO: 508344 - DNA, 922 bp, Homo sapiens
gctctgtacatcgctgagatatagtttctgggagtagctccttgatacttcagtattgctggagtcggcatccaggcccgcgggtactcgatgttctgatactgcagtatgacatatgatagtcgctgtggggtagctccaccaagggtcaagagtatgtcatctaacattgagatgtattgcaaatggtagagcatggttataagcaagggtgcaagtcatcaagatggtctgaattctagataaatcattgctgttgtggtggcgatgagaaaaggagcgcaaagcaggaggttgaagttgaatcaaggatacagggttcgtccatggttggacaaatcgatgattggagttgttcttgcagggtttgcgggagaattaatgggtgattgttgagagtgtcatgtaattggtatgctttcacgtgaggagttagggcgttgccgaggaatatggtttgtgcgataagagcagagtgtactggtgtatcccgtcttttgtatgttattgctgtaggaacgcaagtgaccaattagtagggaaatacaaatcagagtatgggcgggaggacctatatgggtggtgacgagtgtagtgtgcggggaatgaggtgatgataggggctctcaagatttttccagagcgtgtgcttggtcgtttagatatttttaattgggagaatgcgtggtcatttgttggcagtcttcaaatcaggtacggaggtactttggatagcatttggtggggttcaggggggtatttaatgagatatgtggaactggtctgggcttgaaggggatgtcttggacgaaagggggataaaaaaggggccgattggggaacttggggtaaccatgggcggcttttcccattgggagagggaaaaccgtgaggctggtgtatgtatagaaggggcactatg

SEQ ID NO: 508345 - DNA, 369 bp, Homo sapiens
tgagtgtatcgccggtgcaagtggtgagcgacttcgagcaacgtttgcgtggtaacagtggcgtcgagatctaatgcggcgctgtaatatctgtaggtgtcctgggacctagagcggcggcgtgtctctggtgatgttcgagagcgggaccttcttcgatttactgtagatgtgccagatcgagatctccttcgggtgaccggagatgttctggatattgatcttatgcgagtgataggcgaagttctgcttcgagatcgcctcctggttactggtggagtcctggatctggaccttctgcgagtcactggtggagttctagaacgggagcggcggcgtgttgttggcgtcctagaccttgaacgacgg

SEQ ID NO: 508346 - DNA, 433 bp, Homo sapiens
gtcatactgagaaacaggtattaccttcagagtgggaaaaccctcgacggcacattttacacagtagaactgtgtgccatgcactccggagtagcatacatctagttggttatcctagaagctcacgtcgtgtggctgggcagcacgatgagcgagccggttgccagcccgggtcagccggacaccaaagcctctgggtgccgcagaagctgctagccagcggagtccaaagtcagctccatagaagatggagcccccgactcagtggcgtcctctgcctgactactgtgttcacttctataataatctccactccctgggagcctggggagctagagaggccaagctggttcgataaggacctgccatttggacaggacggggacgctaacaacgatccagagtcactggctgcgtcctacatgcagggccc

SEQ ID NO: 508347 - DNA, 994 bp, Homo sapiens
  misc_feature (130)..(130): n is a, c, g, or t
gaatcggaggccgtacctgagctgggagagcgcgtggtacgcgtgtagagcgtgctggagactctgggctctggaggcgtcagcctgctaatggtaactagtgtctcctcgtcatcggccccacgcttgngtatgcgaccccagcggaacgacgtctcgcgtctcgagtgtgccgtgcgatggcgctaggattcgactgattgtcgcgcatgctcgtccggtcgcgcggtcgatccttagtaatttcatagctaatcttgatgtaatgtgtcctggtatctgtactagggtgttccctatgcgggatggccttggggattgcgggttgatcccactgtgagtcgtagcaccgaatgggagactaatgcgagccagctgagtcttccggcgccttattctcctcgacatgataatcctgaagaagcggaaatgcctgagcctgtgccgaatatcggggttaagcactcgctgggacatcagcccttaactaatagtgttccctgtttgcctcgccactcaggcgtggggggcatagtgaccaaccggctgaccatctcttcgcatctctccggtagagcccccctaaacccaagaatcgtggttgcgtggattaacccctgtttggctgcaaggttagctcttactgcacgctggacaggcattccccgttagtgactgctaggacacaaggggcagtgtcatctatcacaaacaaggccggcttgttatgccaaggcaccgtcctcaagcgtcatgcaccaacatccgcggttggtgcgggccaacctggtagtgctgccagcggtgttcccctgttcccaatcgccccttcctagaggaagcgggggtccccattgggcatgtgtggctgggaccccccatggcttgtcagcaggtgtaccctggtgagtgggcctccccaattttgtgggcccgcgcggttctgtccccgtcggggccaggggccctttagttttgcccctgggggcctgca

SEQ ID NO: 508348 - DNA, 468 bp, Homo sapiens
gacacgagtatgttcattagacgcgctgatatctgggagaaaagctggcttcgctggtcacgaagcatgagtatcgtccgactccctgaaagcttcctggtttggaaacactcaccaaatcatctgctgtcacagtgctgcccgttattttgtcagtggccaccagcatccttcccagacgtgccttcatgtctgcgaggatgtccgtcaggggcagcaccgccatgatctcgctggccagtgcgatgtaaaactgcgcctgccgtgtaatggcccattctctgtgtaaaccccgcccgatggttattttgcgtagaaatcggacatttgtatccaatacatctctgcccatgtgaatggtcgatgggtcgaggtcgagacgggcaaatatactcacttcgctcttctgtcagtgtgctcggatcagtcttattcattcccagtaaaataagccgatgaaatcaatgg

SEQ ID NO: 508349 - DNA, 233 bp, Homo sapiens
gctgcttgacatatttgtgatatggtacctggacaggcccatgtgtgttgagagcttctcagactatccacctttggatcgcatcgctgttcgtgatatgagacagacagttgcggtgggtgtcatcaaagcagtggacaagaaggctgctggagctggcaaggtcaccaagtctgcccagcaagctcagaaggctaacatgcactattcatccctacatcactgcccaccca

SEQ ID NO: 508350 - DNA, 918 bp, Homo sapiens
  misc_feature (1)..(2): n is a, c, g, or t
nntcccctggtgtggtttataacagagcctcttttggcgtgcccccatctgttgctcgtgggcacgccacaccaccgcgtgggttggcctcctccctaagcgtaccacgggggctgtatctcccttccggggcgttttttctcttgctccgcggggggggctataactgtttttccaccggcgaccgccgtttgttgccgcattgctcccctcttgttgggggcgcccacgttgagacaccggtggtgtgccaccaaacaccgctggtgggtgcgccggctgcgcggatcttcccgcgctgatttgtgtggcacccctgcgtggtcacaccaccggcgtcgtctgccgggtaatttttgtggtgccttgttgctgccctgtgagcgaggcacagtactgacaccttgttttttctgcaacgcgacctcctcttggggggggcccgcccaccgcttctatttaccgctcggcgcgcgcaccaccctctgtataaccaccctcccctcccctccgtccggcgcgcgcgcggagagttgtttctcctgttgtcgcgcgacacaactcttattttcggtgtcgtcccctcgcacacgacatttgggggggcgtcctcctcccctgttgtatgtcgccattccgcttctctgtttgcgctgaatagtcacccctcctgctgctcgataagtccccccccaccgaacgctgaattttgtttcgcccccagatgcgcctcatcacctttgttgtgtggctttttcgccgccgcgacacctcctcttttttctagcatcgatgggggggacccaccccggtggctaccccttttcccccctttccaaaccccccttttttttccccccccccttttttttttccccctttttccccttttttaccaaaaaatccaaggggccctca

SEQ ID NO: 508351 - DNA, 434 bp, Homo sapiens
agcggtgcgtgcaatagttcctccaggcccgaagctggtttaatctatacaccctatgagtacccctacacattggcaccagcacatccccctttcgcattgatgatcggagggagtatcttttcctattggctttgaccttacggagaggacacaggagctccacagtaggcgagtcttaagagaacgccatccctcagtgtcttaaatctggctatatgctcttgctactgagcttaaactgctctggcagttaaaaaggccagcgtgtttagccctaggaaggtgcaagaagcgctgccacattggccaattatttgctaaaatagccctagtcccagtgccaaataactagataattcacaaacgggggcagtggggactggtcttacccttggttcctccacatgaatgaattgagagccccgatatcg

SEQ ID NO: 508352 - DNA, 948 bp, Homo sapiens
gggcgcggtggctcacgcttgtaatcccagcacttggggaggccgaggcgggcggatcacgaggtcatgagatcgagaccatcctggctaacacggtgaaaccccgtctctactaaaaaaaatacaaaaaaaaattagccgggcgtgatggcgggcgcctgtagtcccagctactcaggaggctgaggcaggagaatggcgtgaacccgggaggcggaggttgcagtgagccgagatcgcaccatgtgcactccagtctgggcaacagagtgagattccgtctcaaaaaaaaaaagaaagggaaaaaaaatagcattatacctcttcctgtgtctcaaccgccatgaaaatttctggaacactccaaattcagttggaataatccaaaacaaaatttataagtttaaaataatttacttcttatagtaatagtatactttaaaaagcctcaggggtatattatcttctaaacaggctacaattcagggcagctactttaaccaactatggtctctagtggagaacaactaggcctatttcacgtgctgtgtaagcctcaaggtgcctaacatggggtgcccaaataattatccgtagaaattacacctgaatggtaaaaaccatctcggtgttgggtgttacaattgggccacaaattctccaaaagggcccgggtatctatggtaactgccttggaacattattcacttcaacttggggtttcctcacgattaatgggagcggcagcgggttgttgacctttgagtacattaagttaccccaagtatttgttaaagaagcgttcaaagtatgtgggacttgggattttaccacaagaatccgttccccttttcttacaggtttaattttttgccaaacacactggggtaatctcctaaatgaggtaaaatcttcagggcttctgaaacacagggttccaacattatg

SEQ ID NO: 508353 - DNA, 1055 bp, Homo sapiens
ggagtcctcggtgtcgagtggccggcagtcatctcgcggccgttcagacattataaggctgtctgcagagcatttgaaaacatgtgcaacaagatgcacacagtgtcagcatcttatagttcatgctatccttggctgtggcacatatgtcagcattcacttattacctgagaatcctctgcaagaaccatttaaaaatgcttggaactatatgttgaatacattatacaaagttccagattgcaacatggggatcccttatagttcatgaagccctttatctccttattctgttacctggatatgattacaatttatacctgtatatgaacaaaatacaaaattcaaaaggataagccagagacatgggaaaaccaatggacgtgtacaaagttcttctctttaatcacttctgtatccagctgccttcgcttcgtggaacctattattttacagagtcatctcactataccttatgatagggaaagaatgccaagatggcatcgcctactggacaagatgcttggcttgtgcaggccattgacgatacttggcactataactggctagaactctcacagcacgacagactatacgaggactatcctcaacgctcatcatgacgtaaccaaggctcaatatggcaactcgacagcttgactatgcacaatccttgggagaaactcaactctcgcaactggaattacaatagacatccggacaaatgacgagacaatgtcacacacacacagggaaatgataccaatcgacatatcacacagcttgcttccaccggccacacaatccctacaccctcaacataaaccacacaaaccgacatgcacaaaatcacccaacgcacacctcagcacatcgacacactacaacgccacaacatccacaccccaccaaccaacacgagacagccacaaccaactcacaccatcaaaaataccaaacacaaacatgaacactaacgaacaacaacatctccatctttacccttctcctctatcctccaccccccaccccatccctacccgaccccccacccc

SEQ ID NO: 508354 - DNA, 303 bp, Homo sapiens
tcttgtaaataaaaataaacttcttcctgattttgagtccagataaatttctcccatatcacttcatttcaagtagacagttagaaattataaaccatgagcgctagtcacagtggctcacacctgtaatcccaacactttggaagagcaaggcaggcagatcgctcaaactcctggcctcaggtgatcctcttgtctcagcctcccaaagtgctgcgattacaggcatgagcacttgtttccttccctgccttattagcagcaggggatagtactcaggaccagagataagctgatacctta

SEQ ID NO: 508355 - DNA, 342 bp, Homo sapiens
  misc_feature (3)..(3): n is a, c, g, or t
gcnaggaagggattctccatgttgcccaggctgtcctcgaacttttgggctcaagtgatctgcctgtctcagcctgcgggatttaggcatgagcggattacagccatgagccaccgcgcctggcctgaggctaactgaaatgtttgccaaagatttgttggaactggtattttgaaatgaaagcatcttatactgtgtttagaacatactagatggtccatagttggaagctgctatcacaatattactactgttatagcaaattcagagattcacactgaatttggttcccacaattctgcattactttgaatagttggtaaaagacctatcaaaagacga

SEQ ID NO: 508356 - DNA, 111 bp, Homo sapiens
tgctatcaagacagatacatccttataacaatggaatgccacaggcactccacgcccttggggttgctcttttcctccggcatcgggacgtcctgggattgggctatcact

SEQ ID NO: 508357 - DNA, 338 bp, Homo sapiens
gagatgtcactatgttgcccaggctggtttccaactcctgagctcaagtaatcctcccaccttggcctcccaaactgctagggttacaggcgtgagctgccacacctggctgattgtttttctttttctcttttattttattattatttttttttagagaaaaggtcttactctgttgcccaggctggagcacatcagtgcagtcccagctcgttgcatcctcaacctactgggctcaagcaatcctcccacctcagcttcctgagcagctgggaccacaggtgcacaccaccatgcccggctgattttttacttttttgatagagacagggtctcac

SEQ ID NO: 508358 - DNA, 135 bp, Homo sapiens
tggtgtgtgtcggctcatgcatagtgcgtcagcagcaatgtttatggtgaaaaatggcaacgggaccgcgtgcattatggcaaactcctctgctgaattctcaatcttaaatttgttgagcagcacctaccagga

SEQ ID NO: 508359 - DNA, 186 bp, Homo sapiens
ctgatggtcttgccgcttgtgtcttcccgaagctagggcatcccacctcttagatggagtcccaggtgcatggtgactctttctggctgttgtagtcagacagggtacgaccatcttccagctgtcttccggcaaagatcaacctctgctagatcaggaggcatgccttcctttatcttggatcta

SEQ ID NO: 508360 - DNA, 322 bp, Homo sapiens
gtcggtcgctctgcaggatccccactccgagctgcggcggcggtcggatcgccatcccgggcctggcgggggcaggaaattctgtcttgctggtctgcaacctgcacccagagagagtcacaccccaaagcctctttattcttttcggcgtctactgttacgtgcagcgcgtgaagatcctgttcattaagaaggagaacgccctagtgcagatcgcggacgacaaccaggcccagctggtccatgagccacctcaacgggcacaagctgcacgggaagcccatccgcatcacgctctctaagcaccagaacgtgcagctcg

SEQ ID NO: 508361 - DNA, 913 bp, Homo sapiens
catggtggctcaagctgtaatcctatcatttggggaggccaaggcaggtggatcacctgaggtcaggagttgagaccagcctggcaacacggtgaaacccctctttactaaaaatacaaaaattagctaggcatggtggtgggcacctgaaattccagctactcaggaagatgaggcaggagaatggctgtgaacccaggaggtggaggttatagtgagccaaagatcgcgccatgtgcactccagcctgggctacaagagcaaaactctgactcaaaaaaaaaaaaaaaaaggaaaaaaggcgcggattttgggcccggaatttaggttgtacccaacattaacacaccacactgggtcttggtggtccacccatgggggtgtctttaccaaaacccttaaagtggttaagagcgcccagtggcacacttaagggcaaagatgggtagtggcgttaaataactcctatagggtaacccacccttgggacccaggcttttaagttggtcccggaataactggcggccaacttggtaggcagattgggtatctggtggtccctaaaggattttatattatctgtaggaacacgggggctcacctctgggaaagcacggcggagggggaggcggcacatacgttgggtttagagggaggcggcgcgggaaaaaaatctcgcaaccaggatcacaagtaggggtgtgctctgggcccccacgggcggcaatgagggccaggggacagggactgggagagaagggctcccaggtgccagggtcgaaactagacaagtagacgggcgggcccatggggtacggcgaggccggcagcatatgtataggggacggttatttgaaccggttggcacaacgggggggatatcacccatcggagggggggaaaaaagagcgct

SEQ ID NO: 508362 - DNA, 946 bp, Homo sapiens
  misc_feature (946)..(946): n is a, c, g, or t
gttactgaagccctatagtatgtttgagtgacagagcgacctaactcaggctatgagaaaggagttgacttgagcttttaacgattatctggaagtaaaatctgggctttgccttaagaattattgagaatatttttttcatttcgtgtttattttttccaattaggaaaagagatgctgaatcacagagcactgctgctcctactacaggctagtagagttcactcatttggaccttgccattccaggcggtttcagagtgaatagggactggccacttccaaggcgagcactacctactgtcctcattgtgtgctaaagaacacgaaagcagagagagtccacgtggtgatcttgtgctcaaagaactcttcaaagatttctagctgtgccttttaaaccatgcaatattcaggatcgttggaatcaaagagtaaaaagctgctatttcggtaacttaattctctctgggaaagggcagggggagtcagcaaacaatctacctcgagtgctcttccactttgactaggaccattacaaagtgtatctgaggctgcactaacctctgacatctgttcttgcatgtgacaacagaaagctttcaggtggactgtacattttgtgctttggaagcaccaaaaggaaaaataatatgtatatttctttgaagttatacagaagttatttggagcaggatggtgttttattgtaaaatgtgagtgatccagagattcctttgcttttgaattaatctttcttgattctcaaactaaaaaaaaaagggggggctaagatccgagggcagttgcgttccgttttggaagggccagggggtaaggagagggggtaagcgggggaagacgggttgtgagattgtgggttgggaccagaagcggtaaatgtggagcttggtctagttgtaaattgggggttcttgttaccattn

SEQ ID NO: 508363 - DNA, 246 bp, Homo sapiens
tccccacccccaaatttttaattcctaaggctaacaggggggcggggggcctggccctaataagggttccaaaaggggggggacctggacttccagcaactttggcccccaaacctacacctgaatgggaaatcacaacccccccacccccaagggggaaaaaaagttgggccccaaatgttatttaaagggccaaccggccccaaaaccacggttggggagtgggcgctttttcaaatggttccc

SEQ ID NO: 508364 - DNA, 373 bp, Homo sapiens
gaatggataaattcgaaggggctgaattgaatacagatcaacctgcaatggtattcaaggcttatctggctgcggtgactgtagtacggcccgcccgacataaagttctggctaacggaggatcgcttaaggatgcttataggtgacacatgaccttaccctcattcaacactgacgtcgatgacgacatgacagatgaacactttgcatctgctacggagctaccatgcatattgacatgccttcgtaacacttgatacacgaatgccgcagtacaatgcattcgtactgagcctgacctcactgatgcactctacaggcatgcatggccttgagagcttcatgggtggcttcagcgacgtatgtccatgtg

SEQ ID NO: 508365 - DNA, 335 bp, Homo sapiens
cggaaggcgtgggatgcgccggtgcgggggtactgcaggtaggcccagccccggagttcgtatcgcgcgaagccctcgatgagcgaagtgcccaggccacccacggggggcgcttcgatggaaggcccgccacgctcgagccaatgaagcgtcagcaggtggttgtcgcaggactcttccgaggtccatcgcaagtggactacgccgcccgggacgctgagggcgccgtacttctcgctgttcgacagcagttcctgcaggatcatgcccagaggcgtggccttggtggcggggatgcggacgcgcggcccctcgatggcgatccggcccggcac

SEQ ID NO: 508366 - DNA, 663 bp, Homo sapiens
  misc_feature (4)..(4): n is a, c, g, or t
  misc_feature (79)..(79): n is a, c, g, or t
  misc_feature (192)..(192): n is a, c, g, or t
  misc_feature (200)..(200): n is a, c, g, or t
  misc_feature (212)..(212): n is a, c, g, or t
  misc_feature (218)..(218): n is a, c, g, or t
  misc_feature (258)..(258): n is a, c, g, or t
  misc_feature (263)..(263): n is a, c, g, or t
  misc_feature (276)..(276): n is a, c, g, or t
  misc_feature (303)..(303): n is a, c, g, or t
  misc_feature (319)..(319): n is a, c, g, or t
  misc_feature (427)..(427): n is a, c, g, or t
  misc_feature (434)..(435): n is a, c, g, or t
  misc_feature (439)..(439): n is a, c, g, or t
  misc_feature (445)..(446): n is a, c, g, or t
  misc_feature (451)..(451): n is a, c, g, or t
  misc_feature (461)..(462): n is a, c, g, or t
  misc_feature (500)..(500): n is a, c, g, or t
  misc_feature (521)..(521): n is a, c, g, or t
  misc_feature (530)..(530): n is a, c, g, or t
  misc_feature (533)..(533): n is a, c, g, or t
  misc_feature (541)..(541): n is a, c, g, or t
  misc_feature (582)..(582): n is a, c, g, or t
  misc_feature (588)..(588): n is a, c, g, or t
  misc_feature (662)..(662): n is a, c, g, or t
tgtntttatatatatataaatgtttgtataaaattgaatattcatgattttaaatttgacaaacactgtcaggtaaaantcaaactattttactaagttaacatctcattcaattagttgtaagttgtaatagcggcatattttacatgagactattagaaaagggtaatattaagtcattaacattatcantctgcccncttttattaggntggggngaaatagggaaatctctactatcctggggggaaacaagcnataanaccatgtattacnagtttaaagaaatgaatttatcctaanatcatcagtatcagcnccccaacaaagcaactttgccatttctacttaaagtacactgtggcttgatcagacacttatctcagcagtacttgtttaagcaggtctctttgtacaaaagcaaaanagaaagnnaaanaaaatnnatagncattatttannttgcacccagtaaaagccaaggggtttagggtgggggnattttctactcccatacccangcgaccatnatnaaaattgntgataaaaaaataaggtaaggaaaagaagataaaaaagggngggtgngtggaaaaattttatgtatgataaattggatggaaatattagattaaatattatgaaaatgtggtgtaaaaaana

SEQ ID NO: 508367 - DNA, 243 bp, Homo sapiens
gaggattccttgagcacgaatgttcacctggtccatcaccaggccgtcggccaggtggattttctcgtgggtgcacaggccggcggtggcgaagaattcgttatcggctgaacggaacaccgcgtaggtctgcgcgccgtggtcgaagcgcagcacgtcttctgcttctatttcgcccacagcgcagacgtcgatccattgatcgttcatacatttatctccaatgactggctcttactctgt

SEQ ID NO: 508368 - DNA, 110 bp, Homo sapiens
cgtaggtgtattcaccactgcgtgtgcatgcctccctgatacaatgttccgtcgacacgtgagcatcacgtgctgacctccaacattatcgttaagctaggagccgtggt

SEQ ID NO: 508369 - DNA, 714 bp, Homo sapiens
ttatgcgcaaggaggtatgacaagatggtcgactatatgcagccaggcggaacacctgccaccgagggactgggacgactggcaccctcctaacagattttcagcggggaggcactgagagtggatggagggaagacacagaagctacgctgaagtgggaggaagctgctgcacagagctaccatgcactgggactagctcctggtccccagtgactccaggggaacaggtgagttaaactggcaaggaacaacctgctctcaccacaggcctctggaatcccggcaggaggagactccttgaccaccacagacacttgagctggcagggagagttgcttggagaagtggtaggggcagcacttcagcctgggtggagcccagagggtttggtgtgggagcatttgcaataaagcatagccaggacagccatccctctaggctcagacttgctcccatggcagactttaaccctagggggactgttgaaactaaattccttcagggtggtcttgcctgtcagatgaggccagttcaataacctgagcaccccttggtttactggtctctcctggagccccaggactaccaaagccagaaacgctccagcacaagcagcccctatggacatgcacagaccagacacttccttcctctactgcagtttccgctgggcccatggcatccccccaaatcacctgctggtgcacatgtg

SEQ ID NO: 508370 - DNA, 460 bp, Homo sapiens
  misc_feature (158)..(158): n is a, c, g, or t
ctaaatggttggtcaggaggcttcattgataaggtgcaaagaatagaaggaatttaggaggttgaccaagaaaatgcttagagaacagtgctccaggcagagggaacggcatgtgcaaaggttctgaggcagacagtgtgctgagcgtgtctaaggancagcgagggtgccaacatggctggagtagataacaaggcagacaggagtaggggatgagagcagggagctgatgaggtaggaaaggccttgtgggccattgtccagatttagctttttctctgagtaacgtgggagccagtgcagcgtttagcacagcagagggccaaggtcattatagagtggttgagagggagggtcacaaaaaccccacatggatgatttccttttccgaacccccatcaaaatgaaagtcagtgccctttgtttacaaaccatgcaattctcttgccgttgttcttcg

SEQ ID NO: 508371 - DNA, 151 bp, Homo sapiens
ggctctgctctcccatgctgacctcagcatccctcctgcattgtcctcattcagcacacacgcatacctcatgcttgaaccgcatttattggctgtctttgagtgtctttggtatggctttgggagggctgtctgggttcctccgactttg

SEQ ID NO: 508372 - DNA, 209 bp, Homo sapiens
tggaactggtaatggttccattattctggcacagtctataacatagaatttagcagttcccaaaatattcagtttattcattatttagtttacggcatggccaccttggcagaacagtgagacataaggtagagtgacgctgcttggagggtttcaaaaaatcacaaaactttccctagtgcaggcagggaaaagaaattcctcttata

SEQ ID NO: 508373 - DNA, 408 bp, Homo sapiens
  misc_feature (2)..(2): n is a, c, g, or t
cngggaaatggcaaattaaaacccacaatggggattatcacttacacacttatccggaatgactacagtacaaaatagtatgataacattatccaaatgctggtgaggatgcagagaaagtgcactcatacactgctgaggatgggggtgtaaaatggtatagccattctggaaacagtctggcagtttcttataaaacgaaacatgcaattactatgtgacccaacaattgcagttttgggtgtttattccaaagaaacaaaaatttatgatcacacaacctgtacacaaaatattcctagcagctttattcatattagctaaaaactagaatcagcccagatgtcggtcaatgggtaaagattaaacaaactggtacataccatgaagtatactactcaacaattt

SEQ ID NO: 508374 - DNA, 976 bp, Homo sapiens
gaagacggcgtgcatcaagtagttagaactgggattagtctgctcgtgttagtattcaagatgtccttgctatgctcaatctctagtacgcgtgagacattttcctctgttacgaaggtcgttgatgtctctttgggggttagaaggtacgagtgagtgtcgcgtatccagagtccccttggtccgtgacgtgcatatcactcgatgtctagagctcgagttacgcaacttctctgagtttcagaccggcaaccagtcatatttagtaacccggaacacagtgatggcatctatatcctacctctgaagaggtatccctcgggaacagaagctcctactgagcttgagccataggtcgttagcctaatctagtagtgccatgtcgcgaaagacacctcgactaggaatagctctagctggcttatataataacctactcaagggaagataaaactagggcccgagaagtggagtggttgctcgaagatggtttgtgacttggctggaccccactagtgccatggcgcgagatgcccaaaattttgcatagagacccagtcgtgtccaacgttccctagagacaccgtatcaaccatagactcgaaggatccccagggccatgcccatttacccggtggagccccacaggggcttttcctatggttggggtttgacctggacccccgaggcgcctggaacgcgagcccaaggcacgtccttccacgggcatgcgcgaagtccttctaatggttaaacccttacgcttagcgcaatattgcggccttgtgttaaccacgagaagttcgtaccatacgtgactgctaattgtagggaccacttttggccaatcccccattggcaccacaaaccaaaggggacggctcaacttcagcttggggtttattggactgctggagttgggcaatcgaccttgggcattcgcgaaaaagctaacaatggcggcaataggcgctag

SEQ ID NO: 508375 - DNA, 686 bp, Homo sapiens
  misc_feature (140)..(140): n is a, c, g, or t
  misc_feature (228)..(228): n is a, c, g, or t
  misc_feature (240)..(241): n is a, c, g, or t
  misc_feature (280)..(280): n is a, c, g, or t
  misc_feature (282)..(282): n is a, c, g, or t
  misc_feature (365)..(365): n is a, c, g, or t
  misc_feature (368)..(368): n is a, c, g, or t
  misc_feature (399)..(399): n is a, c, g, or t
  misc_feature (412)..(412): n is a, c, g, or t
  misc_feature (417)..(417): n is a, c, g, or t
  misc_feature (421)..(422): n is a, c, g, or t
  misc_feature (431)..(431): n is a, c, g, or t
  misc_feature (439)..(439): n is a, c, g, or t
  misc_feature (443)..(443): n is a, c, g, or t
  misc_feature (457)..(457): n is a, c, g, or t
  misc_feature (461)..(461): n is a, c, g, or t
  misc_feature (464)..(464): n is a, c, g, or t
  misc_feature (482)..(482): n is a, c, g, or t
  misc_feature (489)..(490): n is a, c, g, or t
  misc_feature (493)..(493): n is a, c, g, or t
  misc_feature (497)..(497): n is a, c, g, or t
  misc_feature (501)..(501): n is a, c, g, or t
  misc_feature (509)..(509): n is a, c, g, or t
  misc_feature (538)..(538): n is a, c, g, or t
gcctggcccacgtgggcctcagagctgctgctggggcattcagaaccggctctccattggcattgggaccagagaccccgcaagtggcctgtttgcctggacatccacctgtacgtccccaggtttcgggaggcccaggngcgatgccagaccccgctggcgcacctgcccttcttctacgtgcagcatctcgcgtgccgaggccgaggagcacctgaagctggctgngcatggcggacnnggctcttcctgctgcgccagtgcctgcgctcgctgggcngntatgtgctgtcgctcgtgcacgatgtgcgcttccaccactttcccatcgagcgccagctcaacggcacctacgccattgccgnggncaaagcgcactgtggaccggcagagctctgngagttctactcgngcgancccnnacgggctgncctgcaanctgngcaagccgtgcaancggncgncgggcctcgagccgcagncgggggnnctncganatgnctgcgagnacgccatggtgcgtgactacgtgcgccanactgggaagctggaagggcgaggcccctggagcaaggccagtaatcaagacaggaacccgcagggtggcaggaagcgtcattgctacagacgggcccagagaagcggaatgcccctgggaacaacgggcgagccgtgacggcgttgag

SEQ ID NO: 508376 - DNA, 158 bp, Homo sapiens
tccatgcgccaccactggctggataatcctgaaaagaatggcaatacagtaaagatggtgatctccaaagaaagaggtggcgctggcctatcaggaagccatgtacaatatggctaccctcaccagcactgctgcaggtttaatgcacacatttaatg

SEQ ID NO: 508377 - DNA, 358 bp, Homo sapiens
cgggacgggatggttgtctgacctcgcgagtcctctctggggctcctttctcaggtgggagctcttgtgtttttttgtcgacggggtgtcactctttgctgtgctgtgctggagtgcactggctcgatcttggctcaccccaacctccacctcctgggttcaagcctcagattgaaccctgtctcaggctcccaagtagctgggattacaggtgcccaccaccatgcctggctcattttttttaatttggtaattttttatttttagtagagacagggtttctccatgttggtcaggctggtctcgaactcccgacctcaggtgatctgcccgcctcggcctcccaaagtgctgggac

SEQ ID NO: 508378 - DNA, 681 bp, Homo sapiens
aaattatatgaaagtagctacactggtcaggcatggttgctcacgcctgtaagttcagcactttgggaggctgaggcgggtggatcacctgaggtcaggagttcgagaacagcctggctaacatggtgaaacccaatctctactaaaaatacaaaattagctgggtgtggtggcgcaggcctgtaatcccagctattcaggaggctgaggcaggagaatggcttaccaaggagacagaagttgcagtgaacggggattgtgccattgcactccagcctgtgcaacaagagtgaaactccatctcaaaaaaataaaaataagaaaaaagaaagcagccaaaccaaacaacagattttcaataaagacaacatagacttctattgtaagaagatataatctaggactttcatagctatagagaagtcagtcaatgcctggcttcaaagcttaaaaggacaggctgattctcttgttagggactaatgcagacaatgattttaagagaaagccaatgtttcttaccattccaaaaatcctagggcccttaagaattatattaagtctattcagcctctctatgaatagaaaaaagcctagatgacagcacatctgttgaaagtatgcgttacggaatattttgcccatatgtgggacttactgctgatcctttctattactctc

SEQ ID NO: 508379 - DNA, 130 bp, Homo sapiens
aatccagagatagtatgatgaatattagcagtctacagtacaagcctaacataaccattctataatttaactatatatattatcctaactactacccctattcctccccacactcatcgcccttaccatg

SEQ ID NO: 508380 - DNA, 130 bp, Homo sapiens
tatgaaagatatggtgcgcatgacgtaattcagaagtgaagacaacatgggtggatgtggagtacgaacctggggatcgggtaaagataccagtgccagaacgctgactcctacgaagagtgggagcagc

SEQ ID NO: 508381 - DNA, 1336 bp, Homo sapiens
  misc_feature (546)..(546): n is a, c, g, or t
  misc_feature (642)..(642): n is a, c, g, or t
tggccccgactttttgacaaggctgcggggtctgcggtctattccccgagcttcgcaatgtgccgccataagggacaagacaaagaaagaaaaaggaccgcgttgagaaatgctccggccaaaaaaagacaaagacccagttgaacaaactccgggggcaagggccaaaagagaaagaaggtggctccaaagggcaaagtccgggacaagcctcaaataacttagctctgtgtgtgtggcacaaagcttcccttattgattaacactcgtgtagggaagttcccccaacttataaagctttattaaccccagttgtggtggttcctcttgaaagcacttgagaaattcgagggtctccccgtgggccaggggacagccctttcgaggagcctcctttaggtaagggggcactttattcaaacgcgtggtttcacaagagcacgagaagccctcagagttaatttttacccgcgcagaaaaattccccaggggggtgggcagaagtgcctcccagtcgtgccgtggtgtgaaagaaatgctgtgaanattagcgtctcccaaccccgatggtttgctcactttttgtgggcaaccacaatttcaaagcaccatcttttttatctaacgactcttcccacacancagaagacagccaccgcccactcacagcacacgacaacagacagcaggacatgcatccgaacagatagcccaacaaaacgacccaacacgaaagccacgaaacacacgagtccggcgcgggcgagactactaatctcgtaatgttgagcggcgatgccgagcccgccacgatacaacgcactagtaggcgagtcgatagcaaaaacctagggagcggagcgaccgacgaaggaagtagaacaaacaagcagccaacgcgtagcacaagagcccaaccacacagagagtagaactgtctagtgtagtcagcagaccacaagacaagtagggggtcaaaaagctcactccagacagccggcgcgccccgccacccaagaataagagcgaggagccgacagactaagcacttaccacatagccagacgaacgaaacgacagcgagtggcaaatccaccctcgctaactaaatcaaggaagtagacgacgtcgaagaacatacggcaaggccgacgccaggacatctcgccaactacgaacgagccacgcgtacggcagacgcacgcagcgcacccccgagagcgacgcgagcatcgtgcgacaagcagcgatgccagacgtcgaccaagaacgagacagtcgatgaacggacagacaggaccacgaaaccgatcgtacgaaccgactgctcgactgc

SEQ ID NO: 508382 - DNA, 413 bp, Homo sapiens
atgtagtggcagttggtatcttgtagtatcaattatgtggtcattgtattcatctattacatctatctcatgtaataatggatgatttgctgaatacttcccgcttggctgaatactatctgatatgtcaagacagtgatgtaagcagacagggagggtctccaggaactatagaagtttctgcagcttgaaccttctgcctgttttatagcctcccatttttcagtcctgttttttacaaaccgtcgatggaatgcggacacgcgtaggtcgcgctggcataccagtgtccaggagcaggatcccagtaaactaatagatgaatctgagtgaatgttccgcattaccatgctacattctctacgcttcgacgagctacagattcctcacctttacatgtaacctatgtgctg

SEQ ID NO: 508383 - DNA, 158 bp, Homo sapiens
ctgggagtggatctgtctgtgtggctctcggtcacatgtcacagtgcagtcctggcagacttgggtcttctctttggtggtttctaaagtgccttatctgcaacaacttcttttctccttcaggaactgtgaatggctagaagcaggagctcagtaaa

SEQ ID NO: 508384 - DNA, 662 bp, Homo sapiens
  misc_feature (509)..(510): n is a, c, g, or t
  misc_feature (592)..(592): n is a, c, g, or t
agcagtgtctcacacctctaatcccagcactttgggaggccgaggtggacagataacctgaggtcaggagttcaagaccagcatggccaacatggtgaaaccccgtctctactaaaaatataaaaattagctacgcatgggccgggtgcggtggctcatgcctgtaatcccagcactttgggaggctgaggcgggcagatcatgaggtcaggagatcgagaccatcctggttaacatggtgaaaccccatctctactaaaaatataaaaaattagccaggcatggtggtgggcgcctgtagtcccagctactcgggaggctgaggtaggagaatggcatggaacccggaggtagagcttgcagtgagctgagatagcaccactgcactccagcctgggtgacagagcgaaactccgtctcaaaaaaaaaaaaattaacttggcgtggtggtgggcgcctgtaatcccagctactcaggaggctgaggcaggagaatcactagaagctgnnaggcagaggttgcagtgagctgagattgtgccagtgccctcctgggcaacaagagtgaaactctgtctcaaaacaaacatantataaattaagtgtctttgttggtgatgaataaattggtcagtccacctattaaggtttaaggtgggttt

SEQ ID NO: 508385 - DNA, 441 bp, Homo sapiens
caaggcttttaggagcttgggtactcacagccctgttccgagactcaggaactcggagtctcaaagcccggatcccgtccccaaagaagccccagtcttcactgcccgcttctgttcccttccaaactcaagttttctctgtctgcttctgcccctcaggaacctaagtcttcgctgccccgtttctgaatccttaggagcccgggtcttcactgtcccgcttctgcctcttaggagcccaagtcctcaccgctccacttttacctctccggagcctgtgtcttcacgccccgttcctttctgaccctttcctcgtaggagtgcgggtcctcataatcctgctcctctcagaccactttccctcagatgccggagaactcgcatccgtccccgttccctaagtcccgtcttggagcccgggtccccttctgtcgtcttctc

SEQ ID NO: 508386 - DNA, 275 bp, Homo sapiens
  misc_feature (2)..(2): n is a, c, g, or t
  misc_feature (45)..(45): n is a, c, g, or t
tntcggctacaacgccaaggcgatccactcacaatctgaaggtgnataatgatccagcagggaaggcattggacatttttatgtgactgacttttcgaaggggtgtgaaggagcttttaccctccaaatccaaaagcttcatcaccttcattgggctagcgcaatccccaaactagaagcaaactgcccttaatatttcagggtaagtttttatagattagcccagagcttttgtattttcccagttcactgctgagatcgccttggcgttgtag

SEQ ID NO: 508387 - DNA, 276 bp, Homo sapiens
attgctgggcgatctagaggatccctgacaccagacactggtatggtagttcttattctctaggttatatttcattatgtatttaaaagtatttttaagacaagtttcctgtatacctctgaactgttttggttttgagttcatcatgatagatctgctgtttccttataaaaggcatttgttgtgtgagttaatgcaaagtagccaagtccagctatatagcagcttcagaaacatacctgaccaaaaaaattcccattaccaggctggtgtcaa

SEQ ID NO: 508388 - DNA, 135 bp, Homo sapiens
tacagcctgtactacacctacaacctgtccaagcgcaccaacctgtacgcgctgggttcgtatgccacgaactatcgcgttcatcgacggcgtcaagagcaccgtcggcatggtgggcgtgcgtcaccgctttct

SEQ ID NO: 508389 - DNA, 140 bp, Homo sapiens
tttggctgtacctcaaagtgctatggagagcttctgtcctcgaaaatctccctgacaatactgacagcatacaaaacatggagaaagctcaaaactaaatttagactctcagtggctgggttttagtatctcttttcttt

SEQ ID NO: 508390 - DNA, 598 bp, Homo sapiens
aacagtggtatcaatcgcagagtagccaccacgcccgggccctcttgaactatccctatactgtgacattagcacagaagtcagaaaagggcaatcgcagccctacataacaaacccaaagctgcgcaaaaagagcaaaacaaggacaaagcagaaagaagcccgaggatagggggataattacagcagaaagaaagcagtgttcaaagggggttacctattccctgtactgcggggccgaaggaaactgccattagaaaaatggaaaatccaagtcacaagggaattcccgagagacgagacaaaagagaaaacagacaaaacagagagcagaagggagcccaaacagagagacacagagaagaagtgagagcggcgcagagcgcggccaacaacccgcgaggggacacccacgacgaaagaacagggaggtttacacgggacaccaccccagggcctagtggagggtgagcgcgcgcgcgagcgacaccaacagaggtggcgaggagagaggcgagaacaacgagggggggaacaaaagcaagagggggaaaggaccacgggagagagacagcacacagcccggcgcggaggaagc

SEQ ID NO: 508391 - DNA, 647 bp, Homo sapiens
ccacgcgtcgatctcttttcatttgtatgttaattgaggttaactttattcttttgatgcctgtacagttttttgtttgtttgtttgttttttgggatgcagtcttgctctgttgcccaggctggagtgcagtgatgtgatctcagctcactgcaacctccacctcccgggctcgggcgattctcctgcctcagcctcctgagtggctgggactgcaggcgcccactaccatgcccggctaatttttgtatttttcgtagagacggggttccaccgtgttggccaggctggtcttgaactcctgaccttgtgatccgcccaccttggcctcccaaagtgctgggattacagggatgagtcaccatgcccagcccaacacacattgtatcttttaaagtgagaggtggcacgtacctgtagtcccagctacttgggaggctgagaggcaggaggattgcttgagcccgggaggttgaggctgcagtgggctgagatcataccactgcacttcagcctgggcgagagtgagacctgtctcaaataaactcaattaaacaaataggctgggtactgtggctcatgcctgtaatcccagatcttgtgggaggcggaggtgggaggatcacatgaggcctggagttgagaca

SEQ ID NO: 508392 - DNA, 312 bp, Homo sapiens
gcgctcgggttagcactgtggggaacaaaagagtctgaaacacagtccctgctctgaggaacttccaatcaagttagtgatggtacttgaatggcattatagaaatgctaatagggcttagagaaagagaatcttgcgttgctgtggtcaccgcggaagtcttctacttctcgaaaatgcaggctgggcgccgtggctcacacccgttatctcaggtccacgtgagaggatccctcgagcccaggagttcaagaccaggctgggcaacatggtgcgagcctgtctctattataaatgaagaaattaatccga

SEQ ID NO: 508393 - DNA, 199 bp, Homo sapiens
tcccagcggaatagactaaaaatcttaggtaacgccgggggcattgaaaggaaagcatctggctctgaaaatgaaggcgattataaccctggcaggaaaacatggcaaaacaacaagcaagaaaccgaagaagacatcttttgatcaggattcagatgtggacatcttcccctcagacttccctactgagccaccttct

SEQ ID NO: 508394 - DNA, 270 bp, Homo sapiens
tctggcatcgctaatcttttactctacttgatccactaacttgacctcggaacaagttaccctagggagtacagcgcaatcctattctacgagtccacaattcaacaatagggtttacgacctactatcttggatcaggacatcccgacttgtgcagccgcctattacaggttcgtttgttctacgacttaaagtcctacgtgatctgagttcagaccggacgtaatccaggctcggtttctatctacttcatattcctccctgtacgat

SEQ ID NO: 508395 - DNA, 1642 bp, Homo sapiens
ccggctgccacttgttgtggtgcgcttcttgctcgtgtggcctcggcctggcgcgtgtgcggctatagtggactcttgttcactcctcatttgacttcgccggcgctgccgcaattattgttggggcacacacgtctttgttctgctccacgccggtggcactgttgtttgcgtcgcacgatggtactctccgtttggtgtgtagccgcttcctcccggcgcggtggggtgtcctcccggtgcacactatgggctcatattgcaagctgccttctagttggctcgccgggggggtgcaccccacaccacgatggggcgtgcggtgtgtatctacaccaacctcctcgtgtgtggcagctcatctgatagaatgtttgtgttgctccgcggggcgaatgtttggtgtgggggggccgccctctgtggtggggggtttcttgtcttcccccccgcaggggccgcccgcagtttctccctgtggcgagccacgtgtgttcctcgcgaggtggtattggtcgccttctccacagttggtgggcggcccgacgggagggtgatgccgggtggccggccgccacgagtgatagatgggttgtagcgctgcgctctcgctgtcgatcccaagaagggggctcccctcgcagcgtgctacttggtgagaccgtgtgggtggcatagcttggggcgccgtcttgttttgcgccgtccccccacggtgggtctctgtcccacgcggggggaggggtgggcacgcccccctgtagtccgcccttcccgtgttcacgccgtctctggggagaccactggggttggtgtggattgactcaccccccgcccgctggtcactccgtcggggtgtattccccgcgggctcccccagcgcacgcgcgtgtgtggaggatgtgtccacggtgtgtgagatgctccccccactcttttctatatggcgcacacacactgctgttcgacaccacacaggtgttttgtgccgcgcgaggcactcgtgttctcgcgagggagaccccgcgcgcccactctgttggtgctctgtggggcgccacacactcatgtgtgcgccacatctgtgtggatacgccgcgcgtgtgtcttgtggacacacacgcgtgttatctgcagagtgagacacacaccgcgccacacagagaggtatgtctctcccacatatagaggagacactttctctccacacactcccaccgcgggccacacccctgtgcgtgtgcacaccctctgccacatgagatgtcgtgtgagcacacaccgctccaagggtgtcacacttctctatatgtccaccctcccatctccgctataaggctggttcctcggcactccctctcggaccacacatgagagagaatatatgccaccacctcccgcgagacactccgcggggccccgcggcaccacacacacttctgagagcccactctcccggacgtctattctccgccccaatccgcggtctatctcaccggcccggcgcccatggaggcgccatatggcttggccctatggcccctttttggtttgcctcccttggagttctccccttctccccctccccgccccccccgccccccctggtaccccgatccccgaataaagcaccttttcccta

SEQ ID NO: 508396 - DNA, 180 bp, Homo sapiens
gggaacaagacttagaaggagggcccaggccctttttgtttgaacccctgtcatgatcccagggtcagagaggggtccttttttttggggaagttgaggggggcccttcagagccagtagcaggcaggggggggtaggccccctccttcctgtttttttttaataaaatggtaccctgca

SEQ ID NO: 508397 - DNA, 151 bp, Homo sapiens
tgagccactgtgcctggccgcattaagatttgtttttgaaatgctgtaaaaggttctcttggacatcccgtacttgcttgttgagattttatttctgttagagacttagactttttttacacgttacgctattttaaacacacacgcactt

SEQ ID NO: 508398 - DNA, 966 bp, Homo sapiens
gtgagctgagatgcaccactgcacttctctgcctgtttcaaccaagcgagactccatctcaaaaaaaaaaaaaattagctgggcatggtggcgggcacctgtagtcccagctgcttgggaggctgaggcaggagaaatggcgtgaactcaggaggcagagcttgcagtgagcagagatggtgccactgcactccagcctgggcaacagagcgagactctgtctcaaaatatttttaaataaagaaacgaaaaacgagggttacagattcaatgggcaccatgtgggaaaattatcccctagacagataaacacttcccatttaagcgtggtgattcataccagccttttaaacaaggggagccattctcagaaattacagatgtgggtgggtacacattggcctttactgggagaaaagggaacaaagaaaaacacagcggagttatttttaacaaggggaaaaagagggcatgtggtgattttctcaatgggattggaaagcttgaatttcagaattggccattacagcgttttttggttacccacagaacaaagcgggctatcctgtggcaagaaccgggggggtggtttcccgaaatgtgaccagaaccgcgaaggtgtgccattatattgaaagggcaagtttgccccgaatgtgttacccaaattgttatagcaccaatggtgtgtgagtgcagggggggaaacaggctgtggattgggaacaagggggcaaaagtttgggatagaaccgggcataccctccattgggtggccttttgtgaacacgaagcctaatagcctgtgaagcctacttatatgtaactacatctggggggattatcacacggcactataagagccatgacacgtgttgattgttacacgtacaagtaattgtctagaccacaagcgaggtgttgtaaaatataccccagaaagtgtgttttgcaacgtgaattggg

SEQ ID NO: 508399 - DNA, 110 bp, Homo sapiens
gtgttatccgctgacacctttgccaataatagatccagccaaagtctttggtgaatagttacttggtgtagtactaattaggtccaccaagatcaccatatgatgccgac

SEQ ID NO: 508400 - DNA, 154 bp, Homo sapiens
tttttttgttaaaaaaaatttttttaatcaggattggttttacaagtaaaaaactttgaaactcttgaactaaaagtctccaaaactttaaagggcagtttgagaacccggatttttattgttttaaaaaaaaacatggttttgaatagttcca

SEQ ID NO: 508401 - DNA, 264 bp, Homo sapiens
  misc_feature (1)..(1): n is a, c, g, or t
  misc_feature (10)..(10): n is a, c, g, or t
  misc_feature (237)..(237): n is a, c, g, or t
  misc_feature (246)..(246): n is a, c, g, or t
ntggtgatgncgtgcacagccagaccattcagatcccaccgtgccccagcggtggtcctcgctgtggatcggctactcttttgtgatgcacaccagcgctggtgcagaaggctctggcaagccctggcgtcccccggcttcctgcctggaggagtttagaagtgcgccattcatcgagtgtcacggcccgttggacctgcaattactacgcaaacgcttacagcttttggctcgcancatagagangagcgagatgttcaagaa

SEQ ID NO: 508402 - DNA, 179 bp, Homo sapiens
aagccagacttcaggaacagcatgtccaaatcgatgtggatgtttccaagtcctgacctcacggctgtccctgcgatgacgtacgtcacgcaatatgaaatgtgtggctgccaagtaacctagcaggacgcagaagcaatggtacaaattccacagtttgctgtacctcgtctgcaggc

SEQ ID NO: 508403 - DNA, 269 bp, Homo sapiens
gcttcgtactgtggtgtaccgttcaccctttaagcatcccacatgagcacagatccctttcacgaagcatctatttttcatccctgtaatgccaccttaaagccagggtaacaatgtcaagaattagcaagtaaaatgagctctccactatttagtctgttgcataaaggatctcttgtactaaacattctgtgtggaacaagaacaatggaagctgcaaagtcacagaacttaaaactggctcaggtgaaggaatagtttatgaattg

SEQ ID NO: 508404 - DNA, 488 bp, Homo sapiens
  misc_feature (216)..(216): n is a, c, g, or t
gatgtcctctccaacccttggggcaagatccctcatcgttttcttttttctgaatcaagagacctttgaacagctttcaataagttaccggccccctctacccagcaaagtgcatgtgcagtccatacttatagttatggggagagagtttatagactagattaagatggaagaaaatggggtgaggttgtagggaattttcttctggttcacacntttttttctttctttttttttttttttgggagataagagagtttggcctctggtgtggcacggggctgggagtgtgcaggggtgcccctccgtcgcgtggaacctccgcctccggggtcgggggattctctggcctcgggtctcccaaggggcggggattatagggcgcgcctgccaccggggcccggctaaattttggtatataggggggagagggggtctcgccatgtgggcaggagtcagaaaccacctgaccaacatggagaaaccca

SEQ ID NO: 508405 - DNA, 207 bp, Homo sapiens
  misc_feature (25)..(25): n is a, c, g, or t
  misc_feature (71)..(71): n is a, c, g, or t
  misc_feature (81)..(81): n is a, c, g, or t
  misc_feature (191)..(191): n is a, c, g, or t
  misc_feature (204)..(204): n is a, c, g, or t
tcttgcttaggcttacaattttaanacagggggagacaaagttgtagtttttctactcctttgccttcacncctgtttaantttccactgtggtcagataagtattttttaaacgaccgtactcaaacttctggtactgagcaatgggggaacctcactatggctgtaaacccttccactggacactaatnaaatgcattgccnccc

SEQ ID NO: 508406 - DNA, 87 bp, Homo sapiens
ttttttgaaaggcccccttttaaagggggtcatttgttcccttttaagttgagaggccaaacctgaataaagtgattgttttttgta

SEQ ID NO: 508407 - DNA, 359 bp, Homo sapiens
acaagtgcgtaatccctggcagtacaatcatatacaattctgaatggggctgaattattagtcaaagcgacgtatgtagttacttcatttttatgggagtaaatgctttatagcttggccctatggctgtattatggctatgtttaattcctaataaatcagttttgtgtaaaaaacacagttgaggctgggtgtgatggctcacatctgtaatcccagcactttgggaggctgagatgggcggatcatgaggtcaggagatccagaccatcctggccaacatggtgaaaccctgtctctactaaaaatacaaaaattagccggccatggtggtggcatgtgcctgtagtcccagccta

SEQ ID NO: 508408 - DNA, 151 bp, Homo sapiens
aaattgtccctttttggacgtgtctgccatctcagagctctcggatgattggtcaccaaagtctactaattttctactacattcccccacagtaataataataactgcactcataactggcatttattgagtggttattatgtgtcagttc

SEQ ID NO: 508409 - DNA, 105 bp, Homo sapiens
ccgatgtcaccgcgttgcgccgcccgtgcggcggccggtgcgtccaccccggcgcgctgtccggtcgtgacacagcaccatgttcgggatgcgtgtcctgatctg

SEQ ID NO: 508410 - DNA, 281 bp, Homo sapiens
cttcgcagttatttgacgcgtccgggaaaagggcaaccagataggagctcagcccaagaagaaagtcttcgagaagtgcggctgacttcaaaatttctgcaggagtgcatcgcacagtggaagcaaaccaacttcatgacctaagctgggggccttcccaaattttttccccttgggttaaagcattccggccttggaaaacaagggggggggggaaaaccattttcaggccttaagcccaaaggcccccaaggcattcttccaccacccttccttcccta

SEQ ID NO: 508411 - DNA, 355 bp, Homo sapiens
aagggtctctcccatttgcctttaaagaagatgtaattcccttgagtacccttctccaggtaatcgttgatctgtttcttggcctcttcggggtccccgaagttcacagtgaaggcttctgagtggtacaactttttaacatccccaaaaactttccctagcttcaggccctctctgaggaacaggccattgccgtgtggtcagctggatctgtctgtctgttgttagggtatgaggagcccgaagccttcatggatctgagcctccggaatctccgtgaggttgaaattcaggccctacaggatttcatcgtgagtgtcagccgtggtccacagagagagcattgccactcgtg

SEQ ID NO: 508412 - DNA, 105 bp, Homo sapiens
ccctccattgacagctccactgcagtcacttcccaagttgttccatgggctcctggctctggacggtggcccacttctccacattccgcccaatctgtacggatg

SEQ ID NO: 508413 - DNA, 995 bp, Homo sapiens
  misc_feature (367)..(367): n is a, c, g, or t
gtggctgcgacaggcgtgatcagagcaagatacagcgaaggacgcggaccgaggcatcgattgagtgccgaggttgtctcactccttgctgaaaactgtggggcaacgccgtctctctgaaggtggtactgttcctgcatcctgatgtgtggctggtagcagaactggcacgtgcccacaagtccagcgtcgggcgacgcgacgccgcaagcgtccgggagcataatttgcctatgaaatctccacggagagacaagtaggatactccatctgaagaccagaagtatacatgctatatgtaagttgatgcggtggtggacagagctgatacctatgatgcaaaacatggtaaccccatacatggaangttctgacatgaagtacaagatagggtttcacagagggcataagcaagttcaggtggcttgcctaaacatctagatgacattgtcaaaataataggcgactacaaaagctatactattcttggactcagatgtgacgatagcacccagaagacgtacatcctgcatctttgatgtggtcccggagtacgtagtaacaccgttgggcatgtgccccatgacatgtcaatgttaccaggaagtgttattgcgcttaaggaattgcttatctagagtaaaaaagttccaaataaggtaagcttccgattactatcgatgttaaaaaagtaagcctttaagtatgaatcggaggtctaattgataaataatcgctacgcgcgacaaagggaccagtatggtcccaaatccatctttacatagatacctatccagcggaaaagtatgatcccaggtcatagtgttcgtggaggtggactgagaaatggatctggggaggagtaatggcctcggagaaggataaggacctttttaatcgaatggacttctttgccatagttgtggtgaagcctagaaatgtgcccttgattttttgaccctccaatggcgcctatttcatctcctaagattaaa

SEQ ID NO: 508414 - DNA, 241 bp, Homo sapiens
gctctctactataaatacaaaaattagctgggcgtggtggcgggcacctgtgattccagctattttcgtatttttaggagagacaggtttcaccatattggccaggctattctcaaactcctgacctcaggtgatccgccctcttgggcctcccaaaatgctggcgattacagacaggagccaccatacctggcctggaactttctataaatgccacacaacatgttctgtgcagccgcgt

SEQ ID NO: 508415 - DNA, 234 bp, Homo sapiens
tgggagcccttcgcccaaagattcagtttggccaatttggggggttgtgtccccccagcccgcccgtcctttggggggcacagttccccttgttccctcctgcccgggttgaaaagcggggtttgggggccctttttcccttcaggcccctgtcctttttaaccggtccccttcaactgtattcccaccttcctgcccccgtcttttattaaagagggaccttcgggcttgtta

SEQ ID NO: 508416 - DNA, 785 bp, Homo sapiens
gggcgccggggggctgctggcgctgctagcgctgctgtgcgtggcctgcgcgctgggcggggggcgcgcccaatacgaacgctacagcttccgcagcttcccacgggacgagctgatgccgctcgagtcggcgctaccggctacagcagctggacaatgtagcagcgggcggaggctacgtggggccagagagcggtggtgctaccgtgggagatcacgcgtgggggcgtgcacctgcgttgctcgcgcagaacagctgaggcccttcatgccgacctgcaacatgcagctgcctgctgcctgcagcctctgagccctgccagcctggcgctccgccatgctagtccctgaggcgtgctgcactctttccggggtggccctggctgctgcctgctgctgcacatgcgctcgaatgctgcgtgcaatgcaggggcgcctgccatgcccttcctgcgcagtccccagcgccagcctgctgatggtgcatggctgtgacattccagctgccagcgaatgcccatacaatgttccgtgcgagttcgggcgttacttcaagggcgaagataagtctccccgaaatgccatctgccggctgctccacaccctttctaactggaagcatccctgatagacgaagatgatgaaggaggaacattggcatattataagagcctgcctggtgccgaggactacattaagacctggaaaccaagtcatatgaaagcctgttcatcgagcagtgcgggcataccacggtgagaactggggaacatccatcacagacg

SEQ ID NO: 508417 - DNA, 721 bp, Homo sapiens
  misc_feature (665)..(665): n is a, c, g, or t
ctcttagtgagattacacatgcgatgcgtcccgattccaagtgagttcaccctcctaaatcaccatgatcaaaagggacaagcgtcaaggcactggcctagctaatgcagctcgagcagagcgcttagcctagcccacacccccacgggaaacagacagtgattaacctttatcaataaacgaaagtttaactaagctatactaaccccagggttggtcaatttcgtgccagccaacgcggttccacacgagttaacccaagtcaatagaagctggcgtacaagagtgttttagatcacccccccccccccaaattaaagcataaaactcacctgttgagtgtggtaaaaaacctccagttggacacaaaatagactacaaaggtggcttaacatttcctgaacacaaaatagcttaaaacccaaagtggggattagataccccacttatgcttagccctaaacctcaacagttaactcaacaaaaactgttcgccagaacacttacgagccacagtttaaaactcaagggaccggggggtgcttcatatcccttctagaggagcctgtcctgtaatcgataaaccccgatcaaccttaacccacttcttgcttcaagccttatatacccgcatctttcagcaaacccctgatgaggctacaatnttaggcgcaaggtcccaccgtaaagacgttcgcgcaagggtgtagcccatgaaggt

SEQ ID NO: 508418 - DNA, 394 bp, Homo sapiens
gaggatcccccccgttaccacagcttgctctgtgtatcccgatttctacaaagtgaagtcaacaacggttatcgaatctactgtagcgctgtgccaacgaggagagacacatccttctagcgtcaccccaataaacaagcctgacagacattgcgaggggctgagcaggacgcagtccccatcctttccaacatgtctgtcgccttggaatctgtggcgcacagcccaaaccagcacgccagcttgagttcaattctccctccacttcttttcgccatgatccctaactccccatagcaacacagcggcgtgaattggttcctctgctgcactcggggctcttccttctcacctcatgttccgagaagatacatcttttctaacagaatgctct

SEQ ID NO: 508419 - DNA, 195 bp, Homo sapiens
gtggcggcagtgcaacccccttgttattcaggcagatgtcctgcagagggagctagagagctgcctaagaagagagtacacgccggaaaatcttcctctgcttctgctgcagcattacacagagagaattacgcagctggtccagaataaatatttgcacatgctgaggtggaggcggctctgccagaccagcgg

SEQ ID NO: 508420 - DNA, 996 bp, Homo sapiens
tttcatttggggggtgttaaggtaaatgatactgtgtttttaatttcacatcataattgtttattgtttgacaaagcaattgacttttgtatgttaactttgtatcctgcaactttgctgtagtcacttattagttccaggattttttttttttctcatttctttcagattgtctacgtagacagtcatgtcacccgcctaaaacagatagttgtttttttccttcccaattctacctttaatttctctttcttatcttatggcattagctaggacttccagtatgatgttgaacacagagtgataagagaggacattgttgccttcttcctgatcttagtgggaaaacttctagtttctcaccattaagtactgatattagacatgaggtttttggtacgatttttttcttttaatccaggtggaggactgttggtctatccctaagcttaactggagaagttttacatccatgagactggagtggtccgaatttccggtcaaaataacttcggcctcttatcaaatcctggatcccatatattttgcttccttttagagcctactggatggtgcgatgggattcattatcactctcaaattctctccaacacctttggatatcagcctgtgcatactctcaggtaacatctccactgggggccgggtgcgggggctcaacgcctgtgtctcccagccacttggggaggccgaggcaggcagatcccgaggtccggagatcgagaccatcctgctagcttggtgaaaccccgtttctactaaaactccgaaaaatttagccaggcgtgttgggccagtgcctgtggtccccggtaaccacgggagggtggaaaccggaaatgcggttaacctgggaagggcgaactttgattaacacgaaattcgggcccatgcacttcaaggcctggcttgaccagaagccaagagaacgtgttctccaaaaaaaaaaacagaaacggaacaacaaaaaaaaga

SEQ ID NO: 508421 - DNA, 81 bp, Homo sapiens
gacagcagcttctacatctgcagtgctcgggacagaagaaacactgaagctttctttggacaaggcaccagactcacagtt

SEQ ID NO: 508422 - DNA, 412 bp, Homo sapiens
cgagcatcgccgtcggaatgctgccgatgaatgcgagctgcagcagcacgtagatcagcgtcgacagcaggatcgacaggatcagcgcgatcgggatcgtgcgttgcggattgcgcacctcgctcgcgaccgacacgatcggcgtgagcccgaggtacgcgaagatgatgccgcccgcggacacggccatctcgatgcccggcatgccgaacggcgcgaagccttgcacggtcaggttcgcgggcttgaagaacgtgaacagcaccgcgatcaccgccagtggcacgatgaacttgaagatgctgatgatgttgttcgccttcgcgaacgtcttcacgctcgaatagttcaggtaaaagaagaagcagagcagcgcggcctgcacgagccagccgagcgtcgtcggatcgct

SEQ ID NO: 508423 - DNA, 127 bp, Homo sapiens
tctactatgttgctcaggctggcccaaactctgggctcagctgatctcctgccttggcctccaaagtgtgcgattaaggcgtgcactgcgcccggcatttattttattttttactttaatttttttt

SEQ ID NO: 508424 - DNA, 335 bp, Homo sapiens
cccatcctttgtcacagtaatagaattggcgcattcagacttattcttagataatttccaataatttttaaatcattgatctggcttggtaaatagctctccaatacttctacagctaatggaaaaatcacttaacctttactagaagtaacagaaagcattaaagttgaaacctaatgcagcagttctttccagtgagttgaactgccttagcagaaatcttcccattgagatacaggctttatttttattattatatttttggagacagtgtctcactctgtcacccaggctggactcacaactcactgcagcctcaaactcctgggctcaag

SEQ ID NO: 508425 - DNA, 150 bp, Homo sapiens
tcatgacggccaggcagcttcactcgacacctgggaaggtaaggatcgagatcaccgaatttgatcattttggcacctgataaccgggacaacattaacctcggtaagtgatttttggcctcatgccccatctgacctccatcttgaagc

SEQ ID NO: 508426 - DNA, 145 bp, Homo sapiens
tactctgaggatccctggctgttgtggacatctggtactccaggtcaccttgtgtggggggcacccccgtgggtgtaagtggtggttttcttgagcgtgtactggcgcccgcaggcctcatcctcctcctgatttccaccttgcg

SEQ ID NO: 508427 - DNA, 579 bp, Homo sapiens
  misc_feature (19)..(19): n is a, c, g, or t
  misc_feature (34)..(34): n is a, c, g, or t
  misc_feature (44)..(44): n is a, c, g, or t
  misc_feature (49)..(49): n is a, c, g, or t
  misc_feature (56)..(56): n is a, c, g, or t
  misc_feature (61)..(61): n is a, c, g, or t
  misc_feature (63)..(63): n is a, c, g, or t
  misc_feature (75)..(75): n is a, c, g, or t
  misc_feature (81)..(81): n is a, c, g, or t
gatgattgtgctagagggngagtgtagcggatgnctgcgagtanggagnacgtagnggtantncccgagttggcntggttnatcttttacagatgggaaaactgaggcctgatgctggagattctatgagggtgctctcctcaagggtatcagacggtcgtaggttcttaagaatttgattcatcagtggcaggccatgcatagagccacgggaggtgcgtccttgttttccaggaaatgttcttagaacttggactactgattattaattgactgtgccttgggaaacagtgggaagtaacttggtgcagcactggggtattgttggcttcttgtgttggaaactttgtaatgtaaaaggaaaaactggaaatccccacgccctgtttccctttatcgtcttgtggttggactggttcaattcgtttaactcgaattcttgctcctggccgtggttaagctgtgtacagatgatggagagtttggcctcaagtttttataaactgagcgagactagtgttcaggatctcctcccttgtttaaatgtcaataaatgccccaactgctttgtaagtgcaa

SEQ ID NO: 508428 - DNA, 181 bp, Homo sapiens
ttctttggagtacatccttactttctgcacaacagatgagagatgttccagaacttatactgtatcatatattttacctccccccctatacaccctgagatatacatatacactatctccgctagagagatgtctatgacatatcactttctgagatgtacacgaacgagatcttttgaga

SEQ ID NO: 508429 - DNA, 397 bp, Homo sapiens
agagaatagtcaacggtcggcgaacatcagtgggggtcaaaaaaaaaaaaaaaaaaaaaaaaaaaaaatttttgggccgcctggccagaaagtttttaaacccaactccggtggggcggcggcggcgcccaaggatagggttacggtacaacgcgggcaaattagcgcgggtccataagaagaaactccgggggccagcgactatggggctggggtttcccttacacaaatataaaaaaaaggcgcgggggcgacaccccggctgtttttgagaacaaactcttccaaagagtgggacgtcccgaggaggggtcattaagcgggctctcttacaacacaggggggctcaaaggagacgcctaggaaatattaaaattaacggcccggcagggtgaac

SEQ ID NO: 508430 - DNA, 270 bp, Homo sapiens
  misc_feature (138)..(138): n is a, c, g, or t
aggatcacgatggccgtggtagggttaatggcaggaaggcgggggagagcaagatttctgtgcgcagcttttcatacttttgaaccatgtagatggattacgcagtctatgcctatttgaaaattgaatttaattganaaaagagaaacacaaagttgcaacatatgggaaacaggagaggcttcagatcaagactcagctgggtttccagaaactcacaaagtgtccttgtctcttggcccctgtcttatctgtgaggcatctatacga

SEQ ID NO: 508431 - DNA, 910 bp, Homo sapiens
  misc_feature (128)..(128): n is a, c, g, or t
  misc_feature (131)..(131): n is a, c, g, or t
  misc_feature (162)..(162): n is a, c, g, or t
  misc_feature (170)..(170): n is a, c, g, or t
  misc_feature (201)..(201): n is a, c, g, or t
  misc_feature (303)..(304): n is a, c, g, or t
  misc_feature (306)..(306): n is a, c, g, or t
  misc_feature (308)..(309): n is a, c, g, or t
  misc_feature (313)..(313): n is a, c, g, or t
  misc_feature (315)..(315): n is a, c, g, or t
  misc_feature (318)..(319): n is a, c, g, or t
  misc_feature (323)..(323): n is a, c, g, or t
  misc_feature (345)..(346): n is a, c, g, or t
  misc_feature (353)..(353): n is a, c, g, or t
  misc_feature (356)..(358): n is a, c, g, or t
  misc_feature (367)..(367): n is a, c, g, or t
  misc_feature (384)..(384): n is a, c, g, or t
  misc_feature (406)..(406): n is a, c, g, or t
  misc_feature (410)..(410): n is a, c, g, or t
  misc_feature (412)..(412): n is a, c, g, or t
  misc_feature (417)..(417): n is a, c, g, or t
  misc_feature (423)..(423): n is a, c, g, or t
  misc_feature (425)..(425): n is a, c, g, or t
  misc_feature (429)..(429): n is a, c, g, or t
  misc_feature (438)..(438): n is a, c, g, or t
  misc_feature (449)..(449): n is a, c, g, or t
  misc_feature (453)..(453): n is a, c, g, or t
  misc_feature (456)..(456): n is a, c, g, or t
  misc_feature (471)..(471): n is a, c, g, or t
  misc_feature (473)..(473): n is a, c, g, or t
  misc_feature (477)..(477): n is a, c, g, or t
  misc_feature (479)..(479): n is a, c, g, or t
  misc_feature (489)..(489): n is a, c, g, or t
  misc_feature (495)..(495): n is a, c, g, or t
  misc_feature (498)..(498): n is a, c, g, or t
  misc_feature (500)..(500): n is a, c, g, or t
  misc_feature (883)..(883): n is a, c, g, or t
ggctctgggcactcagcatcgtttccttttcctccgctggagcagctatggcggcggtgaagaccctgaaccccaaggccgaggtggcccgagcgcaggcggcgctggcggtcaacatcagcgcaggnggnggtctgcaggacgtgctaaggaccaacctgnggcccaanggcaccatgaagatgctcgtttctggcgctngagacatcaaacttactaaagacggcaatgtgctgcttcacgaaatgcaaattcaacacccaacagcttccttaatagcaaaggtagcaacagcccaggatnntntnntttntnatnntatnatttttaattttttaattattnnagagctnttnnnatatgtggntttttatattttttaangcttttattttataataattanttantnatttnaatttncnaatnaaaatgccntttattttttngaanaanttaaagtaagcagananattnanagggaaacanttatanatntngccataatatctcttcgtactaaagttcatgctgaacttgcagatgtcttaacagaggctgtagtggactccattttggccattaaaaagcaagatgaacctattgatctcttcatgattgagatcatggagatgaaacataaatctgaaactgatacaagcttaatcagagggcttgttttggaccacggagcacggcatcctgatatgaagaaaagggtggaggatgcatacatcctcacttgtaacgtgtcattagagtatgagaaaacagaagtgaattctggctttttttacaagagtgcagaagagagagaaaaactcgtgaaagctgaaagaaaattcattgaagatagggttaaaaaaataatagaactggaaanggaagtctgtggcgattcagataaagg

SEQ ID NO: 508432 - DNA, 728 bp, Homo sapiens
atcgagggcgtcttcaccaacggcagccgggtggaggtggaggtggacatccactggcagccgggccaaggagaaggagaaacagcagcacctggcttcaggtgccagcagaggccagtgatgagggcattggcatcagcgccaacgaggatgagccaggtcttggccaggaaggagacttctctggcgttgggaccattgggcgccggagggcaatggtctgttggcgccccaggaaaggagccacaattgtgattggaggttggtacagacgcacctcttcgaaagcctggaggctattttgctggcccggctcagcggattctggatgatcagtttatcatacccccggagctggaagaggaggtccaagaaatcatgaagcatcacaggagcaacagcagcagcagaagcgcacaacccctcagctcagccgaggctgccggggcactaccagctggaccagctgcagattattaacgacacgccactatgaaccagcgagctgttaacaaataaactaacacaaaagactgagttgcaagagtctcccagggtcacatttaaacagggttttactccaaatcttccccaagaactgttcgcaagctgtcatcgcagctatctgtaggtctcttcttgggtaaatttaagtatcaccactttcttctagtgatgctttaccatatgattaccttggtaatctccccctacatatagatttgtag

SEQ ID NO: 508433 - DNA, 953 bp, Homo sapiens
cctgttgctggggagaatcatcttacaccccccaaaaaaaaaaaaaaaaaaaaaaaataaaaaaaaaaaaaaaaaaaaaaaaaaaaaaaaacaaaaaaaaaaaaaaaaaaaaaaaaaaaaaaaaaagaaaaaagacaaaagcagagagaggagcggcgcggaccacagcaattattgtcactcgacgggagggacagcagtcaatctctagacagtaaccaacgcgatgtgttagtgatctatgaagagagagtgagcggagagcgctattatactgcgtgaggtcaggttgatcattaatccctaccgaagcgcgcggagtcgatatcttgattttggttgagtacaattcgtatgatgttgtggagagaggtgaataaaatagaaaaaaaaaaaaaaaaataaatactttacctaaaccacaaacagataccattcatatctattttatccagcatataaaggagaacaaacatatccgtgtcgtctgttgaaactaccaacatacaattctatcctctatactttcaatatgtaatatatctatatcactcatatcataatcaatcaaatctcatattataatattatatttcataacggtggtctgaaagacgactgagagatgagagtgagagacgagggaggggagagacaagaaaaaaggggatgctccggacggggtatgtaagtgtagtggtgcggaggcgaagcgaatagctaacgaagagggagcgatgatttgttgaggtgttgatgtagatcgagtagagtatgtgcggctaggtatatagtatagtggtctgaaagaggaatacgaatatactgatcatgtttatagaacatagatcagtgcagcgtgaggagagaatgagagataaatgaaattacgcatgaagccaccagccgcgtcacatagatagactgagtcgagatacgacccttcacgtcca

SEQ ID NO: 508434 - DNA, 558 bp, Homo sapiens
  misc_feature (279)..(279): n is a, c, g, or t
  misc_feature (281)..(282): n is a, c, g, or t
tttttgtttataccaatcccccccccccctctcgagagtggaagaaaccaggttctgagatgaaggtgtctctcagaggaaagttttttggatggcaaagagggtccaccctgggctgactgccaaactgtttccaaagttacacatatagtacaggttgtggtaagaagtacccgggggattcacccattcccgaggccttccggggagtgcatcggtacttgaacaatgcctacgccccggaagaattcgcttccacctggtccagatgaaactgtngnncccagtccctatgagcaaggggctaaggccctgaaatgagcccgttctgggagtcccccccaccccctcattttctccacaaaggccttggtggtttccacattgctacccaatggacacactccagaatggccagtgggcagggaatcttggagcacttgttccgggatggtgtggtggaagaggggatgagggaaagaaatggggggcctgggtcaaatttttattgtggggtgggatgagtaggacaacatatttcagtaattgaacacagaa

SEQ ID NO: 508435 - DNA, 97 bp, Homo sapiens
  misc_feature (50)..(50): n is a, c, g, or t
  misc_feature (88)..(88): n is a, c, g, or t
ggcgggctctgcgtgcgcaccggctacacgcccaacgacgagtgcttctncatcttcctggacgtcagcagggacttcgtggccagcngggcggagg

SEQ ID NO: 508436 - DNA, 133 bp, Homo sapiens
tgaaagacacatcagcatggaagactcgagttaccttagggtcataccaaccaatacatatatgagcagcagcaaatattgtactaggaagtgcacagattggccaggagtaccacaacatcagataatcata

SEQ ID NO: 508437 - DNA, 766 bp, Homo sapiens
  misc_feature (27)..(27): n is a, c, g, or t
  misc_feature (81)..(81): n is a, c, g, or t
  misc_feature (109)..(110): n is a, c, g, or t
  misc_feature (119)..(119): n is a, c, g, or t
  misc_feature (264)..(264): n is a, c, g, or t
  misc_feature (286)..(286): n is a, c, g, or t
  misc_feature (303)..(303): n is a, c, g, or t
  misc_feature (310)..(310): n is a, c, g, or t
  misc_feature (320)..(320): n is a, c, g, or t
  misc_feature (322)..(322): n is a, c, g, or t
  misc_feature (327)..(327): n is a, c, g, or t
  misc_feature (338)..(338): n is a, c, g, or t
  misc_feature (342)..(342): n is a, c, g, or t
  misc_feature (350)..(350): n is a, c, g, or t
  misc_feature (391)..(391): n is a, c, g, or t
  misc_feature (410)..(410): n is a, c, g, or t
  misc_feature (425)..(425): n is a, c, g, or t
  misc_feature (427)..(427): n is a, c, g, or t
  misc_feature (493)..(493): n is a, c, g, or t
  misc_feature (497)..(497): n is a, c, g, or t
  misc_feature (499)..(499): n is a, c, g, or t
  misc_feature (517)..(517): n is a, c, g, or t
  misc_feature (521)..(521): n is a, c, g, or t
  misc_feature (542)..(543): n is a, c, g, or t
  misc_feature (552)..(552): n is a, c, g, or t
  misc_feature (565)..(565): n is a, c, g, or t
  misc_feature (570)..(573): n is a, c, g, or t
  misc_feature (579)..(579): n is a, c, g, or t
  misc_feature (590)..(590): n is a, c, g, or t
  misc_feature (608)..(608): n is a, c, g, or t
  misc_feature (653)..(653): n is a, c, g, or t
  misc_feature (669)..(669): n is a, c, g, or t
  misc_feature (672)..(672): n is a, c, g, or t
  misc_feature (706)..(706): n is a, c, g, or t
  misc_feature (711)..(711): n is a, c, g, or t
  misc_feature (728)..(728): n is a, c, g, or t
  misc_feature (766)..(766): n is a, c, g, or t
tataatttaactataaaggtccaattnttcacagagccagtttgggatgggctgcattccatttatgctgtatatagtttnaattatatataaattaccccttcttctnnccacccctnctcccatcttagtattttgcaagatctaatcagttgtacacctggtgcccctcgcttgcttcaatcatggttatttgatggcaaaatcgacctcttgtcgctgaaggagagagaaaagatgtgtgtctgattggccctgggatcntttgagctgtgccatttatggnaccctttgcctatgcanccccctnttagatcccncntaaantttatctcacngccnttataatntctattgggaagaggcttgtgaccagtaccaatcttgagtntctttttctgcccacaagnaaaataatatccgcncngaaatgtcatttatccactcacacattcttggggaaaaaaatcaaatgtcagccctagcagatgtngcangnaaattggtagcaagtaangatnacaacccagaggaataagaannaaaaaacanaaagccctatgtnttaannnnttatanacaattagganaattagcattgtcagacnataaacctttgctttttaaagtttatttttactatttctttatcnctttattgtatcatcnccnttggtttcataatgtaaaaactatatgttgaacnaattnaatgtcaaaattttttnttaccatagtccatgttaatagtggggctttcaggtgn

SEQ ID NO: 508438 - DNA, 377 bp, Homo sapiens
aacgggtgatgcggttggctgaaggctaagttcccttccaactttgagatttctgctcaaagatggtaaacatacagtagtctctgcccttatccctggtttcagttatccactgtcaacactggtctgattatttctggaatttttttttttttttttttgaaacagtgtctgtcacccaggctggagtaccgtggcacgatctgggcccattgcaacctttgcatccgggtttaaagcgattctcctgcctaagccttaaagtagctgggattacaggcacccaccaccaggcccactaattttttcgtatttttagaagagacggggccccaccatgctgaccaggccggtcccgaacctctgaccttatgatc

SEQ ID NO: 508439 - DNA, 345 bp, Homo sapiens
  misc_feature (66)..(66): n is a, c, g, or t
  misc_feature (161)..(161): n is a, c, g, or t
  misc_feature (309)..(309): n is a, c, g, or t
ggccaccctgtgttgagcaagtctgttggtgctatttttccaacatgtattcacttcatgtctgtntgacacatactggtaaattctcacaatatttcagactttgtcattatatctgttatggtgatctgtgattagtgatcttcgatgttactactgtnattgttttagggcaccacagggcacacccagacacaacagtatttaaattaggtcaattaataaccccacagtggcctctgagtattcaagtgaatggaaaagtcacatccctctcatttttaaatcaaaacctagacatgattaagnttagtgaggaaggcatgctgaagttaaaataggcct

SEQ ID NO: 508440 - DNA, 426 bp, Homo sapiens
tccccgcggcctgccgctgcgagctgtcatgcccggtccctttcttggcgagaaagaccatgcgcctggcttctggctactctctcagcactgcaggctcctgaacaaaatggtcgggcttgggatcctcctcgtcagcattgtcttcctcaccgtcgtcatcctcctcctgcccttctctacgcactttggttctcagcacctgagggatggtgaatggcctgcgtgctgatgagctcgtcatcagagtctgcatcattggcgcccaccttgttgacatcgtatgtgtcatcgtactcttcctcatagtacacactgtggtaaggcaggctctcgcctggctgccgtggcacctcctccaccaacaggctatactgttcgcagctgcggccgcgggctccgagctccacttcgttatccctgtcc

SEQ ID NO: 508441 - DNA, 188 bp, Homo sapiens
ttgaaattgctaaagggaaatttttttatggtaatgctcttccggatataagcctcagttaaatggaattatttatgggatgggtggttctggttaactaaaaattaaccagtaacccctttgtagtaaccattccagaaaatacttttgccttaaaaaatatgatatgccagagatgagttagtgtt

SEQ ID NO: 508442 - DNA, 215 bp, Homo sapiens
aggcacagccctccaaggagcacccagctgcctggaacaggacttcaggaaaaggagcatcgtgactggtgacagatgtatggtgtctgcacatcctggctgagaagttcagctgtgacgacctggcctagacgaggtcattctttttggagcatggagttgcacacagtgtgtcagtatgatgcgcaggatttcactgtggacacagcagacta

SEQ ID NO: 508443 - DNA, 396 bp, Homo sapiens
  misc_feature (209)..(209): n is a, c, g, or t
  misc_feature (264)..(264): n is a, c, g, or t
  misc_feature (354)..(354): n is a, c, g, or t
  misc_feature (371)..(371): n is a, c, g, or t
gttggccgagttgattttctaaggcctctctccttggcttgcagatggccattttctccctgtatcttcacacagtctttcctctctaggtgtcatctgtgtctaatctcctcttattataaggatactagtcaaatcagatttgggcccatcctaatggcttcattttaagttaattatttctttaaaggtgctatgtccaaatagtnacattctcagagagtaggaattagaagttcacacatgaattttgggagggacaanattcagcccataacagaaatcatgggtataacttttatttttcaataacagtactttgatgacattggggctggttcttccattttaaanggaatacaacatgtttnagaccacagcatctgcatggctgtt

SEQ ID NO: 508444 - DNA, 287 bp, Homo sapiens
tggatctagaggaccctatggagaccaggctgagctctgcgatgacataagccccagccaacattttgactgcatcctcatgaaagaccctgaccgagcactgcccaactcggcagtcccgaattcccaacccccagaaactgtgaggtaataaacacttgatgttttaagctccattttggggttatttattttatttttttgttacaactttttttagagatagggtctaactgttgcccgggctggagtgcagtggtgcgatcacagctcactgcagcctccaa

SEQ ID NO: 508445 - DNA, 692 bp, Homo sapiens
gtgatctaccatgcattgtctcagaaagaggcgaatgactcccgatgttcagccttcaggagcacaggggccgaggcccttcgttgagggtcttcccttgaaagcgcatgcacgccgcctggaattgatgccccgaaggccccctggcgaaggcacccaggtggcagcggcaaaggcgcggggtggttccctggaagtacttcacccgggccaaaaaagcggcaaggggagcaagcgaaacggcaacagaaaaagggccccaaaaagggggggccattctttctgggcccaggccaacagggagggagctggcggcctcttggcaccataaaacccagagcagcaagagattacaggctctttcccttccccttcttccgagtggacgctcgtggaaaacgccagttaccaatcaggggcacctggttcgcaggtgggggcttcaaaggcgccaagaaacagacggcaagaccaacgaaggatggatttcccaagtgccccaaaaggctttcttttaaaaaaaggggccaagaatttccttcaccacggggggcgccctaattaactttcacaaggttgtggacacgcaaaaaaaattttcccaaaaatattgtggccccccctttcttttaattggtgccggtaattaacaggggaacattcctttcatacgggaaacacaacaggcacat

SEQ ID NO: 508446 - DNA, 389 bp, Homo sapiens
  misc_feature (276)..(276): n is a, c, g, or t
  misc_feature (283)..(284): n is a, c, g, or t
  misc_feature (324)..(324): n is a, c, g, or t
  misc_feature (355)..(355): n is a, c, g, or t
  misc_feature (379)..(379): n is a, c, g, or t
ctgacctagaggacccagcagctatccaagagtctcttaattcctttctctggatgtgacctctctgcaagattagggaaattttcctgaataatttccttaagtatgtattctaagtttcttactttttctttttctctctcaaggaatgccagtttgtcttaggtttggccactttatataatcccatatttcttgaaggctttgtttcttaaagttctttttttgtttatcttttgtgtgactgggcctctaatttgaaagacgggtattcanagctctnngaaattcctttttctgcttggtctaagtactattgttaanagcttccttgttgtattcttgaacaatcctngtagttacaatctttcaattccangaggttccac

SEQ ID NO: 508447 - DNA, 174 bp, Homo sapiens
ggactctagcaggcatcccccacctgcgcggtgcaggtggcctttgcattggcagcagcccgtgtctctagttctcagctcagagttggggggcttgcaagatgaccggtgcagggtggccaggtgcaggtgtgggcctccggtgcaggtgtggcctaccggtgcaggtgtggg

SEQ ID NO: 508448 - DNA, 1536 bp, Homo sapiens
  misc_feature (115)..(115): n is a, c, g, or t
  misc_feature (610)..(610): n is a, c, g, or t
gccacgccgcacccacgcgccacgcgcacacacgcgccctccctccaacgcagcgccttccctgcgcctgcgcctcctgcgccccctacacgcccccccacgccccacgcacgcngccccctgcccctccctccctccctgcgccccctgcgcgcgccactcccaccccccgcctcctgcctctcctcgcacacgcgccacgcaagcccccccacctctccctgctgcgcgccctccacccacacgcaccacccaccgcctgcacacgcgcgcgcactccactggccccctgcccaaccccccccctgcccctctcctctccacgccccacgcctacacacacacgcccccccgcacacacagccccctgcgcccgcagcccacctgcgccccgcacgcccctgcgcgcacgcgcgcccccgcacgccccgcgccacaccctccccacccgcctcccccctcgcacgcacgccacggcgcacgcccccttcctctcacacgcgcgccctgcgccaccctgcggcctccctccacgcccccctacactgcgccctgcacgcgccgcgctacccccatgcgcccttctcactcactgccacttccttccacnctgccctcccccacccctgccacgcggcgcgcgccacgccgcgccacacgcgcgcgcgcgctcctcgcgcgcacgccccccccctctccactgctgcttgcgcgcgcgcccgcacgccttgcgcgcgcgccccccccacctggcccccacctctcctgggcacccctccgcccctgccctcccaccgcaggcctctctacactacacaccgcgctagcccaaccactggcctctaactctggccctacgcacgccccctctcttgccaaggacacccaacacacacacacacacacacacacaacgcgcgcgccgcgccgcccccggcccctctctacgcacggctcatcctcccccctcttcccgcaccgctgcgcccccccaacaacagccgcctctttacacccgcccgtctacccccccccacccctctttccctctgtgttctcccccacacgccggtgtgcggctccccctctcatctacccttcgaccgcctccgcctatctccatcttacccccgccttcagccgccacgctgggccccccggcgcccgccctcctctcacccacacccggcccctgtctgcacttcgtggccccgccacacaccccgtgcccctcaacccccctgctgcgccgacactccctctcgcgccccgacccgcggccccccctctctcaccctcctcctgcgcccgccgtctggctcccccctcttccttgtcggcccccccccccttcacccccttcccacgccgcactttcccaccccccccctccttcccgccgctccgcccttcttccccccccctctcctcccccgcgtgcgccaccctccccgcctctccctcccccactctagcccctggcccatttttcgcctccgcccccgtccgctggccccacctcttccgccgccctcc

SEQ ID NO: 508449 - DNA, 163 bp, Homo sapiens
caggaatggtgcagtggcttatctatctctgggcgagaagccaacttcttcttcgaccggaaaattttgaccaacccgatggtgagcaaagacaagaacatcacctacttccggaacttgggcttatggctaggggtgtgcggcagtgtcctggccctcccag

SEQ ID NO: 508450 - DNA, 358 bp, Homo sapiens
acactagaggatccctccttctggccacgctaacggacatcacctgctgggtcaataggcataagtgttttcaaaacaaaaaattaaccaattagccaggactggtaggcccacacctgtagtcctagctacctggggggctgaggtgggagaatcacttgagcccaggggtttgaggctgcaatgagctgggaccacaccattgcactccagcctgggcgacggagtgagactctgtccctaaaaaaaccgaagagaagacagtcattttaaaaatatttggtcttcaaaaacccagaattgaagaacacaagtatctggcatgacgaaaatatcctacaaggcgtggccagaagga

SEQ ID NO: 508451 - DNA, 1643 bp, Homo sapiens
tcgtgacaggagctctactggtgatcctgtccgtttgcgctagtgtccccccgtgttggtaatgagttggttgtgccgataggcctacttcagtgtgtcatgtacacgtgtgtctggcgagtgtcctgtaaagcgtcgctctggtggcaggggttgtgccatcactatggccccgcactatgcttggcacaatgtggggtgtgtggagtgctcgggtgcaccccaagtgggtaaggaaggcgcgatgaaggtcacactagtggcccattcctgtgctgggctaaagcagccgttgcaactaattgggctatgtgggggtgtccctggcctgggtcctgactaagggtttcgctagcaatggccggcgcatgtggtcgctcgtactggggtaaggggtgctcagagatatgtccctgtgctttcgggtcgataatgtgcgccttttgccggttatgagtctcgggtgacccatggtgtgtgccagtactatgtaagcgcgccgcgacttgcgagtgtaaaatgcgcgagcacgagttggggtttggtgcgagcaagagtgttggtatgttgcgccggttaggtaaaggacgtcgttaatggccgtgccgtggttgcgggataggacacgagctggggctctggatagagtatgagaatgtattagggtttggagcggtggctagtgtgctctgatagtgagtgaatttggagaaggtaggttcgtgtgtgtatatgagttcgtcactaggtatgaaaggatatagtgccgtgtggttgttggtcgttgtttacgcaaggcgcgtcgtagtgaagtttgtcgattgctaatgttgagtagtcgggggtaacagtaatggttgtcgaatgaaggacaaggttgatgatctgttgggaagtggagactgacgccgttcgtatgttgggatatatgggcccttcgccctagggcagaagtccgctggtatgcccggagggttgttgtgtgtggccgcgtgaagacgttgtggtgtgtcaacctcgtgctaggcgggaaatgaagttggcagtatagattaacgagtgctcaagtgtagtacattggctcgaagttgaagtgcatcgtgagatggaagggcctgtgggtctgtggagatgtgggcacaggtgtggatgttgtgtggtcaagtgtagacaagtgtgtgggatagtatgagtggagagtgtgttgataggtgcaggattcagtcgttacgcgtgtgagagcttgtctatcagatagcgtggactcagctgaagcagagaagagtggagccgcgccagtgtgtggtgctgagcttttcaggtgtgaggagcagcagttatgcgcatgagagtgatggcagcgtgataagggccagtcaaatgaagttggtgtgacacacgatgatccaatcttgcgtcaagatagggagcgccgcgaagtctggccttggcggaatatcgtctttgacagagcagcagccctgggagagcagtgaaaagtgaaagcgtaaggcgtcgagggctaattgtcccgcataggccgtggggtgacttgcgctggtcagccaaggcagtgcatgacatgttggggtttcctttaccttttctataatgttgtaccaagaacatccagcttatagttt

SEQ ID NO: 508452 - DNA, 489 bp, Homo sapiens
tatactcaaggtctctgatgtggacaagcgtacgggacaagagaacacgatcctatcactaatgacacgggccgttggagcaaggcagacattgcccgtatggtccaggaagctgagaagtacaaagctgacgatgagaagcagagggaccaggtgtcctcccaagaattccacttgcagtcctcatgccttccaacatgcacagcaactgctcgaagcatgagacacttccaaggccaagattaaccgatgcaggacaacacagacagattctgtgacaaagtgtacatgaacattatcaacttggcttgataaagaatcagactgctgagagggaagaatttgaacatcaacagaacgagctggagacagttcgcaaacccatcatcaccacgctgtaccagagtgcaggaggcatgccaggaggaaatgctgggggatatcctggtggtggagctactccctctggtggtgttcctcagagccacc

SEQ ID NO: 508453 - DNA, 796 bp, Homo sapiens
  misc_feature (401)..(401): n is a, c, g, or t
aactgtatgtgctaggtactgatggcatggtgttgttaactctgtgcactgatgggctgtgtgctggtgtgggtcccagtgcctgctggggctgtgtgctgggactgtgctgtggctgcctggctgccgatcagccagtagacatgactgagcatcaaatgcctttactgcttgtctactgcatgtgtgagcgtgtgagctgctgatgtggctgacaatggagctgctgtcaagcatatgatgttgctgttggatgtgctgcgtgcagtggacctctactgtggtgcaccaactgacttgcttctgtctaccacttcctgttgtgatgtgatgagggccatgttgcctgcttgtggccagccactgttcactgccaccaaacatgcttgcatgatgacacnttgtggcttcagatgaatgccctgtgaagctgagcttgctgttgcttgtgcctcatgcagctcaacatgtgcttgcttggtgcttgtgttgacaactccatcatgcctggtcaacattgcttgaacctcgatgccatgtgccttcggtggtgccctgcatcaatgggggcatgccactgtttgcacttgaactgagaaccctgttgatgtgggtgaccccttctgtgtagaatgttttgcgatcatctcttgtcaaacggcagaaccatccagattgtttctggtgtactgaggaccttggtgcagatctgtcaaggcagtgtgtctgactgccggagcagcccctcgctgtggcttgtggactggccacttcctgtgtctggctctgaccactc

SEQ ID NO: 508454 - DNA, 354 bp, Homo sapiens
tgtggccccccaacatttatgagaatggacatgtttgcatttccattcttcatccgcctgtagatgacccacagagtggagaactggcttctgaaaggtggaatcctactcataatgtgaggactatcctattaagtgtaatctcactgcttattgagcccatcaccttctccccagccaatgactaatcttcagttatgttcaggaaatggagagacagtaaaggaaaacacaaagaatatgctcaaatgattaggaaacaagttttatccactaaggccgaaacagaaaatgatggagtgaaggtacccacaacacctgtcggaatactgcattaatactaatgtgcctcca

SEQ ID NO: 508455 - DNA, 272 bp, Homo sapiens
gaaaaatgttttttaaaattcgagggccaggcacagtggctcaagtctgtaatcccagcactttgggaggccaaggcagttgatcacctgggtcaaggagttcaagaccagcctggccaacatggcaaaaccccgcctccactaaaaatacaaaaaattaaccaggcatggtggcacacgcctgtagtcccagctactcaggagactgaggcagaattgcctgaacctgcggggcagaggttgcagtgagtggagtacactgcactccagcc

SEQ ID NO: 508456 - DNA, 580 bp, Homo sapiens
cccggtggctgccgacgcttggttggtcaggcagctgcaggtcccgcctgttccagtgacatggacccgggcccggcccaccggccccctggcttgggaaggcgtgggccatcactggtcctcctctggcgcgtcccctaggcctccccgtcctctgtcgtaacctcatgcctctacactgttcagcggtggaaagattgatataacttttaaaagttacttactgctttgaaataaacggacgtttgagctcacgtggcggccatgcatggttagtggcggaagacggggcccattgcggatcccccagcgctgaagcacggggttcagcgtgtcccccagtgctgcaggtgccgccaggacgggccacgtgggccccccgagcctcccccctcgggcgcctccaacgacccggagtaggcgcgcctccgggaccattgaggactgacccaggcaacaattccaagacccaacaaagtggcttccaacaagactttttctcaccggggaaaccccacttgttgtcttcttggaaacgctattttagaataccacttactctaccaaagaaacagctaac

SEQ ID NO: 508457 - DNA, 1166 bp, Homo sapiens
ggacgcgtgggtcgaccacgcggtcgcgagccacgcgtccagcccgcgcggaagggccctggacccgcgcggctccctggtggataggtgagcaaggcgctgctgcagcctcggtgtctgccgtcaaccgcaggaggatgaagctagctgctgggcatcgccttgctggcctacgtcgcctctgtagggggcaacttcgttacatatgagctttctactcaacaggtctatccaggaaaatggtgcaactcaaaaattgacaagcacagattgaagcagatggttgaaccactaaagagcagaaaatcaagaagcattaggcaaaagaagctttacccagaaataccaccagtcaacgttttaatcagagaaggatcggaagacgactttggataacaggaggcgcacgggttcgtgggcatcccatctaactgacaaactcatgatggacggccacgaggtgacccgtggctggacaatttcttcacggggcaggaagcagacacgtggagacactggatcggacattgaagaacttcgagttgattaaccacgatgttgtggagacccctctacatcgaggttgaccaagaatataagcaacagggcatacaccaacatcccgttcaaactacgtgtataatcctatcaagagattcaagaccaatacgactgggcacatacaacatgtaggcgctgggcaaaaaggagctacggcgccggcatggcaccaggaccaccacatcggacggggacaggcgaatcatgaagacacactacaaagaggcagatacagggagcaccatacatcacataggcctcaggccggacagaaaaggaaacagattacaaaaaccaggcagcgaaccagaaacaagaagatgaaataccaggacacaaaaaacacacatggaccggcggcaacaacagaggccgacagacggacaagacggagagagggacaaggagaccacacgcgacacgcacgggaccacgcggagcaaaacatagaacaattagtagagaacaacaaaggcacgaaggcgggaacaaaacgcagccagcaacaagacgaacgaacactagcatgacaaacacagcgcggggcagaccatcagccgactcggtcactgacagcacgcaaaagagaagaaggcggagcgcac

SEQ ID NO: 508458 - DNA, 141 bp, Homo sapiens
gaaggttagcgtatcgatgggcagtgaggggcgcatatgatctaggctattatatcgggtatagtagcgctacgttacacggtacttagactatagtagatggcaattaaaggtgatatgatcggcgagattgtatgatga

SEQ ID NO: 508459 - DNA, 494 bp, Homo sapiens
ggtgataatcgatgtcactaaggtctgtgcattctggatcaggcactggagtgtgcgtgtgtgacttcttggcagagcaacgcataacatacaatagtggtggctgcgtcagtcagcctgggtcccgagcatcccagccaatataatggcaggtactgtgagagggaaataacttgtggtgtactaaggcacttgaaattgggcaggtgtttttttcacggttcggtaacttcagctcacatggatggatacgcacattgttttcatccaagataataataactaatagtacttgggcatatgctatgtgccaggtgcgtctgggttcacattttgcactaccctagaacatacatattattattaatctcatcatttagatggggaaactacggttagacatgttaagtaacttacccaaggtcacccagccagtaaggggaagggtggggatttaaacccaggtacacgtgacttcagagcttgagctctta

SEQ ID NO: 508460 - DNA, 353 bp, Homo sapiens
ctagtgcaggccttaaggtaatttctgtttgtgatatgaagtatggatccttgtttcctttttttttttggcatatcaggagccaattgtcctaccatcattggtggcaaagtcaacccttttttccgctgcccctttgtaaaagttcactgtcaatattcatgagtttatggctaaaccctgtattctctcccatcgatctattggcctgcctttatacaaatcccacagggttttgatcctaaacctttataataattctcaggatcaggtaatattagcccttcaccttgggccggttttaacagagaggttggttttggttttggtttttttgactaccctagggtatc

SEQ ID NO: 508461 - DNA, 423 bp, Homo sapiens
aacgtgatgcggttgggaaaagagcacagctttgtggctttgctatggactgaatatttgtgtctccccactctgccaaattcatatgctgaggccctcatccccaatgtaatgatatttggaggtgaagctttggcggggaggtaattaggtcatgagggcagagccatcatgaatagggttattaatgcccttctgataacagaagagacaagagagattatttctctgtctgccaggtaaggacatagccaggaagaaagccctcactggacaccaaatcttggcgccttgatcatggacttcccagcatccagaactatgagaagtagatgtttgttgtttaagtcacccagtttatgatcagtgttatacagccgactaagacaggggtaaacagacctgagttcaaatactggctcc

SEQ ID NO: 508462 - DNA, 890 bp, Homo sapiens
  misc_feature (2)..(2): n is a, c, g, or t
  misc_feature (745)..(745): n is a, c, g, or t
  misc_feature (833)..(833): n is a, c, g, or t
  misc_feature (849)..(849): n is a, c, g, or t
angaatcggcctaagtgttgtgtgcctgaggattttctgtgtttctgggaaccattttggtaactgagagttttctagaaagccacctgtttggtccctgttttctcgtggattcgcacagagtaaaagacagtgctcttaccattatttccatttccttgttctgcctgtagctatttctacttttacatttctgtttatgcttcctttttctggattagtttacacactgttttttgtctttttctttgtgagacaggatcttgctctgtctgccaggcttggagtgcagtggcacaggtatgattcacttgcagaactcctgggctcaagagattcacctgccttagcctctcatgtagctggggaccacagtgcttacggccacacctggtgcttacggccacacctggctaattttcttttcttttttagtggagacaaggtctcactttgttgcccggtctggtcttgaactcctgaaattcagcgatcctcccacctcggcctcccaaagggctgagattacaggtgtgagccaccatgcccagccactgtatttcctttttaatagtgtcttttactgatttggtttctacatattctggaatacttttaattgcatttttatgtttaattttttcagttgctcctaacttttagaaatcggtaggattttgtatcctaattacattttaataattctgaagtgtcaacgttactttctaatcatcaggaaagtcantgggtagcaaagaatatcccaagatttctctgcatcttcctctgagacattgagtaaagtcccatgccagcctcaggaggccttgcantgccggaggatcagcncacggtctgggcgttggacagcctgggtgttgaccacagcg

SEQ ID NO: 508463 - DNA, 465 bp, Homo sapiens
ctagaggatcttatggagacgggttcactctgttgcagttggaatgcatggtaagatcttggtcactgcaacatggtatctgacatatgcaactccagctcccgggtcaagagattctcctgcctcagctcccgagtagctggcactacaggcgcccaccaccatgcccagctaatttttatattttgagtagagacaggtttcaccatgttggccaggatggtctcgatctcctgacctggtgatctgctagccttggcctcccaaaatgatgggattacaggtgtgaaccactgcacccgacccacattttcccctttttataaggacaacagtcatattggattagggctcaccctgatccaggaacacctcattataactaattacatcagctatgacccttctccaaatcaggtcatgctctgaggtgctgggggttaggacttcaaaataggaattgtg

SEQ ID NO: 508464 - DNA, 480 bp, Homo sapiens
gactatagagcgtggtcatcctggagaaggccaccaaggtttaacttcaagcaagttagataccatggcaagcgtttatgtcaatgcgcagagctgacgctccgagcatgagaactacgatgatgccttgtcggttgctgctaaaggccacggacgctgtccatgcccgccgggccgagtactttgatggttctgagcccgtgcagaaccgagtgtacaactcactgaaggtctggtccatgcatcggcgacctggagagatgagcctcgagtcaccttccagtccaccaaggccgtgtacgaccgcctcctggacctgcttttcgcaacaccccagatcgtcatcaactatgccatgttcctgtaggagcacaagtacttcgagtagacgcttcataggcgtacgagcgctgccatctcgctgttcaagtggcccaacgtgtccgacatctggagcagctatcttatttcacaatcggt

SEQ ID NO: 508465 - DNA, 616 bp, Homo sapiens
  misc_feature (471)..(471): n is a, c, g, or t
  misc_feature (559)..(559): n is a, c, g, or t
  misc_feature (575)..(575): n is a, c, g, or t
acgttgacacttcaggctcgcacattaaagccactctagtttttatttatttttattttttagatggagttttgctctcgttgcccaggctgtagtgcagtggcacgatctcggctcaccgcaacctccgcctcctggattcaagcaactctcctccctcagcctcccaagtagctgggactacaggcgcccgccactacgcccggctaattttttgtatttttagtagagacggggtttcaccgttttagccgggatggtctcgatctcctgacctcgtgatccgcccgcctcggcctcccaaagtgctgggattacaggcgtgagccaccgcgcccggcctaattgcatttttatgtttaattttttcagttgctcctaacttttagaaatcggtaggattttgtatcctaattacattttaataattctgaagtgtcaacgttactttctaatcatcaggaaagtcantgggtagcaaagaatatcccaagatttctctgcatcttcctctgagacattgagtaaagtcccatgccagcctcaggaggccttgcantgccggaggatcagcncacggtctgggcgttggacagcctgggtgttgaccacagcg

SEQ ID NO: 508466 - DNA, 388 bp, Homo sapiens
aaggatcagtgctgccctaagtgaataaactcaattgtccatctttattttagagttttaatgaattcaaggaagggagcatagcatatctcggctcccccatttcctcctcaaatcggagagaggtgggcaggtttttatttcttccctttcagcatatgagatccttcaagccaatgtcagcgatcttgtattggagcccaaagcattgagatagataggtcctttaagtcacagcatcgggctcggatagggaagggtttgtataatgtttaagtgtcccctttaaccctttcatcatttcctgctctgtgtttgtcctagtaacccatgttaataaaaatgttcttttttctccatctgtaaatatgaacaaccttaaaatttc

SEQ ID NO: 508467 - DNA, 235 bp, Homo sapiens
cagacggagaaggccacgtaccatcgtcacatgctgacgatgctggcacagagcagccactgatgcatgccatccgtgcccgcatacatcgcccgggttaaagcacgacgctcgatattcgaaaaaattcaggccaagcgggaacgactcgcgcagttaaaacttgcgaactacacatgatgagcaaaagcccaaaacctgggcaaggtaaacaaatccccccgaaaagaatcaa

SEQ ID NO: 508468 - DNA, 173 bp, Homo sapiens
ctgtttaaatttctgaatccaacagttggtcacagaggtcaagtattatcaaggctcctttgtcagttctcaattttttttttctcatttattcttcaaggacatgcaaggctcaatagttttttataggcagatgcctgggtccatttaatatacagatgaaataggattat

SEQ ID NO: 508469 - DNA, 1521 bp, Homo sapiens
ctcagtccggccttgcggtaagccttcggccgcggctgcccggtagtcccggcggcggcggacagacgagctgacaggacaccagggtcgtaaggacggactccatcagatccggctgactgatctccacgaccgtggggatcgggacaaccgcgtccttctgacccgttccttatccccgatatagatcaccgcgtgacgaaacacgagtgacaggcagaatcaacgcagtgcagttacacaagagcacatggtgttacaccgcaaagtgaagtgacacgccgtgactgaggcactcggtgacatgatcgtgcaaaggacagggacaaacaacagacaaaacgacactgattatttatatgatgcctacagaatgaccaaacattgacaacgaccacatgatgacagagattcaagggatgagatcaaagaggatcaaaagacaaattccagagtaaaggggaagaattgtcataacacaaaacgagcacgaactgtgacacatgcgagacaccatatcgaaggaactcctagggacatggatgcgcatacggaatggcccaaagagactggacataatacaaacaggaccaacagtcgcatgaccaattaggactattaacacaccattatggcaacacacaacagcgtacgtcaggtcagagactcgaggagcttatggcacaaaaagccacagaccaaccacatggccatctgcaactacacggaactcgttggcgacgttaacagttgctccccaagatggccacatttagggcgcacgaaccttagggcaaatccaaggccgcactccactccttccacagaggtacacgacaacatcagttgggacatcaagctgggcacccaaacatgagatacacactgccgctgacgaagcacgggcagattaactacacgaggacacaacgacacaagtccatggatatgccccacacgaagtgcggaacggcaacacgacacatcaccacgacggatgggtggacaacacggcgggacgcggctgggaacagtgaccacaacccacaacgggtaatggagaagacctgcagcattacccccaacagccaacgaattcccacgcaacattgtcccccaaggaaagcacacaccaggcacacacacaacgggcgcaacataaaccccgcaccacacggcacacacggcgcaactggcggaccaacaggcgccccagtcacgtgacacaacacagtgtgcgcagacgtagctccacgcgaaacaaaggtggccaggagcaacatacccccaccagttgatgacgccacagccgagacagacgaagtcaggcggaccccagacgcagacgacgcaccgtaggacacagagctagcaagccaagcgcaacacgaggagcgcagaaaaagaacgagacggcggcgaacacacaactccaatgagcggcaccacacgacaacaccacaccagccacaggccaccaccgacgacaccgtaaatgagacaaaaagcgcaagcacatga

SEQ ID NO: 508470 - DNA, 204 bp, Homo sapiens
gagagatacagaaataggacgatgagtaaattctatagccatctaggggtggcttctcaccgactggtggaccacaagcagacatcacagatataaagatgtctcaggtctcttttacctttaatatactaatatagcaaggcaagcaccttcaaggagatcttacggatttgaaacactttagctctagggataaagcaatga

SEQ ID NO: 508471 - DNA, 163 bp, Homo sapiens
ttaaccatctcagtgaggggcttcggcagcccctcatgctgtacatggcatgtgtatctctgctctactccagaaggcaccaccacagctgcccacttcttggaatgttctatctcactgctgatcttggtctccacgaagctctggtgtccatgagttatgg

SEQ ID NO: 508472 - DNA, 188 bp, Homo sapiens
ctgaggcaagaagatcacttgacggcaggagtttgagtcttacttgggcaacatagtaatacctcattagaacaacaaaaaaaattagctgggcgcggtggcaggcgccggtagtcccagatactcaggaggctgaggcaggagaatgtcgtgaacccgggaggcggggctcgagatcgcgccactgc

SEQ ID NO: 508473 - DNA, 121 bp, Homo sapiens
ctctgctacgtaagatgagtaatataaacggaaatctataattgcaaggggcttaacgctgtgactttaataagctggaacagtccactgaatgggtataatgaattggcagtatatacgt

SEQ ID NO: 508474 - DNA, 240 bp, Homo sapiens
atccgcgcgattgacggctggagacgcgcttgcgagtgcaattgctggagcgcagcacccggggcattcgcctcaccgaagccggggcgaggtttatggcggactgttcacgcatccttgatggcgtgagcgccgccgaagcgtctgcccagggtgcgcatgcgcaggccgaggggaatctgcgggtgttttttccgtttctgttcagccggtatgtgatggcgccgctgttggccgact

SEQ ID NO: 508475 - DNA, 811 bp, Homo sapiens
caacacatataggctaggttgaggctcgtgtaatcggacgggctggctcgtcggttctggcagcccgcagcccctgccaggtgcatggctgattgtaccgcctggctgcggttatctggcatgggctgagccccttggactggcatcatgccgtagcatccagaccctgcgagtgcttagtggagatctgtgccagcttcccactggcatcgagattttgtagagcacagtgcccgcctgtgccattcagagggcatcacatctgtgatggaactgaggctgagaatactgccacactgaccctgctggagcagcagggcctcatccgaaagctccccaagtacaataactgctggctggcccgacagaccccaagggatgtggcacgagtagagagcaagactggttgatttgtaactccgttctcagctgggacacggggtaccactcccgacctgggtagaggccccgtggggacaaggttggggcaaactggaattgtccccagcttgatttccagcagagctgtggatagagaggtatccaggctgcatgcaggccgaacatgtatgtgcttccattcagcatgggtcctgtgggactccccgatgtcccgcatcggggtgcagctcactgactcagcctatgtggtggccaagcatgcgtattatgacccgactggggacacctgttgcttcaggccctgggagatggtgactctgtcaagtgtctgcgactccgtgggccagcccctgacaggacaaggggagccagtgaaacaaaggcgtgcacaccagaaaaaactgattgc

SEQ ID NO: 508476 - DNA, 265 bp, Homo sapiens
  misc_feature (214)..(214): n is a, c, g, or t
cctcaagtgatccacccgcctccacctcacaacgtgctgggattacaggcatgagccacctcgcctggccaacctcttttcttttaaattacccaatctcgggtatttctttatagcagggcaagaatggtttaatacaggggcccatccagcagcactgcattaccaggattccgctgaagaaatggacgtggccccaaaggccatagcctgnctgccaggtgccccagagtattgtcaactcagaggaacatctctcaggatg

SEQ ID NO: 508477 - DNA, 435 bp, Homo sapiens
  misc_feature (3)..(3): n is a, c, g, or t
  misc_feature (68)..(68): n is a, c, g, or t
  misc_feature (71)..(71): n is a, c, g, or t
  misc_feature (77)..(77): n is a, c, g, or t
  misc_feature (96)..(96): n is a, c, g, or t
  misc_feature (98)..(98): n is a, c, g, or t
  misc_feature (100)..(100): n is a, c, g, or t
  misc_feature (112)..(112): n is a, c, g, or t
  misc_feature (400)..(400): n is a, c, g, or t
  misc_feature (430)..(430): n is a, c, g, or t
ctnctgtttgagcccctctaccacgtccagaacacgctcatcccccgcttcacccagggcaagagcgnccngaccgngggtcagtgctaggcgccngngnacctcctgcggnctctacgactgcgacctctacttcctggagaactacatcaagccgccgccggtcaaccacaccaccgacagatcttccgccgcggggccagccgggtcctctgctcccggcctgtgtgcgaccctccgggccagccgacctgggtcctgggaggagggggactgtgtgcgcaagtgcgggcttacttcaacctgaccgtggcggccgaggcgttgccgggaagcgcagccacgttggccattcaagacggttgcgcgttgcccgaggttgaacgaccttgcgcgcctnggttggaaagaacccgcgattaaaactttnaaggt

SEQ ID NO: 508478 - DNA, 220 bp, Homo sapiens
ccgcagagcggctatcatgaagttagtgtccagtggcaacatgtcacaggcgagtatttattaggaaaatgtggaagcacaataaaggcaatcggttggttattcaattacattattttttattgggggtaggtatcttcttagaaagtccctagtcacctaattatatcttagtaggctgctctgtgattggctttattttactatctctttttacttc

SEQ ID NO: 508479 - DNA, 276 bp, Homo sapiens
cgatctgtccctttaatcttctgatgtacacctccttacgagctcttacttactccaacatatgcttacaacaatactctttctgcatctgagagggagcaaatattcagtaacttactgcagctagtcctcactaagaggagaatctgttgaatgccactggaaatgtacggatctcttgtgacagtcacatctcagggggaaactagtggttaaatcgtcacttctttgagtctgaaactatatcatttgcagtgcagataactgcctgatctt

SEQ ID NO: 508480 - DNA, 1665 bp, Homo sapiens
  misc_feature (962)..(962): n is a, c, g, or t
cgtggtttcctccacgagaatcttgtgtctgctttcctagcacgccgggggggtgtgtggaggggcgcgcgttcttctctgctctgcagagagttccgcccgctgttttggctggctactccactgtggcgtgttcgtgcagcgtgcctgtgttcgtctacaatcaggcacgaaaggctttctgttgggtgggctctgagttcctgcgcgtcctcgtaaggggtagagtttgtctgtgggacaaggggttggtaaccatacacggtggtagttcgtttttttcttacaggggtggagatctctccccgggagcgatcgtgttggttgtgatgtggtgggtgctgccccccctctcgggtggcgcactccggggtggggcccacagcgtgctgtgtgttggtctctttggggttgttttttttcgtgcaccaggggggtatatttcgtccttgggggggagttctcttgggaggagagaataataagaggggggggattttctccgccggcaccgagagaagcgcccgtctcttctagggggatattcccctagagaagaaaagttggtgttattagaagcgttccgtctcgcgggtgcgtcacgagctgataaaagatagtggcgttggcgcggttctcgtgatattgggggataaaataagacgctgtctcaggaggatagaagtggtgcgcccataaggagaaggtggggggcacgccacaacagagaagggggccccacacatgggggggaaattgtgtgtggggcggtgtgggtgtgtgtgtgggaaagaccgttgtcggggggggggacacagggtcgtcgaccctcgcgccaccaccccgggggagaggtggtgtaacaagaggggggcccacacttgagacaatgtgtggggcgcacccccacaccacgctggtgaaacacacagcagaaagagggccgcaccactatgtctgtngtttgtgtggggagagggatcctcgagaactattgttacagcggtgggagagagagacacatagacctcgcgggggagacagagagagtctcacacacacccaccgctggagaggggttttttttgtgatagaggtgggagtctcacactggggtgggttgtctctcccccccagggtgggagaccctcaccgcagagagtcctctggaccgcacgctggtgtttctctctcacaccaggcgctctctgtgtggcggctcagacggtttttgtctgtctctcacaggggtgtgtctggagcgccctcttctgtctctctctgtctttgagatcaagtgttctctctggcctctaactcttggggtgtgtgtgtccctctctggcggtgtggtggaaacacactctgggagagtgtcccctctctcctcgcgcctctgggggtatattgacatctcacacacaccagacgtgggcggatagccccgggtgtgttaccacaataaaaggaggataacactggtgtggggttctcagagggtctcaccctgtggtctcagcccacacacctggggctccctgttgccccccccgggttttgttgttggtgcatttgggcatccagacccaatttggaccccatccaagataacgggtttgaccctggttttggttttacctccaataaaaggtatagactcaccca

SEQ ID NO: 508481 - DNA, 372 bp, Homo sapiens
  misc_feature (205)..(205): n is a, c, g, or t
  misc_feature (313)..(313): n is a, c, g, or t
ggtttaaagcaagcgtttgcaggtaattggaaaaaagtgtttattgtttgtgagtgtgtgtgttctttatcgaatgatttaagtgcgtttaccaaggaatgtggctttgtactttcccgtttccttgtttactaattgccacgttagaacaaaaatctagatggaattttgatttatattggtaatcatgaataaattgatgcanaacctgaagaaaaggtcaagttatatgatcggtggatgtatcttagggattgtctttattacccacccttggtttgttacctttttctcccttacataatgagaactntaagggttggtcttaaactgggtaaaattcatttgtggttcagttttacaaaacctggt

SEQ ID NO: 508482 - DNA, 211 bp, Homo sapiens
tcattgtttgaattttttcgtagagctggggttatgccatgttgcccaggctggtcacaaactcctgagctcatgcagtccacctgccttggcctcccaaggtgctgggattacagacatgagccactacagccagggatttccttcaagaactttcctttgcattcacgtcttggctgttggtacaagagtcctagcgttggcctcttct

SEQ ID NO: 508483 - DNA, 161 bp, Homo sapiens
  misc_feature (6)..(6): n is a, c, g, or t
  misc_feature (14)..(14): n is a, c, g, or t
  misc_feature (36)..(36): n is a, c, g, or t
  misc_feature (39)..(42): n is a, c, g, or t
  misc_feature (45)..(45): n is a, c, g, or t
  misc_feature (65)..(65): n is a, c, g, or t
  misc_feature (75)..(75): n is a, c, g, or t
aagganacctagcnggtgtatgtgatgtgcttcagngcnnnngantgatttatcatctagtcttngtctattttncctttgatgttcaagtcctagtctataggataggcagtttaaatgctttactcccccttttaaaataaatgactaaatgtgctgca

SEQ ID NO: 508484 - DNA, 1396 bp, Homo sapiens
  misc_feature (51)..(51): n is a, c, g, or t
  misc_feature (63)..(63): n is a, c, g, or t
  misc_feature (65)..(65): n is a, c, g, or t
  misc_feature (71)..(71): n is a, c, g, or t
  misc_feature (73)..(73): n is a, c, g, or t
  misc_feature (82)..(82): n is a, c, g, or t
  misc_feature (90)..(90): n is a, c, g, or t
  misc_feature (101)..(101): n is a, c, g, or t
  misc_feature (103)..(103): n is a, c, g, or t
  misc_feature (108)..(108): n is a, c, g, or t
  misc_feature (145)..(145): n is a, c, g, or t
  misc_feature (175)..(175): n is a, c, g, or t
  misc_feature (178)..(178): n is a, c, g, or t
  misc_feature (181)..(182): n is a, c, g, or t
  misc_feature (189)..(189): n is a, c, g, or t
  misc_feature (199)..(199): n is a, c, g, or t
  misc_feature (202)..(204): n is a, c, g, or t
  misc_feature (206)..(206): n is a, c, g, or t
  misc_feature (266)..(266): n is a, c, g, or t
  misc_feature (268)..(268): n is a, c, g, or t
  misc_feature (280)..(280): n is a, c, g, or t
  misc_feature (322)..(322): n is a, c, g, or t
  misc_feature (334)..(334): n is a, c, g, or t
  misc_feature (339)..(339): n is a, c, g, or t
  misc_feature (351)..(351): n is a, c, g, or t
  misc_feature (364)..(364): n is a, c, g, or t
  misc_feature (370)..(372): n is a, c, g, or t
  misc_feature (374)..(374): n is a, c, g, or t
  misc_feature (376)..(377): n is a, c, g, or t
  misc_feature (379)..(379): n is a, c, g, or t
  misc_feature (394)..(394): n is a, c, g, or t
  misc_feature (396)..(404): n is a, c, g, or t
  misc_feature (406)..(407): n is a, c, g, or t
  misc_feature (412)..(412): n is a, c, g, or t
  misc_feature (415)..(415): n is a, c, g, or t
  misc_feature (418)..(420): n is a, c, g, or t
  misc_feature (423)..(423): n is a, c, g, or t
  misc_feature (425)..(425): n is a, c, g, or t
  misc_feature (459)..(459): n is a, c, g, or t
  misc_feature (509)..(509): n is a, c, g, or t
  misc_feature (555)..(555): n is a, c, g, or t
  misc_feature (565)..(565): n is a, c, g, or t
  misc_feature (575)..(575): n is a, c, g, or t
  misc_feature (716)..(716): n is a, c, g, or t
  misc_feature (719)..(719): n is a, c, g, or t
  misc_feature (721)..(721): n is a, c, g, or t
  misc_feature (723)..(723): n is a, c, g, or t
  misc_feature (725)..(725): n is a, c, g, or t
  misc_feature (730)..(730): n is a, c, g, or t
  misc_feature (732)..(732): n is a, c, g, or t
  misc_feature (796)..(796): n is a, c, g, or t
  misc_feature (812)..(812): n is a, c, g, or t
  misc_feature (897)..(897): n is a, c, g, or t
  misc_feature (988)..(989): n is a, c, g, or t
  misc_feature (996)..(999): n is a, c, g, or t
  misc_feature (1010)..(1010): n is a, c, g, or t
  misc_feature (1013)..(1013): n is a, c, g, or t
gaatggacatagcgtgagaggcggtgaggccagggttccagcctcgtgctntctcgggactcntnaccgtngngtgcgtgtntgcccgtntgtgactttcnantcacnaaggttgaagaaaggaaacggggaaaatcaaaagggnttcaaaccccacttcagtaggtggaggggngcnccnnccattgnttgtattttngtnnngngttttcggtgccgtgttcctaactactccatcccatgacctcgccacacctactggggcntntggctggtgccngctgccatggccagcccccactctcaccctgcacagggggtnttgcagcccccnggccnacagcctcgttnggaggacaggttncccctnnncncnncnccccccccccccccngnnnnnnnnnanngagantgntcnnnggnangcatccactaccccagggccccccacatgtcatngcaaggttggtagtgaatgggcctggttgggagcagcccctggcccattncccacccacccttctcactatgcaattcgagttccaagcaacattngctcctgccntggggccagntctgccccagccctgagaggggtggtgaggcagccccctggaccccagaaccccagacaagggggcaggcgggggaccagggcctctcctgtgggatctttgttttgtgtttaaccataatggttgtgtactgaaccactncanantngntatananaatatatatatatataatctccttaagactcagcctcctggtttacccccccggcctgggcatntgacctcccccacccnagtgtgatttaacatccaggaactgaggcctggaccattttgcatttccccctcctccagcctctgtagggccatggctgtatgnactgtcgctgtgtttttttgtttttttagaactgggtttgggggctgatttttatttctttgggggctttttttcttggcaaatactaatnntctcgtnnnngtaatttctgnggnttctattcagcttgggcttcatgttgtaaaataaattttaaaccgccctttttttttttttcatttttctctttttctggttctttttattcctttctttttgtggtccctctctccgtgcccacattaagaacattttgttttgccccctttttttgggcgtctttcttcctttcggttgtgtgggggtgtccctcccctcgccgtcggggggtgggcgcccgcgtccccatgcttcttttctttggttgcttcctctattccttcttttcaaccatttcctttctccctcctcttctctctcttttgccgtttttcccccgtctttcctttttgtcgctatttgtttttctccgtttcttcctctttgcattcacttatat

SEQ ID NO: 508485 - DNA, 1354 bp, Homo sapiens
  misc_feature (51)..(51): n is a, c, g, or t
  misc_feature (63)..(63): n is a, c, g, or t
  misc_feature (65)..(65): n is a, c, g, or t
  misc_feature (71)..(71): n is a, c, g, or t
  misc_feature (73)..(73): n is a, c, g, or t
  misc_feature (82)..(82): n is a, c, g, or t
  misc_feature (90)..(90): n is a, c, g, or t
  misc_feature (101)..(101): n is a, c, g, or t
  misc_feature (103)..(103): n is a, c, g, or t
  misc_feature (108)..(108): n is a, c, g, or t
  misc_feature (145)..(145): n is a, c, g, or t
  misc_feature (175)..(175): n is a, c, g, or t
  misc_feature (178)..(178): n is a, c, g, or t
  misc_feature (181)..(182): n is a, c, g, or t
  misc_feature (189)..(189): n is a, c, g, or t
  misc_feature (199)..(199): n is a, c, g, or t
  misc_feature (202)..(204): n is a, c, g, or t
  misc_feature (206)..(206): n is a, c, g, or t
  misc_feature (266)..(266): n is a, c, g, or t
  misc_feature (268)..(268): n is a, c, g, or t
  misc_feature (280)..(280): n is a, c, g, or t
  misc_feature (322)..(322): n is a, c, g, or t
  misc_feature (334)..(334): n is a, c, g, or t
  misc_feature (339)..(339): n is a, c, g, or t
  misc_feature (351)..(351): n is a, c, g, or t
  misc_feature (364)..(364): n is a, c, g, or t
  misc_feature (370)..(372): n is a, c, g, or t
  misc_feature (374)..(374): n is a, c, g, or t
  misc_feature (376)..(377): n is a, c, g, or t
  misc_feature (379)..(379): n is a, c, g, or t
  misc_feature (394)..(394): n is a, c, g, or t
  misc_feature (396)..(404): n is a, c, g, or t
  misc_feature (406)..(407): n is a, c, g, or t
  misc_feature (412)..(412): n is a, c, g, or t
  misc_feature (415)..(415): n is a, c, g, or t
  misc_feature (418)..(420): n is a, c, g, or t
  misc_feature (423)..(423): n is a, c, g, or t
  misc_feature (425)..(425): n is a, c, g, or t
  misc_feature (459)..(459): n is a, c, g, or t
  misc_feature (509)..(509): n is a, c, g, or t
  misc_feature (555)..(555): n is a, c, g, or t
  misc_feature (565)..(565): n is a, c, g, or t
  misc_feature (575)..(575): n is a, c, g, or t
  misc_feature (716)..(716): n is a, c, g, or t
  misc_feature (719)..(719): n is a, c, g, or t
  misc_feature (721)..(721): n is a, c, g, or t
  misc_feature (723)..(723): n is a, c, g, or t
  misc_feature (725)..(725): n is a, c, g, or t
  misc_feature (730)..(730): n is a, c, g, or t
  misc_feature (732)..(732): n is a, c, g, or t
  misc_feature (796)..(796): n is a, c, g, or t
  misc_feature (812)..(812): n is a, c, g, or t
  misc_feature (897)..(897): n is a, c, g, or t
gaatggacatagcgtgagaggcggtgaggccagggttccagcctcgtgctntctcgggactcntnaccgtngngtgcgtgtntgcccgtntgtgactttcnantcacnaaggttgaagaaaggaaacggggaaaatcaaaagggnttcaaaccccacttcagtaggtggaggggngcnccnnccattgnttgtattttngtnnngngttttcggtgccgtgttcctaactactccatcccatgacctcgccacacctactggggcntntggctggtgccngctgccatggccagcccccactctcaccctgcacagggggtnttgcagcccccnggccnacagcctcgttnggaggacaggttncccctnnncncnncnccccccccccccccngnnnnnnnnnanngagantgntcnnnggnangcatccactaccccagggccccccacatgtcatngcaaggttggtagtgaatgggcctggttgggagcagcccctggcccattncccacccacccttctcactatgcaattcgagttccaagcaacattngctcctgccntggggccagntctgccccagccctgagaggggtggtgaggcagccccctggaccccagaaccccagacaagggggcaggcgggggaccagggcctctcctgtgggatctttgttttgtgtttaaccataatggttgtgtactgaaccactncanantngntatananaatatatatatatataatctccttaagactcagcctcctggtttacccccccggcctgggcatntgacctcccccacccnagtgtgatttaacatccaggaactgaggcctggaccattttgcatttccccctcctccagcctctgtagggccatggctgtatgnactgtcgctagcgaattctcgccctaaaagaactcggtctcgtgggccaatcattattacttggcgccctctgtgtcttggcccaacctaagcacaagcccgtcatagacgaacaaagcgagccgccaagttctgcgctctgcggtccgctacccccagtggtatttcgattggggcatgcttgtgcagtgcgcccccaggtcgggccccttttgggcaacgcgggcattagtgcgttccttttccactttcatagccccccggaaccacaatgttgtgactgtgggacccctgccgtgaccccattgtaactgtttgagcgcccgttctttttggcccagctgtgaaaggcggaacagcgcccgtcccgttagtccttgcaaaccctctgccaccccggtaataccgttctccactctcgggctctcctgtgataaccgtgccgtgtaaatctagt

SEQ ID NO: 508486 - DNA, 304 bp, Homo sapiens
tatacacttctgatacagactactttgagatcacttcgtgactaatcttgtaacgaaatagtttatcatatgttgcatttgtacgttagtcattccatctttcactcaggatgaatgcgaacattgactgttcacagaacctcagtgatgtgagcatctgttgctcaggacgtgacaagttgctaatatgcacgaagggatgggtggtacattcttgcttctcatgatgcatgttactgtatgttaatgacttgtagggtagctattaaggtactagagtttgataaatgtctaataggtagat

SEQ ID NO: 508487 - DNA, 879 bp, Homo sapiens
  misc_feature (407)..(407): n is a, c, g, or t
cttatcacgcaggagcatgatctggagccaagagcagagtgaccatgacttgatgctgcgtgagctccacaagctgcatgcaggaggtagaggacccagcgcctaggactaggagctgtaggttacaagagacccgagaagccttggtgggacgagcatatgcagctgaacagatgtgaaggaatttgatagcgtgcatgaccaagcagcgtgacccgtggaggtggcaggcgctgcactaagtggacatcgtgcaaggccagttcgaggatgcagaagagatcagcgcagagccccggtctgccaagacacttcgaggaagaggcttgcccgtcttaaggaagccatttgccaggcgtcagttacatgcagtgaaagtgtaggaacagacaagcgtcgttgcatgnaggatcagactccgtcgaggcaactcatcaggtatgaagaatcaagaggggtggcagcgcctgtgagacagtcagaggtatccggagggtgtctgacgacgtgctaaggcaacctacgaagaagagccagagccagcacaggaccgagctggccagttccagaagcgtgacaggagacgcatgttctgcaagccttggacctgggggacaccaagagcacttggcgtctagcagtgctccaggcaggtcgccctttagaacagccatggagaggagtccagtctggatgtcaaatgtcctgcaaaggatagagatggagacatgcttgaagaggctgctgacaggttagcggcctggacaacgccaaggtgagcctggattgtggacgaagactctgtgacctgggagataatgcccaaggtcggacaagcatggtgatgcgggaagacgggcaacgtgactctaataccag

SEQ ID NO: 508488 - DNA, 459 bp, Homo sapiens
  misc_feature (431)..(431): n is a, c, g, or t
  misc_feature (447)..(447): n is a, c, g, or t
  misc_feature (458)..(458): n is a, c, g, or t
ggccctccggaggccaagctcatgcgtcagagcggcctctcccggcctggcgtttgctcctttgcatgggctccaggtcctgcacttcctccagtcggcctctccaggcccagctcttcctcccggcagcctctgcaggaccagactgtcgtcaagtaggcctgtccagggacagctcctgcctcccggcagactctgcaggcccaagtcgtcctcaagtcagcctccccaggcccagctccggcctctcggcggcctctccaggtgcaaaagttcctcgagtccgtctctccaggtccagctcctcctgtctcccagtggcctctttcagcccagcccagctcatgcctcccggcggccttcccaggcccccttttgactttccgcgacctctgcaggccccgaacttaacctccagtcggcctctgcangcctgggcttctggcnttccgaaaggnt

SEQ ID NO: 508489 - DNA, 259 bp, Homo sapiens
  misc_feature (154)..(154): n is a, c, g, or t
  misc_feature (238)..(238): n is a, c, g, or t
ggcacgagcagttatgagagtgatattgaggaggatattacccacccatcacctcataaggaggaggcatgacttgatgatgaagggtgagccagtggtaagggaggttttttcaaccagccaaaaggtcctatcctatgtttcctccccgagnggaggaattaaatgggatgaatatggagacattactcaacccaggggatccttagtccaaacctcaaccactgaggagaaaaangcaaatagactatgttttcca

SEQ ID NO: 508490 - DNA, 90 bp, Homo sapiens
tttttccctttctacattttgctaattatcctgtatataagtttaatatatcactttttaaaagaaaaaattctaccattaaaaaaaaaa

SEQ ID NO: 508491 - DNA, 144 bp, Homo sapiens
ctcatatttgtgcactgactattaaaaaaacaacaatgtgcacatcaaagtcctcggcacacttgtcactcttgggggatgctcgctccaacctgactgctgtcaccttcacctgttccagtttttaaatcctgagtcaatgcc

SEQ ID NO: 508492 - DNA, 292 bp, Homo sapiens
aggggggagggggggcccccccagggccaaaaaaaccaaaatgattttttgcccccggggggttttccccccctggtttggttttttagccaatggccgaaaccccccttttttggtttttcttgggggggggggggggggtaagggtttttccaccccggcctgggggggggggaaggttttttacccccggggttttttcaaaaagggaggggggcaaggggcccccttttcattttgggggggggtcccccaggggaccaaaagccaaaaaattttttcccaacccgga

SEQ ID NO: 508493 - DNA, 274 bp, Homo sapiens
agctgctcaagctcatcctggcaagtgcccatgtagaagctgttccttcctggaggggccccactggacaccccggcctgggaacgacgagcagaactgtcactggatgggttgaaggattgtttgctgctgacggctgaggtgccataatcgggagaacccatgcgagctaaagactgagtagaggaggtggctcgcaggctagcctgggaagcaggagcagactgggtgctgttgaacgatgagctggcgctggctggctcttgcacatcta

SEQ ID NO: 508494 - DNA, 120 bp, Homo sapiens
aggctggagtacagtggcgcaagtctgctcactgcagcctccacctcatgggcctaggcaatcctcctgccccagcctctcaagtagctgggactacaagcgtgcgccaccactcccggc

SEQ ID NO: 508495 - DNA, 449 bp, Homo sapiens
cccggtccctgccgggcccctctccgtgccgccgctcccccccctcccttccccgcgctggcccctcgccccgccgctgtccctctgttcctctccgcctggcctcccccccttgcccccccccgtggccctcccggtcctctgtgccgcccctggtgcggccggggcctggtggcgcgcccccgtggttgcctcctccgcggcgccccccgccgtgacgcttcgctccgtggcctccggcggctctccgcgggtgcccgtcgccgtgctccggcccctccggtctgcctttgtccccctgccgtttccgggcgccgccgtccttctggcccgtgtgctgcccctgtccgccgctgccccgttttccccggccgccgctgccgccctgcgcgcgctgccggggcctcccgccctgcttgctccggtgccccgttcccgtccccctggtc

SEQ ID NO: 508496 - DNA, 1088 bp, Homo sapiens
tgagcggggtgcgccggaaggggcgctgccgggcggtctggcggctggcctgttgcgctgatgctgatgtgcctgccaggcgaagtctggagaccagccgggccgcggccgcaatgttgccaatggactctgcccatgtctcccttgggcgcagtcgcccaatgaatgccgggtctgctccatgcccggctggcggcagttgctggagaaccagacggcgggatgctggagaacgctacgggcggagctggaggcggagctggtgcaggctggcggtcgtgagactggctgtgcgcttcgctgcccgggagctgccggctgcgctgacggagtgccgctcgggggagcgcgccggcggctggcttgcccgtctgcgctccaagtgtggacgtgcactaggcgtcagccgtggacgttgccgtgcagcctgtcctcagggacgatggcatggcgggaaccgcgaggcctgaggatccggggcagcatgctgcggcgtgcgacaggaaggcccgatgcaaggcgggacatgcgttgcaagcaaggcatgcgttgcgaccctgggaagccgcggactggcaggtgggatgcccgcccaatgccctgggaagacttgcgaatactgaccttggtttggggtccgaagggggaggcctcgcggtttgacacccggggagaccccacttgatagtcccggcccgacgtgtgtgccgtcgctgaccgggtgtacccgcgcgcgttgcaacgtcgccagcttgttctggccttgaccccgagaggatgatttgcgcggaccaacgttcgtgttgggcacgacgctgtcaaggggtgggaacgccattgcgcggtgggccggacacttcgccggctttaggtcttgccacgggccgggcggccgtggcccacggtttgggaatggcgtcccacgcgatctcgattcccgtttcagggatagccattccctgggcccccccttttcccgggtgtgggcacccccggaggttttgctcgcgtgggatcattcggtgaagccaccacaacggcctgtgtgtgcactttccacatgtggcatgaaacctcggatgccccca

SEQ ID NO: 508497 - DNA, 682 bp, Homo sapiens
ctgggggaggtttctttttcccgaagggggccaaaggccctttatgtccgctcggttggggcacttagcccttcccacaaaaaaaaaaatatatgttttatgctccggggagtggtgcccctttgataaattggaacccgcccccccccctgggacatttttcgccgggagcccaagaataacccccccctcactgtttgatgttgtcaacgaacacccggggttaaaaaagatggaagaaaaagggtgtcaagagttatcccccgtcttccgtgaaaaccctaatccggctcctcataaaaacaattttctttttgaacgggtgtaaaatccttgccttaggccacctcagccccgggggaatgaatatccccctatgaagagccccgggtccccaggcgggcaatgaaaaaaaatttttatccacgaaggtcctgtccctttttttttcttgggggggggaaacaccccccccctttcataaaacaacattttttttattacatggccttttttttggtttggggatatcaaaaaaaaattgcacgctttttctttttaataggtgttcatccgcgcaccgtgaaaaaccttgtaatttctacaaacttttcaaaacgttcaatgtcgcaacaatttaagacgttcaacaatgacccaaaaaaacaaaaaacctaaaaaa

SEQ ID NO: 508498 - DNA, 264 bp, Homo sapiens
ctcggaaaagggggttgtcgtgtctacatcagatttctatcttgactactgtgtgagtgagagtacatgaatcggcttgtagaaggaataactttctgcttgctcactggacaggtttacttggttcgaattagccaacggtctacacacttgcaatgataagcatgggaacagggacggatactgagataaagcctccatcttcatactcatccaaacaaatggcacatacatcatactcatctccttgcttgaatatatgta

SEQ ID NO: 508499 - DNA, 764 bp, Homo sapiens
  misc_feature (38)..(38): n is a, c, g, or t
  misc_feature (66)..(66): n is a, c, g, or t
  misc_feature (75)..(75): n is a, c, g, or t
  misc_feature (77)..(78): n is a, c, g, or t
  misc_feature (80)..(81): n is a, c, g, or t
  misc_feature (84)..(84): n is a, c, g, or t
  misc_feature (87)..(87): n is a, c, g, or t
  misc_feature (96)..(98): n is a, c, g, or t
  misc_feature (114)..(114): n is a, c, g, or t
  misc_feature (184)..(184): n is a, c, g, or t
  misc_feature (191)..(191): n is a, c, g, or t
  misc_feature (242)..(242): n is a, c, g, or t
  misc_feature (280)..(282): n is a, c, g, or t
  misc_feature (285)..(285): n is a, c, g, or t
  misc_feature (294)..(294): n is a, c, g, or t
  misc_feature (314)..(314): n is a, c, g, or t
  misc_feature (316)..(316): n is a, c, g, or t
  misc_feature (319)..(319): n is a, c, g, or t
  misc_feature (321)..(321): n is a, c, g, or t
  misc_feature (324)..(325): n is a, c, g, or t
  misc_feature (335)..(335): n is a, c, g, or t
  misc_feature (366)..(366): n is a, c, g, or t
  misc_feature (368)..(368): n is a, c, g, or t
  misc_feature (376)..(376): n is a, c, g, or t
  misc_feature (388)..(388): n is a, c, g, or t
  misc_feature (399)..(399): n is a, c, g, or t
  misc_feature (405)..(405): n is a, c, g, or t
  misc_feature (412)..(412): n is a, c, g, or t
  misc_feature (435)..(435): n is a, c, g, or t
  misc_feature (451)..(451): n is a, c, g, or t
  misc_feature (511)..(511): n is a, c, g, or t
  misc_feature (659)..(659): n is a, c, g, or t
  misc_feature (662)..(662): n is a, c, g, or t
  misc_feature (703)..(703): n is a, c, g, or t
  misc_feature (754)..(754): n is a, c, g, or t
cctccttccccttcttgcccccccttggtcgctttgcnccccctcccgtcgccccgtccgtttgcnggtttgttncnncnnttngtncctgttttnnngggtccgtgtcccgcnttccctccctgtgccccccctgttgcttctgccgtgctccgccggctgcctgcttcctttcttcttcgtncgccccnttgcctgcccccgttgggccttcccccctcctcccgcgcggtcctcccctncttcgccctttgcgtgtggctctggtgtctgctccccnnngtngctcttgcnccctccgccccgtggggggngnggngnggnngggtcgttgngggggggttttggttttggtggggggggggncncgggtgcntccccgcgcccngggccttcccncccccnggctgcnccgctcccctgggcctgcttccncctcccgggtgggtgngtgggcgcggggggtggggtgggggcccctcgcgggggtgcggctggtggggcggtgggntttggtggcttggggggggagggttccctggcccggtccccccccccggccccggctgcccctcgcgcgctggtccgttcccggggtccggctcggcccctgcccctgccgctcctcgctgttgctgcgtccctccggtgtggcggcnggnccccccgcctctgtgtctgtgctggctgcggtgcgcgtcgnggtcgcccgcctggccgttctgccccgtgcggggctggctcccccgccccngccttttctc

SEQ ID NO: 508500 - DNA, 291 bp, Homo sapiens
cgggcatatgaatagaaggaataaactgaggaaatggagaaaatgcaccccacagcagaacggctatttgggcagcggccacttgtatagaagatctggacttggccgagcgcggtggctcacgcctataatcccagcactttggaaggctgaggcaggcggatcatgaggtcaggagtttgagaccggcctgactaacatggtgaaaccttgtctctactaaaaatacaaaaattagccaggcgtggtggcgtgcgccagtaatcccagctacttgggaggctgaggcag

SEQ ID NO: 508501 - DNA, 101 bp, Homo sapiens
catcatggggtcctggattacatgaatacatgaatgagtgaacaggtggatacgatggatagaatgtgatgtgatgggtgggtgcatggtatggataaagt

SEQ ID NO: 508502 - DNA, 241 bp, Homo sapiens
atcgagcggccccttttccagcagctcgcaagccggtttcagctatatccgcagcgacctcaaaccggagatgaccaacacgttcgaggcgggttaccgcttccataatcgcgatctgcagctttcgctgaccggctattacgtgaagttcaacaatcgcctgctcgcgtcttcgatcagcgcgaccgtcgtgggcaaccagaacgtgttgcagaatgtcggcagcgtctcgtcgcgcggc

SEQ ID NO: 508503 - DNA, 137 bp, Homo sapiens
ggagctcggcccccctgacatattgcatagctagtgtaggaaaagaatcacttactccataggacgacgtagttgtctgagacaaaaacagtcacttggtggagttcaaatcacacagaaaaaaatccaacgccggg

SEQ ID NO: 508504 - DNA, 264 bp, Homo sapiens
ggctctagagatccctgagagaccgtgttgcatgaatcaatcagtcattaggctgggctctgtgactcatgtctgtaatcccagaacttggggaggctgaggcaggcagatcacctgaggtcaggagtttgagaccaccctggccaacatggtggaacccttgtcctctactaaaaatacaaaaattagccgggcgagtggtgcgtgctatcatcccagtactcagcaggctgaggaagagaatcattgcaacacggtctctca

SEQ ID NO: 508505 - DNA, 447 bp, Homo sapiens
  misc_feature (47)..(47): n is a, c, g, or t
  misc_feature (237)..(237): n is a, c, g, or t
  misc_feature (376)..(376): n is a, c, g, or t
ggcactgaggcaagacctttgtcagccatcacagtttgaaactttgnctctgttcagcaagagaaaaagcctggctaaaatcattccatatttcaggcacagagaaaggaagtaaaaagaaagaaaaggaacggcctgaaatttatcctccatctgattttgagcacaccatccatgttggctttgatgctgttactggagaattcactggcatgccccaacagtgggctcgattantacagacctcccatatcacccaactagagcaaaagaagaatccttaggctgtgctggatgtcccaaagttctacgcactccacacagtgaagccgaaatatctcagctttactcctcctgagaaagatggctctccttntggaacaacagcactgaataccctgggaaccgaagccccccagtagtgacagaggaggaggatcatgatca

SEQ ID NO: 508506 - DNA, 556 bp, Homo sapiens
caggtaccacactccaatgagcaaaacacatccaggtaatctgcagatgcaagagtggccctcagagaagagcagctcagattaccaactcaggaaggcaggtacaaccctgaagcaaacctcacagagaatcagttcctcggtgatgatcctccctaatgggaatggaaacacacacaactgacatacatggggcaaagtggggggatgctaaagaaactaaaaatcccgatgtaacaacaatattgcagtttccacattggcaatctaggacaactacatttatgaccatcaaatatcctcttaaatccccagaatgccttagggaatacttgtaagatagagtatgaaagtaaagaatatagaatttcagcactgaccctaccaagtatagactatgccaaggaggcgtggcagaaagaaagagcagttagtttgaaggattccattccataggctttgatttatgaaatctagagggaaaagaaagacatgtcttcaaatacttaaagtaaattataaaatgctccagtttgaatcttttaggctcaggtta

SEQ ID NO: 508507 - DNA, 370 bp, Homo sapiens
  misc_feature (269)..(269): n is a, c, g, or t
  misc_feature (282)..(282): n is a, c, g, or t
gcgagaccccgtctccaaaaaaaaagaagagaagagcaagtcattctactgaaaagacacatacactcacacgttcctcacaacactattcacaacagcaaagacatggaatcaaaggaggtgttcatcaacagtgggttggataaagaaaatatggtacatatacaccacagaacactatgcagccacaaaaaaagagtaaaatcatgtcctgtgcatcaacatggatacagctggaggccgttattctaagcaaattaaagcagganaagaaaaagcaantaccacatgttctcactttataaattgggggcttaaacgctggggtactccacgggccatagggatttggcaatattaggccacttgg

SEQ ID NO: 508508 - DNA, 772 bp, Homo sapiens
gttctagatcgcgagcggcgccctttattttttttttatttttatataggaaataaacaaaagaaatcccatatgtgattggatcccaggttctgggcagtaatcagaaagataaaaaatccttaaaaatgggggctgggacagtggtattacaccaaaccaggaacagattatatggcacatcacgttaactattggggtacacaattctttacgcacatcagtcaagatcattcttcatacactcggggtggtaataacactatctctggaagaaataagttctttctattaatgagattatcacactttatggatctctccaccctacaacctgagggtctaaatgtgtccctgtctagataattacactcctctgtgggtgaagagtcaaaatatccgtagaagggtcacatcatatcattgtgggaatatcccacgagatgttgaaatcaaccctaatgtgttataacatcctatatagataaacacgatcctaaaatgttgtgaggaaatcccctgggatgtgtggttctacaaacttatacacagaggattgtgttagagagaccccacgtgggtacaacataactgcgtggggcgaaaacgaataaatttttcgcagatagaatccatactcgtgttgggggacaaatgtgggggtacctgtgtgggtccccccgtggaaatccagtatgggggaaatatgtccccgagtaaaaattcaagaaaaaaacgcaacggagggtttattcacccatataattaaact

SEQ ID NO: 508509 - DNA, 234 bp, Homo sapiens
atggggaaacatcagtgacttctcagaaacgcacccaatcaacgaacattaatatcaaaacccatctacatacacaaaacaattactgatgcttcatcacagacatccaactagaatttgaaataactattatagaaaacaaagtaaacatgcgaataaatactacgggacataatcgttgacataggttatcattgtttcattttgcttgccaaatagctttaaaccagtaat

SEQ ID NO: 508510 - DNA, 440 bp, Homo sapiens
ctagaggatccccgctgctctctctgggggggggctgcggctgcgggcagttgagtgtggaggctgcggacgcgctggtggagctggaactgctgcagctgctgccgccgcggagtgaaccttgatccccgtgctccggacaccccgggcctcgccattggctgaccagttgagtgaggatcagattgcagagttcagggaggcatttaccctattgtgccttcctttatttcttaaagaaatgcccattttgtgcctggcataagttgaggtgctggggatgctgtgattagcatgacaggcagtgacctgtgttgacaggaacctaagttctggaataatagctcagcagtgccgagcacgtaatgtgtctggcagcatgccaaatgtgccccatgtgtgcttacggcgatcctgtccccaccgcaaagagagagggt

SEQ ID NO: 508511 - DNA, 418 bp, Homo sapiens
catcgcgcccagtgtgcctaccactattcacgtgtgtaaggacacgctcgtgggtgcacttctgaggccagacacgattgatttgccgctgcggattctggtcctcacccagagagctggtgccatcatcgtaccggagggcttgaccatctagaacattactgggcagacccagtcccggttcgatatccgtagaacagagaactctggagctgctgagaatcctgtgaccgtccatgccaccccatacgctacttatgaagcatgccgcatgattcttgaaatcatgcagagcgaggcatatgagaccacactagccggacagagtcctctgtagatcttgcgacacactggcttcggtggaagactgattggcgaatgcagacctttgaagaacattggacatgactcagggccg

SEQ ID NO: 508512 - DNA, 804 bp, Homo sapiens
gaggcctgggggcaatcactctaatggtctctggtgcagctctcagcgcgcagttggaggaacccgaaataacgttgttctcttgaaagatagagataaatacaatacttaaaaaatatatgtcactaggtgtgactaagatatgctaagagtacaagatttagaagggtaatatgaatagcttaagatttataccgagaaaatatgcaagattagcaagagtagcatgaggaaggacaggataaaaggtttctaaaacatgacggagtgtgagatgaagcttcttcatggagtaaaaaatgtttacaaagaaaattgagagaaaggactacagagcccgaatttaataccaatagaagggcaagtgctttaagattaaatatgaaggtgactttaaacagcttaaagttagttaaaaagttgtaggtgattaaaataatttgaaggcgatcttttaaaaagagtattaaccgaaggtgataaaagaccttgaatccatgacgcagggagaaattgcgtcattaaaaggcctagttaaggcattttactaaaggcaagaccgaataagtggacacgactactggggaagtgaaaggattgaaacaattgggcagaagatagaaggtttgaactgtgggaaaactgggaaaccagaagttaggggaaggggaagaaaagaactacggcagcttggcacaatagaagtaaaaccattctttaagaagaaaaaggtaatttaacctgaaagtgggacgaagaacaagacatgtagacacaaaagctatgggagaaaatatcaacaaa

SEQ ID NO: 508513 - DNA, 321 bp, Homo sapiens
gtgctggctacagtcctcatcactaccattcctcatcactaccattcctatgctgcacccgactgtcactgccgacggcctcgagactgctctaggtcagagcgactcacgtgccctgacggctggagatgctcggtgtcacttcactggcgcctccagtggagaggctgttcaggacactgagcgtgactctgtggtgtacgcgtgtcagtgtctgcgggtgtgcggcatggacatggagacttcactgactgtgctacccagtcagaccgctaacgcacctctcaatcggaaacatccgccagtcactctgcgcgctcg

SEQ ID NO: 508514 - DNA, 483 bp, Homo sapiens
ctgctcagagtaaaccgcagtggcaatgagataggatagttagtgaggattattaacctctgagcagtgatatagcataataaagccccgggcataattattattatttctttagttacatctattacaagtttagaaaaaacaaagcaattgtcaaaaaaagttagaactattacaacccctgtaccctggtacttatcaaatacttagtatcatgggggtagggaaatgaaaagtaggagaaaagtgagattttactaagacctgtattactttacctcactaacaatggggggagaaaggagtacaaataggatctttgaccagcactgtatatggctgctatggtttcagagaatgtttatacattatttctaccgagaattaaaacttcagatcgttcaacatgagagaaaggctcagcaacgtgaaataacgcaaatggcttcctctttccttctttggaccatctcagtctttatt

SEQ ID NO: 508515 - DNA, 236 bp, Homo sapiens
tcagctcggtaccacctatatcccagcactttgggaggtggaggcagggaatcatttgaggtcaggagttcaagaccaccctggccaacatggtgaaaccccggctctactaaaaatacaaaaattagccaggtgccgtggcgttggcctgtagtcccagctactcgggaggttgagggtgatcgtggggttgtaatcaacacaccacaatactatgggtgatcgtggggttgtaa

SEQ ID NO: 508516 - DNA, 395 bp, Homo sapiens
  misc_feature (19)..(19): n is a, c, g, or t
  misc_feature (46)..(46): n is a, c, g, or t
  misc_feature (67)..(67): n is a, c, g, or t
  misc_feature (106)..(106): n is a, c, g, or t
  misc_feature (154)..(154): n is a, c, g, or t
acagaatttgaaatgtatngaaatgcctttactacatggatggagnttttggcacacttgtgtagtncattgataggacagattacactgaggccatttctaatgnactacagtagactactacattagaagggagtacgatcattatattatntgtatgtagtactatcatactactacaataaatccaacttttcatagatttaaaatgtttatattacagtttctatattacttgattccgttgtgagttaagatattgtttaagatttttgcatgtgtttatgagtaaaggtaacccataataatccgtttttgtttttgtttgtttgtttgggtggagacaggctgctcactgttatcacccaggctgcagtgcagtgagccaagattgc

SEQ ID NO: 508517 - DNA, 337 bp, Homo sapiens
  misc_feature (186)..(186): n is a, c, g, or t
  misc_feature (211)..(211): n is a, c, g, or t
  misc_feature (243)..(243): n is a, c, g, or t
aagtgagtcgggacggtagctgtctcactaaatttagagcagatggtttgggaagaggcaggatggttttcaatctacttacccacctatttccattgcgcagtgcctcacataactaatcacctgtaaagcgtcctcacctgcttttgtttccagaactctatcaccgtctgggatgtttgagcnctatcttctgcagtctgtactttcntgcgctcagattcctgggctatgtgattcccnatcttaatgctagatcccgagtttaagctccagtatttcacgagaagctctcagccgtttctggtaacaccatgcagttactctcacgtttcta

SEQ ID NO: 508518 - DNA, 106 bp, Homo sapiens
cgatgaccacaggcaagtgatcagctccctgctgtctggggccctggctggtgcctgtccaaaacagcggtcagtccccgtgaccgaaccaaaatcatcttccaag

SEQ ID NO: 508519 - DNA, 1169 bp, Homo sapiens
gaaatggaatatgtttcatatgccgttaatccgggggactctggaatgatattgctccagttggcaatctactgtgtattcttgaacacggtcggatccgtcgcaatctgtcgtcgccgtacttccggttgtctggtcctgcatgcttgttcatctggtctaaccttgcggtcgttaatggaaacgtctgttccaatggagggcttgaagtttaaccgctttaaactattccttcagggccccgaaaatggcctttgtcttccggtccattccttgacttgccaactgcctagatatacgagtcactattgttcccatatttgcttaacatccatttcgtaggccttcccccgtgtgtccattctgctttgatagcagtcactccagttaccgtgtccatctttctcagacgaggaccctactgcgtgcccttgccatgggtgatgcacaactgtgaaatgagagtgccatcttccaatggtcttaggtgtctacagaaggtctcacaattcctgtccaggttgctggagtactcgacctttaccggggcatagtccgtccacctggactctctctctgggccagtgcatgtacttgggctgtccttcagccgtggtggcgagctgatttccgggtgtcatgttggctcctgttttaccacgcgggtggccatcagcactttccagaaagcaattcaggatacagtggagaaattccaggaagtaatgaactcctatcatgctcatctcggctccagccatcctgggcaccagtaacatgcctgatgctgtgccagccacacagccggggatgctgcagccacccatggtgctccgtagatttccgcacccctcgcctgtctgttctcaacgaatattctggcttgccatctcaaatgatcatgcgccatctgctgaccctgtggcaatggcgcaggatgtgactggggcacttggaagatgcccttgccaaggtaactaaaataatcatggccttctcatcgcgctgaataggctgctctgtcagcagcggggagcaagagctctttgtcacagttctgcaactgtcttcctggaagaccattgttccgtatttaaatcgctgtctgccaagtcctttagtccaccaagctcagatagcacagactttaactaagaggatgaaaattc

SEQ ID NO: 508520 - DNA, 260 bp, Homo sapiens
attactttcaagagacaactgtgtatacacatcgaaatatatatatatatatatatatatatatctgtataatatataaagagtggcactctgcctctctgtgcaccagcacagccctggtgacatggcaccactcagcagggctgtctctgtaggcatggacccccaggagacaggggggaaaacgctgctgctttaattacccgagaaacagctctttctgtttggatgctggagggcaggggccaccacagattaaa

SEQ ID NO: 508521 - DNA, 295 bp, Homo sapiens
cgtgtgaagaagagtgtggacagcactcatcgaggcatccagagactgtgaccgagtccgcgtcaatggctgggtaccctattcctccgaatcagcatccgcactcatcaacatggagaacaagaccatgtggttctctgtggacattgactcggacctgttggaggatctgcctgccgacaattacgctgtggctcgtgctggtgcccgtgggtacagggctgatggtgctggggctgatcttcctcctgctgtggaagtgcgggcttcttcaagcgagcccgcagtcgcgccc

SEQ ID NO: 508522 - DNA, 614 bp, Homo sapiens
taagttgactgaagacctaatctgatcattttggtatgaattgaatgagtattacactgggttcttatatataatacattttaacagggtgtagcatccctccttctatggaggagtatggtcctaggaaactatattagggagcagcgtgtgtaactggggatgggtgaaaactatggtccagtattgagaaacctatactcggttggccctcctataccagaggagagaatatagatatggcggtagtgacgttgacataatcagttcatacatgtctcaaagtatgtctccaaggaaaagttaatcttaacagtaagcacctatgaagcatcttccggaacctttaggtcggctttaaattaaaccttatgaatcggtaatatagtgggttaacttaagctaaagggggtcatgacgaagctctcggacagaatatatatatatgtggactctaaatcctacaattttggaatgaagcagccggttagtgtaaataacacaaaactcagtatcagtaaagtaaactgtgattaacaagtctaaatgactttatctgtactgatgcctgaataaggttactatctctcacaatattggcctgtggtaagacg

SEQ ID NO: 508523 - DNA, 181 bp, Homo sapiens
cagataaagatgagaagaagaagcaagatcaagtcatagaggctaaggaatcctttcagcgatgtcttgaaaatcatgagaaaatgacttctacaaccagatacaaaaaagcagagcaaatgtttggagagatggaagtttgggatgcaatatcagaacgtgaccgtctaggtagcgtaat

SEQ ID NO: 508524 - DNA, 276 bp, Homo sapiens
agaggatcccattctacgctgcacctggtctgcactatcacagatactgtgtcttttactaattgaaggtttgtggcaaagttgtattgagtaaatctattagtgccatttttccaacagtatgtgctcacttagtggtctctgtcttacatttgggtaattttcacatttcaaaacttttcttatatctgttatggtgatctgtgatcagtgatctttttttttttttggagacagggtttcactcctgtcacccaaactgttgcagcgtaaaag

SEQ ID NO: 508525 - DNA, 339 bp, Homo sapiens
atacagctggcctggtcactctgctcttcatcagcatccatgattattcttcacactacgagctggctgcatctcgcgcacagcgagagcagagagccaggcagcacgcggaccagctacagacgagagctagaagggaacacacagcacagacgcagcagcagcacacagcacacgcagcacagggcacgcagcaggcacagacggcaggaggcacagtaagggccctaggcacacgcaggggtagcacgagagcagcgcagcaggctagccgcagacagtgaagagcagtagcaggcaggcagcagagagagctagccgaggaccgcccacagacag

SEQ ID NO: 508526 - DNA, 224 bp, Homo sapiens
gtcatgtatcagtcacacataacctcagtcacacatgagagcacaggccgtttgatgcagacaggacccccccttgtgctatgctgcctagaagttcattccaccagatatgcactaaatcatcaccctcgagttcaaagtttcgcagatcttgagggcaaggtcgccctgcagccatgttctttgctacagaaaaacaaaacatacctttggcccttatcgag

SEQ ID NO: 508527 - DNA, 851 bp, Homo sapiens
tctcgctctggcgtcagagccgtcgtggctcgttccattctcggcggtggtacctgctcccggtggccctgaggacgtgtgggccagggcggccccgaaattaggaagcggagggggagcagtctgcaggtctgcggggctaagtgtcgcggcggctgcacctcgcgtcaagaatccggaggaggagactgcaacgactaggcccaggagtaactggagtccaaacgaggaactagcggcaaacaatctcaacggggaaaatgcccaaccaagaaaacgaacgcgaggggagcaggcccccacgcagaatgaagaagaatcccgccattctgggaggcgggctgaaggccagaagcctggcaggcacatatcaggcgggggcgagcttaggcgcacttgtccctaattttcgatgggccatacctaataggcactattgagcacaatgaagcgagcagatgactgtacaaacaggtccgctagcggcagactgactggacaactcccgcagaaagactacggaacagcacgatgaggcactatatgccgctttccaaaactcctgaaccctgacaacccattatgactttagcctcataccttgcaacctcctaccagtttccgctgcacggtcacacgtgaccactggctttaccagcttgctattcccgtgactcacatcttctgctacagcccttatcggcggctacacacctttaacccagggttctacctggcacacttagcaactctccttgactcatcgctcccggtcctcagcctaacacgttacggccacctactccgcttccaccctatcccaggaaacacaaccctcgcatcatattgaa

SEQ ID NO: 508528 - DNA, 1462 bp, Homo sapiens
tatgttttattgtgtgttttattatatactttgttttgtcttgttgaggtgatgtgagggcagaggggcgggcgggggcgggttattttgtgtttggtttgtgttgctagcttatcctcgacctgttcgttggtgtgagtgatgccggcggtgtcctccccttttttgttgttagtatcattgtcttgcctcctctcgtttgtttggggtttgttatattgttatagctacgtcatcttgtctgccgcgacggtgtttgtatgtggggtgtgcgccacaccccactttgttgtagttggagtaacttcttctgcctaggtagagggggaggctgcctctcaccgcccacccggcgggggtgttgggtgtggcgcccccgcacattgattctcccgcgcggcggtgtgttgttgtatattattcttctctcctcgggtcgcccctcctccgtcgttggtgttgtttggattgagcggcggcggctgctctctgttgggatgtgttttttgtgttgatgtggcttctctctcgtcggtgtggggggggcggtggataatatgtggttgtcggccgcgccaccacgacgatgtggggcgccccgctctactctcgctctgatatatgatgatgagattatgtctcttctctctcctcctcatctctctcttctgatgatacgtcgtgttgttgtgcttcgccctctacgcgcgcgtgacgagagcgtctgtgattatgagaggcgcccttcgacgatgagagcgcgcgcgcgtgtgtgtgtgagagagagggtgtctctcccacacccaccccatagagagagagaagatatgatatccccgcacgctctctcgctcactccactctctctcgcgcgcgcgcgcgcgctgctatgatcagcagctctcgtcgcgcgcgctctcgcgcgcgatgatcatagcaccagccccgactagttctctctcgtcgcgcggagagagagcgcgcgctcccgcgcgcgcgtgtttactccccgtcgtgtgtgcgctcctctctctgtgtctgttctctctctctcacaggtgttctccgcgcgcgcgccccgtcgcgggtgtctcgtctctcctgcgagagatagagagataagagagagacacacacacccacacaccacactctgtgtggttgtctctctgtgtgggtgagagagtgtgtgtacgacaccaccccctcgcccccccgctagtgtgtcacacacagcagcagcgctgctgtggatatatatacacagtgtgtgtgtgcgacacagcagctgaagaggggaccccgaggtccacacaccccggatttggccccgcgagaggagagaaaaataaagaacgtcatatatattttgtgggggtccccgaatacaaaatctttgtggagagagtcccccccaccaaaggggggatattttttactgaggccccccccccctttttga

SEQ ID NO: 508529 - DNA, 857 bp, Homo sapiens
agtgctgggcacacggcctgtgcgggttgagtgtataccagcgtttttgtttaccccctgtcttggcccagggttcttaacgttggagaagtggagagcgcggtgttccccctgtggtgggcccgtgctccctgggccccggtgggctctcccttgtgctcccttgggcgccttttcccatgagtcccctcaggggcaagctgcacagattatagatgggcggtgcacgtctgtcctcacagcccggggcgtatacccttattggggacggtgcgagtatctacttggaatgacaggcttaggccgggtatccgcgggcgaccccgggagacacccccggtgcacgagagtctcccaagaagcagggcaaaattaagggggccaaaccccgggtgcagcttcaaattattatgtaccctagtggggcggccccgaccaccccttccccagataaaaaggacatatccccgggaggagagcgctcacaaagcggcgccccccggaatacgggcctctaaaagacatctcccacaaggagcattgttgggaggcactaacgcaacgtgccaggcagagttcctcttttcaacagagcccctcttatgggccaggagtctgctacggacactgatcttgcgccgcacaaaacaacgtgggagcacacgctctagtagaccagagcattaatagctttgccactcatgtgggacccactctagggcagttgtgtaacacaacaataagacaccccacactggttagagactcccgccactcctctcggaaggtctttttagcgctcttctggaaatagtttcgggactttgcggcccaaagaatttcccccaacatagaca

SEQ ID NO: 508530 - DNA, 966 bp, Homo sapiens
aacctggagcgcgagcagtagctggcgtggtgcgccatggctgggatcaccaccatcgaggcgtgtgaagcgcaatgatccaggttctgcagcagcagtgcagatgatgcagagtgagcgagctgagctgcctccagcgagaagttgagggagaaaggcgggccctgtggaacaggctgaggctgagtgtggcctccttgcaaccgtaggatccatgctggcttgacagaatgagcatggaccgtgctcaggagcgcctggccactgccctgcctcccagctggcaagcaagctgacaaacagcttgctgcatgagagtgagagcaggtatgaaggtatatctgcacaccccgggccttaaacagcatgaacgacaaagcatggaactccaggaaatccacactcaaacgcaagctcaaagcacattgccagcaagaggcagctcgctaaggctatgcaccgcaggtggctcgtaacgctcgcgtgaactcactcgaccggacgaccttggcactgcacacgccggaacagacgcatgacactgcgccagagaatcctgtttgccgacgagactgccctgcgcacaactcacactgaattggcccaacacaccctgcacggctgtgggaagcgcctcttggacgacacacggacctctccaagacctacagataaataatgccggaagtacctccatgacttccccctgactccactctccggcggccgcaccacccgcagcacacctaggctgccgagaaatcgagacatccatacttagaacaccatacccctctaacacaccctgaaaaacatacaattatcacctgccacctaacacaccgacccaccatttataccctatcactacactcattgaccacacacctccttgaccctccactccacatctcaaacaccccaactacaccaccctcttctctcctcccctctagccatacaaac

SEQ ID NO: 508531 - DNA, 105 bp, Homo sapiens
gaaggagcctgggggcttctcgtagggtctctgctacctcatggtgcccccgggggccaggccagtggtctcgcctgggcccgctctcttggctgggggcacagg

SEQ ID NO: 508532 - DNA, 462 bp, Homo sapiens
gggacaaggtgggagtcccggatgagaggcgagggtggtagatgagggtggacccagtagaaagggtgagaaggggatggagtctgaagtttttgggagataaagccaaggagacgggctgagggatggcttatccctctttacacctgacggtccctccagctctcttcactccggcagggtccatccaaaaacactcggcccagggaaatctaatttcggttcaccccgtaataatgcccagaagacaaaaggaaacacggacagatggtcattatttatcaccccttggtttggcttggtaaattcatggtccggcctagcggttagcgtcttaatggttcaggtggacctttagaaacacattcaaggtgaataaggaggcctggctatattccaaaatcgtgtcagggggaataaccaaaaggattttattctttcactctcctttgggcgggcagg

SEQ ID NO: 508533 - DNA, 246 bp, Homo sapiens
  misc_feature (1)..(1): n is a, c, g, or t
ncagagaaaccaaaagacaggtaccaatgaatcctgccaagtatgtgaagaaaaagagaacccgtacactaatggtggaaatgtaaattagcacagctactatgaagcacagtatgaaggttccccaaaaaacctaaaaataggctcacgcctgtaaccccaacacagaagcccaagtgtggaaggatcacttaagcctacaagttcaagaccaacacggccaataaagtgacacctcatctctac

SEQ ID NO: 508534 - DNA, 769 bp, Homo sapiens
  misc_feature (31)..(31): n is a, c, g, or t
  misc_feature (297)..(297): n is a, c, g, or t
  misc_feature (367)..(367): n is a, c, g, or t
  misc_feature (392)..(395): n is a, c, g, or t
  misc_feature (503)..(503): n is a, c, g, or t
  misc_feature (528)..(528): n is a, c, g, or t
  misc_feature (557)..(557): n is a, c, g, or t
  misc_feature (752)..(752): n is a, c, g, or t
  misc_feature (761)..(761): n is a, c, g, or t
aagtagaatgtgtttatcaagggtgggggcnagggaatagggactttaataggtacagggtttgtttgggataataataaaaaagtgagatggggctgggcacagtggctcgtgcctgtgatcccagcactttgggaggcggaagtgggaagatcacttgaagtcaggagtttgagaccagcctggccaacatggtgaaaccccgcctgtactaaaaatacaaaaattagccgggcatggtagtgggtgcctgttatcccagctactcaggagactgaggcaggagaatcgcttgancccaggaggcagaggttgcagtgagccaagatctcaccagtgcactccaacctggggaacagtgggagtnctcaaaaaaaaagaaaaaaaaaagnnnnggccgggcgcggtagctcacgcctgttatcccagcactttgggaggcccaggtgggaggatcgcttgagcccatgttggacaacgctgtctctaccaaaaaattttanccgggtgtggtggcacacgcctgtngtctccgctaggaggctgaggtgggaggntcacctgagcccaggaagttgaggctgcagcgagctgtgatcgagccactgcactccaggctgggcgacagaatggggcccagtctcaaaaattacaaaataagaaaagtcccattgttcccaagatggtttcccgcctttaccccagatgtgtgaccctgagcaaaaaaacctttctgtacccaactgcctcanctataaaangggggtaa

SEQ ID NO: 508535 - DNA, 1414 bp, Homo sapiens
aaaggaacgctgttgagacagccaccaacacagttgtgtgtctccccgcaacgtttggaagcgggacacaatcttatatgtgtgtagaatgtttagaagacaggccgttcgacccaccgagggggggggaccaacacccaacaccacaagcatgtttgtgccattggggggccacacacccaccattgtgtcccgccggtcgtgtagtcgccgctttattgatgatgagtagaagacgcttgtcttgtacaacaaagggcccctcgcgggtgaaattataatagatgggaccgaacgggcgcctgtgatatatactaataagtaaatataagtgggagataaaacaagtgtggatgggatgaagaaacatgatttattgagatacacaggggggaatgttttattataacttcctgcggggcccacacattagttggtgtggaacaaaataatcaagagataaatatcttctcccggaatgggggcgcgccaaccatcagtctccaacagtaattttggaagcaggaagaagattcttattaaagaaagaagtgttgtagtaccccaacgggcgcccaacgggccacaaaagtgcctctccctctacgaaaaggggagaacccccttgttgttggggttgtctcctccccccccttcttgggagcgaattataatatggggttgtagaagtagggtattccccacaagaaaaaatagttttttaagggcacaacaacgggggagattataatgtggaaattgcccacaacggggaggaattgttataaagcagggcgccactataagggggagagattgtctcaattagagtaaatctggtgagagagagacgagtttgacacacttcctgtagaacccactgtgtgcaccaaagagcccccaactttgtcgcacactctaaaagagggggtgaagaatatctgaaatatctgtgatatgtgtgtttgtgtacattctgggaatattgtaatatcgccagtggaaatatttgtatatatgcacatataaattcccatggataaaatatgggtgtaatagtggagtgatataatatggtgtatagtaaaatcgcacgtacacacaaatgttgtgtgctaccctgtgtgttataaaagagtgttttcccgcacagaccacagtggcacttataatgggcgcacaatggcataatgtgtgttaaatggaggtatagagggaaacactcaaaataatataagtagttccttaattttcacgttgtgagaaaatgaaagtgggctataaagcacagaaagaagaacgttctatttttagttcttttaaaaaatgtgtgtgggtggtcttttttcctcagaagccccaagcacatgtatattttgttatttctccttgctatattcctgagactatacta

SEQ ID NO: 508536 - DNA, 446 bp, Homo sapiens
taatcatgttctatctctcgttacctgatgctctcatcttatatacatcgtcttagtgctgtccagattctaacgctgtatgatattattaatgtcattgatgtaaataaagttgagaaatatgttaccaggtctacagcaaagaatatggttcttttgctgactatacttggattccccactaagcagctggatctaactggagttaatggtctgcatgcaacttccagcaatgcactgtggtagttatatcagaatatacaggaacacttgaaacaaagggagccagtcttaatagataagggatgaacacagtgcaggcaagagagaccagctgcttcatgggcatgtgaaaaatctacttatatacagtcgggagaaattgacacaagattctctttttgtgcaagtaacaactataagctaagtaggagacaaagctagat

SEQ ID NO: 508537 - DNA, 165 bp, Homo sapiens
ttgtgagcgttggagggcgtgctctcgtgggctcacagaaggaatgatctggtggttaagataaaacacacgtcaaacttatacgagttgtccacatgtcagcaatggtgatcttcttgctaggacttgccatacctggacccaaagggggccatgggctctcac

SEQ ID NO: 508538 - DNA, 195 bp, Homo sapiens
agggataacaggggagtgagctgacgctcggaaggtgtcttgagacttatcatccgcgtgagggtggaacgcggcccccgacagacgctcggcagggtgtcttgatattatcatctgctgagggtggagctgagggtggacaggggagtgagctgacgctcggaaggtgtcttgagattatcatccgctgagggt

SEQ ID NO: 508539 - DNA, 419 bp, Homo sapiens
agtgggtgatctagaggatcccttcggttgtgatccgtctggtgtttctgcatatcatgaatatttatgagtgagtgagataagagtttccttaagatagtgatttcgataagcgtgaagctgtatctgttagctctgggctctaatgctctcctatttatacagtgaagcgcatggaaaataggaagaagctcagtatcggctcctcccaccataatccgcacttcctccactgcctcctggaccatagtttcctccaccatatggtccccccatgttcctgctaccaccaaagtttccactcttcatgggaccgtagttagaaggttgctggttataatttccaaaatcatggtaatttccacttccataatttcctcctccatagttgtcataaccacctccgtagcccccaccct

SEQ ID NO: 508540 - DNA, 1066 bp, Homo sapiens
gtttgcggttcccagactgaatcgtgagtgagcggagtatgaggtcgctgaggactgtccactgggacctagtctgaggatggacggccgcgattacctgtatgatcgacatactcgcgtgttggattgtcgcgtagtacttgaccttatgtagaatccatccagctatggtatgacctccatcatagagtaggcgtcacaacaacccggaatgtacatagagatgtaggttgaactctagtttctgctcgctgaagctatcagcgatctgaacgaatgcactccgtgggagtctcacgtctggggattttacacactctggacggcagcgaacacggcgctcaccaagtctacggcagtcgtgtcagtcatcctaatcggctgaattctctggactcctggatgccacgatagcagtcagggacgtgccagtgagagtgggacccaatgtatctagcttgctgcaactgattgctggcatttgccaaggatacttgcagcatcagctagatggctgcttcgaggattccttgcacagacaagcctcgttgcacaatgcgagcaatggccgctgtgctgcatttctcttcacctaacaacttagtgatcgcgcagaacaagcagacggcactcgtgcgactagcaaacgttgcggagccccacagttcctttcactgtggactctggtcatgtacatggctaacgtagacttcagggagagccagcttctggtgggcagcccctccctgcgaatagtgagtgaggacggatggcggagacagctagccaagctgcatcaccgaaagcatattgcactttataggtgcctaattgttctcaagttgcagctttcatcccctgaaggagtgattcgctgactcatctaaggacattaacataagcactggtgacggcaaccttgtcttcgcacaagaacaaactgagcataccttgacactactcatggcagttaagttccctagcataccggcaacttagaatacatgaacattcagtgtgtacacggaatctcgcggaatttccacatgagttcctggcccctaat

SEQ ID NO: 508541 - DNA, 198 bp, Homo sapiens
  misc_feature (155)..(155): n is a, c, g, or t
atgactctaagatccaataccgcgtcgaacaagtcttgtgtcggggagtatgttgcacgctaactaaggatgacgaggacacagagtgagctgcgttatttgaccacacggaactcaccggccgacacgacaggattgacagattgatagctctntctcgattccgtgcgtggtggtgcatggccgttcttagtttgg

SEQ ID NO: 508542 - DNA, 373 bp, Homo sapiens
  misc_feature (155)..(156): n is a, c, g, or t
gacgttttggtttctgcttatggtggggagcttgttcccgttcttcccacaagagaccgcaggatgtgggcacaagcttcccgtgcgcgtcttccttcactcagttggctacgcctcccatcctagctccacttccagaactgccttcaccctannggctgggggtcccatgtggtctatggtcttttaagagacagggtctcactgtgtctcccaggctggagtacagtggcgtgatcatcggctcactgccacactccaagcttcaccggaagatttcaaaacgccgaatttcctccttggcctcagcctcccgagtagctaggattacaggcatgcaccaccacgcctggctactttgtatatttttacg

SEQ ID NO: 508543 - DNA, 603 bp, Homo sapiens
ttaccaagcatgcactatagataactgtaaacggggcaaagtaccagctaaccgagaaataaccaggtgaccagtagctcagctcactgcgccccctccgaatccgagggaagcactctgtgcttggacagcagccttgtgtgcgatgatggcgaggcagggcgaggttagtatgtgcggagggacatgtatcgtatgctttaaagctacagccagaagtcgtagcgctcctgttcctgcttcactctctatcattctcctcagtctcaatactcattcaatcgcaccctctggccttgtctaagctaaatgtggttagagctaaaaggtcgggataggtaacgagatgaatggctgggggagccctgagagaggtcgtcccacatgttgcggaatagggtaaaacaagatctttgttgttgtaaggagagccacttcctcctccaacacagcgatgtggacacgcaacagggaaatcaggatcacccatggctaaattacccctctccgtcatgcccacatttatatggtccccagcactgtactcaatagcggggcaagctgctgaaaagggcaagaaagaacactccagcaaacacgtct

SEQ ID NO: 508544 - DNA, 81 bp, Homo sapiens
cgtctattacacttttctgatacaatataccacaacgtactagcaaaaaagaaaacagagaacctttaggtcgactagacc

SEQ ID NO: 508545 - DNA, 428 bp, Homo sapiens
  misc_feature (371)..(371): n is a, c, g, or t
ggtcgacaatcagttataggggtgcctgctaaaatcataacctggtctgtggcatttatgcaaaaattgttatctgattgattggactggtaggggtgagcatgaagctgtaatcttgccagttgttaacaccattgttggaagaagaatgtttccagggtgagatcttcttagagccctgaaaaaggcaaatgaagagcagggagggctccttcttaatcttgtaccatccagaggagaagggcaccaacaggccaaaaagattattcttgtgccctgagggatcaagttatttatgaggcacgggcgtcggcgcggccgccaaatttataataataagggggcgcttctaccgattaaatatcgccganttaaggaagggggattgggaggggaagattcttacccaaagtcaaattggggaaacg

SEQ ID NO: 508546 - DNA, 102 bp, Homo sapiens
ctcttactagtacccatgtccataggctgtttatattttgtgatatcctctggggctggctatccatgggctgcatgagggaaaggaagaagctaagaattt

SEQ ID NO: 508547 - DNA, 165 bp, Homo sapiens
aacttctataaagcgaatgtttgcctgttactacagatgcaacggcaccacagcagaacctttggggcgatggtgcctcgcccaaagagaaccgcccaccaagtcatgccattacactaattaagtgctctagcttgtacctgatcgttggtgcctcacgccaat

SEQ ID NO: 508548 - DNA, 399 bp, Homo sapiens
atgagtaaatcttgtgcttacttagtaaggcatttttacttcctgcagaaagggtacactcacaggcagtttggccatgagagtacacccaacaaaggagatagggtcatttataacctgacgcatctaccttactgctgtttccggtttcctttggctggaacgggacctcacattctgtattggtcccgattgattagtaacttagaacttttaaaagaggcaaaggtagaggggaacaaaggaaggaggaagtaacttgtggaatgttgagaaaggtaaaaacacttttaaataaggaagaggaacagggtatggactaatggttggttggaccaggctaaggggttgcagggccaatatttaggctaaattgtgggagccaagatttactcatcg

SEQ ID NO: 508549 - DNA, 413 bp, Homo sapiens
gatgcatcatacgctgcgtttgtccaccaggtcctggagcctgagaatattcttgcggacttcctcagtgtggtaacgtgagtaccttccacttttctctcgatgtatgcgtagacccttgacagcttcacacattgcgcttctgttcactttcaaattcaccttcaagttcacgaaccctggcctccagtttctggatctgcttcttcccacccttcagggccagctgctcagactcatccagacgatgctgcaggtccttcaccgtctgttccaggttcttcttcatccgctccagatcggcgcaggtagtcctgtaccttcttcagctcctcagacatcatggcagcatcagtgatggacttcttggccttctcttctgcattgcgagcttcctagctaaataatctcca

SEQ ID NO: 508550 - DNA, 897 bp, Homo sapiens
attccagaacttgggaggccaagatgggcttcaaacacaaggtcaggagttcgagaccaccctgaccaacatggtgaaacttgttctactaaaaatacaaaaattagccaggtgtggtggtgtgcgcctgtagtcccagctactcaggaggccgaggcaggagaattgcttgaacctgggaggtggaggttgccatgagccaaggtcacgcccctgcactccagcctgggtgacagagggagactctgtcttgaaaaaaaaaaaaacaaaaccaaaaacaagaaaagaaagggaaaaggattttcgaaatttaaagcctcaaggggtttataatgaacaatattttggcaaaaactagataattccagaagatatgaacaatcttctaagaaagcacgctatacctagccaattctgcttcaggaagaacataggaatgcggaacagaccaagttaacaaactaggggctttaatcagggattaaatttcccctaagaagaaaagcccagaaccagatggtttgtggtgaatttccaataaacaattcaaaagaaaatacctattctccaaaattagaagaaagaagactctaaccccattttgggggtccacccaccataatatcatgggcgagcacggagttcacgaacttggatgatggccattctattgaacatgcctacaactccggtaatctaccatttaatgggcgcattaaggtctaaccggaaaggattcccgggaaaacaggggcatggcatatgggaatcccgacgaaagggaacggattaacgcagaacctgcacccacatgtacactccacgtgacaggatagtagcggagaggaccagaggcagctgacaaggatgagacacagaagagaggtaccgacacgc

SEQ ID NO: 508551 - DNA, 177 bp, Homo sapiens
acgtcttgagtgcacatgctagactgagctccattgtaaaaaaacacagtgtagcaatgagacatgatcgtgttgtggtattcaagagtggaatagtgtacgtgtctcatctctctagctctctatctctagctctctctctgtgtgtatatttcacagtgtctctgtgtcactgtc

SEQ ID NO: 508552 - DNA, 149 bp, Homo sapiens
cgccagcctcgaacgcgacctcgaccttggtcagcgccagctggtggcacagcgggatcaggtcactggtgcgcttggcggccatgatgccggccacgcgagcggtcgcgatgtcgtcattcttgggtaggccgccgctggtgatgagg

SEQ ID NO: 508553 - DNA, 130 bp, Homo sapiens
tgaccgcgggtggcagcagaccctatttctaaaggaaaaaaagaacataatagtatctcgcatggtgaaagtaagtattactttgtgaaatatttaattcacctgttcgtgtaagtgtggactagagtgg

SEQ ID NO: 508554 - DNA, 432 bp, Homo sapiens
agtaggcgaatcaggtaaaggaaaatcaacaattttaaaaataattttaggaattgaagataattacaccggatctattttatgaaataataaagaactaaaaactattaaagaatctagtttaagagaaaatgtaagttttttagacggaagtaattttttatttagagattcagttgataacaacattgcattatgagataaacaattgaataaaaataaagtaaaacaaatgctaaaatactttaatttgactaaagaattaaaggattttcaacaatttaataaagaaaatattgtttcactttctgaaggtcaaaaacaaagaatcactcttgcaagattgatgtatacagaacctaaatttattattttagatgaagtatttgctaacttggacaaaaataacgccgataacataaaaaaaaaaaa

SEQ ID NO: 508555 - DNA, 654 bp, Homo sapiens
gagcgttgcgcgtgcgcactgggcctgtcagcggcggtggaaccatggaggccgcaagcccttcgcccgggagtggagggcccagtccctaacccctggcagtagggtgctttgaagctgcggtctgtgactgtggtactgtactgggttctaggttgaacgccagatttttgcagagaggaggacgtaacttatcaacgagtaccgtgaacctccacaatgactggggggagtatccccgagggtctaattgcgcttcatgacttggggatgtagctttattacggactgctagagcatggggaaaaaacatgttgtttacacataatatttatttacaagatgtacaaatggtccatcctaaattttatggtattggtgaaaatatgtgggtcggcctgaaaatgaattatctgccaggtattgctatcagaagttggcatgcagagaagacaatgtccaacattttgaaaatggcagttgctctggagacgtgtctaattatctttcagttgtgtgggaccacatcttacaaagttggttgtgctgttctccattggtccaaaaattggacattattatacatgcaggaattttcatatgcaatattgcgccaggaggaacatgaagagaaagaccttatgaaccaggaat

SEQ ID NO: 508556 - DNA, 334 bp, Homo sapiens
cgggcgccacagcttctcccatgatctgaattatgattttcctgttcaaaaaccacctctggccaaaattcacatttacgagccattactcgtatgttgtctgtcacagaacatatccacagttccagctttgaaggatctgatggctgaagttcggctatagtcagatttttggcaccacctgtccgttcaggctagcaaacctttctggagatatgcaatgtctaagggggtgcctgagagcagcttctgcaaaacgcttagaaacaccatgaacaaaacatgaacacagttgaggctgcctccatctgaggctgtgctttttcctaacaag

SEQ ID NO: 508557 - DNA, 256 bp, Homo sapiens
ctctagaggacccctctctccacactggtctccagtcagtgtcaggtagcctggctgctccacccactcccaggagaccaaacagccttcatacatctcaagttgggggcaccaaaaaagggggcacagggggggcacgaaggctcctcattcaaaatacaaaaaaataaaaaagtattaaggcgaagattaaaaaaattttgcattacataatttacacgaaagcaatgctatcacctccccagtgtggagagag

SEQ ID NO: 508558 - DNA, 305 bp, Homo sapiens
tagctgtttaactttgtaagatgcaaagaggttggatcaagtttaaatgactgtgctgcccctttcacatcaaagaactactgacaacgaaggccgggcatgccttttcccatctgtctatctaactggccggccaggaaaggaaaaactttcatgtttgtgaaagaaaaaattgggtggaagaaattgggtgggaccacaatgaaatcttgaagtaaaacacgcctgccccaaggtgtccttcaagctgtaaagcaagttaatccaagtggcaattttttttttgttcaaatgattttaattat

SEQ ID NO: 508559 - DNA, 810 bp, Homo sapiens
cggtaactttgctgaactaggctgttactactttatgaacgatacatgtcctgcctaatatactgtcagcatgcaaggtactcacgagtgagtgcaccacttcaagggctttactccgttaacgagattttgttggcatagtctactggcggttgggcagttttgatcgacaatgggctcaaccagatatagccgcaaggtgtcagggcagcctgctgggcagagttacagcttcctgtggtctttcatggtgtagttacccttatagatcttctgctgtaattagctgccaacttaatgtatgttacacaaaagataaactatactctagccgccagaccatagatgctagtattttttgctataacttggatttcctaatactgtcatcctcaaagaaagtgtacttggtttctttaaaaaagaaagtgtatttggaaataaagtcagatggaaaattcattttttgaaattcccgttttgtcactttttcttcgataaaagatggccactaattaccccttttcggccaccatgtatctcgagtacccccgatggagacgtgggctcaagataagataggtattggtttcacgcacgtgaggcaacttagacagctttggaagatggcataacgatgtctcacctggacttaagcatctggcatctaacttcaacagtgctcggtttctcctcactgtatccaggttccctcccagaggagccaccagttctcatgggtggcactcagtctctcttctctacagctgactaacgttttttctgaccagatgacttcttccacactaa

SEQ ID NO: 508560 - DNA, 282 bp, Homo sapiens
tggtacagcccgtgtggcaaacgacaatgctgatgcctccaagatatctattccctcctccttcattacactatctattttttatttttttgatgtgcggtgtctcgctcttgtatgcccagtgctggcgtgcaagtggtgtgatgcagctcactgcagcctcgatctcctggtctcaaagctgatcctcccgactcagcctcccagtcgctggagaccacaggcgcacgcccaccacgccggctacttgttgtatttactgtaaaagacagggtttcgctt

SEQ ID NO: 508561 - DNA, 311 bp, Homo sapiens
ccctgatcacctcagcctcccaagacactaagactataagcccacaccaccactcccagttgatttgttgttgttgttgagagagggtctcattatgttgctcaggcaggtctcaaactcctggtctcaagtgatcctcctgcagcacgggagttttgacctgctctgtttccaacctacatcagtttacccctcgaatagttttaaaaaacatgaagtggggccaggcgcagtggctcacacctgtaatcccagcctgggtgacagagcaagactctgtctaaaaaagaaaaagaaaaatcacaattgtc

SEQ ID NO: 508562 - DNA, 402 bp, Homo sapiens
cgaaggctctctcttactagaggtgcaacataaattggtaatgcttggaatggcactagggtagaatgagtcgtcaaaggcatatcttctatatctgaagagtatccttccttcagggatttaatagactgagtcagatgggtctgatcttaatcacaattgtctcttctgaggaccgctgataagcattgacttgctgtccccttaggaaatccgggcggatacaaagcgtttctttacttttcacttcaattaatgctgcgcttcgctaggtgagtgcgtactttttctacctgtacacattcctgcattcatgtattttgttaaagtagactaaagctatgttacatggaaaggatttagaagccttttgtttcccttgctttgttttcataaacagta

SEQ ID NO: 508563 - DNA, 171 bp, Homo sapiens
gatacaaagagcccaaatcccatctgtgtgggtctacctcctgggaccttcctacatataagcttcataacatacttgagaggctgatgtgtgagacaatcgatttatcccaggagtttgagatcagcctggacgacataactaaatctcatctctacaaggacgaggtgg

SEQ ID NO: 508564 - DNA, 204 bp, Homo sapiens
  misc_feature (33)..(33): n is a, c, g, or t
  misc_feature (75)..(75): n is a, c, g, or t
  misc_feature (160)..(160): n is a, c, g, or t
  misc_feature (178)..(178): n is a, c, g, or t
  misc_feature (189)..(189): n is a, c, g, or t
caagagctctctgatcactattacatatttttnctagaaaatctaaagttcagaagagaatgtatcactgactgnacttttattacaatatttggatggagtaagttttagggtagaattttgttacagtttggatttaatacttttgaaaagtaaattncttgtttactggtttganctataatactnctgttatactttacg

SEQ ID NO: 508565 - DNA, 234 bp, Homo sapiens
aatttgaagtaaaaacaaaccgacctggattactccggtctgaactcagatcacgtatgactgtaatcggtgaacaaacgaacctttaatagcggttgcaccatcgggatgtcctgatccaacatcggggtcgtaaaccctattgatgatatggactctataatatgattgcgctgttatccctagggtaacttaccccgatggtcgatcaagaggattaattgattatagcac

SEQ ID NO: 508566 - DNA, 263 bp, Homo sapiens
tctgttggacatcattgtccttagagtttggaaaactacacataatggaccttggaatacaggtatgatattggccaaacgcggtggctcaagcctgtaatcccagcactttgggaggctaaggtaggtggatcacttgaggtataggagctggagaccagcctgaccaacatggtgaaaccctatctcaactaaaaatacaaaaaaattagccaggcatggtggcgtgtgcctgtaatcccagctacttgtgtaaactgatt

SEQ ID NO: 508567 - DNA, 1617 bp, Homo sapiens
ctgaaatccgagagaaaatttaccatgatccccagctgctccgagagatcaaaggacacaagtgttacagaatcctgaggtgtcacttttctgcctgaaacctctggctggtggcacctttacctgtgttttgctcgggcccactgggttagttctgtccactcagctcatgctagtggtctggatcccacacctgccaagggcgagctgggtacagagcagtgaagggtgtgtgagcaagcgagcatgggatctggccactgcacacagccaagcatgccagccgcagtggggtgggcagctccaggcacaggtgccagctccctgtgaggctgcagctggaccaggccgactgcaaacagcttccactgtgggtatcagggaatgcagtggcacccagaagcttggagatgcaggacctgcagagccccaaagaaggtgtcacagccctggttggaggagctcctaggtctgtgttccctgaagggacacagctcttctctccttctctcttctcttcttcttgcctgcaatttggcaagaaaggatagcgtttcagccctgtttatgttacacctctttcagccctgctagttggcaggtcctgagttcttgtcctgagtccaggaaaaatgaggtatgtggacaagtagaaggtgagcaaggtgaagaggtgctttattgagccacagtacagctcagaggagacctgcagtgggtagctcctttctgcaggcaggtcatcccaacgtctgttcagctctcagcagctgagaggagacgcacggtgggtagctgtgcccatagtgcccaggcgttcgagctgaggagggccttccggccactgctgagccactcttagccacacctcagcctccctcctgtgcttgtcagtgcccaaattctggagggggccgaggtggcagggggctggcatgtcagcactgccctgagcttgcacaaaccaggccaggttgtgactgtgcccaggtttggcctcaacttggatctgaatttggagtgggctctggaagcagagagatgccagggggcaggaccaggtacaactgagcctgcgggacaggggggcttgctgggcctctgagagtgcagagatgcctgggtttgcagtcatggctggatggctgcagctgtgcctgggagggcggggctcctgcctgataatttagaaggggcaggtctcccacccattcctggctcccaccagctctgaggagtgcacagccccagccactcctccccactgcagccagtgtctccatagcaactgctccacgtgggccactgctgccatcataaatgggtcctttcaggttccttccttgtacctcagcactctgggggtcattagaagccttagcaacactgctcaccacagtatagctccagaggccctagcagtcctgctcccacggatcccacttctgacaccatctattaaaagaaaatcttcagctgaattaaatttaaaggagcttaattgagcaatgaaggattcacgaatcaggcagcccccagaatcacagcagattcagtgagactccagcacagacacatggtggaagatttatagacaataaagggaacatgatgtac

SEQ ID NO: 508568 - DNA, 590 bp, Homo sapiens
  misc_feature (330)..(330): n is a, c, g, or t
  misc_feature (491)..(491): n is a, c, g, or t
  misc_feature (514)..(514): n is a, c, g, or t
  misc_feature (525)..(525): n is a, c, g, or t
ccaggttctttgccagattagtttcttattattcctcctatttgagattaaatattacctaatttcttaaacagatttcctcttctctccttttttaaatacattttttaaactttttaattgtaaatttgtctagtgcatctctacccttactagagatacaaactctgcaagcaaattaccacgtcttcttcatttttttattctaaatccagtgtctagaacaatactctgaatatattaagctcttattactatttgttgaattaatgataatgtcatatgagactcatagaatcaaagaatattcagtttgagagctacaaaatnaaaagacctttataagcaaaccggcctgtcttttgtaaaagggggacatatgttatcaacgtgccttgcatttaagaagcttattaaacactgtgatgcaaaatctctccatttccttctccatcagctgcgtatttgtatatgtgtatgtatgagattgnatttctttcttaaaagtccttgnattaggcattntgcgttgctctaaaggaatacctgaaattgggtaacttacgggaggttttggctctggggtctgc

SEQ ID NO: 508569 - DNA, 536 bp, Homo sapiens
ggccacgctggccatcagcacacctccttaagacgggcagcgagagcagcatcgactcgcctcatgaagcagatctcctccttcatgtcaggaaatctcggatgaattcagatggtgggaggttgtccatggccatcagatgcccggtgtcgagcaaactatccgtcgtcaagacgacgtgccgtccttatgaactttgcctgttcacacatgcgtgcgggaaacgaggagtggcatttgaggtataacgcgcgactgtcgtgtggcacgtgcagtcatcagtccatcatcggaagagaagctcagagtagcaaaggtgagacagggcatgtcacatctgttgcgacgttcagtacgaggactggcgaggttcgacagatgctagggcaccacgtatgactaacatactcctgaggtgcagtgaggggccctaagatcactcagatccctcagaagtacatcctgattacatctatacatgctgagttggtcttgggaccgatgccggaggtccgggcatggtgctagtggagtag

SEQ ID NO: 508570 - DNA, 139 bp, Homo sapiens
gaccctcccgcccagctgtcaagaagtacttaatatttggtttcaacgttttttttcatacgagaaaagggcagcggggcgctttttaatctctcgcatgacaactcacagagtgcttccaagtctttcatgtactctc

SEQ ID NO: 508571 - DNA, 215 bp, Homo sapiens
caatgtttctgtttcttaaatttaaaacgggccgggtttgcctttttttatcaagagagcttaacagataaaaaatgaaattagtttattttttacttgccagcagaggatctgttttattttaggatgcagggtgaaacttcccattcaactgaacaactagttgtcaactaatgaaaataaaaaattttctctaagccaaaaaaacaaaaaaa

SEQ ID NO: 508572 - DNA, 308 bp, Homo sapiens
  misc_feature (180)..(180): n is a, c, g, or t
  misc_feature (295)..(295): n is a, c, g, or t
aagttgtagagattacaggtgtgagccaccatgccgggttaggatttgtatatttagtgatacgagtgataaaatcatgtgggtagtgatgggattcatatatgtgaattgtgaattgtcagatttgaccactgggtgtgattaaatttcagtaaggagggacagagatcgtgtgatgtncaatggctcttgtaagcccatggaagttttggtctcattctagtgtcaggaagtggtggatagaataatcaggacggttagaatgtgtccttaatattccctcagaagtgttggnaggcccttccctg

SEQ ID NO: 508573 - DNA, 665 bp, Homo sapiens
  misc_feature (297)..(297): n is a, c, g, or t
ccagtgggcaggcgggtctcgaactctggagctcaggtggtcggcggccttggcctcccaaatggctgggaattacaggtgtgagccacggtgtccagcctagtttgggaattcttcatatataaaaagctttttaagaaaggtaatatttgggacttctggctcctggggaacgagggacataggacgttttcctaatttcttttcttcataactaacaactaagagagcccgtgggctagtacattaaggaaagacacaggggagcctcgtgaaaagcggattgaggcagaccanaccaggggatctgggagactcgaggaattgacacagatactgagtttcctgtgggtttactttggctttatatatcccacgactgggagccaacagaaagaagctgacaacctgaaattggcagggggcccaaacacggaaggtgccaacaaaagctccccggtccagccagaagaccaggacacgggcagcccagtgaggcagaaaacttaaagagtcatggctctactccaggtccacaccatagaaaaaattatgcagccccaaatttacacccgcagaggtgactggggagcctagggtttgacaacagtctagcaataaggaagccactctccgggggcatggaggagcaggattgagggacc

SEQ ID NO: 508574 - DNA, 133 bp, Homo sapiens
caacaccttcgtccattccgacatggcaacatcgagacacattatccatcactatgcgctatttagtctggttcttcggcgtgtgcagtccactgtgacttttgcaccaaggtatggactctcggcgtgtgca

SEQ ID NO: 508575 - DNA, 191 bp, Homo sapiens
tctggaagcccataaatcccagagccaggagatagaggaggcagctgtcctggttccccctactactctcaaaggcagttcatcccttttggctgacaactctcccggccctttcacagttctagctcaacccacaccagtcaccattacctaccaacttcacactcatcccaccaaactaaaagcttaca

SEQ ID NO: 508576 - DNA, 1360 bp, Homo sapiens
ggaggaagcaatgctgagggggctggtttcctgagcttcgacaaattcctggtgtcgtcttctgtggtctcctcgagacttgccggggttcagcactgaatcccatcggagcacggagcgtgggttgagtgaggctagaccaaccgcgaaggcacgagagtagaggttatgcgtgacatgcacactgtacggacagactccatcttctccgtagccgatgtgactatcataagagactcttaccaggtggagcctcgacacacgtgacgcttggctcgtcttggctctacatggcggggacttgtggaagtcgtccttatctctcgccgttcatcatatcttattcttcgagtttagagatctatagacagagacatcaacgtaactcatgaagaacgagggagcatcaaggtgtatatgacgccaggggtgctaatagagcactcagtgcgaactgagcgttgcagtccccaatccccataactgtatgtaacaatagtagtcatcatgacgtgaatcccgtgcgaggcatggcgttgagattgcagataatatcgtcgtgccctaacggagccgtatgacacccacgacaaagggcatgcgcagtactgcgtacaggtccaagctttgaaagatgcactgggtggcgtaacgtaagcttaacaggagcacggtgaaaacgccatgcccgtgggaaaacgatgggaggattggagaaactgcttgggaatgcaaaagggtatgaaccatcgagcacccggaatgtcccaatcacagagggcgagagaacaccgcaaatactcagtagggtcagaccacatagagaccagagaagaccggaaccgcgagtaagaacaggcacaagttgggaaccgtagcaaaatagacaccaacatagacacagacaatggaatacggggacctttcgccgcagagaggaaagcgctagattacaccacaagaaagggcacagaggcaaaggagcacatgcaaatcggcaggggatacacagggtgccgccacagggaagccacgggccagatgccacgaacaccgtgcccataaaccaacgggattggacgcgacataccacgatgacccgattgaaacaatttacccaggaatcacagaaatgcaccccccccggtgcacggagagacgcacctatggaagccatttcggaagacccgagtaaagggaaaatgaacaccccattcacagacaacgtgggaggaaacagttgcacgctagaacatagggacacctagagtacaaacataacgcaagagagaacaatataccatgaaaaaaagaagaatgacccgagagaatgaaggcattggaatcacacaaatcaaag

SEQ ID NO: 508577 - DNA, 698 bp, Homo sapiens
cgcagtggctcatgcttgtaatcccaacactttgggaagccggggcgggcagatcacctgaggtcaggagtttgagaccagcctggccaacatggcaaaaccccgtctctatagaaaatacaaaaattagccgggtatggtggcgggcacctgtaatgccagctacttgggaggctgaggcaggagaatcgtttgaacctgggaggcagaggttgcagtaagccacgatcgtgccactgcactccagcctggtggacagagtgagacgccgactcacaaaagaaaacaaaacaaaacaaaaaaaggccaggcgtggtggcttacacctgcaatcccaacactttggaaagctgaggcgggcagatcacgtgaggtcaggagttcaagaccagcccggccgacatggtgaaactccctctctattaaaaatacaaaaattggctgggtgcagtggctcacgcctgtaatcctagcacctttgggaggctgaggtgggcggatcacctgaggtcaggagttcaagaccagcctggccaacatggtgaaatcccgtctctactaaaataccaaactcaccatgcatggcgggtgcctgtaatctcagctacctggggagcgctgagatggcgagaattgactgaacccggaagaacgggggtctgcagtgaggccaagatgtgcccctgccttccaacctg

SEQ ID NO: 508578 - DNA, 209 bp, Homo sapiens
  misc_feature (21)..(21): n is a, c, g, or t
gagaggtgggacacgggcccntgccaccacgcccagctaatttttgtatttttagtagagatggggtttcaccgtgttagccaggatggtctcgatctcctgacctcatgatccgcccacctcggcctcccaaagtgctgggattacaggcgtgagccaccgcgcccggccaacttatatattttcaagattcacctcctcccacctct

SEQ ID NO: 508579 - DNA, 117 bp, Homo sapiens
gagggagttcatatactcgctggacctggaccagctctttatctgggtcctgcgggagtacaatgaagtggagcccatcatcctctccgtgggcgaggaagatgaggtctccatcaa

SEQ ID NO: 508580 - DNA, 715 bp, Homo sapiens
  misc_feature (11)..(11): n is a, c, g, or t
  misc_feature (134)..(134): n is a, c, g, or t
  misc_feature (278)..(278): n is a, c, g, or t
  misc_feature (280)..(280): n is a, c, g, or t
  misc_feature (288)..(290): n is a, c, g, or t
  misc_feature (314)..(314): n is a, c, g, or t
  misc_feature (317)..(322): n is a, c, g, or t
  misc_feature (326)..(329): n is a, c, g, or t
  misc_feature (332)..(333): n is a, c, g, or t
  misc_feature (344)..(344): n is a, c, g, or t
  misc_feature (347)..(347): n is a, c, g, or t
  misc_feature (358)..(358): n is a, c, g, or t
  misc_feature (375)..(375): n is a, c, g, or t
  misc_feature (421)..(421): n is a, c, g, or t
  misc_feature (436)..(436): n is a, c, g, or t
  misc_feature (455)..(455): n is a, c, g, or t
  misc_feature (477)..(477): n is a, c, g, or t
  misc_feature (542)..(542): n is a, c, g, or t
  misc_feature (578)..(578): n is a, c, g, or t
  misc_feature (583)..(583): n is a, c, g, or t
  misc_feature (647)..(647): n is a, c, g, or t
  misc_feature (674)..(674): n is a, c, g, or t
cttttcagccntctttttcaatacaaaataaacatattcattttcatattttacatttctcacctctataacatatacaataaaaatcccagacattgttggctggctgattcttgcaaagagatgcataagtnaactagtcaagtacatcttaaccattttgggtgtcatttagtcagtcagtcatgaaacagtaatatggagacataattttgaaaattaagcaaatgaatctgttctctagaaatgccttttctcgagttatagtattatatttntnactattannntttattcaaatcagtcggttttcnttnnnnnncttnnnnttnncatctctagtngcngttacggtggngccctgtgtggtctggnatgtggcgacatcagtgatgatgtcatgatgtcccacgggcagggnctctggcccccttcncggggtgtcatcacttggncctactttctgcttattctgantttcctggacaacttcagtgccttcaattattttcctgtagtagggcacagatgggggacttgtncttcctgcaacaacataggacctttctgggtaagcnaagtnccaaaaccttattttcatatctgagccagctgttagtaggatagggtttcggtctgcggggctncagtggataccatggacgctatggggngaaggctgtaattcagaaagtggtggtgcactgctggccca

SEQ ID NO: 508581 - DNA, 124 bp, Homo sapiens
gctcgactgacccgcctactttgcgggatgcctgcgagttgcgatctgcccgctcaaaaattcgtctcacattagcagtgaggattcgggcgtcaccccgaatcgttagtcgacgcggccgcaa

SEQ ID NO: 508582 - DNA, 467 bp, Homo sapiens
  misc_feature (2)..(2): n is a, c, g, or t
  misc_feature (9)..(9): n is a, c, g, or t
  misc_feature (76)..(76): n is a, c, g, or t
  misc_feature (85)..(85): n is a, c, g, or t
  misc_feature (232)..(232): n is a, c, g, or t
  misc_feature (426)..(426): n is a, c, g, or t
anggttaancaagggtaaaccgaccaccatgggataaccataaccacaaaggtgattttccccctcccaatttggncacccttancctttccaaggtaccatgaaccccccacaattagtgtcatttgtgagaaaggtttagaggaaccacaaagtatgtatgatcccaaaaagcaagcaacctgctgggcacagtggctcatgccctttaatcctcagcaccttcgggagnccaaggcaggagggtcgcttgaaccccaggagttcaagacaagcctagacaacatagtgagacttcatctctacaaaaaaaaaaaaaataataacaggcatggtggcgcttgcctgtagtcctagctgcatgggaggctgaggcaggagaattacttgtgccccagaggtcagggctgcagtgagccatgactnatcactgcactacagccagggtgacagagcaagaccttgtc

SEQ ID NO: 508583 - DNA, 366 bp, Homo sapiens
  misc_feature (4)..(4): n is a, c, g, or t
  misc_feature (30)..(30): n is a, c, g, or t
  misc_feature (48)..(48): n is a, c, g, or t
  misc_feature (58)..(58): n is a, c, g, or t
  misc_feature (60)..(60): n is a, c, g, or t
  misc_feature (63)..(63): n is a, c, g, or t
  misc_feature (69)..(69): n is a, c, g, or t
  misc_feature (76)..(76): n is a, c, g, or t
  misc_feature (86)..(86): n is a, c, g, or t
  misc_feature (125)..(125): n is a, c, g, or t
  misc_feature (173)..(174): n is a, c, g, or t
  misc_feature (181)..(182): n is a, c, g, or t
  misc_feature (187)..(189): n is a, c, g, or t
  misc_feature (198)..(198): n is a, c, g, or t
  misc_feature (220)..(220): n is a, c, g, or t
  misc_feature (242)..(242): n is a, c, g, or t
  misc_feature (262)..(262): n is a, c, g, or t
  misc_feature (277)..(277): n is a, c, g, or t
ctcnatatctctgtgccactttctgaatgnaacttattttgtgcctanagctctcacncnctnataatncttattnccttctgggnatttatccaaagtgggatcaactgtacgcctttggtatntgaccataaatcttttctccgctgacatttggtgatgcttcacatggnnatataannaaaannnaaatctagnttaatactgcattatttatttncctaaggctaaagaggagcagncctatgcttttattcagcancctttatctgtgacntcatgtctgataactgcctttccttccttctgtgcctttgaatacaaatttcagttctgcaaaagtgaaacattaaacattgccaacgc

SEQ ID NO: 508584 - DNA, 754 bp, Homo sapiens
tgcagaccgtgctagtatagctccaggaggaagcccaggaggctgatgcctgccaggaggatgctggcactgaaggtggacagagcttgaaggctgagcctggttggtcttcaaggggctcatgatgtaactaaacctgttcggagctggacaccagaagatccaggagaaagccatgaacggtggatatggacatctgccgccgtcgatcgcatctatcaccgccaagctctgcgatgtggctcagcagcgcaactgcgaggacatgatccagatgttccagaagctggtcccatccatgggggggcggaagcgggagcgcaaggctgccgtcgaggaggacacctccctgtcggaaaggtgaggggccccgccagcccgatggggatgaggaggaggagcacagtccctcaggatcaagcgaggagatgcacgcgcgatgctcaaccagctgcagggacgatatgatttgtgaggacgactgtgacagcctgacttgggagggagacttgacgtagtaccctgcttgctttggggcaggatttctcaggctattgccatggcaagcttggagaggcccaaggtagagcagcaaggagtgatagcctggagaaggtgatctaaggatacggagccctgttcaaaacccgggataggagtatcaggacaccattggccagataaagctgaattggcaaggcaaaaacgcatgaacggacctgacagtattgggatttgaataaacggctgatta

SEQ ID NO: 508585 - DNA, 726 bp, Homo sapiens
tgtgtcgctggcactgcgggaccgccgcctggagttcctgctacgacctgggcatgggggcatgctggtcatcatggagcatgggatgccagtcaccctgtgtgagcctgtgaccatgggtctcactggatgctgaaactggccgcaatgggtgccctgcgtgtgtggctgactgtgcccccgtgtgttagggggagtcccctggttcctgcacacctgtcctcaacctgaatggatgccgctctacgtagtggggcgctccctgacttcagcaagctggccctgtgctgctgccgtgtcctctggcttcgactggtgccatccatgctggtctccctcggagtgccgccagctgctgacccctggagcacgtgctgctgtgcatgtgtggactgtcactgtcctttgcattgtcacccctgcaccctgggcctcaggccacccctgcctcaattgtgggcctcctgctgtccctgagggaggctgcctatgtgttgcctgtgtcccggggggattctcaggaccgcactgcgagaaggggctggtggagaagtcagcggggtgacgttggataccattggccttttgaccgggcggacctattgtcgagtacctcaacgcctgtgacctgagagcgagaaggcacctgcagaagcaaccacttttgaactgagcctggccactgaggcccccagggctggtgccctgagtggaagcccggactgg

SEQ ID NO: 508586 - DNA, 488 bp, Homo sapiens
  misc_feature (49)..(49): n is a, c, g, or t
  misc_feature (356)..(356): n is a, c, g, or t
  misc_feature (368)..(368): n is a, c, g, or t
  misc_feature (385)..(385): n is a, c, g, or t
  misc_feature (419)..(419): n is a, c, g, or t
  misc_feature (473)..(473): n is a, c, g, or t
gaactgtgcgaaccagacccggcagccttgctcagttcagcatagcggnacggatccgatcggatcggagcggatcggagcacaccggagcaggctcatcgagaaggcgtctgcgagaccatggagaacggatacacctatgaagattataagaacactgcagaatggcttctgtctcacactaagcaccgacctcaagttgcaataatctgtggttctggattaggagtctgactgataaattaactcaggcccagattttgactacatgaaatccccaactttcctcgaatacagtgccaggttcatgctggccgactggtgtttgggttcctgaatggcagggcctgtgtgangatgcagggcangttccacatgtatgaanggtacccactcttgggtgacatcccagtgagggnttccaccttcgggtgtggacacccggtagttcaccaatgcagcagagggtgaancccaatttggttggg

SEQ ID NO: 508587 - DNA, 357 bp, Homo sapiens
  misc_feature (162)..(162): n is a, c, g, or t
  misc_feature (173)..(173): n is a, c, g, or t
  misc_feature (184)..(184): n is a, c, g, or t
  misc_feature (196)..(196): n is a, c, g, or t
  misc_feature (216)..(216): n is a, c, g, or t
  misc_feature (233)..(234): n is a, c, g, or t
  misc_feature (274)..(274): n is a, c, g, or t
  misc_feature (313)..(313): n is a, c, g, or t
  misc_feature (332)..(332): n is a, c, g, or t
agttcgacggagactctcagtggagatcaccttcttttaatatgggggtcaccagttcagcaaggtacaaccaaatatggggaatatcaatggccatgtcatctgccaattccaaagtttctgaaaaacctttgaaaaagtcctgtttgctagagtttttcntgactgtaccnagctgatagangtagttggcccnatgtgatcgcctggtgatcntggctcgctttccaggnngtggactccacgtcccactctcacaagaaacatgtagtanggcccgtgggcatttcagctcttccacacactggcatgngcttccgttaaagatcatntaatgtgtagaaagttcatcgaatg

SEQ ID NO: 508588 - DNA, 795 bp, Homo sapiens
  misc_feature (653)..(653): n is a, c, g, or t
ggctgaggcagaaggaccaattgagcccaggaagcagaggtagcagtgagccaagatgcaccattgcactccaacctgggaggcagaaagagaaccctgtctcaaaaaaggacacgaaaacgacacggaccatacacgacaaacgacgacgacacacacctacgggacacaaacgacgcgacgacgaaaggacgacacagacaagaccgaccccgaccaaccgaccggaacacacgacagcgcaggaacagaaagaccccgaccacaccagcgaccccaccgaccacaccgtaccggaacgaccacccgaccccccgggaaccacacaacaacaacacagacaacaatacaacgaaaaacaacacacgtgtgtgtggtggcgcagcttacgcgtgcccctatgaaagaaaaaagacggttcttcatacaagagccccccattttccgcgtgttggtgggcgccgggggggcgcccccaaagggatgtgggttatcgtgcagcacctcgtgcgccccaaacagccgggctcccccacagagagagaacccgctgggcggcaaggagcatcaagcgcgcgcgtggaggcttctctctacacaaataataaaaaaaaacgccgccggggagcacaaccgagagcggcgctgtctcnggaaacaaacatcccacaaaggtggagggtcgaggcagggcgccacaacgcggcgacgtcatactacaacagagagaaggctcaccaaaggagagagaccggaaattaaaaaattacgccgcggacacgggggggggagcgt

SEQ ID NO: 508589 - DNA, 123 bp, Homo sapiens
  misc_feature (41)..(41): n is a, c, g, or t
atttcaaaaatgttgttaattaggacaagattaaataaaanggccaggcagaagtggcactttggaaggctgaaacaggagaatcacttgaggccaggtgttcaagaccagtctggcaacatg

SEQ ID NO: 508590 - DNA, 377 bp, Homo sapiens
aagtgctagtctcgccagtggtagagaatttgacaatctgaaccagagtgccttgtggctacgtgtggactgatccatccactccggtctgctcagcttccaggtcagaaagctggaactcagcagggctctggctgcctccagaatcccatgctttggacaacagccagaactgctgtgctcctgctccacagcctgacgtgcggatgtggcgggaaggatggtctagtgtgaggcagatgccagactcccagctagggtcctaccactacgtactgttcagacacggcagcttggccttgcaggaacatgtgtctcagctgaaagtcactgacaataacctcgggccttgtgtctggaggccgggaaacagcact

SEQ ID NO: 508591 - DNA, 133 bp, Homo sapiens
attgcttgaggccaggagtttcaagaccagccttggccaatgttggcaaaattcccattcttctgcttaaaaattacaaaaaatattagctgggcacggttggcacacacctgttaattcccaactacttcgg

SEQ ID NO: 508592 - DNA, 358 bp, Homo sapiens
  misc_feature (73)..(73): n is a, c, g, or t
  misc_feature (209)..(209): n is a, c, g, or t
cccccgagacctttgcgtttgttcgttaccaaagatttggtggagactctgagagcctgaacttagaaggccnctgagaggggaactgtcgtcctccggggagcgggcagcctgcccgcagagcgcccgggacccaggtccgccgtcctgccgagacagcggcagtatccagcactcaccgtgcgggattaaaaacggctctctggttnctacggccaccagccgtctccccccagcgtcagtttgaatttgttcaggccattcctagcccagactcaacccaacagtgtattgattgctgtgagctgaaggcttgtttgagagccaaataataaaattaacaaacctaaaaaaaaaa

SEQ ID NO: 508593 - DNA, 519 bp, Homo sapiens
agcccccaccaagctccagcatctggacacctcacgtccagccctcctggactttgtgctggggatgaggtcaatatgacagcccccctgaggtctggtcgctcccgcacaccctccacagtgggcagaatggtgccccccaaaaggcccacatcctaatcccgggactgtgaatgggtgacttttcatggcaaaagggacattgccagtgtgaccgagggtcctgcgatgggagactccccaggatcatgcaggtgaacccaatggcattacaagggcccctgtgagagagaggcgggggtcagagcagacgtggctcgaaagcagagggtgtggtgacgccccagcctgggactgaggcccagaacgcggtggccttcagaagccgggaaaggccaggagacggatctgcccccagcctccagaagaagccagccctgctgacaccctggctttagcccagcgcggcccatgggacttctgagcccccagaactctaaactaataaattggcatcgt

SEQ ID NO: 508594 - DNA, 119 bp, Homo sapiens
atcggacccacggagcgacagagcgagcggccctacggacgtcggcggcctggcggcccgagatgttatctgggaagaatggcggcagccgcggcggcggcggctgcagcgtgcaggca

SEQ ID NO: 508595 - DNA, 440 bp, Homo sapiens
  misc_feature (4)..(4): n is a, c, g, or t
  misc_feature (63)..(63): n is a, c, g, or t
  misc_feature (86)..(86): n is a, c, g, or t
  misc_feature (94)..(94): n is a, c, g, or t
  misc_feature (173)..(173): n is a, c, g, or t
  misc_feature (209)..(209): n is a, c, g, or t
  misc_feature (260)..(260): n is a, c, g, or t
  misc_feature (269)..(269): n is a, c, g, or t
  misc_feature (282)..(282): n is a, c, g, or t
  misc_feature (288)..(288): n is a, c, g, or t
  misc_feature (290)..(290): n is a, c, g, or t
  misc_feature (293)..(293): n is a, c, g, or t
  misc_feature (345)..(345): n is a, c, g, or t
  misc_feature (377)..(377): n is a, c, g, or t
  misc_feature (440)..(440): n is a, c, g, or t
tcanacagacagtataagttgtcttttttctaatattcctaccaccatttactttgggccaantatccacatcccctttcttattntaggtggntaaagatttttttgattcaaagtggttattatgggaagtagctcgatggtaaaaggacaaacacctatctatcttagancttaagcctgtatgtgcttattcccaagggagatanaggtgtttaatcacaaggacagcatgagttagaggacactggcatcaacanctgccacanccgttcacaccanggccanancanccccactgacatctgtctttggtcttgagatcaaatgcatcccattcttcantacattagaaggtcgacctccttgaagcagancaagtataacaagcctctaaaaggactactgagaaacagaatcagaaactctagaactctaan

SEQ ID NO: 508596 - DNA, 110 bp, Homo sapiens
tgtcgttcactgccttggtaagaggtactttggctcattaggctctagggacagaaggggatctcctacactgtaaatggagtttttaggaatatccccaagcccttcga

SEQ ID NO: 508597 - DNA, 297 bp, Homo sapiens
atccacctgccttggcctgtaatagccaccgcacccggccagatttaagtctttaatcccttttgatttggttttgtatattgtgagagatggggtctagtttcattctgcctgtggttatccagtttaaccagcaccctttatgggagagactgtcctttccccagtgtatgttcttggcacttttgtcgaaaatgagttggctgtaaatgtgtggatgtatttctgggttctctggtctgttccactgttctgtgtatgtgttttatgccagtagcgtgctgtttttggttacta

SEQ ID NO: 508598 - DNA, 343 bp, Homo sapiens
aaaaaaaaaaaaaaaaaaccccccccggggggatttttttcccccgggggaatttaaaaaaagggaaattcccccccaaacccccggggaaacaaaaaaaaaggggttttttttttccggggaaaattttggggccccccaaaaaaaacacccccccccctttttgggggggggtttaaaaccaaaatttcttttttaatttaaaagggcccccccctttggggccccgggttaaaaaaaaagggcccccccccccctttttttttccccttttttgggggaaaaaattttttttaaccccccctttttttttttttttttttttaaaggggcccggggttta

SEQ ID NO: 508599 - DNA, 796 bp, Homo sapiens
  misc_feature (2)..(2): n is a, c, g, or t
  misc_feature (222)..(222): n is a, c, g, or t
  misc_feature (266)..(266): n is a, c, g, or t
  misc_feature (320)..(320): n is a, c, g, or t
  misc_feature (327)..(327): n is a, c, g, or t
  misc_feature (329)..(329): n is a, c, g, or t
  misc_feature (335)..(335): n is a, c, g, or t
  misc_feature (370)..(370): n is a, c, g, or t
  misc_feature (436)..(436): n is a, c, g, or t
  misc_feature (438)..(438): n is a, c, g, or t
  misc_feature (454)..(454): n is a, c, g, or t
  misc_feature (487)..(487): n is a, c, g, or t
  misc_feature (496)..(496): n is a, c, g, or t
  misc_feature (536)..(536): n is a, c, g, or t
  misc_feature (559)..(559): n is a, c, g, or t
  misc_feature (602)..(602): n is a, c, g, or t
  misc_feature (626)..(626): n is a, c, g, or t
  misc_feature (633)..(634): n is a, c, g, or t
  misc_feature (644)..(646): n is a, c, g, or t
  misc_feature (651)..(651): n is a, c, g, or t
angtgcccagatcgctgcgctggcactgtcgtgccctcttccaccacaggggcacagaaacctgcaggagactgaaaacgattacaaacatcttcaaccagctctctggccaaaggcagcaaaagcagcctgaatacgcaactcacgccaagagggcagcagctctcctgacatccatgtaagaaggctaacacctaaaccacacgcaggcatcctgaactnagcagctctgatccaaggtactgagtggagacaaagcactcggnggtggcaagatgttcagcaaccaagtaagacacactggcaaggcatcccacccnaaggtgngnagcacnaagcaggcttggagaaacaaacagtcatgccaggngccgccagacatcctgctatacgccctgcccctagtaccccgcgttcatcacgtgctctggttttntntccataaagcacaganggcactgaccaccccaaaccagactcccaaggnatccttatngttggcatagggcctcagatctgctgcaggatcattttcnttttcaggtcgtggctgaacttnttcatcctgaagatctcactgtcataaaatgcagagaggttgnggatatagatctgacgagacttanacaccanntccttctcannnaactnaatagtgtcatgctgggccccaaagcggatgcgctgatatgtcacctgctctgccactaactgcttcagtatgaagagcaacagctcattgttgtcacgccggaaatgaaaggtagcgggcaaaagtcttgcgcatgctgcgcat

SEQ ID NO: 508600 - DNA, 165 bp, Homo sapiens
tcagctcatctcatttttatctgtctacctccattctgaagagggcggttatggtgtcccttagtcctctgggaatagaagatccatattgtctttgtgtacgagcaagcacgtttttccaccctcaactgtggttggaagagggggaatccatctagtcgtcgc

SEQ ID NO: 508601 - DNA, 835 bp, Homo sapiens
caaagggaaagtgctaaagtgcttgagaaaagagtttctcttaattaggttaaacactcccccactccccagcctcatttacaccattcatttgctcagcagactatggcttccaagagaggattcaagtaaaccctgtcctatccaggtgtacatgatcctaaaccacaaaaaaatggactctgaaatccagttcctgcaggatggagagggactaaatgggtctggttgggcctcaggcctgccctgcacccctccccacgctggccaggttttgagcatgtctcttggggtcactgccggtccagcctgctaggaaacaggcaatggaaacccagagcagaatttctgggaaatgcaagagtttctttctccactccagccatttctcttctgtcagagctctaatgaggttttagtgccaggagggaaagtaaatggaaagaaaacagcccaaagttgctaatgctatcgacagtgaccatgcttcaggaaacccttccttcccctggggccaccgcccagtgcatggtttgcctaaaaggaacgaaagagaagggaaaaacaggttccttgtaactacagagagagggattctccaagatccacttgtgcatgtgttgggggatctgaacattaaccctttctgcctcattagtttctaagtagtgctgagattaagagccattgctgggaacatgaagaggctgtttctgtaaggggagtcttgatagctcttccaggaagtcagagagacagccagtgggtgctgagcagcccaatctggctggatgtctatacttgtggccttccagctcttcatacactgagtcca

SEQ ID NO: 508602 - DNA, 346 bp, Homo sapiens
gggagccccctacgatgagctaataggtgcactgtcactagatacgaataatgctgcgatgatccattggcatggagcacgcgcgcatccactttctttgtttatttgagatggggtttcgctctgtctcccaggctggagtgccgtgtcttgatctcagctcaatgcagcctcaacctcccaggctcatgtgatcttcccatctcagtctcccgagtagctgggattactcggtgtgggccaccatgccctgctaattttttttgtatttcagtaaagatggggtttcaccatgttggtctggctggtctccaactcctgacctcgtgatctgctcgcctcagcc

SEQ ID NO: 508603 - DNA, 509 bp, Homo sapiens
aaccccaagaacgggcagcggtgagcgtgtggaggatcgtgcccattccacatctactttccccccgaatcccagcggaggtagtaggggcggcgagggctggatcctgggccaatatatatgccaacaacgactaagctctccaatgaggctgaagaaacgtgtgtgaagccacagctgttgtgagcgagagttctacagtgagatcctggacaagaagttcacagtgactgtagaccatgctggaccctggacctacatcgatgaggcttacgggctcgactttaacgatccgtcaagactcccgaaggaggacctagtagctccaagttttgggatggacgcttgacaggcgcaggggatggctgcgtgccggcataagccgcggccaggaccaccacaagctgcaaccgccgaagggacccccgagccggcggggcagccagtctacgaccaagtacaacggaattggccatccctagaggcacgaggcagagtgggtgggcctc

SEQ ID NO: 508604 - DNA, 144 bp, Homo sapiens
cagaagagaaacagcacacaggctaggacagcaggggctgggggcggccacaatcactgctcagcttctcctaggacgtcgttctgtttgcgcttcatgttctcaaagtcaaaggcagctccagccgtactggctggcgcgtgc

SEQ ID NO: 508605 - DNA, 923 bp, Homo sapiens
  misc_feature (381)..(381): n is a, c, g, or t
gaagctgtggaccgcgtgggctcgcctgccctgggatgtaggtttcacgcggacgttgctgatgatcaaatataaaggtagatcccgacggggccctaggctcaggcggaggcgtgttcctgtggagcgcaccttaccaggtagtcatgtctggtcaacccagagatgcctccgatcgcgcagctcccgtgggcgttctcgtccgcgctcactgcgtgaagcttctactgaagtgcactcaggtgaatagtcggttgtagagctatcaagcaggagttcgggcgcgtgcggttgaacacgtatggttcgacgagaagtgttggtccaatagaacgcgtacgaacagaacgcggcatctagtgtcgtttctggcatggcagnagactacttgaccacaatagaatggttatatcatgcgcaatctcgcgcatgtctagtgatgctcagtgacccgcaacatgtgccctctatgtcataataatcacccctcttagaggaccaggacccctgcgattgcaaaggaccgcaacgagacatcgcgaaaagcagcacgcacgaaccctgtctgctgagatatagtggggttcgatatcgccttccaaatgaaaggacaggtatcccaggcgagcgactatacctgattgatttcgccttggctagcgaagggttgcccccgatcgcccttgacccccttatgcacccttagtggacgggtgggctccctgtggttgagacgagccctttggaggctgtgcttgacctcggtatgccgaatacgccttattttggggtgccttgcgttgatgccatgggaccgaactttggggcttggtcccttcccttggccccaaaacacaacaactttgaaccgggccattctttccccaaggtttcccccaaggggcaacggccctttctttccc

SEQ ID NO: 508606 - DNA, 873 bp, Homo sapiens
tgtaccccaaactaagcctccgaacccctaaccaacccccctcctaatactaactacctgactcctacccctcacaatcatggacaagccaaagccacttatccagtgaaccactatcaagaaaagagaactctagcctctctatactaattctccctacaaatctccttaattataacacttcacagccacagaactaatcatattttatatctgcttcgagagccacaacttatccccaccttggtatgcatcacccgatgaggcaaccagccagaacgcctgaacgcaggcacatacttcctattctagaccctagtaggctcccttcccctactcatcgcactgatttagacctcacaacacacctaggctcactaaactattctactacatcacatctcactgcccacagaactatcaaactcctgagacaacaaattaatatgactagcttacacaagtagtattatagtacacagatacctacactaacaggactctagattatgactccctgacagccatgtcgaagcaccatcggcggggcaaaagatatcaggccgcaggaccactaaacactgaggggcggcgtgtcgtgacataatacgggctaaacaacacaatctacaaagccccatgaaccaaaaaacatagcctaccgccgtgacttgtagaatcccgatgacgcataactcataacacaggccaaactgacgacgagcaacagcacctaatcgtccgggcgccaacagcacgaagcaagccacgagaacagaccaccaacagacacgtaagatcacggcacaccgacacgcagcacgaaaaccagacgcacgaagacaacaaagaaccctacgaggaaaccctaaa

SEQ ID NO: 508607 - DNA, 976 bp, Homo sapiens
ccgtctttgggtgccgccggttcagcgagagccacaattggcggccgccccgcgatcacaaaagcgcccgggggaaaccaaagccccgccgtgtggaaggtaacggccgcccctcccgcgaaggtggaccccgcgtccgccccttgaagaagaatggttgcacaccgccggtgtgacaagtggcccgactgctcccccccagaggggggcggccctcctccaactacgacgagaagagggcttgttaaaatcaacaagtcatcaacaaaccgcgtgaaattgcagaaactatctcccaacaacgcgggggacatgcggtccaccgcttgtatgagagcccagcccgcagagtagtccaccctggtgttgagggatcagtacgaccagtggcccctgttcaagagcacagggctggaaaaatacaaacaagaggaagcaccactgctactagttggggccgcctgagtaggcccccatgcggagattaaggactttccccgcttctttgcacaaatgggccttgtccttacactatagtgtgacaagcgcacgatcattgttgtggtggttatacaggggaataatacctttaaagggtattttctcaccaccgcctcctcccactcttgttgcagacgccttctacaagcggcaccacggccctttgattaaattagttgcgccacactaaaccggtagctacttcgcagaatgtctttcacaccagtttaggcgcccaccaaagatgtatcatggtagagaattgtttctcttttaacgccccctctccgtgcccccgcaacactcggggtgaagctcggctagtttatcacgggataagagtggcccttcttcccacccttaaaagaggacatacaactccatcggggaaaatacacccccaatgtttcgaaagatacgggggacacccccactcaaaaaaattaaaaaaaaagccccccagcacaaaaaaaac

SEQ ID NO: 508608 - DNA, 444 bp, Homo sapiens
cagatctgcatgtatgttggtgtcgagagtggcatatggtatactgtcggaggtctatgggtccatcaggcatgtctagaggcatccagcccttgattgggcaactaacgttggtacacgtggtcagacggcatcacctagacagcctctgtagctatgcatagcagtcctgtcagccatgcattcatcgtcagatcaggcttcgtagtcaatgtgacgcaccagagggcttctagagcatgttcaccatcaagtcatctgaagattatcgttcagatacgcttcacagatgtagaaagtccttatttcatgaatgcatggcgcatactatggtccagcccagtgatctccctttgggctctcacgacatgtcaggctgcttatgttcccccagtatcacgtagcgtagtacgtttgtagagttgcgtgctcccctccatggcg

SEQ ID NO: 508609 - DNA, 327 bp, Homo sapiens
tcacaggattcctgggacgaccggatagcatatgtgaaagcctgacttgaatactgaaggggtccccgaatgtggaggaggaggaagaaggatggacgggagtgagagaagtgcagggtagacccgtagagtagatgcagagtagatgactgaccaacagaatatgccaaatggtattagacaaatgatggaggaatgttagcagttgcattagttatgaatcttgtcgacacaccagaaaccaactcaagatagcttaaacatagttgggggcagaggggaggatgaagagaggtgggttaaagggtacaaacatacagttagatc

SEQ ID NO: 508610 - DNA, 160 bp, Homo sapiens
  misc_feature (41)..(41): n is a, c, g, or t
  misc_feature (143)..(143): n is a, c, g, or t
tctagaggatcctgaggtggttgtgggtagaatctcgtccngtagctcatttcaacgcagatctcagccacctcatccccatcatgggggtggtagtcaaagcgcagggggggacagaagacggtagcatgcacctcgagaancttgggttttgtcccct

SEQ ID NO: 508611 - DNA, 1572 bp, Homo sapiens
gatggactgtcgagttgttccttctatggtgtatagccatagttggccaagcgctgtgactcaaacctcttgagctcaaacatgatcaagcctgattccgcctccagagtgctgggatttacctgtgctaagccactgtgcctccgagccattacaactggaacgttttataatgcattcgacggaccgcaaagtgtgctgaccgtaccatgacagccgaacataggcgtgcgatcaataacgacgctagccgagcagacgcagcaaagaagggaacatcgagcgagacgcgtcggcgctaagaagaaggcatgccacaagagcatttccgaacctgaaggctacgcgaggtaggtgcccttgtgaaagacgagactttacgaccatggcattgcttgagacgtcatcacagtgctagttaccctgtgactgggcgacctacgctagttagttcaagcgcaccagagagatgggcgtatgccctgtttaatggaccaccgatgaaaggtgtgctttgcccctcgtgaaggtaacactctcttgtcgacactccaagaaaaagcacaagcgggagtgatatcgccactccgtgaacgaaagaactgttgaatgcggagcattgacacgagacagagaccacgtcggtggagtgacgacacacggtgaacggtgcctcagaggtcagtcagagccaagagcgccccgaccttttccgagtgggagaaggccggcgaacactcgaggagagcaataccgagtgaatggcgggtcgcacttcacgtgtggtagtagaaggcaagtgtcccggtctacgtcggttgcacgcacgggagagcccgcagtctgaaaagccctttgttccactatgcgccaagaaaggctcacgtcatcctgggaggaaccctaggctacgactaccacctgtagttcgtcgcccaaaccccctgggggccctcacagggttcgatgcgagagtccggatccccaaacggagtaattgcgagactcaaagtgaacccaaccagggttggcgctgtcgcgcagagagcttgtccgtggggcacatccccggtgctccggctgcttgtagattgctacttccgacagaggcgttgaatgggtcgccaatagccaagatcgccttagtgcaccgaacaagacccctgggtgcccccgtttacctagtgagttaaacgccgtttggctcgcccaaagtagattccgcgaggtggcacaccgtcacgccgttgtccggcacaattagttacgacggtaccgcacgttgaaaccgtcccctacacgattgtcaacgattgtaaacaaccgcgggccttatgaaaaacgtgtgtctcccggatagtgcaacccgccacaggaatggggagggacattaaactgaacccgcggccaataggtaagtcggcacatacggatgacttgattggcccgtgagtaatgccatggaggaatcaagcgactgagtggaagggcacaagaggtccaaagccccacactttgtaaggcacattgtggtcaatagcagtgagacccaatcataggagagcgcaattg

SEQ ID NO: 508612 - DNA, 143 bp, Homo sapiens
agttgtgggtagtacatccccagtcgtggcctctggacagtggcgggctgcactcatgagtggcttccaatgtgctgctcccctcttaatactcaccaataaattctacttcccgccacaactgtacaagcctgccacaaggt

SEQ ID NO: 508613 - DNA, 158 bp, Homo sapiens
gcatccccccttctgcacgcattgacatgttgtgcttgatggattcggtgattgagcaaggaaaatataacaaactgcagctcatctccaaccatagaaatacaggaaaatggtgatgccttacattaaaattggagagccttcaggcaaggacaact

SEQ ID NO: 508614 - DNA, 469 bp, Homo sapiens
ggagatcaaagggcgtcgccaaagcgggacaggtccagcggttgtctgtgtgaagtcgcgcggttccacccacgcagtgtctacgtgaaggccagaaactcgctcgccatgtcggtgcagaggcggggggtgttttccgcagagccaaggggcaggaccctgcccgggttcccgcagaaaaggaaagcgatggaaggcccattctacttcatcctgggcgcagaccccacagtttgggctgatcaggcctgttccactggggacgtgtggacaatggcgggtgacaaagtgcgaaccggggagatccggtctaactgagcaagcggtcccaggccattcaacaaggttaaagccttagcccaaaaccaattccacctttattacccagacaactttagccaaacccattttaccccaggtaacaaaaaagaccatagacgcataacaaaaaacagtgtggtgcgggcgc

SEQ ID NO: 508615 - DNA, 183 bp, Homo sapiens
cgatcgtactctctatgacggaatcgacttctatacctcaattaacccgtgcccgattcgacgaatggaatgctgaccggttccgtggcacccgggacccagtagagaaagcccttcgagctgccaaactagacaagtcacagattcatgatatggtccgggtgggtggttctcctcgtctcc

SEQ ID NO: 508616 - DNA, 375 bp, Homo sapiens
  misc_feature (164)..(164): n is a, c, g, or t
  misc_feature (169)..(169): n is a, c, g, or t
  misc_feature (201)..(201): n is a, c, g, or t
  misc_feature (203)..(203): n is a, c, g, or t
  misc_feature (232)..(232): n is a, c, g, or t
  misc_feature (238)..(238): n is a, c, g, or t
  misc_feature (294)..(294): n is a, c, g, or t
  misc_feature (329)..(329): n is a, c, g, or t
  misc_feature (331)..(331): n is a, c, g, or t
  misc_feature (363)..(363): n is a, c, g, or t
agctagtagaaggggatgcaggggcaaagccctcagttgccaagcaaggaggaaaaatgtacgtgggctgtgtggcagtcccccccccctgccctggctttttcaggttatcgcccccctatggaatcctttgcagaatggtactcatataatggtttaaaacnacccnttcataattgactctgtgcaggatgtcccccnancagtttgggtttgctttattttattttanaaaaanattttttggtatcctgtcccttccagtgggtgtgaaaatagtattttaatatttgnccaaagtttaatttaattttaattgttctatgtananaactgcctttttaaataattaaaaaaaagttnttatgaaggcca

SEQ ID NO: 508617 - DNA, 693 bp, Homo sapiens
accgtgtgtcagaacctgtagataatccgcaatgggtactctgaatcgatgttgaattactggaagatggtgaaggagggcacccgtgtggtaagctcactggatggtgtcgtaacgcatggggtctggaccttcaatcaaagccttagatgggagatctcaagtttcaacaccatgtttggcaaaacgttcgatgccccaccagccttacctaaagctactagaaaggcttgggaactgtcaacagagctacagaaaagtcgtgtaaaggaccaagggacccctcaaacaagaatcagccaagcttttctggccaaaaagatgactgagaagactgtgacagcaaaggggctctgttccgtgcctcagatgatgcctatccagaaatagaacaacttcttttccgcttcaatcctctagacttgtgagagttttgaccctgcctgaagagcaccagatggcgcactccccttgagttggagtggcctctcatgatccttgaccgaggagagaagagtttgaaaagctgtttcagctgggcccccttcacctgtgaagatgccctctcaccatggaatccaatctgtggcagtctccttcagcattctgtcgacctggatgttgaattgccacctgtttgtgtgacatagcatattcaattctaagtgcttcagagttggggtatggatcata

SEQ ID NO: 508618 - DNA, 346 bp, Homo sapiens
tttttggggggcccccccccccccccccccttttattagggggggggggcccccccaaaggcccctttgatcctttttgagggcgggggggggttggggccccctttttttggccccttttaaaaaaaagccccggttttttttttaaaaagtttccccgggggggggggcccccctttcctgtgtgggacttttaaaaaaaaaaaggtttttaattcccccgggcccttttttttttttttttggggggccccccccctttttttggggggttttccggggttttggggtttaacccaggggggttttttttttgggttttttttgggaattttaaattaagccc

SEQ ID NO: 508619 - DNA, 269 bp, Homo sapiens
gggcaataataaggtggaatttgcaggtcagcccaggaattggcgtgaggagagtaggtgtgtgataaccctttgtggagaatgagattccccccagctgtgtgagataaatatacagctctggagtcttgttggtgacttcagaggtacgagagcattccaggaaagagagattccctgtgcaattgcaaatgtgaatcctagggggaaattggggggtgtgtctttccctgttgaaaatgtttggatgggaataaatatcttcagga

SEQ ID NO: 508620 - DNA, 132 bp, Homo sapiens
tgacatgattagaatcgagctggtaccaattcggccggggcatctctcatggaaaatggcagtaaaggctttagtcacagaacataaagcagtgttcctcactattaccagtaaaaattctttttatttttg

SEQ ID NO: 508621 - DNA, 908 bp, Homo sapiens
tgcggtggctcacgcctgcaatcccagcaccctgggaggccgaggcaggcggataacgaggtcaaaagatcgagaccatcctggccaacacggggaaaccccgtcgctactaaaaatacaaaaaaattagccgggcgtggtggcgggcgcctgcagacccggctactcgagaagctgaggcaggagaatggcgcgaacccgggaggcggagcccgcagtgagccgagatcgcgccaccgcactgcagcccgggctacaacagagcgagactaggtctaaaaaaataaaaaaaaaaaatttagccgggcatggtggcaggcgcctataatcccagctactcgggaggctgaggcaggaaaatcacccgaacccgggcctgggggtagacgcagtgtggggaggcggacgttgcagtaagccgagatcgcggcaccgaactccagccgggataacggagactccatctcaaaaaaaaaaaaataaagatgcacatgagatatttacagaggtaaatcgataagattgggtggacagatgggatgtgcatgtcagggatagaaaatctagaaaagctcctggctttccaaaacactgtttaatcaaatatggtgaattcagcaatccctctttttcagattcggggtggctctcaattgccgtcagaagctgtggtcccggatgctttagaaaggaagcgaaagtgttgtatcacagcagtggaaaccatggccagggttcacctatggtgcaatgggaaggtacttggattctcaggtacggggtagatctcagaaagggatgggaaatgtgcgcttaattcagtgagagtgatgatagtgtgggaagtaatttccaagaatcttaattgatggcagaattgaatagtttatggaggaggttgaaagagg

SEQ ID NO: 508622 - DNA, 154 bp, Homo sapiens
aatatattgtgatcgatatatatcatatatatttgatatgtgatatatgatatatagcatatgatatatttgataccctatatatatttgtattaccctatatatcctaatacattcatcctatatattcattatcttataaatcctattatgc

SEQ ID NO: 508623 - DNA, 444 bp, Homo sapiens
tctaggcctctaaggagccaaaactggcccttattccttcttagaccaaaccggagtagaaaagctatacctaaaacaatttcacagcaccaaatctccacctccatcatcacctcaacccaaaagggcataataaaacttaacttccttctcttccttctccccactcatcctggaccctactccttaatcacataaccatatccccggagcaatctcaattacaacatatacaccaacaaacaaggttcaaccagtaattactattaatcaaggcccataatcatacaaagccccggcaccattaggatcctccggaatcaacctggacccctctccttcataaattatccagcttcctacactattaaggttaccacaaccacaaccccatcatattcttcacccacagcaccaatcttacctccctcgttaaccccacta

SEQ ID NO: 508624 - DNA, 160 bp, Homo sapiens
agagtcctgtcggggtggcgggccagtggggcggagctcgtccgcgtggtgctgaagtggctgaggaccttcccaggtctccccaggggtccgtgcctttccctgtgtgaattttgtagtctggcctaaagtttccctaggctttcttgtctccggccta

SEQ ID NO: 508625 - DNA, 381 bp, Homo sapiens
tcggccaggggggggtgttacaaaaaggggtttaaaggccttccctttaaaatttaaacgctctttgtttttttgaaaagggggtgggttttaaaaaaaattgttttaaatcttatagaggagttgggggaagtggggtttttcaacatctgcgactagaaattgcggttcgcctttgggggggccccgaagaagccctctatagtctttcgtaaggggattcgtggatatagtaaagcatctggccggccgggggggggggtatcaaaaagtgtctccggttctactcgtacatcgtgtgtcgaatacattcctgtttaatatcttcctggataagccccatcggactacgaataggctgagaacgagcgaggggggggg

SEQ ID NO: 508626 - DNA, 943 bp, Homo sapiens
gtcgcgaaaatgctgtttttgtgcgagcaggccgtatatggtgggacgcaagacaagggctggtgagtataatacggcggaatcgttcccatgtatgagaaaagacacacggtggggtgagaaaattgcataaatggggcacccccgccgcggtatatatacatctgggagggcaccttgagagcggaagttttatggggtcggtgacccgaacggcccacagggcgcacacttagctcgtagtgcccgctagtggagttacaccgcctaacatgacgtgggtgctaatatcacttcgttacatggaattaacaaaatgtcccgtgaacgcagaaaccaacacttgtaaaacccttccacaatagttataaactcatctcccacgctgaaaacaatgataccaccctctcgtacctccatcataaaagaaaagtattacccccccccgcactcaccccgcccggtttttctgtgcagagaagtatcttcctctctctgtgttagcacacacttcctcataagattatcatttttccgtgccccgctctgccccctctcaaaatttttgtttcacacacacgcagtacttgacagccactgcacataacagtctaaagatttctcctcacaaaaaaaaagaatccctctaagggttcccacaatactgtattattcgtgcgtgcttacaccgtaaagtcggctatattcacccaatcaattcttgtgtgcatatataccccctatataacaacagtggggcacacctataattattctacgccaccattcttttatacaaaaaaaatactaagtagtggtgggtagtccttacacaccatgacgcaaatattgtctccatcggacacaaaaactgcagcaaaccaatgttggtggttcccacaacaaaaaaacaaaacggtttcccccccttccaaacaaaaca

SEQ ID NO: 508627 - DNA, 614 bp, Homo sapiens
cgacggctcaacggaacttagcagaagtggctccagtttgggtttgggtggttgggcctagggcagggactcagtccaaagcagtggtctcctataaatgtaacagatctattagtacttgaaagaaatgtcaaatttcatttagaagttaacaaaaatgaagatgtagctgttcagaccctttaaattcatccatgttcacagaccctctaaagtctatccatggaccccaggctaagaactgctggcttaggtggagcagccaggagaactgcatccccccggataggggatcgtaaaggcattagaggagggaggcacttgcctggcagaggggcaaactccaaaaaaaggcaaagatatctcccctaagtgtgaaattttaaaaaaatcaatagctaacaaatgaagctggaaaaaccacttgagacaattgggaaaatattaatgctgaaacgtaatagatgttaaggaattattgagttcttttcccttaggagtggtggttaaaataaaacgtcctagaaatgtatgaagatgtatacttgagatgccttggattagctttaaaatggttggaggacgaggaaagtaggagagtagagatgaaataa

SEQ ID NO: 508628 - DNA, 932 bp, Homo sapiens
  misc_feature (1)..(1): n is a, c, g, or t
  misc_feature (72)..(72): n is a, c, g, or t
  misc_feature (77)..(77): n is a, c, g, or t
  misc_feature (166)..(166): n is a, c, g, or t
  misc_feature (184)..(184): n is a, c, g, or t
  misc_feature (186)..(186): n is a, c, g, or t
  misc_feature (189)..(189): n is a, c, g, or t
  misc_feature (263)..(263): n is a, c, g, or t
  misc_feature (265)..(265): n is a, c, g, or t
  misc_feature (302)..(302): n is a, c, g, or t
  misc_feature (315)..(315): n is a, c, g, or t
  misc_feature (319)..(319): n is a, c, g, or t
  misc_feature (324)..(325): n is a, c, g, or t
  misc_feature (334)..(334): n is a, c, g, or t
  misc_feature (351)..(351): n is a, c, g, or t
  misc_feature (365)..(367): n is a, c, g, or t
  misc_feature (375)..(375): n is a, c, g, or t
  misc_feature (382)..(382): n is a, c, g, or t
  misc_feature (388)..(388): n is a, c, g, or t
  misc_feature (408)..(408): n is a, c, g, or t
  misc_feature (413)..(413): n is a, c, g, or t
  misc_feature (417)..(417): n is a, c, g, or t
  misc_feature (450)..(450): n is a, c, g, or t
  misc_feature (517)..(517): n is a, c, g, or t
  misc_feature (522)..(522): n is a, c, g, or t
  misc_feature (608)..(608): n is a, c, g, or t
  misc_feature (784)..(784): n is a, c, g, or t
  misc_feature (822)..(822): n is a, c, g, or t
  misc_feature (893)..(893): n is a, c, g, or t
naaaactttttatacactaataattaacatttttaaacaaaaatcaaaacaactaattataaaatactttanaaaanccttatcatctcccccaacctttatacaacaaatactttattcaccatatctacaaaaccataatttctttccacttctttcttctttntttaaactctcattaaananttnttaaaatcactttttattacttcttacctatatcttttaaaaatatatcttttctctataaactccattatttncnatctttaactcttcttttaatttcttcaatctttttntccccttcttttnatcnaattnnctttaatantcccctttcctatattnatcacattatattnnnttttcttnatttttntatatntttttttttttacataattnatccnattnttttctcttttctaaatccctctcttcttattnaatccttttctttaactccactcctttcccttaatcttttctatctttccttttatttttatttttnaattncctccctccccttataactaatttttaactccccttcccaaaccttttatcctcttccttctccactcatccttcatattaaattncctttcttcccccaatctcttaaaccctttttaattattttttcattccataatatcaaaatattcttaattccacaatacaaacttacatacacatacatacacaaacacaaaatttaactatcttcctcttccaattatcctcaatctcccatttctccatataatccatattntccctttttcatttttctattcccatattcaaccattnttcccaactctctcattccctctttctcttttctcctctcatcctttaatttcctttcctcacttcttttnctcctcttctcactcctccctcattttccaattttcaaa

SEQ ID NO: 508629 - DNA, 134 bp, Homo sapiens
  misc_feature (2)..(2): n is a, c, g, or t
  misc_feature (87)..(87): n is a, c, g, or t
  misc_feature (89)..(89): n is a, c, g, or t
gncaattaggagtttcttacatgtctggctgtagatcagtagccaaataagtaagtctaagaattgcgaacgtctggccgggcgcgngngcacgcctgtaatcccagcactttgggaggccgaggtgggtggat

SEQ ID NO: 508630 - DNA, 697 bp, Homo sapiens
agcggggacccgcaggcgggcgtgctgtgagatgcgggggccgcggccgtagccgcagagatgtgactcgcggccgatagggccaagctggagcggtcggcgctgcggggccgcgggggtcgaatgttacgtaggcatcagagagaacagatgacgagcttcacgctaggtgcgtctacgcttcctccgtgctcttcgtgatcaccgtctggttgggccgtctgaaaactgccatgcgacgatcccggacggctggtaaggtcttgtgaatacgtcgttgcgttactagtacgggtgatcctccgtgtgcgaacctatggagttgatgctcaaatcatgtagggacgaatttgcaatcggaggcaagtagcacggcgtgggccaggggtgcctagggtcggactccgtagtaggtcactacttagtcttcccagtgtagtcccaacaatgcccgttcacgtgggcttggcggagcttagggtcccttttacaggtccacatggaatcacatggcagcgaaattgaacagcgaagcctccttagtccggaggggcgttgcggcacattttatctgggtttgcacgtccatctagagaagggacaccgcgaaaggccctcaatcatggttcgtggcatggacgtgagtgagggcctctttgaggtcgaatccgacggggagggacgcgagaactacatt

SEQ ID NO: 508631 - DNA, 380 bp, Homo sapiens
agctttgcaaattctaactccaccctaattataactgccttgttctcatgaagttcactgtcagcaactgtttattcaccaggtacaatattatgcataatacactgggctgagaactgtgagggatacaatttggaaagacagggcccctggtcttaagatgccattgaaaagcacagactgtgttcgggaatcagtaagtccagtgtgtagatgacagcgttagtggggaaaaatggaatacagagttgaaaggtgtattggagccagattgttaggtttttgaatgcaaaatttatatgttaggatgctattatttggaaagtggggacttactcaattttttttaacattaaaagaaaataatcaaaaaaaaaaaa

SEQ ID NO: 508632 - DNA, 254 bp, Homo sapiens
attacgggcaagttaagctgtgaggcaggcagcccttcggtcacctgttggatacacagacccctcccctcgtgtcagctcagagcgagctcgaggcccccgtaccaactacttgcaggggtccctgctaatatagcgccccaccgccgtggtagttcgtaccgcttcctctagaacttctacagaagcctagctccctggagccctgttggcagctctagctttgcattcgtgatatttgaccttatcgacgt

SEQ ID NO: 508633 - DNA, 216 bp, Homo sapiens
aggtgcgaactgaagctcacacgtacctgcctggctagtggtagaagggctggctgaggtcatggaccacatgggataatcagtgggatatgttcctgcagctacaggacatggaaggcctagatcgttggctctaatactattggtaatcaaagcagatttgcacgcttgattggtctccgtgctattatggtccccattaatatagtcccatac

SEQ ID NO: 508634 - DNA, 946 bp, Homo sapiens
cccctgcccacctcagtccagaatctcgcccaccacgccagaagtcgtgttgacagactttccagaccctggatggtaagccagtacaacccggctcaaacagcagctacgtgcgttacgccaccagctgttacagactgctatgatccgccgacatggccctcggctgctgctactactccgattactggcgataggagaagtgcccgctgcgcagcccctggatgctccccattaccctccacgatcaggccacgcttcccccgtggccgggtctccaaagcagccggctgcgtggctactaccgctggccgctgctacaggctggcaccgatacgaccgcctgcacaaccgcccacacaggtgctcgcatcagatgtcgcgtgccatcctggaccaaggagccaagcctgatgcgagcggcagtagcagaccacacacatcctgcccgcacacagcccacctcgccccccctgcaccctgcctcccaaccccttactacagccaaccgtgcagacacaccatcctgcacccgcaactccccatggatgcgacaatcaccgcgccctcccacggacacaacccgacctgctccacccccccctgcccggaccccacaaaccagccccccgacctgcgaacacaagaaccccaccccccctggacgaccccccgcctgccccacccgcacggcagaccacagtcgcagcacccagaccgccccactacccccgcctcccgccctagacaaactgaacccgcacggaaccagcccccggaccaccaccccagacgccgaccgcgaccccaggaacctcagagcccagccccacccccccccccccccccacccacaacccacaacaaggcgccacacaggcaccaaccaccacccccgcccacacccccaaccccacgcaccccgccgcccccccccgcaccccac

SEQ ID NO: 508635 - DNA, 918 bp, Homo sapiens
  misc_feature (63)..(63): n is a, c, g, or t
  misc_feature (84)..(84): n is a, c, g, or t
  misc_feature (111)..(111): n is a, c, g, or t
  misc_feature (119)..(119): n is a, c, g, or t
  misc_feature (145)..(145): n is a, c, g, or t
  misc_feature (177)..(178): n is a, c, g, or t
  misc_feature (184)..(184): n is a, c, g, or t
  misc_feature (190)..(190): n is a, c, g, or t
  misc_feature (197)..(197): n is a, c, g, or t
  misc_feature (200)..(200): n is a, c, g, or t
  misc_feature (205)..(205): n is a, c, g, or t
  misc_feature (219)..(219): n is a, c, g, or t
  misc_feature (222)..(222): n is a, c, g, or t
  misc_feature (224)..(224): n is a, c, g, or t
  misc_feature (246)..(246): n is a, c, g, or t
  misc_feature (278)..(279): n is a, c, g, or t
  misc_feature (282)..(282): n is a, c, g, or t
  misc_feature (306)..(306): n is a, c, g, or t
  misc_feature (314)..(314): n is a, c, g, or t
  misc_feature (337)..(337): n is a, c, g, or t
  misc_feature (339)..(339): n is a, c, g, or t
  misc_feature (342)..(343): n is a, c, g, or t
  misc_feature (345)..(345): n is a, c, g, or t
  misc_feature (351)..(352): n is a, c, g, or t
  misc_feature (407)..(407): n is a, c, g, or t
  misc_feature (410)..(411): n is a, c, g, or t
  misc_feature (417)..(418): n is a, c, g, or t
  misc_feature (421)..(421): n is a, c, g, or t
  misc_feature (426)..(426): n is a, c, g, or t
  misc_feature (441)..(442): n is a, c, g, or t
  misc_feature (444)..(444): n is a, c, g, or t
  misc_feature (450)..(450): n is a, c, g, or t
  misc_feature (453)..(453): n is a, c, g, or t
  misc_feature (462)..(462): n is a, c, g, or t
  misc_feature (474)..(474): n is a, c, g, or t
  misc_feature (477)..(477): n is a, c, g, or t
  misc_feature (485)..(485): n is a, c, g, or t
  misc_feature (492)..(493): n is a, c, g, or t
  misc_feature (508)..(508): n is a, c, g, or t
  misc_feature (537)..(537): n is a, c, g, or t
  misc_feature (546)..(547): n is a, c, g, or t
  misc_feature (549)..(549): n is a, c, g, or t
  misc_feature (557)..(557): n is a, c, g, or t
  misc_feature (628)..(628): n is a, c, g, or t
  misc_feature (649)..(649): n is a, c, g, or t
  misc_feature (725)..(725): n is a, c, g, or t
  misc_feature (728)..(728): n is a, c, g, or t
  misc_feature (734)..(734): n is a, c, g, or t
  misc_feature (848)..(848): n is a, c, g, or t
  misc_feature (910)..(910): n is a, c, g, or t
gagatgtgaggggattaaattgtgtgaggaaataataggaaaaatggagtaaatttaaattgnaaatgttaaaatatttaaggnaggagctgatgaagagagagcagaganagctcgtntgaattcttttattggtgccatcgcnattggagaattggtaaagagaaaattgggaannaaaggnatgganaaaattnttntaagnagtggaagagatgnatntnttatggtaaaaaatgatggtgnaaatattataaaaaaaattggtgttgaaaatnnagnagctaaagttttagttgatatgtnaagggttnaagatgatgaagttggtgatggnantanntntgttanngttttagcagcagaattattaagggaagcagaatctttaattgcaaaaaagattnatnnaaagannatnatagngggttggagagaagnnangaaggntgnaagagaggngctgttgagttntgnagttgatnatggttnngatgaagttaaattncgtcaagatttaatgaatattgcgggcanaaaattatnntnaaaaattnttaataataaaaaagaaaaatttacaaagttagctgtagaagcagttctcagactgaaaggctctggcaanctggaggcaattcatattatnaagaagctaggaggaagtttggcagattcctatttagatgaaggcttcctgttggataaaaaaattggagtaaatnaancaaaangaattgaaaatgctaaaattcttattgcaaatactggtatggatacagacaaaataaagatatttggttcccgggtaagagttgactctacagcaaaggttgcagaaatagaanatgcggaaaaggaaaaaatgaaggagaaagttgaacgtattcttaagcatggaataaattgntttattaa

SEQ ID NO: 508636 - DNA, 165 bp, Homo sapiens
  misc_feature (49)..(49): n is a, c, g, or t
  misc_feature (58)..(58): n is a, c, g, or t
  misc_feature (113)..(113): n is a, c, g, or t
  misc_feature (160)..(160): n is a, c, g, or t
tgagaagtttacaagttaagcacctaagtagaggacgagatgaaggcgnctaggactnaagaagcatggtgccaccgtgctaccgccctgggtggcatccttaagaagagggncatatgaggcagagattagcccctggcacagtcgcatgccaccaagnacaag

SEQ ID NO: 508637 - DNA, 217 bp, Homo sapiens
ggcgtaaccatggtatcatccagagtgcatcccagaggcaaaagagggaggaggagcccaaggagacacaatctaacggcactccggacacttttactgtttgatctacgctgtctagtctacgacatactggtgccgtcttgttggaaatccaaggtaggtaacaaagtgttcatgtcgcattgagatgtcttcaatgacatcgcttgtatcttgt

SEQ ID NO: 508638 - DNA, 111 bp, Homo sapiens
tgggctgttgagggtatgagagtagctatatgaacagcgaagtatattcttctaggctagtaggaggatatgaggtgtgagcgaatactagtatacctagaaagtgagata

SEQ ID NO: 508639 - DNA, 302 bp, Homo sapiens
  misc_feature (147)..(147): n is a, c, g, or t
  misc_feature (199)..(199): n is a, c, g, or t
  misc_feature (254)..(255): n is a, c, g, or t
accgattctcacgggtgctattgcgaccactgaaaccaaggttttagagattccggtggagaccttgaaacaacaatacgagggcgctccgcaaatgctcaaagtcatcatcaagtccttggcggatcgtctgcgtttggcgatgancgatgtgcgttccagcaaacttgaaaaagactcctccccttgccctgaagancaagtggcgaaagtttttggcgctgttttccatacggccaatcacaagggcgacnntctcagccgggccgcgtggagcacccgttcaaccggccgagctgatt

SEQ ID NO: 508640 - DNA, 535 bp, Homo sapiens
gtatgaaggcatagtagtctcagggagctagtatgattctatattcgtatatctttgtttgggaaaattatggtccccaacagggtctcactcggtcacccaggcgggagtacaggggcacaatcacagctcactgcagcctcaaactctcaggctcaagctattcttccacctcaacctctcaagtagctgggaccacaggtgtgtgccaccacatcccgcataatatttttttgggtatgattaatttcaacttcaaagaaagtagttgagatcctgtgcacttccaagtgtgagggacccaggctagggtatccttgggtgggtggggcctcttcaaaaggttttaattcggttatagggaatatgataccttaagcttcaattcacggggaagagaaccatgattataagcaaaagttggtcaaggaatagggggagtcttggggtagattaaaatagttgagacctggctaaaaggtcagataacatggtaatccacctccgggttccaagagtttagaagctgccagca

SEQ ID NO: 508641 - DNA, 166 bp, Homo sapiens
acggaataatattcagagacagaccctccacccactggcagattgtaaacgcctggacccgctggtgaatgtgctcatagtactgcaaccagctctgagaagaacgggccttacagatgacacgcagcacgtgggggctccttgtggtactaccgctattggcagt

SEQ ID NO: 508642 - DNA, 134 bp, Homo sapiens
aagtgaggaggaacagccctaacaggcctccagccaggttgaatgagctccattttgttgtagccaaccagtaagatttgctaatgttctaaattaagtgccttctccaaagacatccctcaatagctccttgg

SEQ ID NO: 508643 - DNA, 309 bp, Homo sapiens
  misc_feature (13)..(13): n is a, c, g, or t
  misc_feature (65)..(65): n is a, c, g, or t
atgctcaccgtcntgcaggaaggtcctcgtcgattccacgtttttctcgaagggacagaactgancccgaacctgtttgacaggccgcagaccagtccgatccaagctagctgtgcgattcggtgatccgtctgtcgcgcggcataggtcacataccatggcttcgcggtacatgttctcgttcctttaagacatacgtggaatcgcctatgaccttctctgactacggtcagcggtgtagaaggtccgctccacaaactctcaagtgttccgtgactcgcggtacgtatgcattgatcggctcctatc

SEQ ID NO: 508644 - DNA, 828 bp, Homo sapiens
gagcgggggctgcgcccggtgcagcaacagcagcagcagcccccgcagcagccgccgccgcagccgccccagcagcagccgccccagcagcagcctccgccgccgccgcacgcagcagcagcagcagcagcctccgccgctgcacgccgcctccgccgctgcctcaggagcggaacaacgtcggcgagcgggatgatgatgtgcctgcagatatggttgcagaagaatcacggtcctggtgcacaacaatagtccataccaacgttcgtagaaaaactctttttgccgaaaacgaacagcgtgtcccacaaagaacagtatggagggcgcctcaacttcaactacagaaaacttttgggtcatcgtggcaaaacgtgcaacgaagtggtctgggcaacaccaatcaccaagatctatcagcagcaacttgctgaacaggtatcttcagcgagaaaactggccagatgacacgtggtttctaaaaaatctttctcttacttgcctggacaccagggatcttgctcgcaaggcaagctggcgctatgtcaacacgcttcagtgacaccttgccttcctggcatccaatttttgtggcacaccactcatctactcgccagtatctggacactatacttcgccccttatagatggcattccttgaaccctgggacaacaatttctaccaggattcaatccaagaacacgtatgcaccattccaaaatccctgggaaagcagagtttaccagcagtgggtataacaggtgcacctgtaacgccaggatctgctgcagatttctaacagaaacctgccgctatcacggccgcgc

SEQ ID NO: 508645 - DNA, 364 bp, Homo sapiens
gtgaggcctcaggccaagaacaggagctaaggaagccacaagggaggccattttctgcagaggtggtgaaccagtaagaacctggtcctgaaaaagctcttgtggaacaataagagccaggtgggaaagcttttcatcttgcaaagttggggcctaaggttcttccttgaatgtgggcatctgcacttcagctcaagagtcctgttgggtgaagtccagagtggcctttctgattcctgaagtagataaacaggcctgtcccaaggaagagcaggtccagcataaagaccccgaatccaatcaacatctggctctgtgcagaatcagagcgtgcactccattgcaacacggtctctcaagggat

SEQ ID NO: 508646 - DNA, 1270 bp, Homo sapiens
  misc_feature (284)..(284): n is a, c, g, or t
  misc_feature (293)..(293): n is a, c, g, or t
  misc_feature (601)..(601): n is a, c, g, or t
  misc_feature (646)..(646): n is a, c, g, or t
gccgcggcctgagcgcccggtcgcgacctccggccatggcggtgcatgcgtatacgagtgagaacagaaggacgtcggaccgaggaccggaccaggagcggatacgcttgcgtgctggaccacctagcagctccccgcgtacacaaaggcatcctccagctgcgaggcacgagcgccaagctaggcgactacgccgtgcgtcttcacgggctactcgcgcacttttgattcgacgctatgcgctcccttgcatcatgcatatgcgcgatacgcatttggcctgnaggttacangtgcgctacggccaacgatccaatgtcgatggctcgtcttagcctttgccaagtaccgcggacggagtggacccgatacgggaccgcccatgcaagtagcacgctagcgagtcgcggaccgcggctaggcgcccacggacgacgaatagccaaggccacactcccaggcgatttggaggcttcgcctgcgttggacagaccatggccatgtcgctttggaagcgcaccgatctttggaacacgtgaagcggctgggagccctagcacaggcttgtgcgcgcagatacactccttttaacccagaggancccttagcgggcgccgcgaacggcgagatgcgttgcctgggtggnccccgaacgatggagagtcgcccccaagtgtcgcctctgggtttgccgtcccttaggggaatcctctcgccgaagaccaaagggctaccttcacccaaagcgcaatttacaggcctttgaccgtgtgaaattgcgctataaacgaggggtcggacaaaccttctcttccttccaaggaaatccccgggaaggtcgaggagcacgcgacaaagaacggacagggaggggccttgcggttttgttaaccagagggttccggcggaagtccgcgcaagttgaaaacgcaaggcaagggggggcgtccccgttctgggggaacccaaggcctttcgttttcctttctccatatcattgcgtgtacagtaacgccccagtttctttctaaataacccttgggaagccaccccctcgctgtagtgggaggcccttcctccagagagttccccttgccaaattttgggccacggggccgttgtttaacttacccaagggattaaacccccctttaaaaccccctgtgggcttaagcgttaaaatctccaacaaaggaacggacaaacacaccacttggttcgaaaacggcaaacgcggagagggggaacggacaacggcaaggggcacacc

SEQ ID NO: 508647 - DNA, 863 bp, Homo sapiens
  misc_feature (17)..(17): n is a, c, g, or t
  misc_feature (19)..(19): n is a, c, g, or t
  misc_feature (23)..(23): n is a, c, g, or t
  misc_feature (25)..(25): n is a, c, g, or t
  misc_feature (29)..(29): n is a, c, g, or t
  misc_feature (33)..(33): n is a, c, g, or t
  misc_feature (348)..(348): n is a, c, g, or t
  misc_feature (515)..(515): n is a, c, g, or t
  misc_feature (739)..(739): n is a, c, g, or t
  misc_feature (744)..(744): n is a, c, g, or t
cgcctcctcgcgctgcncnatgntnggangagncggcctgtgaccggcttggcggttggagcggctgtcgccatgttgtcggtagcagcccgctcgggcccgttcgcgcccgtcctgtcggccacgtcccgcggggtggcgggcgcgctgcggcccttggtgcaggccacggtgcccgccaccccggagcagcctgtgttggacctgaagcggcccttcctcagccgggagtcgctgagcggccaggccgtgcgccggcctttggtcgcctccgtgggcctcaatgtccctgcttctgtatgttattcccacacagacatcaaggtgcctgacttctctgaataccgncgccttgaagttttagatagtacgaagtcttcaagagaaagcagcgaggctaggaaaggtttctcctatttggtaactggagtaactactgtgggtgtcgcatatgctgccaaggaatgccgtcacccagttcgtaatccaagcatgagtgcttctgctgatgtgtnggccctggcgaaaaatcgaaatcaagttatccgatattccagaaggcaagaacatggctttcacaaatggagaggcaaacccctgtattgtgcgtcatagaacccagaaaggaaattgagcaggaagctgcagttgaattatcacagttgagggaccacagagtgatctagatcgagtaaagaaactgaatggttatcctgataggtgttgcctcatcttggcngtgtncccttgccaatgccgagattgggggtatacggccttgcatggtcccccatgatgctctggcaggcaacatgggccgctccctcactgtatcccacgttgttccagacaatggttggggc

SEQ ID NO: 508648 - DNA, 586 bp, Homo sapiens
ggatagtttcgactgttctagaaacctatgtggtattttctgaggcgtggtttgatctagagaatgaaatccatttaggcgatgggggatagattaatgtccgcgggaaattactcacttttttgaaacctaaagtgagtgccatgggcactgtgtgtcatgacagggattggtaaatattgtgaaaatacttatattaattgccatgataagaaacgcacttatgagctcacgggattcttggatggggtgcatagagtcaagcagcgtttacaggatgaacctttatgggttatactagctaaagtatgtctctctacatctgtcaatacaatgacacaggtatatgtgagcatgagctactgtgcctcaagtttgcactgctgcaaaaacttttgtagagagattctgctctaagatgttgatatcatatgaaccccataattctctcactagatttagaacaatggtggaagttacagcgtgacctattcttagaccaaaaaggattcttacgtttaaaaatatttaaaataactggggaacaaggcctttccttctacactggggtttcgctgtgtgaccc

SEQ ID NO: 508649 - DNA, 439 bp, Homo sapiens
acaggtggtagagccttaggctggtggtgcagcctattactcccgggctgcaaacctgtccagcgtgttactactgaatactgtaggcagttgtaacacagtgctaagtatttgtgtgcctgaacacatttagacatagaaaaaatatagtacagatatggtataaaggatgaaaattgcttcacctgtatagagcactcaccgtgaatggagcttgcaagactggagtggctctggatgggtcagtgatgagtgctgagtgaatgtgaaggcccaggacagtactgagcaaagccgagttttataaacagtcaacacttaggctgtactacgttgatttacaaatttttcctcaataagaaattaaccttaacttactgtaacttttttacgttttattttacttttaaattaaaaattctaaactttttaaaaaaaa

SEQ ID NO: 508650 - DNA, 346 bp, Homo sapiens
  misc_feature (17)..(17): n is a, c, g, or t
  misc_feature (19)..(19): n is a, c, g, or t
  misc_feature (23)..(23): n is a, c, g, or t
  misc_feature (25)..(25): n is a, c, g, or t
  misc_feature (29)..(29): n is a, c, g, or t
  misc_feature (33)..(33): n is a, c, g, or t
  misc_feature (312)..(312): n is a, c, g, or t
cgcctcctcgcgctgcncnatgntnggangagncggcctgtgaccggcttggcggttggagcggctgtcgccatgttgtcggtagcagcccgctcgggcccgttcgcgcccgtcctgtcggccacgtcccgcggggtggcgggcgcgctgcggcccttggtgcaggccacggtgcccgccaccccggagcagcctgtgttggacctgaagcggcccttcctcagccgggagtcgctgagcggccaggcccgtagcgccgtgccgtttgggtccggcctacctgataggtgccctacaacatagtcgccgtgnctatactaggtattaggtataatctccccgaacg

SEQ ID NO: 508651 - DNA, 193 bp, Homo sapiens
tcggtacgctgcagggtcttacgcgcaaggattacagaaaaggctaaactgaacatcaggcctccagaacagtgagactattgagtgcctgataaacgcaggtgggatcagaccagctcagagactacacagacccacccaggtgaaagagacccctccaaaggacttttcccagaaagcaaccctatactaa

SEQ ID NO: 508652 - DNA, 1180 bp, Homo sapiens
tcagcaccgggacactggacgtgatggatcccaagacgtgaattgtgatatcaacttgcctctacggagccattgacttgatgttagctttatgcccgtaatatctatttctccctagaccaccaatacggcacatggcctaattcacctgagatatcgctggcatgatgactcctgcacctcccaatgatggcttgctttagtctgtagaatccgacgcttagtttagtcgactttcgctcgtttacttcactaaggtcgaattagtggcctaatgcgatcgcgcttggtcgcgattgatttatgagcaagatacggtataatggcctgctgtaaagtgttgcccgcgtggccacagagcgcattccttgtatacatgtcccaggttgggattcgctgctgccactaactgcaatcattgttgatactcttcgttgcctgagttgggtagtctcttctcaccctggtcgaggatttgtaccactatcgagaacaatacgatcgcatgaaagatgaagtaaaccttcagttccttattgactcagactgtaccacttcgtaagacttgacaggttagtacgcttacctcagtacaaacgcataatttagacaatgaaaaaactactccctattggtctcttcaccaactcacatttgacgaaatcttcctctgacttcgacgtccaacgcggaatctcctggcccttgatattaacgacattactggaattatttacaaaactactcatttatacaaacaacaaacctctgcacgggcccccacctattgaactaccctaagagcgcaattatacaagcaccccatcggtcggtcaataatacttgcccgcacgacccctatacactactacgacccttcctcttattacgctaccactcatacttacacccctttacaaagcaactcaccgatcccctcactatccaatcctcaacgaggctcactatataagctcatcttcactccgcaacacctaccgagtgcccaactacacctcaacccacataccacctcaaacctcactcacgcactcaactacaccccactctcttccaaccactcacatatttcactcaccccacagcccttccttccttcctcaccaactatctgcaccacttctaaccacctcacctcctcttccacataccatattaa

SEQ ID NO: 508653 - DNA, 764 bp, Homo sapiens
  misc_feature (4)..(4): n is a, c, g, or t
  misc_feature (6)..(6): n is a, c, g, or t
  misc_feature (10)..(11): n is a, c, g, or t
  misc_feature (16)..(16): n is a, c, g, or t
  misc_feature (19)..(19): n is a, c, g, or t
  misc_feature (21)..(21): n is a, c, g, or t
  misc_feature (23)..(23): n is a, c, g, or t
  misc_feature (29)..(29): n is a, c, g, or t
  misc_feature (53)..(53): n is a, c, g, or t
accncnctgnnggacncangngncagcgngcatgcgcggggctgcggtggcgnaggcgccctgccgcgcccgccagtcgggaaccggttctccgagtccgagctggcggcgcgctgtttgcctgattctagagctcaatgctgcccatcaggtgtttgaagtcatgatttggtgaaaatgggacagtgaagacgttctgaaaaaaaaaaaggcatatgatgaggtttggacattgagaggtataggctggctgtaggagtcggatccctgcattgtcactgagtccaccatgctttacagaagacgacagatttagtctggaagctcttcaaacaatacataaacaaatggatgatgacaaagatggtggaattgaagtagaggaacgtgctgaattcatcagagaagatatgccaatatacacgatgctactaataaacacagccatctgcccagagaagataaacatataacgattgaggatttatggacacgatggaaaaccctcagaagttcactaattggacccttgaagacactcttcagtggttgatagcagttggttgaactaccccaatatgacgaagacattctcagagacaacacatgtcgacggaacgacacttcccaggatagcagtgcacgaaaccttcatttatgatctccccagttgaacatcagtgaccggagtcaccagacaaaaacttcagctcaacggcattggatgtcggacagccgggaactcgtaacacgcccacctcata

SEQ ID NO: 508654 - DNA, 413 bp, Homo sapiens
  misc_feature (17)..(17): n is a, c, g, or t
  misc_feature (19)..(19): n is a, c, g, or t
  misc_feature (23)..(23): n is a, c, g, or t
  misc_feature (25)..(25): n is a, c, g, or t
  misc_feature (29)..(29): n is a, c, g, or t
  misc_feature (33)..(33): n is a, c, g, or t
cgcctcctcgcgctgcncnatgntnggangagncggcctgtgaccggcttggcggttggagcggctgtcgccatgttgtcggtagcagcccgctcgggcccgttcgcgcccgtcctgtcggccacgtcccgcggggtgtgtgccactcttcaaaaattaggagaaagaactatcaaagcatggacagaaactcgccttagacaaagatttcccaaaggtgagtttgaataagtttccaagttaatgacagatcttacaaaattacacacggaatgctaacatggagatctgcttgaatagtgctgatgacagggcggacattgccaaaaatatctgtgaaaatcaagattcaatctacagtaaattgaaagaatgctgagaaaactctgttggatatgactgtatatgcgtgg

SEQ ID NO: 508655 - DNA, 617 bp, Homo sapiens
gtgatcaattatacgggaattcttacagagcctgttttttgtttaaagatcttggaatttctggaaaagattggtttgtccattccaaatattttggatgacctgatttcattctaactcccatccgtctttctatgcggtttgttttcgcatcttttatctcatttaaatgccgtagccatgcaggtggaaagcagaaatccatttctgcgtttatgttaaactggggctgagagacttgcccagggtcggtgaccgcccagggatccccataccagcgcgtctagctcccgcgttccgatcccggaagggaaaacccatgatcctggcgagggtccgtccacacgtggccagggtggctgatcttcccggctgctgtggttgtcaacaccacttctccggatcgattttcccttttcctcggctctgtcgtccatacgccactcacagcaaacccaggcggcgggccccctccgagggcgctccttgcgtccggacccaggttctcggggcgcccccggtgggtccccgcgaagccgccgccgcacaccttcctcagcgtagcccgccagtggaaaccgggggaggttctgcctccagcacccaagcggcggccg

SEQ ID NO: 508656 - DNA, 1269 bp, Homo sapiens
  misc_feature (4)..(4): n is a, c, g, or t
  misc_feature (6)..(6): n is a, c, g, or t
  misc_feature (10)..(11): n is a, c, g, or t
  misc_feature (16)..(16): n is a, c, g, or t
  misc_feature (19)..(19): n is a, c, g, or t
  misc_feature (21)..(21): n is a, c, g, or t
  misc_feature (23)..(23): n is a, c, g, or t
  misc_feature (29)..(29): n is a, c, g, or t
  misc_feature (53)..(53): n is a, c, g, or t
  misc_feature (151)..(151): n is a, c, g, or t
  misc_feature (771)..(771): n is a, c, g, or t
  misc_feature (784)..(784): n is a, c, g, or t
  misc_feature (795)..(795): n is a, c, g, or t
  misc_feature (798)..(798): n is a, c, g, or t
  misc_feature (1139)..(1140): n is a, c, g, or t
accncnctgnnggacncangngncagcgngcatgcgcggggctgcggtggcgnaggcgccctgccgcgcccgccagtcgggaaccggttctccgagtccgagctggcggcgcgctgtgggctgtgcgggagcgaggggagaagagggaganagggagcccgacatttgggaagggcaggcttgcctctgggatggggaggagccggtgcacggatcctgctgtgcctctgtgcagggcgcgcccagtagtttgggatttgcaagaaaatgcaatcaaacaacatgggcaaagtgcgatgcgtttatcctaagccaagaacacgcttagaatgcacgcccagagccagttctccccaagggatggcaacgcacctgtgtgccgggctccgcgcaagggctttccctgtttattctcccgccgccgctaacaaccttgtggggcgggcatggttggatccccaatttaaaagtggggaaactgaggacagattaacctgtctgcacgtaacacagctgaaaagtggtggaattgctatttctttcaggtttgcctgattctagagctcaatgctgcccatcaggtgtttgaagtcatgatttggtgaaaatgggacagtgaagacgttctgaaaaaaaaaaaggcatatgatgaggtttggacattgagaggtataggctggctgtaggagtcgggtaagtgccaaggaaaagggcctcagggtagcttatggaatggcgattgggccgacagtgcacggacgagaaagcttnggggtggtgagancaagggaaggnaangggaaaacaaaagcgtggaggtgggaaaggaaacctggggagaaaggtaagcgattgcctcatttggagtcttgtgtttatgtttggcttgcaaatagaagcatatataattctagggttgggcttttcttgccaaggaatggattttctcctttctgttcttaggtttatgctgtgatgcacagtgacacgtacctctctctgttcagcaaggttcattccggctattcatttaacagctggaaagttctatatctgtggcaaagatgatctgcggtggagggtttattcctggcccctggccttcctggccttggtcttttgagtgcttaagcggatcnntaattcctttccggttccagtagtgagaggaataaacacttaaaactccagtccaatacactctcaatgtcaataccctccctatctttaaaagaagaaaaaaaaatactaaatcatctttgtttaaag

SEQ ID NO: 508657 - DNA, 800 bp, Homo sapiens
ccggcgttaaagtgcaccaggtggcccgggtagttgaattgaactgtttgtgtattatgtggctgtggtgtcttccctgacaccgttgttgtaggtccttgtgggtgctgtgcttatgtttctcttaaacagatgcctgtgaaatttaccagtggttccagaactccacactcaacacaccgccacctgaggtgtatactacttggggatccgtgcacgttaacgattactaggactatgcagaaaccagagagtttaagaataccgcatggaaaacgtcccccctcctccctgctcctgccgccccctcccgcccccctcctttcctcttccccccgccgcccggctcgccccgtgaccggtcggccgtgcggacgcgcggcattctgcgtgtctcggcctcccgtccgcccctccccgccgcgctcggttcccccctcctctgcgtctctcttcccctccggcgtccgcgcgtctccggtgcgctcgccgttttcccccgtcctcgtgtgtgctcggcggcacgcggctgtcctcgcgcccccctcgtcacggctcgcggcgggctgtgtcgttcgccctcgcgggggtcccgccccggttccgtggctctctcgcgctttcgccgccgttctccccctgcgcctgggccgtcttgccttgggcgggtggctgcccggttggcgcgcgtgcccctgccgccgttctgctgccgtccgggccgccttcctcctccgctcctgtgcgcttccgatcggggctgctcgctttcttttcttcccggtcggtcgtccaggccg

SEQ ID NO: 508658 - DNA, 999 bp, Homo sapiens
  misc_feature (4)..(4): n is a, c, g, or t
  misc_feature (6)..(6): n is a, c, g, or t
  misc_feature (10)..(11): n is a, c, g, or t
  misc_feature (16)..(16): n is a, c, g, or t
  misc_feature (19)..(19): n is a, c, g, or t
  misc_feature (21)..(21): n is a, c, g, or t
  misc_feature (23)..(23): n is a, c, g, or t
  misc_feature (29)..(29): n is a, c, g, or t
  misc_feature (53)..(53): n is a, c, g, or t
  misc_feature (151)..(151): n is a, c, g, or t
  misc_feature (869)..(870): n is a, c, g, or t
accncnctgnnggacncangngncagcgngcatgcgcggggctgcggtggcgnaggcgccctgccgcgcccgccagtcgggaaccggttctccgagtccgagctggcggcgcgctgtgggctgtgcgggagcgaggggagaagagggaganagggagcccgacatttgggaagggcaggcttgcctctgggatggggaggagccggtgcacggatcctgctgtgcctctgtgcagggcgcgcccagtagtttgggatttgcaagaaaatgcaatcaaacaacatgggcaaagtgcgatgcgtttatcctaagccaagaacacgcttagaatgcacgcccagagccagttctccccaagggatggcaacgcacctgtgtgccgggctccgcgcaagggctttccctgtttattctcccgccgccgctaacaaccttgtggggcgggcatggttggatccccaatttaaaagtggggaaactgaggacagattaacctgtctgcacgtaacacagctgaaaagtggtggaattgctatttctttcaggtttgcctgattctagagctcaatgctgcccatcaggtgtttgaagtcatgatttggtgaaaatgggacagtgaagacgttctgaaaaaaaaaaaggcatatgatgaggtttggacattgagaggtataggctggctgtaggagtcgggtttatgctgtgatgcacagtgacacgtacctctctctgttcagcaaggttcattccggctattcatttaacagctggaaagttctatatctgtggcaaagatgatctgcggtggagggtttattcctggcccctggccttcctggccttggtcttttgagtgcttaagcggatcnntaattcctttccggttccagtagtgagaggaataaacacttaaaactccagtccaatacactctcaatgtcaataccctccctatctttaaaagaagaaaaaaaaatactaaatcatctttgtttaaag

SEQ ID NO: 508659 - DNA, 1629 bp, Homo sapiens
  misc_feature (421)..(421): n is a, c, g, or t
  misc_feature (713)..(713): n is a, c, g, or t
gtattacaagtggcccgcgcgttgccgcccccttcggcccgccatgctggtatgccgtgccgctgcgtgctcggtggctccatcggtcattggccggtctgccgatgcctgccggtcgtacttcaaatggagcgatgtttggcttggacgggagatggggtaggacttccctgctggatccgaatccaaacacaaggttcgagagtttgtggtcaagattccgtgtcctcaagttgtcctggggtaaggattacctagctggatgcacggatgggagacagggataagaggttcgcaggacaatgcctagggatggcgactggctttgtgattgcctctttgttcaggctcagtcgtgttcgtagcctcgttttcgagtgccaagcacacaggtcacatgcatgccgttgggttgcgttgnctacggtgtcaccgggcgtgaacatacctagtgtaggcccagtaaatcattcggtaacttgatgcgagcgggcgagacttattggcatgtacatgcatgggtggttccctttcacatcatgctcttggcgcacacagagcaacataggaaccaattgctccacgggcagggacgtgctagcaaaataaccacaaatatgcgcatagtgtcatgggtacccttggaccaatccttgttgggcccccattgtgcgacccaagaagaagagggtatccatagtccacttcctgtnccaaagctaaaaccgaaatgggaggcacacggaaatccggtagcctaggacttccgaacaaccgcgggaaccgtgttctcggttttgtgacaaaacgtgcgcttagtactggaccgtttttggcccaaacaaacttcatggtttacccatccacctatggcactttttgtttgcttgtggcccatggaaccacaacaaaccctaaatttgtaagcgggtcgccacctcgccatttttggcaccctaagacaagtgtccctagggtgtgtcggcacgttcaccgggggcctttccctttttggcgccaccctgaaacgcaatgttgggttggaaccttctgcccctgtgtccaataccccaataggaatgcaagtcaagcagctgggattaccttggatggctcttcaaaagaaggccggtaacggaacctggtggacatggagcccggaggcgcacaagggaattccgcagtggacatctcaccgagcagggagagttcccataaggccgctgaaattgtcactctggggaacaataggccgccgggtgagtatgtatttccattgtagccccatgtaaattgtttccaagtgcaaagactcctgggggtacactgggcatagttgacagcagagcacgttttcacgtgcgaaggtggggtgactaaccccccccatgttgagatttatcagagagccccccttgtgtgtagaatcggggcatagatgttagagaccaccgcgactcaactatgaggatgcaacaatattatacatagcgggcccggtgggtatctccacctcacgatgatgtttagtagcccgcgagaatataccgcgcacaacaaattctatttcgttgtcacatacaaatatagtatgtgaggcacggaactacctggtgaaactatatgcaa

SEQ ID NO: 508660 - DNA, 202 bp, Homo sapiens
ggtgtgtcatgcaggagcaattcgtggtattcccatgagcagcagagtctgagtgttagatgtgcaggatccatgagcggggagaggctggcgggagttgggggcctggaggctgggcgctggttacttggtgacgtgcagagttctctctggggggctgcggctcatcttggggggagctggactcagatgcccccgtagg

SEQ ID NO: 508661 - DNA, 522 bp, Homo sapiens
tagactatgaataccaaagaggcaaaaaatggaatgttaattattgaacaaaaaagctggtggaataatgtgatgtcaataatctgtgtgagtcttagaataagatagccaaatcagagtatgtacacattcccagattataatatttccacaatacaaagaaattaattctcaagtcttaatttgtagaacatcctaaatttataattattcatatcactttaaatgaaatttttacagagataattgtaaatttatatacagtcctaagaagtaatacagaaagactatgaaatgctgctgaaagaaatcatagacaacaaacacatggaaacacataccacgctcatagatgggcaggctcagtattgtgaaaatgaccatactaccaaaagcaatctacaaatttaatgcaattcccatcaaaatactaccatcgttcttcaccgaaccagaaaaagacaatcctaaaattgatatgggactgaagaactgcctgtatagctaaagcaagactaagca

SEQ ID NO: 508662 - DNA, 219 bp, Homo sapiens
ctcgaggccaagaattcgccactacgagttcagtgatcattctgacgtacccaacaacaatgttaatgccctgatcaatggctttgtttacggttggcatggccaagtctgttatatggacatcatgactgccacgcccatgaaggtgggcctcttaccccccttccccaacatcgtcctttcgctactcagtgagctcaacatctctgacatacacga

SEQ ID NO: 508663 - DNA, 398 bp, Homo sapiens
  misc_feature (101)..(101): n is a, c, g, or t
  misc_feature (242)..(242): n is a, c, g, or t
ccagttccgctttcatttcctacataatccatcacataccgagaaccaatgacataaagccacatgattatctcaatagatgcagacagggctttcgatanaattcaccaccacttcatgctaacaactctcaataacctaggtattgatggaacgtatctcaaaataataagagcagtatatgataaacctacagtcaatatcacactgaatgggcaaaagctggaaccattccctttganaaccagtagaagacaaggatgccctctctcaccactcctattcaacacagtagtggaagttctggacagggcaatcaggcaagagaaagatatagagggtattcaaataggaaaagagggagtcatagtgtcctcgtgccgtattcctgcagcgcg

SEQ ID NO: 508664 - DNA, 184 bp, Homo sapiens
cctttttcccccccccccccctttttttcaaaaggggggcccaaggaaattaacccccccgccggggggggttttatttaaaaaatttttgggaaaaaatttaacccccaaatggggttggggttaaagttaagcccccgggcctgggaaaagattaaaattcaaaaaaacccttttttaggga

SEQ ID NO: 508665 - DNA, 330 bp, Homo sapiens
ctgcactcggtaccagaaaaaggtattgaattcaatgaaagtaagaaccaggccaggcgcagtggctcatgcctgtaatcccagcacttggcggaggccgaggcgtggtggatcacagagatgaagagttcaagaccagcctggccaagatggtgaacccacgactctactaaaaatacacaaaaaaattagctgggtgggggggcaggtgcctgtaatcccagctactcggattctagtgaggcaggagaatcgcttgaactcagaggggggaggttgccactgcactccagcctgggcgacagagtgaggctccgtctcgagagggta

SEQ ID NO: 508666 - DNA, 700 bp, Homo sapiens
  misc_feature (357)..(357): n is a, c, g, or t
acaagaagaccaagactgagtacttggcggaacgaagaataaggagattgtgaagaaacattctcagtttattggctatcccattactctgtttagtggcagaaggaacgtgataaagaagtaagcgatgatgaggctgacgaaaaggaagacaagaagaagcaaccagacagcagaagagcaacagcagtcggaagactcaacctgaaattgcaagatgtcggttctgatgcaggcaagcacagcacccgcaacggactggtgcaccccagcacagtcacagcaacgcacacgcaacgcatctacaggtcaacagacgctacgaatccgcagtgccacaggcacagaacgcttccnagaacctgaatagacccaaacatagtctctcaaattcctggggaacctccaatgcaaagcagttcgcaccggcaaccggaattcattttgacacgtgtaacactggcagcggcacggttaccggggcaggaacactttcctcattgcagaggacagctttgcactccaaatggacctgggaagatcacgtgtggccagtgaaagccattcttctcaagttcgaacggacccagtttggccattcatgagcccttctattttgtcccaccgacgtggctccctttttgatcttgtttgaaaacactagatcagaacatacgaaacaatatcaacacttgtaatg

SEQ ID NO: 508667 - DNA, 669 bp, Homo sapiens
aaactaaccggtatttttgtccaaaggagcgcttgtttagatcggctctttcttccaataattggtggaaagaaggctttctctctgaattcgcttagtgtaaccagaggcgtatattttttaggcgccttttcaggatcctaggtagtaatattcagtggtttaaatcttattttatgcttaagctcaaactggttaagactaccttagttgcttatagtgaaatacttgattgcacaggtgttctctcgatttggagctaatttttacttccaccgtcatttgtaactgttaaaaccaactcagttccatcatggtgatgttcatgaagatcaagtcttttgaggtggtctttaacgaccctgaaaaggtgtacggcagtggcgagaaagtggctggacgcgtgatagtggaagtgtgagaagatactcgtggcagagccttaaggatcctggcttgcggagtgcctgaagtgccttagatgcagtgatcccagcagtgcaaacatatttcggagtaccttgactttgaagacactcttcttctggaagactagtcaacaggtggagattcagatggtgatcatgacatcttgaacacatatatgtattcattcggctattaacttactccagggccctgtgggaacatccctcggaacattggggc

SEQ ID NO: 508668 - DNA, 596 bp, Homo sapiens
aactctaaggatcccccacagaacatgaccagtcccgaaaatggcacagaaatggtatcaagaaaccccgatcacaaagatacgaatctcttaagggggtggaccccaagttcctgaggaacatgcgctttgccaagaagcacaacaaaaagggcctaaagaagatgcaggccaacaatgccaaggccatgagtgcacgtgccgaggctatcaaggccctcgtaaagcccaaggaggttaagcccaagatcccaaagggtgtcagccgcaagctcgatcgacttgcctacattgcccaccccaagcttgggaagcgtgctcgtgcccgtattgccaaggggctcaggctgtgccggccaaaggccaaggccaaggccaaggccaaggatcaaaccaaggcccaggctgcagccccagcttcagttccagctcaggctcccaaacgtacccaggcccctacaaaggcttcagagtagatatctctgccaacatgaggacagaaggactggtgcgaccccccccccccgcccctggggtaccatttgcatgggggtggggtcctcctgtgctatttgtacaaataaacctgaggcagg

SEQ ID NO: 508669 - DNA, 156 bp, Homo sapiens
gtgctcacgtaatttcttctggctggctccagctctgctccagccaattaccatcattgttatcatccacccaacatcccgtcgcttccatcatttctcacatacagcagtcacacacatcatcgtcgtccaatcatcagcatcaccatgttgtgc

SEQ ID NO: 508670 - DNA, 497 bp, Homo sapiens
tgtccatagtctattaatggaagcacaccctaaagtgtcaaaatgattaacgacttccattttttttagacagcgggttggctttacaccaacgaaaaataaaaacagatgactttgctctggagctccaatcactttctcttattctcacggtaggctgagatgctggtaaatgtcatgttctatagcctaaggcagcttgacttgcaccatcaaggaatttaccctcctcgggaaagcggggatgcttatcgcctgccttgaagtacttctctacaaaagctgtgaaacaatacataacaactttcagttgctcttttgttgcctcgggcttgagtgacacaggctcaacaagtgcacccttgcatatagatgtggctctccttctcagaaagcgagcatatatctgcatggaaggtgaatgtttcagcattaaactctatgagaacgtatgcttgattgacttccagagctgaaaagcatgcccacctgttaaa

SEQ ID NO: 508671 - DNA, 645 bp, Homo sapiens
caacatgtacacttggctaatcccagagaggctatccccacataggcaagtccccacactggcaatccccacactgaccagtcccgaaaatggcacagaaatggtatcaagaaaccccgatcacaaagatacgaatctcttaagggggtggaccccaagttcctgaggaacatgcgctttgccaagaagcacaacaaaaagggcctaaagaagatgcaggccaacaatgccaaggccatgagtgcacgtgccgaggctatcaaggccctcgtaaagcccaaggaggttaagcccaagatcccaaagggtgtcagccgcaagctcgatcgacttgcctacattgcccaccccaagcttgggaagcgtgctcgtgcccgtattgccaaggggctcaggctgtgccggccaaaggccaaggccaaggccaaggccaaggatcaaaccaaggcccaggctgcagccccagcttcagttccagctcaggctcccaaacgtacccaggcccctacaaaggcttcagagtagatatctctgccaacatgaggacagaaggactggtgcgaccccccccccccgcccctggggtaccatttgcatgggggtggggtcctcctgtgctatttgtacaaataaacctgaggcagg

SEQ ID NO: 508672 - DNA, 368 bp, Homo sapiens
  misc_feature (167)..(167): n is a, c, g, or t
gagtatctagaggatccgtgaggtaccaaaaggacagatggaggatgtatgcagtacaataattttaatgtaaaacattgatgaagggggaagaaaatagtccgagtcttaggagaggtctctttaggagcataaatcagtcagctttagggcaaggctgctactgngaaatcaagacaataaaaaaatgaaacaaaactctaaagcaggagaaaatcccagggagcagacagctaaaggggaagtcctgagcacaagttacggctgtgaatttttaaaggcaaaagcgaagtccctggatgtggtaacctgcgtcctgaccatctgccataacatttgctagtctgaatcacttcagggcctattcc

SEQ ID NO: 508673 - DNA, 559 bp, Homo sapiens
tgatctagaggatcacccagtccgttcgactgagccacaaagatacgaatctcttaagggggtggaccccaagttcctgaggaacatgcgctttgccaagaagcacaacaaaaagggcctaaagaagatgcaggccaacaatgccaaggccatgagtgcacgtgccgaggctatcaaggccctcgtaaagcccaaggaggttaagcccaagatcccaaagggtgtcagccgcaagctcgatcgacttgcctacattgcccaccccaagcttgggaagcgtgctcgtgcccgtattgccaaggggctcaggctgtgccggccaaaggccaaggccaaggccaaggccaaggatcaaaccaaggcccaggctgcagccccagcttcagttccagctcaggctcccaaacgtacccaggcccctacaaaggcttcagagtagatatctctgccaacatgaggacagaaggactggtgcgaccccccccccccgcccctggggtaccatttgcatgggggtggggtcctcctgtgctatttgtacaaataaacctgaggcagg

SEQ ID NO: 508674 - DNA, 379 bp, Homo sapiens
  misc_feature (33)..(33): n is a, c, g, or t
ccgaaggtggggcctggtgtgtttgggttctgngggtggatcctcatgggctgggtgccatgaaccactcaccacagtgagttctcacgagatctggttgttgagaagtgtgtcatcctcccccacaactctctgtcttttgttccggctctggccatgtaacaagcctgctcctccttcgccttctgccatgactgtaagctttctgagggctgaccagaagcccagcagatgccagcaccatgcttcctatacagcctgcagaaccgtgagccagctaaacctctcctcataaatcaccgagccccaggtttatctttacagcaatgcaagacctgactaatacagcaccagctccccaaaataaaaagaaatattc

SEQ ID NO: 508675 - DNA, 586 bp, Homo sapiens
ataagatatgagtcagagtcggagaggcgtgcagtcatgagggcttgacgtaggtgctgatgagtcgtggtacgggacaaccctgggggtggaccccaagttcctgaggaacatgcgctttgccaagaagcacaacaaaaagggcctaaagaagatgcaggccaacaatgccaaggccatgagtgcacgtgccgaggctatcaaggccctcgtaaagcccaaggaggttaagcccaagatcccaaagggtgtcagccgcaagctcgatcgacttgcctacattgcccaccccaagcttgggaagcgtgctcgtgcccgtattgccaaggggctcaggctgtgccggccaaaggccaaggccaaggccaaggccaaggatcaaaccaaggcccaggctgcagccccagcttcagttccagctcaggctcccaaacgtacccaggcccctacaaaggcttcagagtagatatctctgccaacatgaggacagaaggactggtgcgaccccccccccccgcccctggggtaccatttgcatgggggtggggtcctcctgtgctatttgtacaaataaacctgaggcagg

SEQ ID NO: 508676 - DNA, 500 bp, Homo sapiens
gggcgcttcgggagccgcggcttatggtgcagacatggccaagtccaagaaccacaccacacacaaccagtcccgaaaatggcacagaaatggtatcaagaaaccccgatcacaaagatacgaatctcttaagggggtggaccccaagttcctgaggaacatgcgctttgccaagaagcacaacaaaaagggcctaaagaagatgcaggccaacaatgccaaggccatgagtgcacgtgccgaggctatcaaggccctcgtaaagcccaaggaggttaagcccaagatcccaaagggtgtcagccgcaagctcgatcgacttgcctacattgcccaccccaagcttgcaccagtcttaggcccccccaagacccagccctacccatgagcagactgatagccatgacaggaggtaaatcctggcaaccaactgggctgggggccaatcctgataccagtgtgcccacagtagtctgcccttggccatgcaaagacaggtc

SEQ ID NO: 508677 - DNA, 387 bp, Homo sapiens
gggcgcttcgggagccgcggcttatggtgcagacatggccaagtccaagaaccacaccacacacaaccagtcccgaaaatggcacagaaatggtatcaagaaaccccgatcacaaagatacgaatctcttaagggggtggaccccaagttcctgaggaacatgcgctttgccaagaagcacaacaaaaagggcctaaagaagatgcaggccaacaatgccaaggccatgagtgcacgtgccgaggctatcaaggccctcgtaaagcccaaggaggttaagcccaagatcccgtagggactcagtaacaagatggatagagtcaagtacgtatgccaccacatggattgtgagaggatctcgcgaccagtaaatgacaaggtgctaca

SEQ ID NO: 508678 - DNA, 168 bp, Homo sapiens
gcccgtcactctgctccatgtcctacggccctcttattgttctcaatctcctctagtcactagcctcatgcggcctgccgtggtctcgcctccagcctcgtcgttcactagggcgtctctctctcttctcccactccaatcttttgctccatgcactcatctcatgag

SEQ ID NO: 508679 - DNA, 114 bp, Homo sapiens
gaagttaactctatgcacagcattcactatcttaacaagctttgagtgcaagagatagaagagttcaaatctgaccaagatgatgatagtaggataagagaattctctgctaag

SEQ ID NO: 508680 - DNA, 100 bp, Homo sapiens
tattgtatatggggtatttatgctacataagaaaacagtaaatcagaagaccacaatctacgaaattcaggatgatagaggaaaaatggagggtaccgag

SEQ ID NO: 508681 - DNA, 694 bp, Homo sapiens
ggggaaggtggctcggggggggggggggggatcccaaggcccaattccccgaaccacttcagggttccgtggtggacagctcaccttaggtggcaagggcatccagggtctcccgggacgtcacctgcatcctgggactttggcccgtggttcttgcactgcccgggatttcaaggaggctggtgccgatccaaacggttccgtatatccaggctttttgggaccaacgccttatggctccagagacccattcgggcgacacccagcgtggcccatgtgtacaacgctacacgaggagagtgtggaaggaaaccgtatttcccaaagagggacgcagcagagtatattgaccaattcacgtggcaatgtgaacatcccaagagaccgtcacattcgtgggtatactccagaaacatcaatagattcagcggaaagacgcccttgccaacgcaagtgtgggagggaaacaagcgcccaacacgaggaagagaattccgcacagtcatagagacggccgtgaccatcccgagcagatattatccacggtgagcgaggcagacaaatcgaaagagatccgggagagacgatgagagagggccccccgagatggggggaataccccctacgaagaggaaggagtaagtgggtaccggacgcaaagagacaacagcgtgggggtgtatatgagaaaacc

SEQ ID NO: 508682 - DNA, 337 bp, Homo sapiens
aaagggcgatccttaatgtatattataaatggatcttaattattgctgataaacgtattcatatttattctctagaatagagtatcctattgtctgagataaatctagtttccctatatcatagtggctatttatcttccagcccagaagtttttcctttgtaagataagttcattttgtgagtttatagatttggattataaaatatagatcggtactgttagactaatttggcccagagattctcatgggtccacttgggagaaataggagtaattctcaaaatcatattgagaaactccatgtttcacaaagaaaaattagttcttagctgaag

SEQ ID NO: 508683 - DNA, 312 bp, Homo sapiens
tccaatggctgtcatgcagcaggctcagatgtagctgcatcccgggacctaatagctgtctacacagcagggtccaactgcagctccgtcccaggacttaatggccgtctatgaagcaggctcagatgtagctgcatcccgggacctaatagccatctacatagcaggctcgaatccagctccatcctgggactgggacctaatggccgtctacacagcaggctcgactccagctccatcctgggactgggacctaatggccgtctacacagcaggctcgaatccagctccatcctgggattgggctatcaa

SEQ ID NO: 508684 - DNA, 358 bp, Homo sapiens
aaaaccaacagttatttgttcttgcactggctaagccattctgttatctctgtaaatactgtgatttcttttctattttctctttagaactttgttaacagaaattctaaacatttttaacacacctgctctccacaataaagtcagcaaacactaaactaaccattacttccacagtaaactacttacttctctctcctttctctggctggtgcggccgaacgccaattccacaacaccggggatctttcaacacacggcgtcttaaaagcctcttcctaacccgcaacttacttacttttgggcagcacacagcaacgccaacaattgcacaactcagcagtagcagcttcatgct

SEQ ID NO: 508685 - DNA, 347 bp, Homo sapiens
ctccattaatgtgtgcccagagtgctacagggattcctctagttaggttaatagagctcgtggcgtaccagcctgatatagttcatgggaaaactcgacctgttgaggggtctctgagcttgctctgagtcttgctgtaaatatctctttgatggttgccagtaaaataaagttaaaaaaaaaaaaaattaaattagccaggcatggtggtgcacacccatggtcctagctacttgggaggctgaggtgggaggatcgcttagacccaggaggcggaggttgcagtgagtggagattgtgccattgcactccagtccagcctgggcaatagagcaagaatctgtctc

SEQ ID NO: 508686 - DNA, 328 bp, Homo sapiens
ggaaacaggggtctctctctgtcaccaaggctggagtgcagtggtgtgaacacaggatcactgcagttcaacctcccaggtcaagaaatcccttcccccataacctcctgaggagctggtgctactgcaggtgcataccaccacacctagcttttttttttttttaaattttttgtagagacagggtctcactatattgtccaagctggtcttgaactggactcaagggatcctcctgtctttggcctcccaaagtgctgggataacaggtgtgagccactgcacccaggccatctcatttcctttagtgcccttctgtcgtcttctc

SEQ ID NO: 508687 - DNA, 904 bp, Homo sapiens
  misc_feature (42)..(42): n is a, c, g, or t
  misc_feature (730)..(730): n is a, c, g, or t
  misc_feature (737)..(737): n is a, c, g, or t
  misc_feature (743)..(743): n is a, c, g, or t
  misc_feature (753)..(753): n is a, c, g, or t
  misc_feature (765)..(765): n is a, c, g, or t
  misc_feature (773)..(773): n is a, c, g, or t
tctcatgcctccttgcataaggggtttctctcaagccagttncaaagccccctccccttgccgtccccacacctccacggagagtgaccccaggcctggtgctgctgtgctgactcgtgaaccatgcacaaggcgaggctgacccatagccccttcttgctctgcccttggtttatacgcctgggatgtgggtaaaatccgtatcatgtagagcaaagtcttaagtgggctgcaacacgtatgtgctttcaaacacttgtaaccccagcatttgggaaatggaggaggtcaacctctactccatagcatgctccaggccagcctgggctaccccaaaaccaaaccaaaagccaaggaaaatggagctacccaggagctgcccacgagagcccgacttggtctcactcaccctggttttacttttcaaccttattcttgtgaagtgacttgaaatctggttgcaccctctttgctgactgaaaattagagctgcacaattcctgggaattacggcagtgcactgactggccactgctgcctttgaccggctcttcccacgcgtgctcaccattaggtgaacattatattccactccacactctacctgcacaggcattgtggtcatttttgtatggactaaatggtatagatctgtagtgtgtcaggagcataggcagtatcaaaatcgtgctatttacatcttttctatgtgtaatgcttatggcatgangacttgnttcganccagatggtnttgacggtctanatgcctangatttttttacccccaaaaaataaaggattttataccggagttcctatctcgaaagtccgggcataactgggagtaccgggttaagggtgcacccgcggtacaaatgttgttttaaaagggggttcgcgca

SEQ ID NO: 508688 - DNA, 139 bp, Homo sapiens
ctaattcgtcacctgttacgtaacgggtacgggaccgcgacggttgaccctgtatacgggtgacgaccgaacttacttcgacgatgctactacggacgctatgtaacggtgacggtacgcgactgacgacgtaactacg

SEQ ID NO: 508689 - DNA, 939 bp, Homo sapiens
  misc_feature (1)..(1): n is a, c, g, or t
nggcgcccggggtaacacaaaagggggccccaaaggagccgtggtcgcccgcgcgcgccttgaaggggccaccggctggttcccaagaagctgccggtgagattcggtccagctgcaaaacaacggggccaccaaacctcggcatgtggcgccaggactctccctgggtgacaagtcccgcgcgctctggcagtacaattcacggggcccccccccattggcaacccagcgtaggcgtctggggacgagcccgccaccggtggacacggcaagccaacgaggcgcaacagggggtgcaatacacacacacatgccaacgactgcgtctcctatcagggctcgcaccccaggggccaaccaagccaaacagcgcggattccacaagggggaggaaaacggggcagagcacacagcgcccagtaaccggcgcgggtaagtcgcttcccccaaagagatgagttccccggggccaagtccctcaaccaccacagcgttcttgtgaggccaccccccggagtggcgactccagcgccgcaccagaaaagcagggccacaacgtctctggaccccacccacacagtgcctcgtccccaagagccaccctgggagcaaccccctcctgaggaagtcacccctgtcttgcgcgcgcgcatatcttctatggtacgcatccttctcctgtcctttggagagagtggttcacttcccgcatggaggaggggcgcccaatgtgtacaacgaacccctatcaggagggcaacgctagcaggcacaacgatcgctctcttcttgctcgcccctcggttcacgtcggggaaggcatcctcccgcgcttagtgggcgggcgacgcccgcccgaatccaccgtcttgctgacacgcttgccccctattcctcctctgcgccaaaaaaacgtttttttttcgcccaaacaaaaca

SEQ ID NO: 508690 - DNA, 121 bp, Homo sapiens
tacttttcccagcagcactcctgtgggtgcagcgtgatatgagggcagacaagaatctcatatgaagtgaagaggacagggtgcttgtggacccacagtggtgctctgtgtgacagtgcaa

SEQ ID NO: 508691 - DNA, 113 bp, Homo sapiens
gagtgccagaacgtgacgctcaagcacacgcacccacacaggagagcagcacccactccccaggccccgcccacgccctctcacctagagaacagcaccagctccccacagcg

SEQ ID NO: 508692 - DNA, 136 bp, Homo sapiens
cacggtgattaccaaggaggttcccaaggcggctacgaaggaggcggctatcggggcggctaccagtgccacccggcgggccgtcacgagaaaggccgctacgcgagcatgtatggcggttacggcagcggtcagt

SEQ ID NO: 508693 - DNA, 379 bp, Homo sapiens
  misc_feature (31)..(31): n is a, c, g, or t
  misc_feature (92)..(92): n is a, c, g, or t
  misc_feature (127)..(127): n is a, c, g, or t
  misc_feature (147)..(147): n is a, c, g, or t
  misc_feature (151)..(151): n is a, c, g, or t
  misc_feature (166)..(166): n is a, c, g, or t
  misc_feature (188)..(188): n is a, c, g, or t
  misc_feature (191)..(191): n is a, c, g, or t
  misc_feature (232)..(232): n is a, c, g, or t
  misc_feature (240)..(240): n is a, c, g, or t
  misc_feature (308)..(308): n is a, c, g, or t
  misc_feature (339)..(339): n is a, c, g, or t
  misc_feature (377)..(377): n is a, c, g, or t
aaaactcgaacattaacattcttcaattttntgtaagctctgcagtccggaaaatatacaaacttcaaacagctgccaaaatagtgtctttnggagacaatagagtctctacatcgatacatgacanataggcatttttctaatccntccngccctggggcggccngcgcgtctagcctcgccatttnccncctggcggcatgccagctctcctcccccctccccccctggngctgggcnggctgggctgctacttaagacaatctttagtcagggtgaaagcgagatgaaaatgccacttgggaaancacttgtttcctccctctgccagccgctganttggtcaagtgttatggcccgttaggtgtctttggtcngc

SEQ ID NO: 508694 - DNA, 482 bp, Homo sapiens
  misc_feature (84)..(84): n is a, c, g, or t
  misc_feature (242)..(242): n is a, c, g, or t
  misc_feature (334)..(334): n is a, c, g, or t
taactggggccggcttattacagcttgtgtgtacgcgcgggtgtgagccgggttattgaagtaaaaatgtccagaaaaatccanggaggttctgtggtggagatgcaaggagatgaaatgacacgaatcatttgggaattgattaaggaaaaacttattcttccctatgtggaactggatctgcatagctatgatttaggcatagagaatcgtgatgccaccaatgaccaggtcaccaaagntgctgcagaggctataaagaaatacaaccgtggggcgtcaagtgtgctaccatcacccccgatgagaagagggttgaagaattcaagttganacaaatgtggaaatccccaaatggcaccatccgaaacattctgggtggcactgtcttcagggaagctattatctgccaaaatatcccccggctagtgacaggctggggtaaaaccatcatcatttggccgacatgcttatgggggcca

SEQ ID NO: 508695 - DNA, 457 bp, Homo sapiens
tctgatatctgcttataccagttatgcttttgataatagttatgtaaacttaaaaattagcacataatccatgaattatgaggatgaaaagagagatgtttctaatgaaactgaatgcattggaaagactgaatgaatgcaagacatttaaaaacatgtttatttggtgtggacaagatcattctctaagtttggagaaaaaaatatgaaaaacaaaaaacattctcttctaaatacaggttatttgaaaaaaattagctagttatttatcttaaaaaaatggagactggaaatcatagaatttagttgcataaaagagaaacctaagccactacaaaaagatgatggggaactaaaatctgcctaatctaagtaatggctgtggctatgcatcccaagattgtaaataaatatattttccatgtataaaattaaaataaaatgtttaagatgtaaa

SEQ ID NO: 508696 - DNA, 191 bp, Homo sapiens
ttcttttcgtcctccattattgttggtttccccattactcccactgtatttccccctcgcttatccctcgcgttccccctcctatggtctctgatctgtccttcgttggcttcctgtgaccgtgttctgccgaattcctcgtccttcctcccctcgcccctcatcctgtctttctcgcgtctctacgtctc

SEQ ID NO: 508697 - DNA, 522 bp, Homo sapiens
ttgctgatgatttgctagtattttgttgaggatttttgcatcaatattcatcggaataatggtctgaagtttctattttttgtggtgtctttgtctggctttggaatcagggtaagctggcctcatggaatgagcttggaaatgttccctcctcttcatttttttggaagagtttcaggaggattggcgataattcttctttaaatgtttggtagcattctccgatgaagccatctggtcctgggcttttctgtgttgggaggtttttgattactgattcaatctctctcattattggtctgatcagactttccatttcttcatgattcaatcttggtaggttgtgtgtttcctctagaaattggtccatttcttctaggttattaaatttgtaggcatacaattcttcataatattctcttataatcctttttatctctgtcgtattggtagtaatgttccctctttcatttctgattgtagttattgaatgttcttttttttcttaatctagctaaggat

SEQ ID NO: 508698 - DNA, 139 bp, Homo sapiens
ggcagtatacagcgtattatacaagcatatttaatgctgagtttaactaatatgtttacatatggtaattgtagggtaatacccacaacaactgtagttgcttacttggccaagagtatgcttatttacagtgttagac

SEQ ID NO: 508699 - DNA, 867 bp, Homo sapiens
  misc_feature (860)..(860): n is a, c, g, or t
aaatttcgtgcattttgtttcccaccggttaaaagggggctagttacagtgtccaccctataaggtttttagggccaaaggagttccaggatgtgaaccccttagattcgcccagccaggtggccaccccttatacccccggtcgggggggggcttaacccgggttttttgacccaggctcggtgagaccctgtctctaaacatttttttttttttaattagctgggcatgatggtgcatgcctgtggttccggctactcgggaggctgagatgggtgaatcgcttaagcctgggaggtggaggatgcagtgagccgtgatcatgccactgcactccagcctggtagacagagccagaccttgtctcaaaaaaacaaacaaacaaacaaacaaacaaacaaacaaagaatgatgatgacacatggagccactatataaacgtttgctcttcttattagtggttaaaatgtctgaagtcaagtataggtttaaatccttgttttaccacatactggctatatgaccctgggcaagtatttaatctctctattaaaaaggtaacggttgcaccaactttctgtggttttcagaagattaaatgagacaaagtccataaattgcctagcatgctgcctgatcttaggcagcaaatggtggtgatgacaattagatgacagcaggtcagttctggaatgggaggccctcacccagctcctacagtgaaacgtacagcctgggctgctgctgctttgcaagccccaggtttttcaggtgtagcctccccggggggtccacaattaccagctgaatctactttgttttcaggaaccttggacttatgatgggtcaacttggccctnaaaagct

SEQ ID NO: 508700 - DNA, 730 bp, Homo sapiens
taattttttgtatttttagtagagacggggtttcaccgttttagccgggatggtctcgatcacctgacctcgtgatccgcccgcctcggctcccaaagtgcccttctttcttttaagtctgtttgcttaggtctttcttttgaggtcttcttactctatacgtaaaactgcaaccctaccccacacagccataccctacaagattccatttctccctctattctctatttttttccttggcatttatcactgtagagcattctatacatttgtttatttatcttctttattgtctacattgcccctagagtgttagtttcccaagggaacagatttgctttcatctattttgttcactggtattaccccaatacctggaatagtctctgaaacaaaccaagtgttttctatatatttaataaataaaggcctatatatcgtattattctgtttccttaatgtctcatttgccaccaccctcattcagggcactgtgacttctgggctacaggattgatgatgatgatgatgatgattttgagaccgggtctcgctcctgggcccaggcctggagttgcagggggcaatctcagttgatgcaactccactttctaggctcaaagtatctctactcaggaagctgaggccaagatcacttgaacctggaaggcggagttggcggaacctggattgttccctggctcccacctggggaaaaagagatccggta

SEQ ID NO: 508701 - DNA, 136 bp, Homo sapiens
tccgaatcgagccgttacccacgaccgtttccaacgggcgtgctgcatgtggttgaacggcgttactcactgggcgtcaagagggccgagctatgatcgagattttgcaacagtattggcagtcgctgctgtggag

SEQ ID NO: 508702 - DNA, 341 bp, Homo sapiens
ctcggacctctccctacgtatctagaagtttgtttttttgagacaggtcctctctgttgcccaggctggagtgcagtggtgtgatcacagctcagtgcggtcttgacctcctgagctcaagcagtccttccgcctcggcctctcgagtagctgggaccacagatgcacgccacaacacccgactaatttttgtactttttgtagaaatggggcctcactaggttgcccaggctggtcttgaactcctgggctcaagcaatcctcccacctcggcctcccaaagtgctgggattgcaggcgtgagccaccgcaccccaccatggtaggatacagtagggaga

SEQ ID NO: 508703 - DNA, 726 bp, Homo sapiens
attgtgcctattgccatactagtctttgccgcctgcgaagcaggggtgggcctagccctatagtctcaatctccaacaatatggctagactagtaataacctaaacctactcaagtgctaaaatagtccgtcccaacaattatattactaccagtgacatgatttccaaaaaaaccacatatttgtgatcaacacaaccacccaaagccttaattattagcatcatccctctactattttttaaccaaatcaaaagaaccttattgaggttgtccccaacctttccctcggaccccataaaaaccccttcttaatattaaaattagctgatttccttacccccttcaagaaatcaatggcaaagcccaacgccccacttaatccgagtggaaacccactttaatcacgggaaaaaaaaacaaacacgcaaaaaacaaaaaaactgttgtgggggcgcgctcggccacaagaaaaaatttttatcaaacacactctggttgggggcggcggcgcccgggatgagataatgctgaacgagcgccgaagaaggtcgccaaggagaaccggggcaagacaatagggggggcttcccaccaaaaaaacggcggggacaacggggtttggacaaccagggagtggggacctcggacactacagggggccagagcgaatatgcccgccggggtaaacaaagaaaggagagaaacgggagaagaggagacagcg

SEQ ID NO: 508704 - DNA, 983 bp, Homo sapiens
atttctagcaggtatcagctcctagcagcttatgaacacatatgcttgctatggccaggcaaggtggtgtgtgcctgtaatcccagcactttgggaggccaaggcatggtggatcacttgcagtcaggagttcaagaccagcctgtccaacgtggtgacaaccccatctctactaaaaatacaaaaattagccaggggtggtggtgcacgtctgtaatcccagctactcaggaggctgaggcaggagaatcacttgaacccgggaggtggcacggttgcaatgagccaatatgacaccgctgcagtccagcctgggccatagagtgagactctgtctcacacaaaggaaagaacaaataggctgggcacagtgactcatgcctgtaatcccaacacctttgcggaggccgagtgccggtggatcacgaggtcaggagttcaagaccagcctggccaagcactggtacacaacctcgtctctactaaaaatacaaaacattagccaggtgctgcgtgcgcaggctccctgtaatcccagctactcaggacgctgacgcagaagaattgcttgacacccaaggaggcacagttcgcagtgagccaccatcacaccactgcaactccagcttggaccacagaagcgagaactcctgtcttccacaatcataggcccggcattggtggtcaacgccaggtatcccagcacactgggcaggccgactcgggagatcccacggtccggaacgtacgacacagcccgaccgaccaccttgctgacgctccgcgtgttaagacccacacttagccagggccgtcgagccggcccggttccccatgatccccaccgcttgtgcccagcaaccgctgtcaccagggccaccggcgcccgcgcctaactccccgcgccttccgtgcgcacaccgcacttgctcagcgacaacaaacttgactcatattcccccgccaccaacgcccaccacagg

SEQ ID NO: 508705 - DNA, 590 bp, Homo sapiens
gagagagagagagagagagagagagagagagagagagagagagagcgctagtgacagacacgctcctctgtcacttttagtcagttacaccaagagttatctttctatggtagggtcctgctgtacctctgcaagcccaactgtatgctttttgaaagagagactccagcttaaacatttatcacttctcaccactctgtcaaatagagtctgctcacaatatgctgcttatggggagaagaaatcaaggctcagcaatctcataaagttagcccataacatcctctccaaatgctgtgagtgtgcctctgaagattgcatggccaaagagctgcctgaacacacagtttaactctgtgacaatttatccacaaagaactctaagtttgaagactggtgccaagaacaaacagccatggacgtttttgggtgcacttacttcatgccagctgcccaacttcccgagcttccaaatgtacagttggccacaaacaaagattggtgggatccacgatacaccgtcatggataagtatacattcggctacgcggacgggcttatcttccggaggtttcctccgtcggtccttc

SEQ ID NO: 508706 - DNA, 336 bp, Homo sapiens
ggcacgagcgcccagtgcagagtacctagaatagccacaacagttctgaaaaagaacaaacttggaagacttaagctgccttacttcgagacttgatataaatctactataatcaagagagtatagtattggcataagaataaatacatagccgggcatggtggctcacgcctgtgatcccagcactttgggaggccaaggtgggcagatcgcctgaggtcaggagttcgagaccagtccgaccaacatggagaaaccccgtctctactacaaatacattaattagcctggcatagtggccgctgcctgcaatcccagctacttgtggcgctcgtg

SEQ ID NO: 508707 - DNA, 425 bp, Homo sapiens
ctgtctgtgtgtgactcgtggtgtttgggccgtgtagcgtgtgctgttctgtgtgtagctctctgctagtgtgatggcggccgctgtttgcgggtgctgttctgtgtcttagctttgtggtgctcgtgccgtgtagcggatgctgaggagtattcgatgttcgtgcttgctcggtgcccgtgtccctgagctcaagttctgtagtctaaactacataatgctcgctatatgcatccgccgtagggcaccgtgatagtaaactactatcatgctggtggcttataaccagatgaagttcatgtgtcgtgagcgttacggatgactagaaactctgaaatcaaggatgcagtagggacaggctcccctcaagatctggtggggaggagccttccttgttcttcccagcttttggtggctccaggtgt

SEQ ID NO: 508708 - DNA, 393 bp, Homo sapiens
aggttcctggtctcccgagttcagaggtcacggtgggggcggaagccagcatggcctgggtaaagagacgcgagcagggagaggcaacaggcgtcccctctggaagcagactttggaggagagtggacatggagggtcaagtgtttacccatctgaattagaggctccaatgggaaaaggattcgtgccagtgagggctatggagatggtacgctcagaaagccaccaagctcatgtccgagtggtgtcttttcaggtggacagtgttgctgagggggcgcaggaaggaatgttctgaggagcgccctaattgttcagagcagcccctgaagccgtcaagccagagtgtgcctgggcagccttgggccccgcgccttagatcacacagccctg

SEQ ID NO: 508709 - DNA, 274 bp, Homo sapiens
acccattaaagtgtgagaataggtgagatcgtccggggggagacctctacatcactacgctggagcggataacactgcgtgggggagggtgcgtcggagtctgcgagagcgccagttatcctgagggaaacttcggagggaaccagatagtagatggttcgataagtctttcgcccctatacccaggtcggacgaccgattggcacgtcgaggactcgctacggacctccaccaggagttgcctctggcttcgcccggggcacacatgatggag

SEQ ID NO: 508710 - DNA, 199 bp, Homo sapiens
aaaaaattcccccgggggacctttaacccccggggccgttttcccctttgccctttttaaaagacccccccggggttgggggggggggccggcccccccccccgggggaaaaatttagttttgccccgttcgggtttccgaaaatgggggttttttcttttggccgggggttttttttttttaaagctccccccgccca

SEQ ID NO: 508711 - DNA, 193 bp, Homo sapiens
gtaaatcaacttatagagaataaagtctcttcaactttgtactgttctctatccaggatgatgagtcaacaggtttcactaataaatgtcatgctgtagcatgtgtaagatttgtaaatgatgaaattcaaagaaaactttttctatggctaggagcctgccagaacaaaggccaatatataatgttgtgaca

SEQ ID NO: 508712 - DNA, 160 bp, Homo sapiens
aggatcccctctctccacactgggagataatatattaatttaatgatcattatatatgtgggggttaatatgtagttttgctgtccctttaaagtctttacatgtaatgtagctgaataatcgttatttttcttttgcatcttaagtcttagaaattaag

SEQ ID NO: 508713 - DNA, 903 bp, Homo sapiens
acgccgtgtgcagctggggtgggcccgtgagtgccctggtggccctgggatggggaaccgctggtggcttccgctggaggtttctggcagtggcattctggtggcctggggtctgcgtgcctgtggactgtgtggccggggccgaggccgcggagctctgctggaggcaaggccgaggataaggagtggattgcccgtcaccaagttgggccgcttggtcgaaaggacattgaagatcaagtcccatggaggagatctaatcgtcttctccattgcccattaagggaatcgagagatcaattgcatttcttcctgggggccttctctcaaggattgagggtattggacagattatgccatgtgcaagaaggcagaccctgtgccggccagctgcaccatggttcaatgtgcatattgtctgctatcgagggactacaagtgcgccactgtcggtctggggtgtataacgtgctccatacggacgcgttggccactcgtggccaattccgtgtgaggcccatcatccttgtgccaaagctcttccattcgtaccccagttgctgcatgagggcatactggcggaggaaacaacgatcgggcaaatgccccctcacgtgtccctttgcaacggttgacatgcgcctgtctgcggactcatgatgcttgggtactcccttcattcccttgcacccatggggggccactgtgcattcggtcttccgcaaccttttgcccttaagcaacagccttggttccacttgctcgcgctgggttattccgactgaacctggttactaccttcaggccccggggcgcttagcacttggccgaccccttgggcggcaaactttcgggccattgggccccagctatttgcattgcccattttctaaaggaccctta

SEQ ID NO: 508714 - DNA, 248 bp, Homo sapiens
  misc_feature (38)..(39): n is a, c, g, or t
  misc_feature (216)..(216): n is a, c, g, or t
aagtgatactcctgccccaatctcccaggtagctgggnntacaggtgcacaccaccacagctggctgatttttaaattttctgtagagacaggggtctcgctatgttgctcaagctggtctcgaactcctggtctcaagtgatctctagcctcagcctcccaaagtgctgggactacaggcatgagccaccatgcctgaccttttatatgattctnatgaggattaaatgagtgaacatttatataaa

SEQ ID NO: 508715 - DNA, 488 bp, Homo sapiens
  misc_feature (77)..(77): n is a, c, g, or t
  misc_feature (446)..(447): n is a, c, g, or t
ctgagacaacaagaacaatccctcctcttcctcctcctcctcagcctactcagtgtgaagacgatgacgatgaagantttcatgatgatccacttctatttaataaatagtaaatatattttctcttccttatgattttcttagagtttcttttctctagcttactttgtgtgacaatgtagtatataatacatataacatacgaaatacgtgtttttgtttttgtttttgttttttgagatggagtttcgctcttgttgcctaggctggagtgcaatggtatgatctcagctcattgcaacctccgcctcctgagttcaagcgattctcctgcctcagcctcccaagtagctgggattacaggtgcccgccaccacacccagcaaattttttgtatttttattagagatgaggttgagaccttgtctagaaaagaaaagaaaaannaagagggggaaggaggtgaggggagggagacgagggaaggg

SEQ ID NO: 508716 - DNA, 304 bp, Homo sapiens
gagccattgaagggtatgcttccaaggatcagagatagaacttctggcactgatctataggacactggtgtcatctgcatataaaaaaagagaaatgtgcatgttgtccctcatcttttccagtgaaagagtgctgagctgctctaatcctatgtgtggggagggaggagtgcctgtgtagatggatgcaaggacatacaatgtatagccgatgtcggctctccttgtcttccatcccgctcgtgttatatcgaagagcacaatggaggagaatgtagagccgagagacagggtagagcccgag

SEQ ID NO: 508717 - DNA, 93 bp, Homo sapiens
ggtcggtctctgcgttcaacacgttgtggacggaacagatccggggactctgctgccacccttccgaccgccctccgatttccctctcgcggc

SEQ ID NO: 508718 - DNA, 316 bp, Homo sapiens
  misc_feature (34)..(34): n is a, c, g, or t
  misc_feature (44)..(44): n is a, c, g, or t
  misc_feature (92)..(92): n is a, c, g, or t
  misc_feature (183)..(183): n is a, c, g, or t
  misc_feature (297)..(297): n is a, c, g, or t
agttacaaaatagacatttttaaagtttttcaantccttgttantctttaaagctctaaattttaaaaatttcatttggccaggcaacttgngtacgcctgtagtcccagcactttgggaggctgaggcagaaggatcactggaggccaggagtttgggaccagcctggcaacatggtgagantccatctctacaaaatcaggaaaaaaattagctgggcatggtgatgcatgcgtgtagtcccagcttgggcccagggagtcaaaggctgtagtgagctatgaatgtgtcactggntccaccttaggcagtagag

SEQ ID NO: 508719 - DNA, 635 bp, Homo sapiens
agcggttcaagactagcctggccaacatggtgacatggtaaaaccctgtctctactaaaaatacaaaagttagccagggctgggcacagtagctcatgcctgtaattctagcactttgagaggctgaggtgggtgaaccacttgaggtcaggagtttgagaccagcctggccaacatggtgaaaccccacctctactaaaaatacaaaaattagtcaggtgtggtggtgcatgcctgtagtcccagctatttgggaggctgaggcaggggaattacttgaacccaggaggtggaggttacagtgagccaagatcgagccactgcaccccagcctgggctacggagcgagactccatctcaaaaaaaaaaaaaaaaagttagccaagcgtggtggcacacaccggtaatcccagctattcaggaggctgaggcacaaaaaagggtttgaacccaggaggtgaaggttgcagtgagccaagatcgtaccactggcactccttgcccgggcaacagagcgagatgtctcaaaaataaataattaagataaataaaccggccaatagcttctatgacccaaagatgagatgcccctgggcacctctaaaatctcctacaagctgatgtacctatgagaa

SEQ ID NO: 508720 - DNA, 410 bp, Homo sapiens
  misc_feature (45)..(45): n is a, c, g, or t
  misc_feature (63)..(63): n is a, c, g, or t
  misc_feature (164)..(164): n is a, c, g, or t
  misc_feature (192)..(192): n is a, c, g, or t
  misc_feature (201)..(201): n is a, c, g, or t
  misc_feature (214)..(214): n is a, c, g, or t
  misc_feature (239)..(239): n is a, c, g, or t
  misc_feature (261)..(261): n is a, c, g, or t
  misc_feature (271)..(271): n is a, c, g, or t
  misc_feature (324)..(324): n is a, c, g, or t
  misc_feature (371)..(371): n is a, c, g, or t
  misc_feature (380)..(380): n is a, c, g, or t
  misc_feature (385)..(385): n is a, c, g, or t
  misc_feature (393)..(393): n is a, c, g, or t
  misc_feature (395)..(396): n is a, c, g, or t
  misc_feature (407)..(407): n is a, c, g, or t
tctccccgcccgtgtcccgcccgacccgcgcccggattgctggcnttgcgctgcggctcccgntggctcggctgctctccgtcccgcgctccgtgcctgctgcgcctccccgcggcccggcctgcagcaagggctccggcgacccgtcctcttcatcctcctcngggaacccgctcgtgtacctggacgtgnacgccaacnggaagccgctcgncgcgtggtgctggagctgaaggcanatgtcgtcccaaatacaagctnagaacttcanaagccctgtgcactggtgagaaagggcttcggctacaaaaggctccaccttcnacagggtgatcccttccttcatgtgccaggcgggcgacttcaacaancacaatggnacagnccgtgaantnnatctacggaanccg

SEQ ID NO: 508721 - DNA, 347 bp, Homo sapiens
gctgtttgagagctggaggaaacagacaggaatacagcatgctcttgaggaattcaagagtgagctggtgccagtttctgtggctcacgtcagtaatcccaacactttggaaggccaaggtaggaggatcacttgtgtctaggagttcaagaccagcctgggcaacatagggagaccccatcttcacaaaaaaaaacaaaaaattagccaggcctgggggtgtgcacctgcagtcccagttaggaggctgaagcgggaggatagcttaagcccgggaggtcgaggttgcagtgagccatgatcacgccactgcactcaacccaggcaacagagcgagactccatctc

SEQ ID NO: 508722 - DNA, 297 bp, Homo sapiens
  misc_feature (105)..(105): n is a, c, g, or t
  misc_feature (118)..(119): n is a, c, g, or t
cattatcctcctgcttgcactatagcaacagccttcataggctatgtcccccgtgaggccaaatataatatgaggggccacagtatttacaaacttactatccgncgtcccatacacnngggcccgagactctagttcaatgaatctgaggaggctactcagtagacagtcccaccctcacacgattctttacctttcacttcatcttgcccttcattattgcagccctagcagcactccacctcctatttttgcacgaaacgggatcaaacaaccccctaggaatcacctcccatt

SEQ ID NO: 508723 - DNA, 469 bp, Homo sapiens
gccgtccctccccagccttccccgtgagcggacgcggagcgcctctgtctcgcttttgcttatttttcccccctttcccctttcttttttttggtctttgttgttgtttcatccccgcatcgcccgccacatgatcaccaattgttcacccttagaaagggagaatatcccagagtgaagggggaaggaggacgaacactcaaacaaaacgcgtgggaagagataaaattagaccgtactaagggcaaacaagtggaacaggaatgtgcgacaacaatacccacaaggagcaaacaccaataagagtacacccaaagagagaaaacaagtgtagaaaaagaacatagaaacaaaaccggtgtaacagaggtgacaacgcgagcaacgaagcgtccccacgtcgcccagacacaaaacaggagcacaacaaagaaacacacacttagcaagaaaaaaataacagccaaga

SEQ ID NO: 508724 - DNA, 176 bp, Homo sapiens
aagccaagttacacatacccttctactctcttactatccaacaagtatatcgtcatccttccctcgtctttcccactcgggatttactgtaaaccccctttctacctccaccactgaaaacactactgccacaggcgagcttgcctgctcactctaccgcagactaaccatcctca

SEQ ID NO: 508725 - DNA, 181 bp, Homo sapiens
tgtagttgtccgggttatcaggcattggtaggagatcggcgggttccagtgctgcttcgataggaaataagcgggcttgctaaggttaggaaaataagcaaccaccccaaactagtatgctcttttgaaaggagcatgagaactcaaatcaagattacgaactacctctcaagattgaact

SEQ ID NO: 508726 - DNA, 1019 bp, Homo sapiens
atagaaatacacatggtggtcaggcatggtggctcatgcctatggtcccagcactttgggaggctgaggtgggaggattgcttgagcccaggagtttgagaccagcctgggcaacatggcaagacctctgactctataaaaaaatttttttttttttttttttttggaaaaagcgttcttcacattcttctgtgtcacccagggtagagtaggtgtgactctggggcgttattaacaacattccgccctcccgggtttcaaggagatttctccgtgccttagcctcctaagctagcgtgggatttgtgggcacgttgccaccagtgccgtggacttattttgtggattttttaggttagaagacgagttttcaccatgggtttggccaggcgtggtctggaacttccgtgacctcaagtgatgtaagcctgccttcaaccctcccaagtggtgctgggacttacgggggttgagccaccgcgctgtggcccaaaattttggtttttcaactatcggcgtgggttccccatgtgatggggcccctgttgctctcacgctgttcgggcagggctgcgcggtgggcagccctcgttggaagccccgggagtttagaggctgacgtgagctgtgcttgggtcccagtgcccttgggccgtgggcatctgagcgatgacccgtgttgacaatcatggcacccaatgacaacaacctcccggcaggggtcttcgggggcagagcgcacccgacctcgcaggagggccacgcaaccctgggactgtgtgcgcccgagggccacgggaataggtcctttcaacgccagcgcagctgcgctccccgagaccaccgccgtggtgtgcggcacaaccagtgggaaggggccccacccacgccaagggatcggtacggaggcgccgacaccgcaccggaacggaagccaagacaggactacagtctagagaggtcaccgatagaagaacacagggcttagcacccacggagtaaataggaaaccgacacag

SEQ ID NO: 508727 - DNA, 740 bp, Homo sapiens
tggctagtgtgtcacccggcgccggacttcattgagcggctgctgacagtgcacggggagcccgtatgactgcactgcaggccctgaggcacccgtgggtggtgagcgtggctgcctcttcatccatgaagaagctgcaccgctccttatccacagaacctccttacacggtgcctcctcgcgctgcaagagcaccaaatctgcccagttccacgcgtccagccgctccacacgctccaataagtcacgccgtgtgcgggaacgggagctggggagctcaacctggctaccagcagcaatacaatggctgagccgcctggctgtgcacacatgcagcaggaaccagacctggcccacacactgtgtgtgccatctgggtcctgatgccctctctggagatagggctatgtggacccacagtacggtgaataatgtctggctccatccctttctctgtgccttcatcagcccctgttctcaccatgggcctgggccaggtgtgacagagtaccaggtagcacgatgggggctgtgactccccctgaactgggagcctggtctggcactgatatcccctcttggtgggcacgctgctctggtggagtcgggacagggagtaggacctggccttcagctgtctccccttgccctttgacttgtccccgtatcaaacgggaatctgcgtgctgggtggagtgttctgtggcctcaggaccctttgggaccgtacttcttggacc

SEQ ID NO: 508728 - DNA, 805 bp, Homo sapiens
  misc_feature (61)..(61): n is a, c, g, or t
  misc_feature (125)..(125): n is a, c, g, or t
  misc_feature (207)..(207): n is a, c, g, or t
aataccagaaaacaaaattcaaaaggtaggcaaaaaaaacaaaggaagctggatggaaaangcaaagtctcaagcgcgtggaccggggaagcagagccaagaataattaccatttcttccagagngagccaaccacagacaaggggaaggacaagcaagagccgacagcagaccggagcgggggccacgacagagcagcagacgacnacgacgacaacaaccaaccgacacagaacaccaacgcggaggcccaggagagcaagccggattgttatcatcttgacttcatttggggcctggatgcctctttggaggctttataataaaattatgaatctaatgaggaaatatcagttaaagctggacttgagctgtgtaccaccaagttaatgattatgtcattgtgaaaatgtgattgcttcaattcatagtaaacacttgttttttctttcccagggctattagtgtttgatatttcaagaaaatgataactttgatgatgcccagttcactctagtataaattagcaaacatactaccgattttttctttaataaaagctggaattaagaagccaatggctcagccataaaattgaactataaaagtcttttaaatatcaatgatgagaaaaaaggatattatatcctcactgtgtagaaatttaaaatattcgacttttgaccattatatcgaaaaattttttgatgtgttgtaattcgacaaatgggtctactatggggaaaccagcacttaactatagaaagaaatatagaacaaaagtatatagccagcccaaaataac

SEQ ID NO: 508729 - DNA, 339 bp, Homo sapiens
atgttatcctcctcctgctcagcctgcggcttcttattctcttcccgtgaaccttctctttccgtggtgtgtccttatataggtagggtctctgcaaactttttagcatacaactgggccatcttctcacaacagtttcacttcgcccaagacagcccggaactggggctggttattgcaggtgaggaaccagcggttggtattgggacacaggctggcggaaagaagggtctagaacctgcttatagagcccacaacagggtgcagacaatttgtgaatgtcaggccaatgtcactcgttcgcccaccataaaagtcctcgtcttcaagtcagcatcc

SEQ ID NO: 508730 - DNA, 872 bp, Homo sapiens
  misc_feature (80)..(81): n is a, c, g, or t
agcggaacaccctcaggacctggtatagacgcagaatctgtttcacacaacaactgctatttgaaggaaaaaaaaaaaannaagcaaatgatgcggggaacaacgcttcaatacccgagtactcccactcaagaagatgtttgctacggattgaaaacaatacacggtgagattgagttcaaaaacccggcccaaggcagggctcccaagactcttcgaataaaccaaaaagatacttccgaaacactctaagcctatacactggtgtgcccgccaggtcaaccttccttcaatttccaagagggcacactaggggactcggaaatccacgccatctcgtgtaagagcggaggcttccactaccaagaaagggaaacagggacggacgggcaccgtgccagcgccccggcccaaacgaaccagattggcacacaggggcaagagtcaggcccacccccaaacggaagcacgaggacccagcggaaggaactctcaaaagcggccacgtgaaccacgccctcggtctccgtggacaccaattggattgacaaagcgccaaactctacccccctgcgcataacagtcacgggactcacacaatcataatgccgggggcaacaccagccgggtgaactggggacacacgcgcggaaggctcacatggtgcccaggggaagggggggccccgggcacgccgactgggagtcacctccggacagaggcaccccagagggcgtcaggcacacaactgggcaagcgaaaaacagcggcacgacggaaaccatgccagagcaccagtacatcaaccgacaaacggtcatcccagaaggcggacacaagcgcgcacccagcacggacaaacaaacaacctc

SEQ ID NO: 508731 - DNA, 486 bp, Homo sapiens
  misc_feature (208)..(208): n is a, c, g, or t
tgtgtgggtagagggcacactgacatgactgggtcattgtcacggctgctgaggacaggactgactcgaggcccattatcacatctaccccgacaggttagcacaggtacattcccaggtatagacttggacttctggacaactcatcttaggcgctggaatccacttggaaggacatcacaagttagagtggtcagcgagagtcatntaccaagcagcgggcattacgccgttcggtcatgatcttagagcagatctcatgcaggctggtggcgatgttcttggcaggtgcctcacagcgaaacacgtggcacttgagcatctgggtcagcttatcacgagctacgtaggcaaagtcccttccactgtcccgcccgacgccccacacgcggatgctgatgatgggttgggcgtgcagcagtgcctggctctgtggctccactagctttagtgtctcatcctccagctgcagtagcagatccgttc

SEQ ID NO: 508732 - DNA, 744 bp, Homo sapiens
ggcagcacgggggctccgcagaggcgccacgcaccagtgtccataagcatccttgcttcctcctgtgaaaccgcggcgccaggtgtgagctgcgcgctccagcgtcatacgccaccgacccgtccgggcccgctgcacatcgatttcattcatttcgttccacaaatcgccgctccactcattagctgtggaaccttggggaacgttacctaatctttttccgaagcctcggttatcctccatatctgttctttctgtaaagataaagatagataggctgggcgcggtggaacacgcccgtaatcccaacacttatgggaggctgcggccaagaggttcgctataagccaagggagtaacgaggccagcctgggcaaacaaagcaagacctcatctactacaaaaaaatgcaaaaaactaaccgggcgtggaggcatgcggacgggaagataacttaacgcccgagaagtcggggcacgcacgagagatcgtagatcacgaccaatgcacaacaccctgagcgacagggcaagaactgcctacaaaactactactaggctggcgagcggtggatcacgcctgtaatccccagcacttgggaaggccgaggtgggcggatcacgaggtcagagatcgagaccatctggcaacatggtgaaccccggtacactaaaatcagatagctgcgtgtgcgggcgcctgttccgtgtgggactctgcagcgaatactgaccgagcagagtg

SEQ ID NO: 508733 - DNA, 321 bp, Homo sapiens
tgtttaaggatacttcctggggtggcccccatggcaccatcttgccgcaggtggctgggtctgctgtcactgagtagacctggcctgcattttctctacatgtgcatgtctgtgttacacgccctcgccaccgccagcctttagcagggggcacgtctcccaggagcagtgctgatgtggtccccttggtggggtggccagggcacaaagaccggctgccgtgtcatgctgccctctggcgtgcccagcctgtgtgggctttggcccaggcactgtcctgccagttgttggctccagggtgtacaacccttctgctggtgc

SEQ ID NO: 508734 - DNA, 442 bp, Homo sapiens
tgcagagaggagcacctctttggtctaacttacttcccaccacgatcaccttttccttcagaatgtctatgagcagctttcggtggctgtccttctggtagagggttgcgtgcaaaaggatcgcacctccgatgatatggttgatgaatctgtccacagagaagagtatttctcggagctctcgtcggttctctacagtgttttccaccctgatcctccgcagtcggtcccccatggtccccacccattgatctgcagtcagcatcccctttccattggcaacaacgctctgggcaatttatgagagccccttaatctgcccttgggtcacagcttgaaatcgttgggccatggttacaggtatttgcccaaaaacctctctctctagatgtccaaggctgtgtgatagtcaacgctctaatctcgtgcagaattcgtacac

SEQ ID NO: 508735 - DNA, 113 bp, Homo sapiens
acgagatttaagcttacagtgagactgaatgataatcggtggcacagatgtgcattaagttccttccgatgttcaggatgctgtacttagtgctgattgcggtaaaggagtga

SEQ ID NO: 508736 - DNA, 634 bp, Homo sapiens
ggccgtgttgccgggggcgtcttccctgcggtgcttttttaggggggttcctcccccatatggcctggccaggttccccgcccgccttcttttgtgtgaccgtgttttgaacggggcgacactgtgtcgaagagaccccaaggggccgtggctccaggttctgtcaagacgggttgggttgcgcccccgttgtcgcgcgcgtcgcggtgagacatttcctggtgcgcccactagagcccgcgcactgctccatttccaccactctgtgctatatctatcattctgcctcctgcaccgaggaaaggcaaaaaaagccgttcacacacgttgggtgcgagagtcagagaaaacaatggggagggtcaaaaaaaatgtgtggtggtgggacgcaccaccccgtgataatttcttagtcagggttaacacacccaccacgtcgcgacgcacacaggggtactcctcccgccgagctgttaatcccctggattattatctactggttctccccattttttattcttttgtctctcacacatgcgatctttgtatatctgtattggagaatcccccatatttcttctttatatatacgcccaaacataaaaagttttcaaacccaccaaaatcaaaacaa

SEQ ID NO: 508737 - DNA, 508 bp, Homo sapiens
tgcatagcaattaaaggtgtgctattggtcagtagccattttttggcagtgattggaagaccaaagtggttttacagctgtgttaccgttaaaggtttcttttttttatgtattaaatcaatttatcactgtttaaagcttggaatatctggcaatcttggccaaggtacttttttatttaaaaaaaaacataacttggtaaatattacccgggtaatattatatatagcttaattaaaaccattttaagctcaaaagaagaaaaaagaagaaaaagaaaaaaaaaaagtgtgtgtggggcgcggcttgggagcccttgggagagagagtttttagagaagacacaattgcgggtgtgggcgagcgcgggggccccccacaaggagaggcaaaggcgagaacagcagtggggccaaagagcggggtgtacccgagggagaacacgcgggggcacaaggacacaagagggggcgggggaatttcaccacccaataaaaaaaagaggccg

SEQ ID NO: 508738 - DNA, 263 bp, Homo sapiens
gctaacccacgcatgatgagggaactgggaacggaacttggaaagacctagagaagagaagctgataaaaggagtcgcagctctgtagatgctccaattctgcatccagtccatctaattgattaaaacacggcagagtgcatgtagagttccccgttataggggagggcctcaggtttcaggaatatactgttagagcatcacgggtgaaattgtagcccccaggagtcccaggtaccacggcgtgaataagctacatcatg

SEQ ID NO: 508739 - DNA, 105 bp, Homo sapiens
tagactttcttcctttgttcataagctagtatctggttagtagatgcctaggaatagctagcagttattttcgctaccccgcctgagaatgaaattatctatgta

SEQ ID NO: 508740 - DNA, 1426 bp, Homo sapiens
gcctttccgtctggctggtcagccatcaggtaagccaagatggcgtgcatacaagtacatccaggacgctactggataaagaagcagtctgattgtcatgcgcattttcttctagagtggtccagcatggcgtggcaagtacgcgccagactctctgcattcgtccatcatggagctccccgtgctcgcacctcgtgacctgaaatagtacgtcgcgcctgacctggtgtctcaccacagggcccagaggtcacacgggttatcgattaatacagtatgcgatgtctgtggtttctggccgttggtagtgcactgaaatagagctggctccaagtgacctacggtggttgactagcttatcgggcggaggcctgtcccagtcagtggttggttagagcacaagttaagagtattagctcccgtaaatttcccatacaggctactcagattggacacgtagtggatgcccgtagccttggtacggcctctacatgttgggggagcttcttgggatgaagcttccttgaaaattctgtttgaacttcgcgagtttgcgttggagaagaattatcgctactatcaccaatgaatgtataaaccaggaggggtttgactacccattcactattgtaatttcccctatttccacactttatagacggcctcacttccacggtaaaaagggcaatagttcccatagggaacgacggccccattgttagcggtaatccaacgccgatataaatcctatgttaacaaacgcaaatgcctactaagcgtggcatgaatggcgcggtagggtgcgtttggaacaacttttttgccgttcgcccctcggagaaagagggaacgctccagggttggcgcccttattggcgggacaacagtgggccccaaccgaaaggcttttctcgacccgagaaaggttcaattggaggggttggcggcttaccttcctggacccgaggtgactaaggtctgttgttgcccacatgagaaaagcgtctgcccaatatagtcttccttccccaagcgacgtacacatctcggatgttaacgcaaggcttgggagttttattaacacgtttcaacaagttttgttgggagcaccaaggttttcgcattacggtttggaaatttaaccaatcggacactattttgtacggggtaccatgggaacgcgagcgaaacacggccatcacagctaaacacatgagcaggacaaacaccacaaacggtgcaatttgttctggcgcgactggcgtgtcagcggaccccactcccggagaagggacgcttttttccaacacaagacctgtgtaccagtgtgtgtgcggcccagcagacgccccctattaagataacaagtccctgaccacgcttgtggtcccacttggccgaagtatctcgtgagagagaggtgtcc

SEQ ID NO: 508741 - DNA, 103 bp, Homo sapiens
  misc_feature (73)..(73): n is a, c, g, or t
ccggaaacagtagatgctattgaggagtatcctgaggcatgggggtcagggttgaggtcttggtgagtgtgtnagtggggttagcgatggaggtaggatggtg

SEQ ID NO: 508742 - DNA, 410 bp, Homo sapiens
  misc_feature (114)..(114): n is a, c, g, or t
tgctgtgtgtattcaagtcgcagagttgaacattccctttggtagagccgtttggaaacacacttttggtagaatctgcaaggggagatttggactgctttgaagcctatgcangtagaggaaatcactgcccataagaactagacagtagcattctcaggaaacactttctgacgattgagttcaactcacagagctgaacattcctttggatggagcagtttcgaaacccacttttcgtaggatctgcaagtggatatttggacttctctaaggatttcgttggaaacgggataaacctcacctaactaaacagaagcattgccaggaaattcttcgtgatgttggcattcaacttagagagttgaaccgtcccttgtgagttcaggttgaaactttgtcgacgcggc

SEQ ID NO: 508743 - DNA, 127 bp, Homo sapiens
ccaccaccatcttggcaagcccacctgcaccagctgggagaacgctgccctggtattttaggtcagggtcaggtagaccccagagagaagggggagaaagaaaaatctttgttttgcccattctcct

SEQ ID NO: 508744 - DNA, 179 bp, Homo sapiens
  misc_feature (15)..(15): n is a, c, g, or t
agggttaagacccancctataaaatgtaaaaaaaaagttttagagttctgttttccacccttgctagtggtttagttaactttagctgctttaaatttgaaaagcttttatttagatcttgccccctttccaggccattcttaggatgtatgtagtaaaaaaagctttctttaaagcca

SEQ ID NO: 508745 - DNA, 172 bp, Homo sapiens
gcgcattagctgcgttcattcagaccgctgacgacctggctatgcagggctcaatcgcagtctcgaccgaccaattttatgtgcggaaggggcgattttttccagcaatcgcaaggtatctcgttagcgtcgacgatgtcagtgtgcgatcgtctagacgcttcaagccata

SEQ ID NO: 508746 - DNA, 935 bp, Homo sapiens
catcttcctgcggcgagcagagcctgggtggctctgagtctccaggcccagccccttgctcaccagtgactttctagcatcccccgcctccagccctgtgcctgactggacctacccctgcagatggatgcctggatgatgcttgtgaatgacaactataccaggtgatcattggcctgatggtgtggccaatgaatgtgttctgtcttgtgtgccaaatggaggtgatgcttgggtgaatcttgacgtagacgtgtgcattctcctgagtgtgcactggcatgcgacctcagatgcgtgcttttgcgtgcatgtgatgcgtcctggtgatgctgagatggttgcggcatttagacgcatgttggcgtgtgaacttggcttcacaatgtcacccccttaagaaaacctcacaaccttgcccccttatgtcgtgagtgacgtgacgtgcctaatcgaggacgcctttccagccattgttccaccacagtggagactagcccaccatggggcacactcattgtagccctcagaggcaaatgtcgccgtataatagcagtcgagtgatcgctccaatagaccaatcggctattgccacataagtgcgcctagcgagctccgccattatctacacgatatggggccacatccccgattttcgaacgttggaggcgcatttggcgtttgccttaccctttttattgagcgctcaaacacaccttccttggaaggaaaaacacacatttgcgagatttgagcactggagaagtcattccccgagaatcactagcttagcttacaccagcccattgctcgcagttggcgtattgaacgcatgggtggcgtcttagtgcttggtgggacctcgcacagcgattggtgactcactatggatccaacccaccccgccacaaggaccccaccgattaggaacacag

SEQ ID NO: 508747 - DNA, 394 bp, Homo sapiens
atgagctggaccttcaggctgattgcaggctgagctgtttgggttccctgcatacgactgcttgccagtggctcaagtcaacatgaacagagggatgagccaaatcaacgatacaaagctgtgcttggccttctttgtccttataactcattagggctttttgaataaactctgcacctgagcaccaggtttttatgccattacagtgattgttctggacctgtacaggtgccggccgccatctgctgcccataccgcccaagtttggtcatcgatttcgtcttgatagcccaattcatttaaaatacttaaagcatcatgatgtgactcaaataatttagcgagacttaaatcataccctgcaatttgagcaaacaatcgccatcgctgatag

SEQ ID NO: 508748 - DNA, 135 bp, Homo sapiens
  misc_feature (4)..(4): n is a, c, g, or t
actngatcaccgtgacgccctcgaagtcaccgcactgcattccttggccggacgagggagcgggcgtctcatgacgaggcccccactggctcaaccccatcattcggtgtcgatggcggccatggtcggtggggg

SEQ ID NO: 508749 - DNA, 485 bp, Homo sapiens
ctttgggcagaagaaataatggcctggggatgggaggacacacatttctgctgcacaaagaggggagtcctgatgtgaggaggctgggatctgggctcaggctgaccagcagagaagagttcacctgttggccagccacctccacataacaccccctgttctagttcctctagtggaaccagaacccactggccgtgtcggaggctgattatcaccgtgatgcaggcacaacagatctgaggcctccactcactgagacaatagacccaagaacaacagctctgaggcctccactcactgagacaatagacccaagcacaacagctctgaggcctccactcactgagacaatagacccaaaaacaacagctctgaggcctccactcactgagacaacagacccaagaacaacagctctgaggcctccactcactgagacaatagacccaagcacaacagctctgaggcctccactcactgagaca

SEQ ID NO: 508750 - DNA, 508 bp, Homo sapiens
aaactcaatatggagcatgtaaatggtctttttcatgaagcatcgaccgggggtgtacgtgttccgataaaacttcatcccattattgagtccgtaagacagggtgctctccagggagccccgcatcagttagcagcagagagccaccagtaagaggatgacgttaaagaagacgcagacagccaggcccacataaggacagtggatgaaggaagattcttcttcacctgcttgtacacgcttgccagcacatctgttggaagctacttcttcaggatcccagcttatacagaagggcagctgcaacaccagcctcgtgggacctcgtaggacggagcagcttcccattcacggctgcccaatgttgggttacctggactgcaaaatagactgggaagaaaccccagaggaagtgacatttgagttatacaaaactttgtttggccggtgcacacggacccacccaaactgcggaatctgatggaacagagcccaggaagcttggaag

SEQ ID NO: 508751 - DNA, 1060 bp, Homo sapiens
  misc_feature (145)..(145): n is a, c, g, or t
ccatttgatgcttgaatgcttaggtgggctgactctatgctgctgcgtatccacagctatagctcgtgatggtgttcagtgggagagcaagcgtcgcggcaccgagtctccacgaagtcatgcggatcagtaagtgggagctcanggagtgcctgaggagctgcggtgcgacgtgagccactgtcggaggaatgggcactggcgtgcctgttccactaccgccgcggcgcgttggtgtgacgcctgcgtcagccttcgaaggcaaactcgcacggcacgcagtcgtctccaagcagcagctaggtcctcactctagtctccacgcacggccctagtccaactagagaccgtgttgacctacgttacgagatgaccgtggtacgtttcttgcatggaaaggcttccgcaagacgcgttcacgtgcgcacgtttcaagtgcacgctgtccactcacacgagggatgggtgcgagagttgtagagcgccatggtagggctagaggctgcaaatactgggggtgcgtcgcttcctagcaccagaagaggtgcgcacaattccgtgggatggggaaaagaatcggatgaagagctcgacggaaaacgatagatagtgaacctcctcctggtcctgacttggatcaccattgaagagactaagccatgagtgctttggtgcgcatcacccacgtgcgcaaccagattaatacgagctaactatgccagatcagtgatgggctgtgacccagaatcaggtgcaacggaggtggtgagacgaggattcggctgtaaagttactgagcctcgtgcttcaaggaagaggaggagcgacgcacgtgcaccgtgtagtggatggggaatggatgcggcgaaggagtcgtacgtcagaatgagccattggggtgaggtgagggcgcgtcaaacgtgagttggatgggcctgaattgttgcccctaaatggtcttcgccgtaaggcccatgcgagggggtgcctgggccgtcattgaccccacttttgttcccctcatgggtagggtccgaggtccggggggccgggtatcggg

SEQ ID NO: 508752 - DNA, 131 bp, Homo sapiens
cgcgtacctcagccgccgctggccttgaccgaaaaccatgacaagaacagggagtgaggggctatgggactagttaggcccttgggtcgcgatgcccaagggtcccccttgacgtacgaacacccctgagg

SEQ ID NO: 508753 - DNA, 116 bp, Homo sapiens
aggctccatgttggcagtgaagtcaggttcggggtgcatgggctgtggtggtggtgatctggttgctcccagtgtttgaacatcaagaagactccaggttaacatggttgtcttgg

SEQ ID NO: 508754 - DNA, 417 bp, Homo sapiens
acttagccgatcccttttgtgctggggtgatggctcgcgtctgttatctcagcactttgggaggcaaggcgggcggatggcctgatgtcaggagttgagaccagcctgaccaatgtggtgaaaccctgtctgtactaaaaatacaaaattagccagatgtggtggtgtatgcctgcaattccagctacttgggaggctgaggcacgagaatcgcttgaacccgggaggcggagcgtgcagtgagccgagattgcgtcactgtactccagcctgtgcaacaagagcaaaactctgtctccaaaaacacactaaaacatggttcctgccctcaaggacgttacagcatacagagggatataataaaaacagacagatacggaatcacgaagggcattggtgccagcacaagaaccaacg

SEQ ID NO: 508755 - DNA, 355 bp, Homo sapiens
  misc_feature (1)..(1): n is a, c, g, or t
ngaatgctgggcttcatacttgggtaatgagatgatctgtacagcaaagcaccttggtacatgttcacctatgtaccaaataaaaagaatgattaagactgtggtatttgatagcaccacagggagcctatagtcaccacgcaatttaatggtatattttaatatgcctaaaagagtataatggattgtttgtaccacaaataaatgcttaagggaatgcacaccccatatcacattatgtgattatcacccatgcgcatgcatatatcaacctatctcagtgtaccccatatatatacacacctatatacccacaactcttaatatataatatgttttatataaatctctcgtg

SEQ ID NO: 508756 - DNA, 411 bp, Homo sapiens
  misc_feature (10)..(10): n is a, c, g, or t
  misc_feature (71)..(71): n is a, c, g, or t
  misc_feature (99)..(100): n is a, c, g, or t
  misc_feature (103)..(104): n is a, c, g, or t
  misc_feature (106)..(107): n is a, c, g, or t
  misc_feature (109)..(109): n is a, c, g, or t
  misc_feature (126)..(126): n is a, c, g, or t
  misc_feature (139)..(140): n is a, c, g, or t
  misc_feature (158)..(158): n is a, c, g, or t
  misc_feature (161)..(161): n is a, c, g, or t
  misc_feature (235)..(235): n is a, c, g, or t
  misc_feature (289)..(289): n is a, c, g, or t
  misc_feature (295)..(295): n is a, c, g, or t
  misc_feature (323)..(323): n is a, c, g, or t
  misc_feature (333)..(333): n is a, c, g, or t
  misc_feature (337)..(337): n is a, c, g, or t
  misc_feature (339)..(339): n is a, c, g, or t
  misc_feature (406)..(406): n is a, c, g, or t
attttgccanggccacatattattcaaaaagttagttgaataatttcacaaatttttctctagaaaaatanttttaattcatcagaattaaaaaatagnnagnngnntncttttaccatttggagncaaaggggggggnngggggcgcgggggggggnggngtgttgatggaagtagcatttctctcttcaaaataaaaacctaaagtgaatataataaagttatattgtgctgnggggattgtctttttatgaattaatactgactttttaaagacagtgttctgggncatggngaaacaatggggggggaatggggggggnatgggggggnatgngncttttcctttttccaataattctcctctctcccacaatggcagccaattcatatttctggggggggntgcct

SEQ ID NO: 508757 - DNA, 777 bp, Homo sapiens
acaatctagctcctcggggacccccaggctgggcatttccgcagaggtggggatggctcctctatcagaagcaagggctccctcagcacagagaccacatcccttcccttttcatccctcccacacaggattggccaagggtatcagagacaggaaggaggtgattgatgatacacatgtcttattattctctttataagaccatggagacctgtgaggatggcaacgagtctatgtctatcttctatcaagagttttgcagaacgagtgtatgcgaatggacaagaccaatgcactcacacaacaacaagcatgaccacaggagcatgagagacatatcacatgaacaaaaggcatatgatgtgaatctgatgagacaaaaggacaggtgcatggaagactccaacaatgtgcaaacgcaacacatacacaacagtatcagacggacttccccactataaccaaatgtccccgatagattcacagtaacaatgggagaacacattggagagaattagttaagaagcatccccaagcaatgcgaacatatatcagtaggaaaccccagtgtaagataatgacaccccaattattcatccattatctacgccaaatgaatccacacccatattaaccaatacactttcacacaacaacgatatacttatgggacatatgattatacacaattacgaggaatacaatcaaaggcaaacatatatggaaattcaacctgaaaagagatggagaaaaaaaatacacataaaaagattacgg

SEQ ID NO: 508758 - DNA, 519 bp, Homo sapiens
agagtgaaggcttacccacagtcactacatttataaggtgactctccagtgtgaatacactggtgtgtaaagagatatagatctgtcacgtcaaagcctataacacatacagaacacctactgggtttctctcctgtgtgaatctgctgatgtacgtggagctgtgatttcttagtgaaggattgcccacaactactgcattcatagggtttctctccagtatgaattctctcatgtgtaatacaatgggatttgtggaagaaggccttaccacattcagtgcaaacatatggattatcccctctattaattctctggtgcatacttaatgttgacttctgaatgaatgctttcccacattcactgcattcataatgtctctctccagtatgacacttctgatgtatcctgagccgagacttccaggtaaatgattttccacagtcgctgcatttataaggtttctctccagtatgaattttttggtgctatatgagatttgacctgtcagataaggcc

SEQ ID NO: 508759 - DNA, 1117 bp, Homo sapiens
gagcggagtgaggtgcgacgtgcagatgctggctgctggagcgctgagctggaccagctggcggcgcgagtgccagtgagctgggcgcgcaggcggcccggcgcggcgacgtggcgaggaggccgagacacagctgcaggcggcgctgtcaaaaacgcctggctggcggaggagaatgggcggctgcgggccaagaccgactgggtgcggaaggtggaggctgagaatagcgaagtgcgcggcacctgggccgcgcgtgtcaatgagcgcgatgcctccgtgcttgatctgccgaacatgctgctgcagcagtgctggacgcgcgggcaggacagtgcagcagcagctgcaaggcggacccgcagaaggcccctgtgtgaccctccatcctttcctggaaggggggatacaggcgctccagtgtctggcctggtcacccctccttgaacagccctgggagaccaggtcaaatgccggagtcccaaggttaaacgggtagcagaagggcccaaggttccacggcacgggcttgaagaactacgcaggtgtccacagctccaaacagaggacatacatggagaacactcgggacagccttcccctcgagggaagaagcgccttgtttggcctttggggagaagtcaagccaagtggtcccccccagagttttcaggacgcaccaaggtgccctgacaggccagagcttcgtgttccaacagaaagacgcaatgctcccatgtcgaaactcgtccagtctgacgcgggtcgacatgtgggtgcaactggtgcacagggtccatccccacttaaatccttgtgaccacgggggaccagcaagcgcacgatcgacgggttgggacttcgaccctggtggagtcccttgcaccagagtcagtgtgtccccttgtgagcccttgggaaaatcgggggatagcacagcgacgaggtcacgttaggcataggcccccaaacgacaccaagagaatacattatcatggggacacggactgtcacatcaggacccccacttttggagaggaggaccaatgtgatgctacgcgaggagaggagacagatcagactacatacaaagctcggtgagtcatacaataaatca

SEQ ID NO: 508760 - DNA, 964 bp, Homo sapiens
tgttgctggtcgtaggtctgtcctgtttatctgtgtcttctgctcgcgtcgtggccgcagttgtaggctcttctcccccgggttgttctgtgcgtccattgtccgtcgggacggccgctcctgggttccgtgccgggtgttttctggcactctttggcgttttcccgtcgacgccggtccgcccgatttttgtgcgaagatctcgcgcaatcttcctgtgtcgaccccttaaccaggttccctgctcggtcccgaacaattacccggggctcctgcccctcccgcccggcggggcagcctccttttgggtggccctcccccacagagtattcttccgattagcgcccccgggtgagatccgctttcccccttttcccgcggggggactttgtcgccacaaccagtggtccgccggaattattcggtgcccgccccccgcatttctttcccggccccgttcactcccccccgctgccgattattatgtgaacagcggtggcattctggggcccccgcgcccgattcttctcggtggcgtgtcgtgcccggtgtattcacaacaccgacaactgtgttttgtggcccaccaattgacttcccccgggccctctggaaccacacactggggggcccccagagggtgacagtaccaccggtctttcccacatggagagggtgggagaccaaccccccagactgcaaagaaggagactcccccagctttctagtaagaagaacaaggttcccatacaacaccggcgtgttgagaatcaaaggttctcacccaagacgcccacactcggcccgcaatgattctcgcccgtgaagccacacggaaacagtatcttgtcgctctccagagtgggaaaaagtcaagaggtgggggaacatttatgtcatgtggaactttttttggggatcaccagcaatgaaccaaaaaaaactcgaaccccccaacaaaaca

SEQ ID NO: 508761 - DNA, 194 bp, Homo sapiens
tgttgaagatgtcaagaatctgtattaatatacagcaagagagcttaattttgtgtccatgttccagagcagcgaaaaatggagggttaattaccagttcgaaatccactctgtaatttagttcttactgtctccacatccttacacattagcataaattaaaagcagagtttatttgtgtcaaagtgctctga

SEQ ID NO: 508762 - DNA, 182 bp, Homo sapiens
actgatcatatgcagcacacaatttttgcacacaattcaccttttaaacacacttaaccatttgtgaaggttaactttatcttacattttcaaccatacacaatcaacactaatcctccacactttcactgtttttattcgtctgaatatacactttgaaggtttggccaattagtacaagt

SEQ ID NO: 508763 - DNA, 922 bp, Homo sapiens
gatatgtggtcggatataaaactattgtcaatcataataacagagtggtgtaaaataacagctacgattagctcatcataatcattatactgaagttccactgtacactagacacaacgagggagattcacacggtactgtgcacaggatggctagagatgttctgtttatcagccaaagtggcaccaccgatgtggtatatagcataaaaacaggttagagttcaatgggccctccagcttggcatgtgttcctattccaggataattgcttttaaatatacgagacattcatagtgtttccatttttacatagaagtcacagacccttgggatgtgggtcggtttgggggtatttgtgtgggatctgcatcgaactatttcaactttatgtaaagctataccatgtgaaccagtcacaaggaatcatctatgaacggatctaagagtggctaacctcccaggaagtgctggatctgtgggtgtgtcaaagctcagtcgaagaacaagtagaacatatcgagggtgccaccaacgaggacactgcccatgcgagtgctgggggaccgttactcttgtagttccactgtgactacttagccgttagggcaacatgaattaccagtgtgccggccaggggtgcggagaagttaatattgttcaatgaattatactatattcagaactgccacgtccttactcatgcgggaccgtgagtataaccacaagtggaactctatccgtgcagactttggtactagagcaaacacattgtcaaggcggtccaggcactgcctgcttcacgcaatctatgcgcaggcagggtactcgtacacagcagaagtgtcggaactcaattgtgtgacaatcgaacatcgtcgcggaaaccgctactcaaccacaaaaaacgcacagaaatacag

SEQ ID NO: 508764 - DNA, 409 bp, Homo sapiens
  misc_feature (56)..(56): n is a, c, g, or t
  misc_feature (146)..(146): n is a, c, g, or t
  misc_feature (170)..(170): n is a, c, g, or t
ctgctgttttttcccccctttggtcccttcctatcacctaaaactcatcctcattncagcccttacagcataactaattatttgttttccctcacctacattgtacatgtgggaattacagataaacggaagccggcctggggtgngttgtcacgccctgtaatcccaanactttgggaggccaaggcaggcggatcacctgaggtcaggagttcgagattagtctggccaacatggtgaaaccccatctctactaaaaatacgaaattagccaggtgtggtggcacacatctgtagtcccagctactctggaggctgagacaggagaatcgcttgaacccaggaagtggaggttgcagtgagctgagatcacaccactgcactccagcctgggagagacagagtgaga

SEQ ID NO: 508765 - DNA, 195 bp, Homo sapiens
ataaatacatagaaataccaaaacataaagtaaaaataataataacacagaacaggcactgcagtcaggtactagattattgtgagcttatcttagaagtgctatgcaaaccagagtcatatctatcttatggacttccagcaatatgcaataatagtctaagatgactttatattaaatactatctagatctcc

SEQ ID NO: 508766 - DNA, 373 bp, Homo sapiens
taccactcttatttctcaatgagctctagctaatataataagattgcattttttgcttagcagatattgtgatttttactaatggaaggtttgtggcaaccctgtgtacgcagagcaattctattggtgccatttttccaatggtatgtgttcattttatgtttctgcatcacattttagtaattctcaaaatattcaaactttttcattattatatctgttatggtgatctgtgatcagtgatctttggcattattattgccatcgttttagagcaccacgaaccacgccaatataagactgaaaacttattcaataaatgtgtttgttctgactgctccactgactggtcattctgtctaactctctttct

SEQ ID NO: 508767 - DNA, 135 bp, Homo sapiens
accccgagcttaagggctacccaagatgtaagattcttcatttaaatacatatctgtgagccaataagattatatatatataaaagacagctcttagattttttttttgtttccccctcttaaacaatttggtca

SEQ ID NO: 508768 - DNA, 231 bp, Homo sapiens
gcctgctaagtgatctagagtatcccctcataggttccagcaggctaaggagatacccattcaagaactgacatgattacacaaattaacgatataaataggtgactcacaatttcattagcttacaaagatcgtggagttaactactacaagcacactagttataccgtattttgtgggaaaagggcatacagacttggctaacttcatattgatcctgcgaacctatga

SEQ ID NO: 508769 - DNA, 260 bp, Homo sapiens
  misc_feature (69)..(69): n is a, c, g, or t
  misc_feature (121)..(122): n is a, c, g, or t
catcatttaaaaaaaatgtacaatgacaaaaaaaaatggggatgatttaaaagattgcttctatctctngggaaaaatggagcagcattttggccagttgtcttttgttttctattcctgnntcccaaatcaaagagcatggttctcatggaaaaccatgttccccatgtttaaaaacaaaaacaaaaattccctttgtaagttccttaaggagtggaaaaaatgtgaaacaaccccaaacttttatagcacttggatta

SEQ ID NO: 508770 - DNA, 218 bp, Homo sapiens
tcgatacgactttttttttttggccaagcctctttggccaggccacttaaagttgtatatgtaatgtacaatacgaagtagataatcctggatattgtccagaggctgttggagagagtgaggtcgagtttactcatccagtggtaatcatcagtaggcatacgtaatttgtcatgtgtccgcaggcaaggatcagcataggtaaagtgcatcagcac

SEQ ID NO: 508771 - DNA, 624 bp, Homo sapiens
  misc_feature (6)..(6): n is a, c, g, or t
  misc_feature (85)..(85): n is a, c, g, or t
  misc_feature (129)..(129): n is a, c, g, or t
  misc_feature (134)..(134): n is a, c, g, or t
  misc_feature (140)..(140): n is a, c, g, or t
  misc_feature (162)..(162): n is a, c, g, or t
  misc_feature (171)..(171): n is a, c, g, or t
  misc_feature (176)..(176): n is a, c, g, or t
  misc_feature (201)..(201): n is a, c, g, or t
  misc_feature (209)..(209): n is a, c, g, or t
  misc_feature (211)..(212): n is a, c, g, or t
  misc_feature (216)..(218): n is a, c, g, or t
  misc_feature (222)..(223): n is a, c, g, or t
  misc_feature (225)..(225): n is a, c, g, or t
  misc_feature (264)..(264): n is a, c, g, or t
  misc_feature (268)..(268): n is a, c, g, or t
  misc_feature (271)..(272): n is a, c, g, or t
  misc_feature (274)..(275): n is a, c, g, or t
  misc_feature (278)..(278): n is a, c, g, or t
  misc_feature (280)..(280): n is a, c, g, or t
  misc_feature (301)..(301): n is a, c, g, or t
  misc_feature (320)..(321): n is a, c, g, or t
  misc_feature (328)..(328): n is a, c, g, or t
  misc_feature (333)..(333): n is a, c, g, or t
  misc_feature (359)..(360): n is a, c, g, or t
  misc_feature (365)..(365): n is a, c, g, or t
  misc_feature (370)..(370): n is a, c, g, or t
  misc_feature (372)..(372): n is a, c, g, or t
  misc_feature (376)..(376): n is a, c, g, or t
  misc_feature (402)..(402): n is a, c, g, or t
  misc_feature (406)..(406): n is a, c, g, or t
  misc_feature (443)..(443): n is a, c, g, or t
  misc_feature (477)..(477): n is a, c, g, or t
  misc_feature (492)..(492): n is a, c, g, or t
  misc_feature (503)..(503): n is a, c, g, or t
  misc_feature (505)..(505): n is a, c, g, or t
  misc_feature (563)..(563): n is a, c, g, or t
  misc_feature (594)..(594): n is a, c, g, or t
gccgcncgattcgcccctgcgctgtccgcccttacccctagcgttacttccggtccctcgctgaggggagttcgtgcggctcccnggaggcgtgaaccgcggaccatgagcgtgggcttcatcggggcnggccngctggnctatgctctggcgcggggcttnacggccgcnggatnctgtcggctcacaagataatagccngctccccngnnatgnnnctgnncncggtagtccgcgctcaggaagatgggtgtgaacctgacncgcngcnncnnggngnaggtgaagaacagcgacgtcntgtttctggctgtgaagcnncatatcntcacnttcatcctggatgagattggggccgnngtganagccngncacntcgtggtctcctgtgaggctggtgtnaacntcagctctgtggagaagaagctgatggcattccagcnagcccccaaagtgattagctgcatgaccaacacncctgatggtagtgcnggaaggcgctncngtgtacgccacgggcacccatgccctggtggaggatgggcagctcctggagcagctcntgagccgcgtgggcttctgcactgcggtggncgcggccctcctcgctgccgtcccggggct

SEQ ID NO: 508772 - DNA, 551 bp, Homo sapiens
gactgtggtgcaagcaatcagcgagattccgtgggcgtaggaccctccggagccagtcttcaggagatttctagtgaacgtatcttcaagctcagtggttgctttacccaaccgagtgtccagtcgtacgtgatgagtgaatcaaagggatgcttcatcccctgttgcagtatttcggatatccaggcattgcctttgaatgtttcctagggtttgcaggtctctgcttacattaccagtgtgtgagtccgttagtatgtgtgtgcactcggatccattagttgcccacagcatacttaatcatgtggtgttttaaattctgtgggttggacccattacaaatttgggcaaagggacagtgaacgagatacttctggaaagaagacatacatgtagacaagcaagcatacgaagaataaatgtcttatcatcactgatcagttaggagaattggataattcaagaagcacaagtgtagataccattgtttaagccagtgcagaatggcctataatgaagatagtaaaaagagaggaatcaaaaaactgatg

SEQ ID NO: 508773 - DNA, 396 bp, Homo sapiens
tgggtgatctaagatcctctctctctcgtggtttactggctcggccgagtcagtctctatcatgtcgatgtgcacagcagcgtgtctgatgaccagctggcgcgtatagcgactgttcactcatgtataaccgtcactctcggagatgagagtatttctcatagccttgtagttgtctcacgtcagttgtactccgagcatttgtatcataccatcatctgtgctagtccatctcctctcctgtcccgtttgtttcttcaacgtctcttctacaggcaggaaataggcaaaactgtcccttctcatcatcatgccctaatcatggctgagaatatctcaagcagatgacactcgtgtccttggggtggtctgagtcaaagatcacctgagcacatg

SEQ ID NO: 508774 - DNA, 1688 bp, Homo sapiens
gggatcgcgtggggcctgccaagcagataagtggcgcgcatttgcccgagtgcggcacagagcactgtccacctgcacacggggcggaccagcgtctacacatctgcgagtgtatagactagtacagacgcggcgtcgtctggttagcatcttacagaccaggactcgcagcggaactcgtgctaaagtgtccagcgtctttcggctggggacagagcagcaatgcaccgctccgggggccacagcgcttggcacacgcatcgcaattctgtagtgcgagtcgtctccccatggaccagcaccattggtgcaggttactagaggtcggggggctgtcgcgggtacgattgaacgcgcaatgtcgcgtgaatgggtgttcgtcagcagcttgacgtgcacacgatttacgaccaagaggcaaagaggggggcccttcacctgcaaggggcctttttgtacatttgtcatctcccgcatgtgccagagagaccaccccgcgaaatatgaccgacgacccccaaaagcgattgtgagagcgagagccaatttgggccgagagaaaaatctgtccgaagacaagaacaaggttaacttctttttgatattccacaaacactccgaaccgcctataaagggttagcctccggttgggggggttcccacccgttgaggtggggaggggccacacaccgccccggtgaagtagccgcttaagggcggcttgggaagcccccaagacatgggaagacccccctccctctttcctgtttgagacaagagcccccttacaccggaaggagctgggggggctccgcgaaagagccgccggtgttcggggacaaccgtataagggccgaaatgtaggaggcccccttaaggcgaattggcggagagtaaggataatctattgaggaaaagcccctattccaaaagacccaagcgcgcgctcccaattcgggcaatgtgcttacacatggtctggggcaatcccttaacgcaacgggggcgtctgttccgggtgtaaggtgccacccctttggggtgtgcggcgccgccttcggtgtgggggtgccccgtcaatcgcacaaccctttgggggaccctcttcggggtgcgcattttgtggcgcccccatgtgcccttgtggactgtgaggcgcgggggggcagagttcccaagcgctcgcggaggcccaccttttgctttaggcgcgcccaaagttcccatttaccctgcaccggttgccccgtttccacttaggccgctccttccccggcgcgaacgactcaggggctaacatggcgcctatgggccggggtggctgtcggagcagcaccctgtggtgccattttgccgcaacccggcgaggggaccttccctttgtacccccttgtgcacacctgtaatggccccttacaacttcgcaaaagggaattcccccctttttcacaattcggggatatcagccagagcgagagggatttaagagaacgggtcctaatgcacaaaacaccaattcacagagaccgcgcgcgacactgaacagcgccgtggtggaacacaccttcctgcgttgccgcccgtggggcacaatttttgcgagcgggaccaaggagaaagccattgggtaggagcacacaaagggtccccgggccactgagaagaaccctctcactccaccgagcaaa

SEQ ID NO: 508775 - DNA, 424 bp, Homo sapiens
  misc_feature (101)..(101): n is a, c, g, or t
tagtaacatctttgagaaatgaatttttaattacaggactaactggatagcaccagccggttaaataaatcagcctaaatttctgattaaaaaaaaaaaancttaactggataaagagaacattttagaattctgaggttgagttgacttttctggaagcaatctccagtcaatcagcaaatacacacacacacataagtgaaaatcaaaatataaatataaatttctttaaggtttatctaaatattaatctatatggaaggtaatatcttaatagatctttaaaaacaacagcttaatatatcttatcataaaataattcttaaaacaagacatagaatttctaaatgacatgttaaatacagtttacaaattatttttgccaaagaccattttttttccagcccaaagaacagctatattt

SEQ ID NO: 508776 - DNA, 134 bp, Homo sapiens
agtggctcagcgcttagtctggtattaaaagatgcaacagaggtagctgtgatcgcccagggccagccatctgaatacccccaaaaaggcgaaagaaaaacaaaatacaccaaccacataaaaccaaaaggagg

SEQ ID NO: 508777 - DNA, 814 bp, Homo sapiens
agcgggccgctctcgaccccgggagggagtcacagcgttcgtacacgcgaggacgggcgacgcgcagtcggcaggcgggtgaagtcttcccatgtgctgcatgcgcggtgctgcaggctacagggtctgtctgcacgaagcagcggaccgaacccgctccagcggaccgccgccggcagcggctcccgcagtcgcgtgtgtacccccgtgcactgaaggaggtccacagatccctgcaccgaggcccccgtcggaccgtgcaatggcccagtcgtaagaatgccaagagcagcggcaacaggagcgagcaagcggcatccggcagcggtgagcgaccgagtgtcggtgcagggaggcagtccccggggcccggatagagaccaagcatggaggacacacaacaatgggaggaaaggcggactctcaggaacttcattcttcaccgtggtttatggtgacttgcattgctgggcgttggacatctgtagtctgtaacgtgtggtttgatcttgttgactatgaggaagttctagaccaaagcaagaaggacttccgttataacttatcagaggtgcttcaaggaaaactaggaatctatgatgctgatggtgatggagatttagatgtggagtgatgccaaagttttattaggcctgaccaaagatggcagtacatgaaaatcttgattgtcctagaaagaagtccttaatatttgaggcagaggaagagttcagatggggtgttatgggtgtcctctcatttctctatgatataatgactcgttttgaaactgctaaaagaagaaaatggaaag

SEQ ID NO: 508778 - DNA, 232 bp, Homo sapiens
ttacgcgaaactgagcgagaaagaactggcgcgggcgcacgctatatcggcagtatgcataaaggttcagacggcgcggtgggaacgccagcgtttaccgaagttactgggtcgccgatgccaaactggggtatcgagttaatcgcaatctcgacttccagctaaacgtttacaacctgtttggtaccgattacgtcgcctcaatcaacacgagcggctaccgttatcaccc

SEQ ID NO: 508779 - DNA, 752 bp, Homo sapiens
tatttccgtcagcacaggcgctgaataccggacttcgtagttcatgccagcttctcttaatgtcgccatgtgtaaagaacgacatgctgtgcctggatcgaactactgtgacctctggttcattatgtagtatgctattcgacatataaataaagaggggatacatcggtgtcaatgccatagttgagtcgtcaagttaattagcagtaattgtcagcttggtgcgctcttcttcgctacctgacgagggtctcagggaagcaggaaggtgacgctagcgtccgggctaggtaactagtgtctggccgccagagtgggagtacgccttcataatgcgctggaatggtttggaccacgatcgctgacagaagaggctatagacattgtccaaggcggaaaatatcacgcatgccaatctgaggggtacttgtgttaactctgggaacacaatgctatttgagaggacatttcttttggcacttattgatttctgtgaccccatacctggggcagatcgatgaaatccggttggatacctagataaagatgggtggccaccagaattaaatcaacccgtttcatctcgtgcggttgcaatggagcaagggaaaggcgagaaagagacccgtgtaaaatgtctaattattcaacgagagaaacctctcatcatcacaaggaaaaggatcgaggaactattgaaggaaacaatagaaatcggaatcccatccccgggggagatcgcaagagtgtcc

SEQ ID NO: 508780 - DNA, 665 bp, Homo sapiens
gggggagagttttagccatggcccatcgctcccctatggacgcgggcctcaacaagggccacaaattgaccaacaacgtgcgcaagcccaggtccagccgacgccgtggtcgtctgaccaaacacaccacgctcgagcgatacatgattcccaaggtgcgtggctattgcccacgtacgagcggccccccatggagtcactgaaggactccaaggacaaacgggcccctaaattaatcaagaaaagggtggggaaggcacatacgtcccaagaggaaacgcgaggaacctgaccacgtacctggtcgccatgatgaaaagctgatgccacatatgactgagccactcccccgacctctgcctggaataaagaaacgctcgaaaccacacactcctagaccagttacatcacaggtcgccctacttgtccaatctacccttaacacggggcaggttaatcaatctcgccaaaactcgagcttacttgccctatctgtcctatactggcccgtctacaattactggacctggtcttacaccacctcaacgggaaaaccttgagtttcccaatacaaagcccttcattctcaaccgctttctcccgatggttttatctcaaagggcctccccaaaccgccatacagtcggccagcccattgcggcgtt

SEQ ID NO: 508781 - DNA, 164 bp, Homo sapiens
aggatggtaccactgcactgcaacctgggtgacaaagtgagacaccatttaaaaaaaaaaagggaataaaacaaagggcatatttaataactttcccctttaaagtgctttaggcttttcttccaaacctttttcctgtgttctccgtgttttaagggtatatc

SEQ ID NO: 508782 - DNA, 829 bp, Homo sapiens
  misc_feature (829)..(829): n is a, c, g, or t
gtatccaaataaactggacaccatcgacaatgtgactgtggcaaggaccgtggagcgctggaaatccgtgtggctcacgctgtgtcagtttcacagaccaagtggaaatcggagttcctttcctgtgtacagcccttctgagcgaggcagaagaggaaccccgccgctgtatgacagcaatgtgcggtgagtcatggcgcgagggccttgaggtgtctaccgtgacttgactacacgttcgaggactgctagctggccctgtcggaaggacagctccgtctacccgcgatgacactatgccttatcagaatttagcgcaggctcagtgacgcgcggcctctgggcataaacactcaggaaaaagcttgaataaatgatcgtggccagatactcagcaaagatgccacggatgaacgcgcgacgcgcagagaaggatacggtaatatgcgtgacgataaagcgcagtctctaccctgggaattgaggcagaccatcgtgaacctgtacatgtgagcagcacaattgattgtctaccctgataacgacccaaagaaacgtgcacccaagtcgtcagttctgcgacactggctaaaagggtgatgtgatcctatgcgctggacatggatacgacatgtgtgacgaaccaggaccccgagaacgacttgtgcaacgggcacatggccatgttccactatgacccaagaccagttacagtatatacgcccaatacaggatcatggcaatgcagtgtatacccaataggttcgctccatagatacctcgtcacttcctgtcaccagaatcgtgcctaagcaagcctcaacacacn

SEQ ID NO: 508783 - DNA, 512 bp, Homo sapiens
  misc_feature (102)..(102): n is a, c, g, or t
  misc_feature (223)..(223): n is a, c, g, or t
  misc_feature (377)..(377): n is a, c, g, or t
  misc_feature (414)..(414): n is a, c, g, or t
  misc_feature (435)..(435): n is a, c, g, or t
  misc_feature (466)..(466): n is a, c, g, or t
  misc_feature (474)..(474): n is a, c, g, or t
  misc_feature (483)..(483): n is a, c, g, or t
ggcgacctagaggacctctcttaacgccccaaactccaatcagcagtagataagatgcaaggcagcatttcgtaaaatctcaaacctaaacagattcctttngacaaggaagcctcccctttaggagcaggcgactaacctgaaaagtgggatataagaaacgtgaaagagctgcaccctttgtcttaaatcacagcgtctaattacacaatgactataagcngagataacagagggcgagggagctacttgatagtggagaccaaggacatttttaactgagtcatttaggcagctagtgaatttagaataattgttttcctccttaattgctgtaaaaatgtcatagtcacactttatcaagacatcattagatnggttggcatgggaacatcatggtgatatcagctgtancgtagccacagagctgaagcnagagcaggtctgaactggaaagtgtatatanatatgtgngtgtgagtntggggcgttaagataagatccggtgagct

SEQ ID NO: 508784 - DNA, 240 bp, Homo sapiens
agtatctaaacatactatcattatctccctgtgtagtacttggagaagtcagctagccctactctgggctaccttgagatgaggagaataggcagataggacctggctcactgtcactactataccctcagttactatatagttgtaattcttagaggggttagccacatgcactgttagctacgcacatgcctagatagatgtaagcatagtagtagcaaaagcattttgctagtagtg

SEQ ID NO: 508785 - DNA, 276 bp, Homo sapiens
aggactacaccagcgtaataaagggacacagaaagacaatgtcaccaaagtgcaggtgcaacgcccaagcagcccctacctctgccagcccagacccgccacttaattctagaggagggtgtctcctcaaggtcaccagtactttttatcttcctttcctttttggtttaagaaaacaaattcagcaggggagggaccaaggttcctcaaagggacaacaaaaaattccaagcttggaaacgaagaagccaaggcacaactcccattatgggtgaa

SEQ ID NO: 508786 - DNA, 937 bp, Homo sapiens
ccgggaacacgcccctgaggcggcgccgccaccagagggggtcgggcgacacagagtaccacgccgcacaattgtgttgcgcaacagtagccacaaggatgcgcgcacacgcggaacacacaggaagtcgttgttaaagaccaagaagccgagtaatacctttggtagaagacgcatgcacaaagttttccgcgccccggcgaaaaccggcggcttgtctgtcaacacagacggccagaaattaactgtccccgggggcaacgggccttagaaggcgtgtgtccacaagggcgcccgcggctatctcctagagaccaccctcccgtgtggagcaaaaacactcgacacacgtggccacctgcgggggcagagggggaaatattctccgcaacccgcgagcaggccccccgccgccggtggggtcccggccccccttcgggcccctgtgataatgggaaaaaccaaggtgcccggctgggcccccacaaaaaagccggtgggaacaccatgtggggggttctcccccagcgagcccaccaggagacaccgtctgcgttacagaagacggggcggcacgaaacatcatcctggaaagaaatacttgtctgcgagcacaaaccactggcccgagaatttcccccaaaaacagggaccccattggcccgcgtcccaggaggcgccgtgtgcacccgggtcccctgctcccccaaaccagccccagaataacagaggggtaccaacaaaaaggtggacacaacaccaaaagaagagagcggggtcaaaacaagaaggtctataagagaaaacagagggaagtgtttcaaaaaaagagtagacaacccccgtgcccttctaggaccccgggaaggtgtcacgctccaccgcacaccaagaacgacgggcatgtcaccccaaaaaaaaaatttcgcaaaaagca

SEQ ID NO: 508787 - DNA, 432 bp, Homo sapiens
  misc_feature (308)..(308): n is a, c, g, or t
tggtggctcgtgcctgtaatcccagcactttgggaggctaaagcaggtggatcacctgaggtcaggagttcaagaccagcctggccaacatgacgaaaccccatcactaactaaaaaatagaaaaattaggccgggcgtggtggtgggcacctgtaatcccagctactcaggacactgaggcagaagaatcgcttgaacctgggcggaagaatcacttgaacccgagatcatgccattgcactgcagcctgggcgacagagcgagactccgtctcaaaaaaaaaaaaaaaaaaaaaaaaggataaaangaatgctgagaacaagactgagatatgggcagatcaaagattctggcaaatacctgaagacatagaggacacatgagccagagtaatggaagccatggctcagagcctgaaaaagagaaatttg

SEQ ID NO: 508788 - DNA, 156 bp, Homo sapiens
gggcgcgggttttgcataaaagggggcccgtttcctttttcccggcccccccagttggggggttttttggggccccccccagggccagggaggggccggcccccggttttggcggccggggggcccgttgcccctttttcccttttttttttttta

SEQ ID NO: 508789 - DNA, 821 bp, Homo sapiens
  misc_feature (515)..(515): n is a, c, g, or t
ggaaacttaattggattacccaaaccaccgcagtgtattggtagtggatgtaatctggattctgctagattgcgtcgtagcttatgggctgacagacttggcattcatcccatcgagctgcgctagtggatgcgcatttctgggaggtaagctatcggtcgacttctatgtggtgcgtctgctgtagtgatgtgagtgctgaatgatggcgatgtgttatctcgtccaggtagattgaacttcagataatgggtagactgcatgaatgatagtgaatacattggagatgaagtgcgattagatggtggttggtgagtgtctagttaggtcaatcaaagcattaaaggattataccctagaattgtggcatattggtataaagatgtggttgatcttattgagtccgtagtcagataacatgtatcgcagtggagttgctacttcccggtgttctacactacactcggattgaagtgggcatagtaatcgtgtcagtatggaagagactcggtagngtactattcgcgtggagtgcttccgatgctcatcctcaaatggcgcctggtggattgaaccagcgtatatcaaacagaagctaagaggatgatgaggttgcctcaggtcaagaaccagtgcagatacccgtgtgggacatccagaaggagcctaaaagacctgtgactagtgagctctagggctgtagaaatttagaaaatctacagatgtgattaacgtcgagcctttaggttttcatccatgtacatggatcacagttttgcttgtgatcttcttcaatattgtgaatttgggctcacagaatc

SEQ ID NO: 508790 - DNA, 694 bp, Homo sapiens
gaggccctggacactctcgtgggaaattatgggagatggcaaccgtggaagcagcaaccaccatgggagtgcgccatttggggttggaaccaggagggtttttttgggtggcatagagcttttgtaattgagggcccactgatgatgcttttgatatttatttcctgctacttaaatgttgaatctgagtgaattgtacctatttctgatgaagtcggtcttgcaaagcgacagattcataaagtaatgagtgaaatcgtttctgttcgttcccgtgtgtatgttctaagaaatagagcccactgattttgtatgttaaatacccagagccatttacctggtactaaacccgcacccccgtgcggagcccttcccagccctcatcccagcttccgttcctagctgtcctggaacctgtctcccttgtgtgagtccacgccctggttctggctgtggtcacgcagatgccccgtgaagggttttgtgtgtttaggccctcatcttctttgtctttttcctactccgttcctggcatttgctgattttctagtgtatactccgtagtctccgcttcgggtttgattccattccatggagaataaaaagtatgttgtacatactgccgaagaattctcttgcaagttaaggcttcccccttttctataagactataaataaacttattttaacctta

SEQ ID NO: 508791 - DNA, 197 bp, Homo sapiens
gacctttacgctgagctcttcctattacgcttgacatcttgcacattggctacgatctgctgatatttccaaggacttctttccagtccgctgaccccgggcagctgccagctgcttcagcatctttccagtgctccatcaagctgctgccagccgctgctggtatctcctcttttcccgagttgtgttgtcatcgg

SEQ ID NO: 508792 - DNA, 464 bp, Homo sapiens
agcattagcccatttaaatatccctgatcagctggattccaaagacctgtcaactatttctttaaaatatctagcacaaataatcatatgccagaaaaatatgcattttaattaaaaacaagaaagaataattaatatggcagatgtgccttagtcactaaaaataatgctacaggccgggcacggtggttcatgcctgtaatcccagcaccctgggaggctgaggcaggaggatcatgaggtcaggagattgaagccatttcttggctaccaaggtgaaaacccatctcaactaaaaatacaaaaaacaaaattagccgggcatggtggtgggcacctgtagtcccagctactcgggaggctgaggtggaacaatcacctaagcccaggaggttgaagctgtattgagccaagatcgtgtcactgcactccagcctgggcaaccagaatgagaccctctctca

SEQ ID NO: 508793 - DNA, 885 bp, Homo sapiens
  misc_feature (189)..(189): n is a, c, g, or t
  misc_feature (192)..(192): n is a, c, g, or t
  misc_feature (194)..(194): n is a, c, g, or t
  misc_feature (214)..(214): n is a, c, g, or t
  misc_feature (219)..(219): n is a, c, g, or t
  misc_feature (237)..(237): n is a, c, g, or t
  misc_feature (247)..(247): n is a, c, g, or t
  misc_feature (312)..(312): n is a, c, g, or t
  misc_feature (320)..(320): n is a, c, g, or t
  misc_feature (342)..(342): n is a, c, g, or t
  misc_feature (348)..(349): n is a, c, g, or t
  misc_feature (358)..(358): n is a, c, g, or t
  misc_feature (415)..(415): n is a, c, g, or t
  misc_feature (417)..(417): n is a, c, g, or t
  misc_feature (476)..(476): n is a, c, g, or t
  misc_feature (510)..(510): n is a, c, g, or t
  misc_feature (517)..(517): n is a, c, g, or t
  misc_feature (571)..(571): n is a, c, g, or t
  misc_feature (589)..(589): n is a, c, g, or t
  misc_feature (624)..(624): n is a, c, g, or t
  misc_feature (627)..(627): n is a, c, g, or t
gaggaacagatccacttgcaggttgctgttcccagccatggcttcgcgctgctggcgctggtggggctggtcggcgtggcctcggacccggctgcctcccgccgggagcaccccgagcttctgccaccatttctccacacaggagaagaccccccagatctgtgtggtgggcagtggccagctggcttntananggcccaacacctgctaaagnacccncaggcccacgtggacatntacgagaaanagcctgtgccctttggcctggtgcgctttggtgtggcgcctgatcaccccgaggtgaagaatgtnatcaacanatttacccagagggcccattcnggccgnngtgccttcnggggcaacgtggaggtgggcagggacgtgacggtgccggagctgcgggaggcctaanangctgtggtgctgagctacggggcagaggaccatcgggccctggaaattcctggtgaggngctgccaggtgtgtgctccgcccgggccttcggnggctggnacaacgggcttcctgagaacaggagctggagccagacctgagctgtgacacagncgtgattctggggcaggngaacgtggtctggacgtggcccgatcctactgacncanctgagcacctggagagaacggacatcacgaaggcagccctgggtgtactgaggcagagtcgagtgaagacagtgtggctagatgggccggcgtggacccctgcaagtggccttcaccattaaggagcttcgggagatgattcagttacaggaagcccggccaattacggatccgtggattccttgagtactccaggaccagactcagaggtccccgtccaagaagcgcctgcggactgccggtcgaaggccacgacac

SEQ ID NO: 508794 - DNA, 348 bp, Homo sapiens
cctatactactgtatatatggataagctcagttgtatccttacttttatgaacttaattgtgctttgatttcattccatttttatttcaatttttatctcattcaatcaacagatatatactaaaaacctactatttgatagaatttcttatgtccataagatatagaggcaaattcagaaaagaatgttttgacatttaaatatattttccttaaagaaaacagtgatatggtaattaccctgatttggtcattatacgatgtatacatgcaacaaaacataacactttaccccaaaacatgtacaattatgtcattataaataaaatgaattaaaaatcaaaagta

SEQ ID NO: 508795 - DNA, 635 bp, Homo sapiens
atgtcacacggaggcgaagcattctttctattctatctccatatgcttagctgtctggtaaaagataccctgatcgaagcgtcgctgtttcaaacatacaccacagccagatccagaactgttttatcatcttcatcttccttaattcgtcgaagcatgtctctgatcagcgggtgtctgggattaatttcaaatgttttcttctgactcgcatagtaatttgtagagatgtccttgcccgtttggtacgcttgtgctttcatgattctctccatgttgccagaccatccgtacgtggctggccaccaaagcacacggagattctgtcaggcgctgagacaccacagccttttcaatcttgtccttaagggctttatctttcatccaattcagcagaggctcaaattctttctcaactgcttcacgactctccttagttttctcactttcatcgaacttcactccttccttggcaacattcgtggaacctcttcccatcaaattcgggaagggcctgaatacagtattcatccacaggttctgtgaggtaaataacttcatagccctttatcagaagtcgctcaacaagtggagaagatccagctcttttctgctggacccagccatgaagtaga

SEQ ID NO: 508796 - DNA, 149 bp, Homo sapiens
ccaggcacgcttgctcgctgaggtcattcttgaggatccccgccttcctgcttcctgcttctgccccccagaaaactacgattgcccttatgaaatcttaagggtcgaagcgttgatttagcagtaaactgagatgtagcagtgcttag

SEQ ID NO: 508797 - DNA, 163 bp, Homo sapiens
tagtgatgaagtgatgatcgggaggattgatgataatgatggcatgattgtttggtgatggtgatggtgacagtgatgatggtgatgatgttgaaggtggtgatgatgttgatggtgagtgatggtcatggtgatgagtggtgatgacccatgatgatggtga

SEQ ID NO: 508798 - DNA, 253 bp, Homo sapiens
gatggatgaactaccgaatagatggatgtatggagtgtagggaattgaatagaatcaatccgaatgaatggaatggaatggaatggaatgtaatgtaatggaatggaatgaatcaacccgagtgcagaggaatggaatggaaaggaatgcaatgaaatggaatcatccggaatggaatggaatggaatgcaatggaatggaatggaatggaaacaaacagagtgcaatggaatggagtgaaatggaatggaat

SEQ ID NO: 508799 - DNA, 258 bp, Homo sapiens
acaataagcgacggggacagaactgcagtggcttctattaaagcaaaaatggatatcagtgttggctagcagtctacaacatttattgggtgcccattgagctcaaaacaggtgttccctgtcacttcctcttctccccacatcctggtgcagggagggggcatgaggaaagaaaagaaaacaaaaggcaaagaggatgtggaggacgggcaggtgggcatcctctgccacacggcctccccttccagcctccgccgg

SEQ ID NO: 508800 - DNA, 339 bp, Homo sapiens
  misc_feature (24)..(24): n is a, c, g, or t
  misc_feature (29)..(29): n is a, c, g, or t
  misc_feature (80)..(80): n is a, c, g, or t
  misc_feature (88)..(89): n is a, c, g, or t
  misc_feature (144)..(144): n is a, c, g, or t
  misc_feature (199)..(199): n is a, c, g, or t
  misc_feature (271)..(271): n is a, c, g, or t
  misc_feature (291)..(291): n is a, c, g, or t
  misc_feature (309)..(309): n is a, c, g, or t
ggaggcggagaggagcgcgtgcanagtantgggtcgccatgcccgcatgcctgatgtcgtgagctagggcacctcggccntggctggnngcagcagaggcccaggcccagaggggtgaggcccaggcacatccggagcgcgcgntgttccgcgaagagctcagccgtctcgtacagcagcgtcagggtcaaagacagcnggcccccatgtcagtggtctaggatggccagtgaaggcaccaacatcccaagtcctgtggtgcgccagattnacaaagcagtttctgatttncagtatatgcctggaacngtacaagaatcccaaggttcttccctgttt

SEQ ID NO: 508801 - DNA, 386 bp, Homo sapiens
gctgacttgcctgtggtgcgcggacctgcgagcaagcacgcctgcggctgctgtgcatgctcgatgagtttgccgtggtgggctgaagaccaatctgggcttcttgcgacgcatcatcggccatccggcgtttgccgctgccgagttggataccgggttcatcccgcgttatcaggatgagctgctacctgtgccaggcgagttgagcgatgagttctggcaagcagccggccaggcgttcatgcagacccaaccgctcaatgacgcccgttcaccgtggacagatacccacggcttccgcgccggtttgccggccgaggtttccctgcatttgagctgcagcggccaggatcgcctggtgacgttgcaccctggcctctcaagct

SEQ ID NO: 508802 - DNA, 126 bp, Homo sapiens
tcttatgaggtagtgctttcttatactgaaggtggtatagcctagctatacatctagtgcttttcgtatactgtgaacttgtggagcttagctggtagtgagtataagggtggtatcagcgcgtac

SEQ ID NO: 508803 - DNA, 850 bp, Homo sapiens
tgcggtagctcatgcctgtaatcccaatactttgggaggctaaggcaggcagatcatctgaggtcaggagttcaagaccagcctggctaacatgttgaaaccccacgtctcatacataatataatacagatatatattagacccaatgactatatgttggcaaccatgccaagttaaagcctacctgggttatggtctgtaggggcgaggagacgaaattttgctgtgacactggggggagggcagatggttgctaggtgaatgctcgaggattatggctcattagtctaactcccaagcctgtgggtggccgagtagcgaaggtagtctcgtgctccagaaaacatatactaaagggaaaacaacttaggataatatacatatgatcgaagaaactggaaaaaaaactctttcagagctgttaatcgttcatagacaagcgcctattggcacagttttagcagtggctggactcaattaaagcaagtctcctatactttcgctttaatttgcccagaattctactgtctttgccccgtcatgagtttgtgtaaatcctgattgctctaggagggtactgctttcacactggttgggtgtttgggcgtagtccttccttgcaacaagtcccttgctggctcagacgttgtggtcccagcctggggcctagccgcttggaggaaaacgacccaagactaagcatacgacgcgtctagttaggaccgcgtgcctgtcttactggcataaggatcgatacgtggaggagctatcctccccccttgaacacatccctactgcatcccccctattgaacacagtagtcagggtgaggttctcaacctatcaattg

SEQ ID NO: 508804 - DNA, 278 bp, Homo sapiens
  misc_feature (38)..(38): n is a, c, g, or t
  misc_feature (46)..(46): n is a, c, g, or t
  misc_feature (138)..(138): n is a, c, g, or t
  misc_feature (211)..(212): n is a, c, g, or t
  misc_feature (219)..(220): n is a, c, g, or t
  misc_feature (222)..(222): n is a, c, g, or t
  misc_feature (234)..(234): n is a, c, g, or t
  misc_feature (240)..(240): n is a, c, g, or t
  misc_feature (242)..(242): n is a, c, g, or t
gcctgagcatcttatttcagaaagtaaggaaatgctcnaatacatnatgggcacaggtagccagcattagtcactgcaccctgctctaatatgattctattctgactgcatcatccccctccacatttcatgttctgntgttagcaacatagccttctctttctgcccatgtatttattatccatcttgactcactaattgctggttttcnntggtttnncntcagttactgtntttatntntgtgctcactttgtcctagatttgaccagtgagagt

SEQ ID NO: 508805 - DNA, 503 bp, Homo sapiens
ccccatattatcagagtccttgtcgccctccaatccatgcgcatcctttatataacaggagaggtcaggtctccctcctttaccataaaataatttgcccaccaatggttgtaccctaagagcacccggattgggggggaaatttttcaactcctacatacttcccccattattctaaaaacaaggcgacttgggaccccttgcggttcacaataagatagtactcccaattgaagcccccattggtataataattacttcccaagagttctggcattcatgagcggtccccccattaggtttaaaaccaaagccaattcccggaggtttaaaccaaacccctttcaccgctacacgaccgggggtatactacggtcaatgctctgaaatctgtggagcaaaccacagtttcatgcccatcgtcctagaattaattcccctaaaaatctttgaaatagggcccgtatttaccctatagcaccccctctaccccctaaaaagcc

SEQ ID NO: 508806 - DNA, 228 bp, Homo sapiens
atttctgggtcaggtgagggtcttctgaaacctcacagggtcagattaagctctactttgaagttgtacttctgcaaatgccacatggagaaaaagcctgtatcctataacagtgattcagaacagtggactctggatttcctgaggactgagcttcacttttgctggccagacgtgggcttatcttagaacctcgatactgcaaggggttaatcaaaccttcaaagt

SEQ ID NO: 508807 - DNA, 582 bp, Homo sapiens
gaccatgaagctgcgctgttaatcgaactgtgaaggcgctctcttatacatcgctgattggtaggtgggcttatcagtacgtctgtggataggagagaagtctttggatcgtgatcccatgcatgtctggcaacgtggctacatcatcatcgagtccgcgagaaggcgcagcgactacgtgctgtggaggagattttgtcctggggtacctcatctgctgtggtgcatcctgttcccggtagtcttgtccatcgggcatctccaggatgcgtctggcacagacgggaaggtggcagtgaacctggccaagctgaagctgttcgggcattactatgtcatggtcatctgctacgtctacttcacccgcatcatcgccatcctgctgcaggtggctgtgccctttcagtggcagtcgctgtaccagctcttggtggagcgctcacccgtggcttcttcgtgctcagggctacaagtccacgccacaggaacaacccgtactgcagttcgccaggagccgaggagatgtcagatggagcagtatgaggacctgggtcgggaggctctcaagtcacaatagcaggt

SEQ ID NO: 508808 - DNA, 163 bp, Homo sapiens
cttctatgcgactccacatgtgtaacccacacactctaccatgtaccctgcttccaaagtggaccctcagatgtactgttccctccacatgagcccaaagagcccccaaaagcaggccagagactgaggacacagaatgtaactccacaaaggtccaggtatg

SEQ ID NO: 508809 - DNA, 575 bp, Homo sapiens
atcggagagcttggttccttgcctccttctgcgtgctcttcaactccaagtctatttcattattcaccacagctgagcaatgaatgtgagagatgtggtcaccaaggatctacgttacttgtctgaccagaagagttacgtcttcgatcatagatccttaattatgaagagcagtagattctcacattgtgatctctgtagaataagtcactctatatccctagtaagagagtagccttttcaggtagagtttgcaatagaagtaagaggacaagcagtatggaaggagctacaccgatattttgtaacatactggctagctatggggcaccaggtttctcctggtctcactctacaaattttcagcacagatcttcacttgtctgttatttttactactgtatgagtttgtccagtcttagagagaaatattgagctaattctaacatggtaagtagagggtgtatggaaggatcatatgtacaccttaacagcgtaaggccagtaagatgagaatgactatagaccagcggagaattgagctactaatatgtttaaactcttaagcagccagt

SEQ ID NO: 508810 - DNA, 167 bp, Homo sapiens
attagataggacgacacagtgaaatgcaatggcacttaagcagagagaagaaggattttacatttactattttaaatagaaggtgttagaacctcaactcgtgctcgtttgcattttgtgagagtccagtcgtgggaacaacacaaataaggtcttgagaatgaaga

SEQ ID NO: 508811 - DNA, 710 bp, Homo sapiens
  misc_feature (2)..(2): n is a, c, g, or t
  misc_feature (105)..(106): n is a, c, g, or t
  misc_feature (137)..(137): n is a, c, g, or t
  misc_feature (156)..(156): n is a, c, g, or t
  misc_feature (159)..(159): n is a, c, g, or t
  misc_feature (185)..(186): n is a, c, g, or t
  misc_feature (205)..(205): n is a, c, g, or t
  misc_feature (222)..(223): n is a, c, g, or t
  misc_feature (237)..(237): n is a, c, g, or t
  misc_feature (240)..(240): n is a, c, g, or t
  misc_feature (244)..(244): n is a, c, g, or t
  misc_feature (249)..(249): n is a, c, g, or t
  misc_feature (252)..(252): n is a, c, g, or t
  misc_feature (265)..(265): n is a, c, g, or t
  misc_feature (268)..(268): n is a, c, g, or t
  misc_feature (270)..(270): n is a, c, g, or t
  misc_feature (274)..(274): n is a, c, g, or t
  misc_feature (276)..(276): n is a, c, g, or t
  misc_feature (279)..(279): n is a, c, g, or t
  misc_feature (282)..(282): n is a, c, g, or t
  misc_feature (295)..(295): n is a, c, g, or t
  misc_feature (310)..(310): n is a, c, g, or t
  misc_feature (405)..(405): n is a, c, g, or t
  misc_feature (409)..(409): n is a, c, g, or t
  misc_feature (493)..(493): n is a, c, g, or t
  misc_feature (519)..(519): n is a, c, g, or t
  misc_feature (525)..(526): n is a, c, g, or t
  misc_feature (532)..(535): n is a, c, g, or t
  misc_feature (537)..(540): n is a, c, g, or t
  misc_feature (625)..(625): n is a, c, g, or t
  misc_feature (697)..(697): n is a, c, g, or t
tntctccttgtccctggagtgtggcgcttcgcggggccgatgtagaacttagggcgccttgccgtggttggcgcgccccgggtgcagcgagaggccatccccganntttacctccccggagcggagcacgccggctnccagtactaggggtgcgcncgnggagtggcgggggcggaggggtggtnnttttccttctcctccgccngaggccacgggcgcccnngttcccgccggccnggncctntcaanggnggctgccgggacncgngnggcngnaanagnccggttaggcggngcagacggtctgggncgtggcagacggacggaccctcggcggacaggagtaccgggagccctgaaccgcccgctggtcggcggatcccggctgcggtggcgacggcgggnaggngctttccgctgttcctcagcggccgggcccttgaccagcgcggcccgcaggtcttccttctcgccgtcttgcagttgaagagcnacatacgtagtcagtttcgatttgtnacagannttaacnnnngnnnntacccaaggttatgctatgacctttccgcagtttactttgattttctatgtttaaggttttggttgttggtagtagccgaatttnactggcactttattttacttctaaccttgttctctgacggtgtacagaatcaacaaaataaaacatttaaantctgaaaaaaaaa

SEQ ID NO: 508812 - DNA, 153 bp, Homo sapiens
gtgcgctatcgagaatgatggacaatttagacaacttttgaccacttgcgctaataaaaaaaaataaaaactactcttatgtccactttacaaagacgaacactacgccattgtgattactcccaaagacccgcgcaacgggcctcacaacga

SEQ ID NO: 508813 - DNA, 1080 bp, Homo sapiens
tccaaaaaaataatatatattttttttctcacacaaaccccgcagaaaaaaaaaacaaagaggggggcgccgcggggggggacacagagggggcgcccccccccccaaaaaagagcggggggggggggggcgcgccccccacccctgggggggggaggggggcgcctctgtgtgtgtgcccgcgcgtgggggggtctctctctctgtgggggggggcgctcccctctctctctctgtgggggggggggggggcgggcgcgccccccccggggcgggcgcgccccccctctctctttttccacacaaaaagaatatatatgtgtggggggaggggcgccacgccggcgggcgcaaaccagaggtggcggcagagagagagagagacaaaaggcgcgcgcgcgcgcggggagcacaaccaaaaagaggagcagagaggtcggcgacaaaagagaggaggaaaagagacgacaaaaacaaaacaacaaaaagagagggcgcacagcagagaggggcgggcgggaacaacagagagagacaaaagcgggcgcccacaaacaccgtgtgggggggaggagagaggagagagagagagagggggggcggtgttctcgcgggagagggcgccgcggtggaggcgcgcccgggcgaggcgaagaaggcggcccgcgcggaggagaggggtctctccccaacccacacacggaggcgggcggcgaacgaaccgcgacccggagagtcaaccacacacaccccgcgggcggcgcccccccccacacacaaacgcggcggcgcccaccaggacacccccgggcggcccccccccccaactcacatagttcgctgggtggcggggatattcaggcggtggaggggactcaacctagctcgcttccgcaaagagaggggagggcccacccgcgtgtctctacatcctcagaaccatcaccaccggacaatgcacgggggtggagggctaaaccaacacacacaacacaagggaagacacacccctccttttaaaccacacactctgagtcggatgactaagcgacgatccgttggagtgcgtccgtaacggcg

SEQ ID NO: 508814 - DNA, 501 bp, Homo sapiens
actgtggtgagtgagatgagccccactgtgttgtggtaaatatgtagagaggagtatagggctagtgacatagtatgttagagtcctgtaagtagagagagtgatatttgaacaggagaacgtggttactagcacagagagttctcccagtaggttaatagtggggggtaaggcgaggttagcgcaggcttgctagaagtccatcaaaaagctcattcagtgggcagtcagcagtttgcaagtccttgcagcagcaggcattcatgcatgcgcactgtgcagtgcgttccgtcagtttgcagtttgctaggccgcacatcagtactgaggctgtaagtccgtgggcgcattatgagaatgcaccgcgccggtgcaagcttccagggggtttggatgagaatggctgttactacgagggctatgtggctgattgcagagtatgcaatgagcgattttaggtctgtttgtcgtaggcagatggagcttgtaatacttatgcct

SEQ ID NO: 508815 - DNA, 288 bp, Homo sapiens
catgcacttactgccacccctcctcctcctgccctttggtgcaggccatgcccaaggcatagaggcccccttagggcccaggaccctagggtcccagccgctagagcttaaagaggccttaaggtttttcagatccagttaaccggagttaccctagcccagaagagcattcttaccgccctggacatctttgcccacaacctggcccaggctcagaggctcaggaggaggacttggcacaactagtttggggtgactccattcagttacctcacaaaggaggagttt

SEQ ID NO: 508816 - DNA, 1943 bp, Homo sapiens
  misc_feature (653)..(653): n is a, c, g, or t
  misc_feature (917)..(917): n is a, c, g, or t
  misc_feature (949)..(949): n is a, c, g, or t
  misc_feature (1213)..(1213): n is a, c, g, or t
  misc_feature (1418)..(1418): n is a, c, g, or t
  misc_feature (1432)..(1432): n is a, c, g, or t
tcttaaagtattctttataaagatcattaaaagtggtaaaaacaatcttaatattatatataagggcacagggagacagtctcaaataaaattattcaaatttaaacagataactttacagatacaaaagacaagttttaagtgcacattacaaaccccaaagtgtcgtgatctcaaaaattaatttaacgtggcgtctattataagtgcggacaatgtgattataaaaatgtattaaaattgtgggtgcgcattattaaattaaatatactctgtgagatagtgtgacacattcttgtggatagcaaaaaagtgtgcagacaaaaaaaatatatatagtgggcgttatttagacttttacgagtatattttatctcccgcgtggataaattttcttaagagtctcccgataaaatgtcctgtgtataacaatatatcttttctctcgaaagctgtgtgtctcccccagaagagaatataaaatataaagattttctccaacaatataacattgtctcgagtggggaagcgggggcaaacacgtggggatacgggtgtggggtacagaaaaaccagctatcaacgctcttcaaagatgtgtgagcgacaaaatcatcacaaccgccggtgatggggccgagagtggtgatgtnttctctcctaaccagctatttttctgctgtggtgttctatgcgtgggccacaaagttggtgcgcgcaaatactacgcagcgcacctggttctcccccacaagaagatacaggaaaagcaagcacgaccacacacgctgtggtttgttggggggcttttaacagacacccccaatatgaagacataacgaggaaagcaaaaacacctttcctttgttggtgtgttgggaagcgtgggggatatatttataaaataacgagggggngtctactaaactcaacacgttggaaagaaganaccgcttttaatttccaacaagactctattcttcacacaacagggggagtagtgcatccccgccttcctgttgtggcacaacacacgttgggttagtcatacgtatactacaataataggaggaaaacgggctttgatggggaagaatcaaaaggaaggggtataggacaagatggggttcttggtggcgcacaaaagtttttcttgttccaacaacaaagcattctcccgctcgcttttcacaaaaaagaataattcttcccnccaaaaaagaggttgtgtccaaacaaaaaaggtgttcaagcgaattgatgagtcattaacaaaacaagttctcgccaagagagcaccaccataaaagagatgcggcatcacaaaataggaggggcagcacccagaagtgagtagatataatcaccgacaaggacgcgaacatatgttggtgtgttatcaacaatattcaacaggnagcagcgacggaancaaactatagcaacaaaaaggaggggagcaggagagagagcccaaaacacacaaatacaacacaccacaaagacgaagatataacacatagggcgggagaaaaacacaaatatatgaagaagaaaagcacaccccaaaagataataaaatagagacgaccacgcacacgtatagtgactcgtaatgcgaccaggaacagaagaagaaagaataatcaccaaccaagacgcaaaaacagaaaaaagaagaccaagagaagtcaaaagataaaaaggaagaggaataaacaggagagagaaaagacaataaaagaagacaaaaagaaacaataaagaaagagacaacagtcagattaagacgacaaaagcacatccgcaactaaagacaggacaaggaacagagaaaaaataaagacgacgaaacagaaacgagcagacagccataagcacaaaacaaaagaagcaagcacatcgcgaacgcacagagataaatagagacacagcagcaccag

SEQ ID NO: 508817 - DNA, 276 bp, Homo sapiens
  misc_feature (181)..(181): n is a, c, g, or t
ggaaaaattttgggcccgccccaaggggaacccccttttttggggtgggtttttaagggggggaaaaaaaaaaaaaggaaccccttttttttcccgggggcccctccaagccctcccccccccaaatttgggggttggggttccagggtggggggtttcccaggttatggggaccaaaaanggggcccccccccctaaaagggagggggattttttttcccccggggggggcccccggggggttttttttttttttttttggggggggttttttta

SEQ ID NO: 508818 - DNA, 390 bp, Homo sapiens
  misc_feature (303)..(303): n is a, c, g, or t
  misc_feature (328)..(328): n is a, c, g, or t
  misc_feature (356)..(356): n is a, c, g, or t
ggaaaagcaaccacttaaagaatttacaggccgggcgaggtggctcacacctgtagtcctagttctttgggaggcggaggctggtggattgcttgagctcgggagttcgaggccgacctggtcaacatggcggaaccccatctatacaaaaaatttgcagggcgtggtggtgcgggcctgtggtctcagcctcctgggctgctgggactacaggcacctgcccccacatctggctaatttttgtatttttagtagagacggcggagagcagagagggagcgcgccttggctcgctgggccttngcggcggcttcctcaggagagcttngggcgcccacgagaagagccatcaactnggatgcctaacgttgggaagggaacttcgaattt

SEQ ID NO: 508819 - DNA, 1002 bp, Homo sapiens
  misc_feature (222)..(222): n is a, c, g, or t
cgcgtaacccgtaaatgcgcgatatggtgttcatgcctgtgtatattgacgacgctgctggtcgatccgcgggaatctctctacggtctcagtacctctagccgagtacccactgtggtcgctgtgaccactagtgtaagtgttcgtgaattaccgagattgcgtcatgaatgcgacatgctgggatgccttcacctaatttggaaaatgtaataccacaanttgagtaagatggatgtacgcaatgagcatgtaggtcactatgtcacatgtcattgcgaaccactttatacacgcattcattctctgatagtatccatgcttagccttgaatgtctaacataaagataataaatgattgcttcgtaggtagggtaccctaatttgatgtagactttagaacccgattggattgatcttaccgctaacttgacccttgggctccccgaccaagctagttgctacgtatacagactagctagatagagtgagaccatagtagacctgagctacaagcttagagatcccacagaaatcatatctagctaggacaaagagagtgcgtgatcatatagctataacttacatacgacctgacaggcgtgatcatattgtcgaaaccgatgaattatcgactgcgcatgtgtatctgtagaaaatggaacatctggtagcgaacaggaacaagcgagcctggatatgcccgggaccatgacagtgtgtgtgttgagttaggaaatgccgtgtgagttttcggacactaaagcgtgccatatcaacacctcagcgttggcacttggcttggaaaacactacctcacttggggaataacgctcttcaggcaagggtgtccaaggcttaacacgttgtataccatatattcggtcgtgcctatcacacgtaccctctgtcacattaaagacccaagatctggccttggcccatggggtggaaaacgttaaaccacacggccggccccttcgcttcacaaaagggttcccc

SEQ ID NO: 508820 - DNA, 207 bp, Homo sapiens
  misc_feature (14)..(14): n is a, c, g, or t
  misc_feature (55)..(55): n is a, c, g, or t
  misc_feature (118)..(118): n is a, c, g, or t
  misc_feature (133)..(133): n is a, c, g, or t
acaggatcttcggntgtgtcatgcagacagctggatgtgcgagagcctccagctncatcctgtctaatttttttagacgaagtctggtctggtcacccaggctagagtgcagcagtgnaatctcagctcacgnaaccttggctttccaggttcaagtgattctcatgcctcagcctcctgagtagtgggaagtggggataacaggtg

SEQ ID NO: 508821 - DNA, 1338 bp, Homo sapiens
  misc_feature (326)..(326): n is a, c, g, or t
agcgggtggaagagaacggacggcgactggcgacggtctcagcaaatccagctgcctgctgcggaggctgtggctggcggcatgcggaggtgactgaggatagagagccagcatggcactgagggacgctgccaggtccatggacacgtgcatgtgtgctggccagagttgaaaatcggcgtaggagttgggcgatgaaccgtcctagctgtcgcggtcctggtcagataatgcatggtgtccctatgtggaagaaggcacttggtgtaaggcacgggggatggcatatcggtgcaagggaggggggatcgcaggagctgccatgntagccgtgttccactgagcctgcggtctaacaatctcgacctgcactctgttcaacgactgaggagtagaactggtcgcctcaacaggagagggacttgggtgagaaacggcgaggatttagtcgttgcgttgctccgcattgcaaggacatcgcgttggaagcaactttgacccttgggtcaagcctgggctaatgggtcataggactgcatttggctctaggccaacctcgacttgggaaacaggcaaggggtccattaggtatcgcatgaaccaaaacgattcctacgaatagggatcgttacccgggtgatatacccccaaggatatgccaatcttgccttgagtatgctcgcggtgccccacagagcatgaagatctctgggggccaaacaattcgtgacacaggcatgtcttcgatgatctctacgtgcaagtatcgctggaagtatccataattttgggaaccttagttctaattatggatcgcccacacaggtggctccgggaggtaagtaccggcgaccacattcacgtagagtccttcgagaggggcctcccacaagtcggaaaaggaaccagacctcctgtgtcacttatattgggttccccaagaaggaataccttcaaagcaacaagggcccctcatttggggcggatagtaagggggttttgggttaatttaaactaagcgctatacctgtcaaattcaagcatggggttctcccttcgtgaattggctgcggcccccttttggacgaacccttggggcgcaaagctatagactccatgtcggaacttggtgattgatccgcccatgtcgacatggaaaacgagagaattgggcacgacgatttgggggccaccataaaggtgcaacagagagacgattgccatagtggttcaacgtgaaaacctggagcgacaaccagtttgttcgcgtgaacagaacgagcacatggaagtagcacgcttcacaacgggagtcacagagcgacagagggacgttcg

SEQ ID NO: 508822 - DNA, 725 bp, Homo sapiens
  misc_feature (418)..(418): n is a, c, g, or t
gctattgtgaataacgcatcagtgaacatgggagtgcaggtgtctccttgagacactgattttgccttagaggggattctggggctgggctccgtggtgaagggcactctctttccctcacctggaggttatgtcagcggtgtgctgggggttgtacaggtcatgttaagctgtccttcctgccttcctcaatgcgtcatttcttatttctatgttccacccaggtgctgcactctcgcctgaattccttaacgtgtgtgaggtattttggtgtgtggctagttgtttagaagtttctgagagggaatgagtgctggaaactctattttgtcatttgccaatgtaaccccacattggaattgtcttcagagataatgaagagccactgcttcacagactcatgagatgtgaaagcggngaatctgtttagctcacatgcgtgtgagaaagctgagaccctgagacaaatattggcctgtgctgcaggctttcagttagacagggacagcatcagttctcattcccttggtagctctatgcctgatgtcttctcactgttttgctgcattatgaattgattttttttttttttgagacagagtctcgctcttgcgcccaagctggagtgcaatggtgcgatctcgcctcactgcaagcttcgcttcctgggttcaagtcattctcctggcttgcctcccgataggtgggactacaggccccggcct

SEQ ID NO: 508823 - DNA, 351 bp, Homo sapiens
ctgttcataatcgaccacagggttacatcctcattactattcttgccgtagtcaggctcggatctacgaacgcagtcacagatctgcttcataatcctctctcgaggatttcaatactctactcccactaatagctttttgatgacttgtaactggcttcgctatcctcgtcttaccccccactatttaccttactggtgagaactctctgtgcatatttaccactttctcctgagtcaatttcactctcctactcaccggattcatcatactagtcatagctctttcctttctctaaatatttaccacaacacaatggggctcactcacccaccacattaacaacataaa

SEQ ID NO: 508824 - DNA, 139 bp, Homo sapiens
ctagtgttgaacgactgttgtgcagcttggtgctgggtgagaatgtgatggagaggaagaagcctggccttgtatcgattcctggaggatgttgtgcagtgctgagtgctggtgtggtgcatgcacacctgtgtgtcta

SEQ ID NO: 508825 - DNA, 442 bp, Homo sapiens
attcgcggccgcgtcgacctcttcttgtttttatgtattgggtatattttattttcctctgattcccatttatccttcaaatttttctgcagctctctccttcctgcttcctccttgctgaggctggctgggatgcttcttccatgattttctgaatctagactgggctgctctctgtgttaaaccaatcaggtgcgaccttctcttaacaggtgtgtatggaaatatgcttattaagaaggataaatcttacttttaaagaaatatgtttttttattcctttcatgtcatagcagaatggaatctttttaaataccttggttccttatgggttggtgagagggtgggaattggggagaatgtttatttaaaaacctgtctttcagcattgtgtattttggactggcatataggcgttcatagctataagagagataatcac

SEQ ID NO: 508826 - DNA, 1251 bp, Homo sapiens
gggggtgggtgtccttttgtggtgccaacagtctataatatcttttgtgcggatcacgcttggtcctcctgttattctcccttgtttgtttctcgctgattggcgccgctccctgtaatgttggtccccacggttagtgttttgcgacgctgtgttttttggttagtgttgtggagtagttcttttatcccttgtggaatcatcgttgttcactcttgtgactaatcaaccaagacacctgtggatgtgtttttgccccgacacgttggggagggcccctattgatctcattttgtaggggtggctttttgttgttaactccctaatgtgcttctctcaaatgtgggttatctactacgtggataatatggtggtagtctccaccctcttctctgtttcctctctctcatatgccccctgttgtcgccctactatctcccccgtgttgctcacgtgtgacgtctcaactctggtggtggggttttttataagggaacactccctagagctgttcctctttatgacagtgtcccgttgctgttgtctaccctcgcggtccttgttatcactgtgtttctctaaaatgtatcacactctgtgtgttatgacgcgccgcgggtatcttgacgtgtggtgtgggggcctgtgggggctccctcctttatactgctcccacgagataatagattgtgtatacttgttttagaataacctctctgctcactctctaacatggagagaacacaacacaagctcctgtgagagtgtaagaggccttgtgaaaagaggtgtatagaggcactcagaccgtctcaccttcccatagggggtctcttgtgggttaccattataggtaacccaggcttgatttgattaaggcactttggccactggtttcctctgtttcgtgttgaacctcttgtggggagcctttttcacaggcccactggacaacataggcttgttgtgtaactaattgtggggaataactggaaccaagtgctgcaacacactaaggggcacaccacccacgtccacatgagagcaagctctctgccccgtggcgacacgccacagcggggcaacccacagaccctggtgccacatggcgaaagcacaggcggttcaaagaaaccactggaggaagacaactccttatttaggaaatgaggaccactcactgcccaacaaacacaccttttatgacccaaccaggatcctctgttcaatttaaactggctaacccatacc

SEQ ID NO: 508827 - DNA, 913 bp, Homo sapiens
  misc_feature (162)..(162): n is a, c, g, or t
acacacttcactaaccacgctttttcctgcactttttactcacattccccgtgcaccacacaatgtcctgctacccccacgtctggtggtcaccaccccgccccgttgaacaggaatttaccaaacactggggacttccccagacagggtatacctatattnggtgtctaaacccacggtcccagaaatattacgccctcacgaaaacacttgtgtaaaaattgtgcccccccccagttgtcacgagattttccaaagcagatttttcttcccccgaaaaattttgctactggacagaagaccctttaacgtgcgtgcagtccacaagaaaatttgtgtgtagtgggtgtccacaccaaagagtttataatacaaggggggcccccccactaagactgcgtcacacgaagccggggcaccaccaaagtgttaagaacccacctcagagggcccggtaggcctatataatgggggtacttcttccccccacacacttcacagaacctgttaccactaatgagaatctgagttgttctcctatcctatatagatgagggtatcgctctcccccacctgttttcatcttcccaccaattatccaccacggcgactcatcccttgtatacaccaaacgttcaatatctcctggtgcccacatccacaaacacagtggtttactaatccccccctcatcacccacaacctcttgtgcactaacccgtcatctcccctcaagtaccgccgtaccacaattcctatcgaaccaagtatgattctgttacccccgaactcagctattagtcgactgctacgtttcacccctcattcccttctcgaacacgacgaacaagtcgagtcaatgaccgcgaaacaacccacaaacatcatattttcatacatgataacaaactat

SEQ ID NO: 508828 - DNA, 249 bp, Homo sapiens
atttaggaagtcacactgacactgtcctacagacctccacttgtcagcaggagcgtgaggggggatggtggtggtgggggagggtgcggtggggttgagggtgaggatgtgttgcagggtggtggtgtgtgggggtggtagcggtagggggtgtggtgtggtggtggagggtaggtggtggcgagggtgtgtggaggtgtgggaggtgttggctgtagggggggtgtgtgtgtggtggtggtagtgggt

SEQ ID NO: 508829 - DNA, 123 bp, Homo sapiens
ggtgactgctgcggtagctcatcacgagctccccggaccacctgtgctggccggacccccttctgtctcttctcgggtaccacgctcgcacattcgtcacatccatggtccatcagctgtttc

SEQ ID NO: 508830 - DNA, 295 bp, Homo sapiens
  misc_feature (30)..(30): n is a, c, g, or t
  misc_feature (61)..(62): n is a, c, g, or t
  misc_feature (66)..(66): n is a, c, g, or t
  misc_feature (72)..(72): n is a, c, g, or t
  misc_feature (76)..(76): n is a, c, g, or t
  misc_feature (106)..(107): n is a, c, g, or t
  misc_feature (128)..(128): n is a, c, g, or t
  misc_feature (135)..(135): n is a, c, g, or t
  misc_feature (144)..(144): n is a, c, g, or t
  misc_feature (146)..(146): n is a, c, g, or t
  misc_feature (152)..(152): n is a, c, g, or t
  misc_feature (155)..(155): n is a, c, g, or t
  misc_feature (159)..(159): n is a, c, g, or t
  misc_feature (162)..(162): n is a, c, g, or t
  misc_feature (185)..(185): n is a, c, g, or t
  misc_feature (208)..(208): n is a, c, g, or t
  misc_feature (220)..(220): n is a, c, g, or t
  misc_feature (241)..(241): n is a, c, g, or t
  misc_feature (254)..(254): n is a, c, g, or t
  misc_feature (258)..(258): n is a, c, g, or t
tcaagttttatgatttatttaacttgtggncaaaaataaaccagattaaccacaaccatgnnttantttatnaaangtataagaggtaaatatgaatcttatatgnnaaaatgtttcattcattatancaaattnccaattaangnatctgnganctangancacaattattattctaacaatgnttattagctcattcacttatttngataactaatgnccacagctattatactacttnctcgttattttgngtgnatgcctcatttccctgacttaaacctcactgagagcg

SEQ ID NO: 508831 - DNA, 429 bp, Homo sapiens
tctaaccaagagtgaactccatctcaaacaaacaaacacacaaacaaacaaaacaatgttgtttctaactgtccatttgccaacatgtagattatctgagcttactggtccattctccttctcagattcattctcatttcagattcattcttgttcttaccaccatacctatttttacctttgttcttgggcagagctgggtggagggctgggtctctatctccctctgtggtgtgtgggcacagcagttacaggaggcctgatactgcgtatgggagaacgctggcgcatttgggagagtgtccatttgagatttccttatgatattctcccctctgtgtttttcatagttacacgctctatctctattctctcaaaaacaccttttaaacataatcaggtatatttgatgaagtctaaatgcaatca

SEQ ID NO: 508832 - DNA, 196 bp, Homo sapiens
tagctatactcctgcttcagcctcccatatagctggggctacaggcacgtgccatgacacctggttgatttctaaagatattgtcgaggcagggtctctgttgcccaggctggtctcgaactcctggcctcaggccatcctcctaactagttctccccaagtgctgggatcacaggtgtgagccattgcactccgg

SEQ ID NO: 508833 - DNA, 223 bp, Homo sapiens
cggcacgaggggtcagcaccagccaccagccccttaggtgaggactctgcctggggctctgctgatggttccgaatcatggagctgcgcgcggcactggtcctggtggtcctcctcatcgccgggggtctcttcatgttcacctacaagtccacatctgagaaaatcttccgtttccaggacacagggctgctcctgcgggtacttgggagcctcttccttga

SEQ ID NO: 508834 - DNA, 714 bp, Homo sapiens
ggtgtgcatggtggtttggattgatgcctgggcccggccgtggcgccgagttggagggggtggcatgtgatgcggcggcagatggctactgtgggctcgtgttttggcttgactggtggagtcgtgcatgtgcgtgcaggaaccatgcgaggccatgctggagcctgctgctgggccctgtgcccgcctctgcctccgcctccttctgctgctgggttacagtgcgccgctgtccacctctactccggggtctagtacaagcgctggcgctacgtgcaaggtctgcctgcgctccctgctctacaactcctttgggggcaggtgacaccgctgttgattgctgccttttgagccttgtctactggcttggtagacaacgttgatccggctggtttggatgtgggcaggacttgattatcgccaaccgtctccatcttgtaagaagttgcatttaccccaagccgagcccgaacacaccacttgcagcatctgcaacaggtgtgtgctgacgattgatcaccactgccccttggctaaacaatttgtgtgggccactataacccatcggtacttcttctctttctgcttttcatgactctgggcctgtgtctactgcagctattgcacgttgggacctttttccgggaggctaattgtgccattgagacttatcacaaacccacaccaactttccttcggaaaggttctccagag

SEQ ID NO: 508835 - DNA, 85 bp, Homo sapiens
  misc_feature (43)..(43): n is a, c, g, or t
ctggacaggtctctttcctggaatgcagcccaggcaccatgtnatccatggcacccttgaggtctctcctttgagccgtggtcac

SEQ ID NO: 508836 - DNA, 283 bp, Homo sapiens
ctctttggatagcggatgagggggtgcagcttcttgtgtggtggtgttctcatcggtgggacgctggttctagaggcagctgtcacgggagttcctgttaaaaggtcaagacactgtcaaagggcgtgttccattcaatggacaagatcccgttaaaggacaagtttcagttaaaggtcaagataaagtcaaagcgcaagagccagtcaaaggtccagtctccactaagcctggctcctggcccattatcttgatccggtgcgccatgttgaatccccctagc

SEQ ID NO: 508837 - DNA, 476 bp, Homo sapiens
ctccctgcttgtgctgttcccctgctctgtgctgttcccctgctctgtgctgttcccctgctctgtgctgttcctctgctctgtgctgttctcagctatgtgctgttccagctgcagtcactgcacctgggggagactgagttgcttcaggcctcagcttctctgacctgccccatctgccttatgggttccatatgataaccacatggagatcattctggaggccttgctctcagccctttgccgcaggcttaccatgaccactgcccatccctctctgctccagcttaaccccatgcaccctgcggtcctcagatcactgtttcctctctgtaaccttttccttgtgccaggagaggtttggtcactggagctgaggggtgatacgtgcctattgtcaaccagagtcctggcaggccacgagggtgttttccagtaatggactcaggttgactagaagggaatcttcaaagttt

SEQ ID NO: 508838 - DNA, 172 bp, Homo sapiens
tgggatttctgctggggtgatgcctgttgggggccagtgcttgaattatttggtttctggttgttttctattagactatgtgtgagctcagtgtgattgatcactcctgatagcgagtaatacgggatttgtaacaggagtagggactatctagtgtggatttagctggtgg

SEQ ID NO: 508839 - DNA, 107 bp, Homo sapiens
gatctagaggatcccgctgtattggcaatttctgtgagcttggttcatgaaacacagacataagtgttcttgagtgtatgtggatgaagaaaatgtctccctactat

SEQ ID NO: 508840 - DNA, 531 bp, Homo sapiens
cggaaaaaaccaccaattattgtctaaaaaaatatgctatgaaaaaaaccttttaacctccccaagttcttttaaaaaaaacacattttcttaaaaaaaaatagtcataaaactctatctgtggacaactctcctttccaatccccaaaatactttaaaaaattaacacctctccctccaacctttttaaaaaagcttaaaatcttcctccttatcttaaaaaaaaaaacatcccctccccaaaaaattcttgcttttccaccctcacaaaaacgtccttccaaaaaacaaaccaccctcgaaaaccctaaaaaaacactctcccaacaattttttttttctctttcttccacaaataacttttttaaattctcacaattgtagaaaacacacaaatttttcctacctcttcttttctttaaacaccgtaggaggctcttaaacaacacatcttttcctatcgttctgacccccccccctccaataatgacctaataactccaacacaaaacaagaactcccttccacact

SEQ ID NO: 508841 - DNA, 531 bp, Homo sapiens
cttccagcggtttccacactcgttgcagacaacacaggtggtcatgggctcatcagagctgcgggtctgcacctgtgaacagggctgggtgaacccagggtcacctccatgctccgctgcagacggcatcccctcaacatgggcagtgcgggcctcgcagccactgagctcccacaggtgacctgatccgaggccgcctcgtgactccaaccttccaaagctgagcctccgggggagggagacagagtttatcggggcagaggcccttgtgtgagcctgaagcagctcacattggctggggaccaggagggcccagacttggctgagggcaagagggtcccaatggtggggggaactagcaggggtccccagtgcccgcggctgccttccggaaggcccaagggtgagcctccggccacaggcagagcctgttctgaccagtggctgggagcaggagagaggcaggctctgcaccgacccaggccccatgcagccttcgaggggaaggaaaggctgtccttgcagcccctc

SEQ ID NO: 508842 - DNA, 153 bp, Homo sapiens
catttattcagaaactccccctttttaaagcccttttgttttttgatttaaaaactctgttttacagatttagctaaaaaaaaaatgtcagtgttttggggcccctttttgaaatgcaaaactaggaaaaggttaaactggatttttttttta

SEQ ID NO: 508843 - DNA, 397 bp, Homo sapiens
ctaagcctgggtgaccgcccccccgtgttccacaagaaggactatgacagcttggggcaacccggttttttggaccgctttatccgttggatttgctagcccccccgcccgggccccccagtgaagggttgtgagccccccccgtccatggtgttaaagggggccgggtcccacccggccagcaccgttgttcattgggaagacgccttgggcctgcccctttccagctcctcccagggggtccccgtagccccggcccccgcccagccccaggtttccccgggccctccgcggggtgcccggcctccctccccctgcagccatcccaagggtcctgccctaccgggcccctgagttttggggcaagccctgccccaataaaggctttgacccccta

SEQ ID NO: 508844 - DNA, 141 bp, Homo sapiens
cagaacacgcatgctatttatgattgacaatacttaacaagggcaacacattccaggtcttgctttctagcggctagactcggaacttggcaaacatctgtgcgccctgtacagcataggatgttcatatttaagaatctt

SEQ ID NO: 508845 - DNA, 413 bp, Homo sapiens
  misc_feature (406)..(406): n is a, c, g, or t
acaggcacactgcaccagcgttcaatagctgaacttgtgcccaagtgccatccgctagcagctttgagcagatggaggctgtgaacatcgcacagacacctgcagagctctacaatgccattctggtggacacacccctggcggcttttttccaggactgcatctcagagcaggaccttgatgagatgaacatcgagataatccgaaatacgctttacaaggcctacttggaagtccttctacaagttctgtactctgttgggtgggaccacagctgatgccatgtgtcctatcctagagtttgaagcagaccgccgcgctttcatcatcaccatcaactctttccggcacagagctgtccaaggaggaccgtgccaagctcttcccgcactgtggccggctctancctgagg

SEQ ID NO: 508846 - DNA, 378 bp, Homo sapiens
ggtgtaagtagttgtgcacactttacaacagtgtaggtctatgagatccatagcccacatactggagagtgtgccaatattaaatgtgaattttactatatttgatgatttaattgctaataagaaagccgaatgataaacatctaagagggaaatgtggtaaaaactggatttgctggaatatattttgagtcttaaaagaaaaattactggagatacttggtaaagatgataaggaagacttaattcaaaatgggctactacaatgggaggatagtagcaggtgagagacactgggcttaattccagatacaataagaaaaaaggatttatagcaaaggagcagagtcaggggctgctgggtggcatcgataaaca

SEQ ID NO: 508847 - DNA, 124 bp, Homo sapiens
tctgatcgacatcgaggtcgttcaccctattgttgatattggactcgtagaataggattgcgctgttatccctagggctacacttgttcccgttgttcaacgttattggagtcatttgacgttg

SEQ ID NO: 508848 - DNA, 150 bp, Homo sapiens
ccgggactgagctggagaacctgggaacgcacaagccaaccttattcaggccaggctggccgccggaacccaccaggtaaccacccaccttatcaccactactgctccgccccgtcatttaataatacctaccacctgttgattaccccc

SEQ ID NO: 508849 - DNA, 466 bp, Homo sapiens
cagatcatagctgtcagctcggccctctcctgcttatggcagatgcacgggcctgccggctcttcgcaggcagtatggtggcagttctaggaataagaaacaccaaaataaaggctgggggaggactgacaaaaaaaacttcagaatgcggcatatcagattctcccttggtaccaggtacatcccaaaattttctataaaagaaggaaagtagcaaagtatttttaaaaggagcatttacactactgtggcaattaagcagcaatctctgagtcagcaaatcccatccagcaaactgagtaacatttgagataacatgagaggattaaaaaaagtagggacactagccgggtgcagcggctgaggctggtaatctcaccactttgagaggctgaggaaggaggattgcttgagcccaggagtttgagaccagcctgggcacacattatggcgggggatcctctag

SEQ ID NO: 508850 - DNA, 347 bp, Homo sapiens
tgacaaggaatattagagcagaaagagtgctacttgatgggtggacacactcgatgtcccacatggcaaggtatcttgaataaggtctgttcatcaccttagtggaggagagtcagctcaatctgagcattgcgtttgtccccaatattatatccttcctggtaattacttcgtcatttcattccttcagtcatcttctgatgtgggtgaccggagcgctgagaggcagctctgatgcactattgtgtgtcagcagctcaaaggccctaaaacactgaaggttctgcatctgaagtattagattgttagcagcaaaatatgaaagatgaggtgggtcagaacagaag

SEQ ID NO: 508851 - DNA, 235 bp, Homo sapiens
  misc_feature (201)..(201): n is a, c, g, or t
ctctgggacgagggggttagggatgaggtcagcctctcatctgccagctggtccccgccactcttccactctcagctggactcccctgccagggtccagatcctgccagagtagttggtccccctagccatgtcctggccgtggacactaggactccatgtgtggggccagtacttcagctcctgggcagagcaggtgtcntatagtagcctgcggtctccccaactcttcctca

SEQ ID NO: 508852 - DNA, 404 bp, Homo sapiens
cacgaggccggcgatcaaggcgccgttgatggcgccgatggacgtgcccgcgacccaatcgggtgcgaagccgtgctcctccagcgcctgatagacgcccgcctggtacgcacccagcgccccgcccccctggagagtgagcgcgagccgcctgatctgcggccgggccgcgaacaagccccgagcttcggcgttggcacgctcctcattcccgtcaggcgtcggccccatctccgcgatccgtcccttcaagcggcatcccccagattatccccgcttaaggtctccagggcgatggccgcggggcaccccgccaggagcagcaccggcagcgcgggaggcggcgcgcctgcctgctccaggaacaccgcgatgaacacggcgacgagaccgtgctgctcgat

SEQ ID NO: 508853 - DNA, 398 bp, Homo sapiens
gcacgagaggacctggatgcaaaacccataaaatcccatgccctttgactcagtaattgaagttcttgaaatgtattttggggaaataatttaaaggattattatggaaataaaggggccaggtgtggtggctcatgcctgtaatcccagtgctttgggaggccaaggtgggtgaatcccctgaggtcaggagttcaagaccagcctgcccaacaaggtgaaaccctgttttttctaaaaatacaaaaattagccaggcatggtgtcaggtgcctgtagtcctagctactcgggaggttgagacaggagacttgcttgaacctgggaggtggaggttccagtgacccgagatcatccccctgtactccagcctgggtaacagaatgagactcccttta

SEQ ID NO: 508854 - DNA, 139 bp, Homo sapiens
taaaacgccacaccggttattttctctgtatactgagtacggagcgaaaactattgattttcggcggctgggagtttgccagttcaattctcaagcattaaagaagaacacgaagcggttcgcacgcggtgcccggttt

SEQ ID NO: 508855 - DNA, 600 bp, Homo sapiens
tgagtgccaggtgccatttagaaattccggatgtcaacatcatgacacaaaggtatctgctgagtaaaaatgtcatatatggaaagtgagaaattcttagatccagacatgtatactttattagacgattttacaagtgacttaagaagcaaaaaattcaggaaactgactaaagctatatgcggactgactgatgactacagcatggatcgattattaccttacgatcagtcagatgaagaaagcatgaccattgtattgcagcatattgattttgccattcattatgctgaagtcctagaatttaaagagccaaaggaacgtgaagatgagtcttgctctatgttagacgaatattttcaagaatgccaggatgaatgcagagcttactaaaagtaaccatctaaagagcttgtggccaaaccagcagagcattcttcccttaaaaggatgcattagtagaaagctacttattttaatgacaataagcctgcgctctttatcagcctcatgcctgaatcaaatgtttaagaattctgaaactgctgttcgttgtgggatcttttagttttataacaggatcactttggatttgggggc

SEQ ID NO: 508856 - DNA, 430 bp, Homo sapiens
  misc_feature (244)..(245): n is a, c, g, or t
  misc_feature (247)..(247): n is a, c, g, or t
tacatcgtctcactttgcttcctattaactgctggtaaaaggagatttggggtagcggctagacctccttttatttgaagggggcaagggctgagatgtggtcccaaggggccagaaattcccaagttggtcacaggtggcttagaagtgtgtgttatggttttacggatttccttgaagcctctctccttctctgcctaaaaagaccctatattctcagtctccccgacccaccccaaagganntntgggaggcttttttttatctgccatactcgcaatcctttgctaagtggtgaagggagagttcaagccaaacgcaaggattggatttagctccctaggtgccacagtcagatgccggacacgcatttatatataaatatatatatataaatatattatacccactcatcacggccaaaaaaaaa

SEQ ID NO: 508857 - DNA, 774 bp, Homo sapiens
  misc_feature (621)..(621): n is a, c, g, or t
  misc_feature (774)..(774): n is a, c, g, or t
gtctttttgaggaagacgcgctcgtaaggtgctgaggattattggctccgcacgctcctgttcctgactcaccgtctgttgcgcatctcgcctggggaacaggtcgggtcaggtatccgctgcgcggcaagcgagccatggcattttaagtgatcaccggcaataaatatccgtgggagccaggacggtgattaacttcatcggatattcgaatcacctctaacatgcctgttagcggtagaaatccttggacatagggtgctgtgctgactttgataagatggcgtcaaaaagcaaacatgaatctccagcacgtcgacagtggtaccagtgttcgaattgccgtgccgaagatttatgagatatcacgtgaccacagaacacattctccgttgttggttgagatggtcctgaaagaccgtgggggatcgtattcctagattgcagacttctacatgcggactcaattgaacttgctcaagtccttccttggagatttggttactgcgtgattacttccatgcagtatggagccgggagttaggggtggaagtcagcatgtgcggatgcttaatgtcaaacctacttattagtagagtttgatggaccaagttgggctantttaaagaaaaagcgttcaagctcaaaaaccactttgttgggagggcttccggacccttataaaatgttttcctcacacccagtggggcccaggcgtatcacccctattagaatgaaactctgtggtctacgcgtttggtcccctgggagacn

SEQ ID NO: 508858 - DNA, 174 bp, Homo sapiens
agggtgacagatgtcaaaacgatatgtatcacaaagctagtagttggcggggggggaacaccaaagttccaatcctctaaaatacgctattcatactatgaatataggacataacatctgcagttaaagtaatagtacacaactgaaaaataaactgcaaatcatattcctcaa

SEQ ID NO: 508859 - DNA, 202 bp, Homo sapiens
gacaatcattgcccttgcagagtggtttacaagcatggtgagctgtcagggacgcacatgtcgaaacaggtcaagagatgttcgtgcatcacggttcccagcacatgtgcccggcgaggtgcttcagatatctggaccaatgcacgagatacactcgaggacctgatagtcttcgcagcgttgtcaccctatctcccaccgg

SEQ ID NO: 508860 - DNA, 221 bp, Homo sapiens
  misc_feature (29)..(29): n is a, c, g, or t
  misc_feature (61)..(61): n is a, c, g, or t
  misc_feature (74)..(74): n is a, c, g, or t
  misc_feature (110)..(110): n is a, c, g, or t
  misc_feature (114)..(114): n is a, c, g, or t
actacaggcctcactctcagtggctgtgnaactaccatcatgtagtattctgactggaagncactaggagcagncttccgaaaagcatgtgtctccagtacccttcaagncagnctgtacacacaagcatttcaggaccaaactgtcacaaagtatttggtgagatcacccaacaccaattttttcaccactgtctcatgtgaggtgaagcagctaaccct

SEQ ID NO: 508861 - DNA, 263 bp, Homo sapiens
taggactttgttcttattgttcactgttgtatctccagcttctgagacaaagtgcctgggacatacaaatactttagttgaatgcaataaactggatggatggatggatggttggatggatggatggatagatgaatggattggatggatggacggacggatgggtggatggatggatggatggatggctggatggatggctggttggatggatggatggatagatgaatggattggatggatggagtaggcatcgataaaca

SEQ ID NO: 508862 - DNA, 209 bp, Homo sapiens
tgagaccgggactcactgtggccctggggctggagtgcagtggtgtgatcatagcccaccgaagcctttaaaacttctgggttcaagtgatcctcccaccttaacctgttgctgggactacaggtgaacaccaccatgtctggctaattacttcagttctttaggatcccagaacctagaggtctaaagtccatacaatctgttctttg

SEQ ID NO: 508863 - DNA, 807 bp, Homo sapiens
taagaatggccataatcaaggagaatggtagatgttggcatggatgtggtgaacagagaacgcttctaccctgctagtgggaatgtaaactagtacagccactatagaaaacagtgtgaagattccttaaagaactaaaagtagagccatcatttgatccagcaatcccactactggatatctgcccagaggaaaagaagtcattattcgaaaaagatacttgcacatgtatgtttatagcagcacaattcacaattacaaaatcgtggaaccaacccaaatgcccatcaatcaatgagtggataaagaaaccgtggtgtatatatatatatatgcactatggaatactacatagacataaaaaggaatgaattaacacatttgcagtgacctggatgagattggagactattattctaagtgacgtaactcaggaatgaaaaaccaaacatcatatgttctcactgatatgtgggaagctaagctatgaggacgcaaagacataagaatgacacaatggactttggggacttggagggaagaatgagagggggcgaggggtaaaagactacaaatatgatgcactgtatactgcttgggtgatggctgcaccataatcttacaaatcaccactaaagaacttactcatataatcaaacactacctgtaccccaataacctatggaaaaataaaataaaaaaaccttttgttcttccttatttaaactttggacgtttatatccacctattccatggaaacgtagaaatttgacttggggaaccttttttgtccggttgcccgtttg

SEQ ID NO: 508864 - DNA, 3678 bp, Homo sapiens
taaaatatatgcagaatcttttaataaaacaatttaatttcctattactaaatgatctggacttacatttttcacccagacgaattgtacgtgggcagaccgcagagagtttggctgtgcataatataacagtttgtgaacaaaaaatctcagaatggggaaaaataaaggaatgcccaatccctcagtttgctggaaaccctcctatgacttggaaatggatagtgggtcccatgtttctgtatctctgtgagaggttggtgcggttttggcgatctcaacagaaggtggtcatcaccaaggtggtcactcaccctttcaaaaccatcgagctacagatgaagaagaaggggttcaaaatggaagtgggacaatacatttttgtcaagtgcccaaaggtgtccaagctggagtggcacccttttacactgacatccgcccctgaggaagacttctttagtatccatatccgcatcgttggggactggacagaggggctgttcaatgcttgtggctgtgataagcaggagtttcaagatgcgtggaaactacctaagatagcggttgatgggccctttggcactgccagtgaagatgtgttcagctatgaggtggtgatgttagtgggagcagggattggggtcacacccttcgcatccattctcaagtcagtctggtacaaatattgcaataacgccaccaatctgaagctcaaaaagatctacttctactggctgtgccgggacacacatgcctttgagtggtttgcagatctgctgcaactgctggagagccagatgcaggaaaggaacaatgccggcttcctcagctacaacatctacctcactggctgggatgagtctcaggccaatcactttgctgtgcaccatgatgaggagaaagatgtgatcacaggcctgaaacaaaagactttgtatggacggcccaactgggataatgaattcaagacaattgcaagtcaacaccctaataccagaataggagttttcctctgtggacctgaagccttggctgaaaccctgagtaaacaaagcatctccaactctgagtctggccctcggggagtgcatttcattttcaacaaggaaaacttctaacttgtctcttccatgaggaaataaatgtgggttgtgctgccaaatgctcaaataatgctaattgataatataaataccccctgcttaaaaatggacaaaaagaaactataatgtaatggttttcccttaaaggaatgtcaaagattgtttgatagtgataagttacatttatgtggagctctatggttttgagagcacttttacaaacattatttcatttttttcctctcagtaatgtcagtggaagttagggaaaagattcttggactcaattttagaatcaaaagggaaaggatcaaaaggttcagtaacttccctaagattatgaaactgtgaccagatctagcccatcttactccaggtttgatactctttccacaatactgagctgcctcagaatcctcaaaatcagtttttatattccccaaaagaagaaggaaaccaaggagtagctatatatttctactttgtgtcatttttgccatcattattatcatactgaaggaaattttccagatcattaggacataatacatgttgagagtgtctcaacacttattagtgacagtattgacatctgagcatactccagtttactaatacagcagggtaactgggccagatgttctttctacagaagaatattggattgattggagttaatgtaatactcatcatttaccactgtgcttggcagagagcggatactcaagtaagttttgttaaatgaatgaatgaatttagaaccacacaatgccaagatagaattaatttaaagccttaaacaaaatttatctaaagaaataacttctattactgtcatagaccaaaggaatctgattctccctagggtcaagaacaggctaaggatactaaccaataggattgcctgaagggttctgcacattcttatttgaagcatgaaaaaagagggttggaggtggagaattaacctcctgccatgactctggctcatctagtcctgctccttgtgctataaaataaatgcagactaatttcctgcccaaagtggtcttctccagctagcccttatgaatattgaacttaggaattgtgacaaatatgtatctgatatggtcatttgttttaaataacacccaccccttattttccgtaaatacacacacaaaatggatcgcatctgtgtgactaatggtttatttgtattatatcatcatcatcatcctaaaattaacaacccagaaacaaaaatctctatacagagatcaaattcacactcaatagtatgttctgaatatatgttcaagagagagtctctaaatcactgttagtgtggccaagagcagggttttctttttgttcttagaactgctcccatttctgggaactaaaaccagttttatttgccccaccccttggagccacaaatgtttagaactcttcaacttcggtaatgaggaagaaggagaaagagctgggggaagggcagaagactggtttaggaggaaaaggaaataaggagaaaagagaatgggagagtgagagaaaataaaaaaggcaaaagggagagagaggggaagggggtctcatattggtcattccctgccccagatttcttaaagtttgatatgtatagaatataattgaaggaggtatacacatattgatgttgttttgattatctatggtattgaatcttttaaaatctggtcacaaattttgatgctgagggggattattcaagggactaggatgaactaaataagaactcagttgttctttgtcatactactattcctttcgtctcccagaatcctcagggcactgagggtaggtctgacaaataaggcctgctgtgcgaatatagcctttctgaaatgtaccaggatggtttctgcttagagacacttaggtccagcctgttcacactgcacctcaggtatcaattcatctattcaacagatatttattgtgttattactatgagtcaggctctgtttattgtttcaattctttacaccaaagtatgaactggagagggtacctcagttataaggagtctgagaatattggccctttctaacctatgtgcataattaaaaccagcttcatttgttgctccgagagtgtttctccaaggttttctatcttcaaaaccaactaagttatgaaagtagagagatctgccctgtgttatccagttatgagataaaaaatgaatataagagtgcttgtcattataaaagtttccttttttattctctcaagccaccagctgccagccaccagcagccagctgccagcctagcttttttttttttttttttttttagcacttagtatttagcatttattaacaggtactctaagaatgatgaagcattgtttttaatcttaagactatgaaggtttttcttagttcttctgcttttgcaattgtgtttgtgaaatttgaatacttgcaggctttgtatgtgaataattctagcgggggacctgggagataattcctacggggaattcttaaaactgtgctcaactattaaaatgaatgagctttcaaaaaaacctcgtgccg

SEQ ID NO: 508865 - DNA, 1072 bp, Homo sapiens
gatgacccaccagtcacatgcctatcatatagtaaaacccagcccatgacgcccataacaggggctctctcgagccctcctaatgacctccggactagccatgtgatttcacttccactccagtaaacgctcctcatactaggcctactaagccaagcacactagaccatatacgcaagtgatggcgcgatgtaacaggagaaatgcactataccgaaggccaacatacaccacctgtccagaaaaggccttcgatacgggatgactcctatattattgacctcgagaagtacgctggcttcgcaggattatactagagccattattaccactcgagcctagacccctatcccccaattaggagggctctggtccccagtagggcatcaccgcacgttaatatcccctaggaagtcccgaatcctaaacacatccggatcagtcgcatcaggagtatccattcgacctgagctcaccatagtctattgcgacgaacaatccagataatcccacagtgaatgcaaggcactgcttcacttagcactgcatacctggggtcccatagtagttaacccatgctacaaggcctcaagagtacactccgaaggtcttcccttcgaccatatgcccgacggcactctaacgcgctgcaacattatgcggtagccacaagggcttatcctacgtgaacgttcacgtccactcattgggctccagtatcctcacataatcttgcctacaatccgtgaactaaattatctacagactttagattccaagaaaacgactatggcctacagaatccgcggcctgactactggaccagttccggccagcaaagactcggccggcagcacacctagccgcgaaagagtcgctccccaaccaaatcggcctgccggcggctctcacagaaaacacagccaacagcaacaggaacatgacatgtggccgcccccgactcgcgcgccccacagagacccaccgcctaaaacccagcaacgtagcgcggcgcaccgcaccaacgaacaaaacgagccacccagcggtcgcaccacggacacacgcgacc

SEQ ID NO: 508866 - DNA, 2968 bp, Homo sapiens
cttcctctgccaccatggggaactgggctgtgaatgaggggctctccatttttgtcattctggtttggctggggttgaacgtcttcctctttgtctggtattaccgggtttatgatattccacctaagttcttttacacaagaaaacttcttgggtcagcactggcactggccagggcccctgcagcctgcctgaatttcaactgcatgctgattctcttgccagtctgtcgaaatctgctgtccttcctcaggggttccagtgcgtgctgctcaacaagagttcgaagacaactggacaggaatctcacctttcataaaatggtggcatggatgattgcacttcactctgcgattcacaccattgcacatctatttaatgtggaatggtgtgtgaatgcccgagtcaataattctgatccttattcagtagcactctctgaacttggagacaggcaaaatgaaagttatctcaattttgctcgaaagagaataaagaaccctgaaggaggcctgtacctggctgtgaccctgttggcaggcatcactggagttgtcatcacgctgtgcctcatattaattatcacttcctccaccaaaaccatccggaggtcttactttgaagtcttttggtacacacatcatctctttgtgatcttcttcattggccttgccatccatggagctgaacgaattgtacgtgggcagaccgcagagagtttggctgtgcataatataacagtttgtgaacaaaaaatctcagaatggggaaaaataaaggaatgcccaatccctcagtttgctggaaaccctcctatgacttggaaatggatagtgggtcccatgtttctgtatctctgtgagaggttggtgcggttttggcgatctcaacagaaggtggtcatcaccaaggtggtcactcaccctttcaaaaccatcgagctacagatgaagaagaaggggttcaaaatggaagtgggacaatacatttttgtcaagtgcccaaaggtgtccaagctggagtggcacccttttacactgacatccgcccctgaggaagacttctttagtatccatatccgcatcgttggggactggacagaggggctgttcaatgcttgtggctgtgataagcaggagtttcaagatgcgtggaaactacctaagatagcggttgatgggccctttggcactgccagtgaagatgtgttcagctatgaggtggtgatgttagtgggagcagggattggggtcacacccttcgcatccattctcaagtcagtctggtacaaatattgcaataacgccaccaatctgaagctcaaaaagatctacttctactggctgtgccgggacacacatgcctttgagtggtttgcagatctgctgcaactgctggagagccagatgcaggaaaggaacaatgccggcttcctcagctacaacatctacctcactggctgggatgagtctcaggccaatcactttgctgtgcaccatgatgaggagaaagatgtgatcacaggcctgaaacaaaagactttgtatggacggcccaactgggataatgaattcaagacaattgcaagtcaacaccctaataccagaataggagttttcctctgtggacctgaagccttggctgaaaccctgagtaaacaaagcatctccaactctgagtctggccctcggggagtgcatttcattttcaacaaggaaaacttctaacttgtctcttccatgaggaaataaatgtgggttgtgctgccaaatgctcaaataatgctaattgataatataaataccccctgcttaaaaatggacaaaaagaaactataatgtaatggttttcccttaaaggaatgtcaaagattgtttgatagtgataagttacatttatgtggagctctatggttttgagagcacttttacaaacattatttcatttttttcctctcagtaatgtcagtggaagttagggaaaagattcttggactcaattttagaatcaaaagggaaaggatcaaaaggttcagtaacttccctaagattatgaaactgtgaccagatctagcccatcttactccaggtttgatactctttccacaatactgagctgagggggattattcaagggactaggatgaactaaataagaactcagttgttctttgtcatactactattcctttcgtctcccagaatcctcagggcactgagggtaggtctgacaaataaggcctgctgtgcgaatatagcctttctgaaatgtaccaggatggtttctgcttagagacacttaggtccagcctgttcacactgcacctcaggtatcaattcatctattcaacagatatttattgtgttattactatgagtcaggctctgtttattgtttcaattctttacaccaaagtatgaactggagagggtacctcagttataaggagtctgagaatattggccctttctaacctatgtgcataattaaaaccagcttcatttgttgctccgagagtgtttctccaaggttttctatcttcaaaaccaactaagttatgaaagtagagagatctgccctgtgttatccagttatgagataaaaaatgaatataagagtgcttgtcattataaaagtttccttttttattctctcaagccaccagctgccagccaccagcagccagctgccagcctagcttttttttttttttttttttttagcacttagtatttagcatttattaacaggtactctaagaatgatgaagcattgtttttaatcttaagactatgaaggtttttcttagttcttctgcttttgcaattgtgtttgtgaaatttgaatacttgcaggctttgtatgtgaataattctagcgggggacctgggagataattcctacggggaattcttaaaactgtgctcaactattaaaatgaatgagctttcaaaaaaacctcgtgccg

SEQ ID NO: 508867 - DNA, 355 bp, Homo sapiens
  misc_feature (24)..(24): n is a, c, g, or t
  misc_feature (197)..(198): n is a, c, g, or t
agaccatgcagcggatcggatganactgacaacatacgatggctctgcatattatgcccaggattttaaaagtcaagcattaataaatacattaactacacagatcacaacagctgccctgaacttggccttcaacaggtgtagtttaccctttaactaaactggtaacattttgagacatcgggcttagagcttgnnaacaggctttgggaggacgctttgatctcacattgagaaacccgtctccgtgtttcactattgcgttccaatcccaaatcgcatccacttgggcgtgtcttgaagctcctgccaagcacagttgtctgtgccgtggtgcccgagtccgcgtgcattt

SEQ ID NO: 508868 - DNA, 469 bp, Homo sapiens
  misc_feature (129)..(129): n is a, c, g, or t
ctgtaatcccagctactcttaaaaaaaaattcttctaaaaaaaaaatggatacatgtgcaggacatgcaggtttgtttcataggtatatgtgtgccattgtggtttgctgtacctattgatctgtcctntatgttccctcccctcaccaccccgcaacaggccccggtgtgtgatgttcttctctgtgtgtccatgtgttcttattgttcacctcccacttactagtgagaatatgcagtgtttggttttctgttcctatgttagttttttgaaggtgatggcttccagcttcatccacgtccctggaaaggacatgatctcattcctttttgtggctgcatagtattccatggtgcatatgtactacattttctttatccagtctatcattgatgggcatttgggttggttccatgtctttgctattgtaaacagtgctgcaataaacgtgtacatgtgtcattataa

SEQ ID NO: 508869 - DNA, 3331 bp, Homo sapiens
cttcctctgccaccatggggaactgggctgtgaatgaggggctctccatttttgtcattctggtttggctggggttgaacgtcttcctctttgtctggtattaccgggtttatgatattccacctaagttcttttacacaagaaaacttcttgggtcagcactggcactggccagggcccctgcagcctgcctgaatttcaactgcatgctgattctcttgccagtctgtcgaaatctgctgtccttcctcaggggttccagtgcgtgctgctcaacaagagttcgaagacaactggacaggaatctcacctttcataaaatggtggcatggatgattgcacttcactctgcgattcacaccattgcacatctatttaatgtggaatggtgtgtgaatgcccgagtcaataattctgatccttattcagtagcactctctgaacttggagacaggcaaaatgaaagttatctcaattttgctcgaaagagaataaagaaccctgaaggaggcctgtacctggctgtgaccctgttggcaggcatcactggagttgtcatcacgctgtgcctcatattaattatcacttcctccaccaaaaccatccggaggtcttactttgaagtcttttggtacacacatcatctctttgtgatcttcttcattggccttgccatccatggagctgaacgaattgtacgtgggcagaccgcagagagtttggctgtgcataatataacagtttgtgaacaaaaaatctcagaatggggaaaaataaaggaatgcccaatccctcagtttgctggaaaccctcctatgacttggaaatggatagtgggtcccatgtttctgtatctctgtgagaggttggtgcggttttggcgatctcaacagaaggtggtcatcaccaaggtggtcactcaccctttcaaaaccatcgagctacagatgaagaagaaggggttcaaaatggaagtgggacaatacatttttgtcaagtgcccaaaggtgtccaagctggagtggcacccttttacactgacatccgcccctgaggaagacttctttagtatccatatccgcatcgttggggactggacagaggggctgttcaatgcttgtggctgtgataagcaggagtttcaagatgcgtggaaactacctaagatagcggttgatgggccctttggcactgccagtgaagatgtgttcagctatgaggtggtgatgttagtgggagcagggattggggtcacacccttcgcatccattctcaagtcagtctggtacaaatattgcaataacgccaccaatctgaagctcaaaaagatctacttctactggctgtgccgggacacacatgcctttgagtggtttgcagatctgctgcaactgctggagagccagatgcaggaaaggaacaatgccggcttcctcagctacaacatctacctcactggctgggatgagtctcaggccaatcactttgctgtgcaccatgatgaggagaaagatgtgatcacaggcctgaaacaaaagactttgtatggacggcccaactgggataatgaattcaagacaattgcaagtcaacaccctaataccagaataggagttttcctctgtggacctgaagccttggctgaaaccctgagtaaacaaagcatctccaactctgagtctggccctcggggagtgcatttcattttcaacaaggaaaacttctaacttgtctcttccatgaggaaataaatgtgggttgtgctgccaaatgctcaaataatgctaattgataatataaataccccctgcttaaaaatggacaaaaagaaactataatgtaatggttttcccttaaaggaatgtcaaagattgtttgatagtgataagttacatttatgtggagctctatggttttgagagcacttttacaaacattatttcatttttttcctctcagtaatgtcagtggaagttagggaaaagattcttggactcaattttagaatcaaaagggaaaggatcaaaaggttcagtaacttccctaagattatgaaactgtgaccagatctagcccatcttactccaggtttgatactctttccacaatactgagctgcctcagaatcctcaaaatcagtttttatattccccaaaagaagaaggaaaccaaggagtagctatatatttctactttgtgtcatttttgccatcattattatcatactgaaggaaattttccagatcattaggacataatacatgttgagagtgtctcaacacttattagtgacagtattgacatctgagcatactccagtttactaatacagcagggtaactgggccagatgttctttctacagaagaatattggattgattggagttaatgtaatactcatcatttaccactgtgcttggcagagagcggatactcaagtaagttttgttaaatgaatgaatgaatttagaaccacacaatgccaagatagaattaatttaaagccttaaacaaaatttatctaaagaaataacttctattactgtcatagaccaaaggaatctgattctccctagggtcaagaacaggctaaggatactaaccaataggattgcctgaagggttctgcacattcttatttgaagcatgaaaaaagagggttggaggtggagaattaacctcctgccatgactctggctcatctagtcctgctccttgtgctataaaataaatgcagactaatttcctgcccaaagtggtcttctccagctagcccttatgaatattgaacttaggaattgtgacaaatatgtatctgatatggtcatttgttttaaataacacccaccccttattttccgtaaatacacacacaaaatggatcgcatctgtgtgactaatggtttatttgtattatatcatcatcatcatcctaaaattaacaacccagaaacaaaaatctctatacagagatcaaattcacactcaatagtatgttctgaatatatgttcaagagagagtctctaaatcactgttagtgtggccaagagcagggttttctttttgttcttagaactgctcccatttctgggaactaaaaccagttttatttgccccaccccttggagccacaaatgtttagaactcttcaacttcggtaatgaggaagaaggagaaagagctgggggaagggcagaagactggtttaggaggaaaaggaaataaggagaaaagagaatgggagagagggaaggttttcctttcccccctcacccccagaaaaccaccttcgtccctgccccttctggccgatggcttccaatttatgt

SEQ ID NO: 508870 - DNA, 503 bp, Homo sapiens
acaaaacacagcctgtgtgggcagctacgccccaacacccggccctgtgcacgttgagcacgaagagaagcgagctctctgttcagcgcacttcccagaagccaggggcatcggctgagcacacaccatccggaatatctcgaaaggcacacagtggcatctgtaactatggtaagaaaagcctggtgaaagctcaaggagatccagagcatgtatgaagccgctgcacccctctgttcttacgccctttagtgtcgacactgtctacattggctgcttgctctgaaataacttggaccaagaaggctttgtgccacgccaggctcggaggaagtgtgttggaaaagagggcacacactcgcccgcagcagtcaggcaagactctgcataagtatttcagtgacagcttaccttaccggaaaggtaagctgaaactgtcattactcttcctaactttgcatacttgaaatacttttaactgccttttacagcggacagacctc

SEQ ID NO: 508871 - DNA, 2880 bp, Homo sapiens
tatccagatgctcacacaaacaggctgaaccacactccctctgagcaatatgatccctttgctatttgtggaaaagaaaaaggagcagaggggctctgccctggggcctcaaattaacgggaaattcacctacctgctttgtagacatctcatcccaaagcttgaaattgtctttttttttctttcccaaaagtaccagaataggagttttcctctgtggacctgaagccttggctgaaaccctgagtaaacaaagcatctccaactctgagtctggccctcggggagtgcatttcattttcaacaaggaaaacttctaacttgtctcttccatgaggaaataaatgtgggttgtgctgccaaatgctcaaataatgctaattgataatataaataccccctgcttaaaaatggacaaaaagaaactataatgtaatggttttcccttaaaggaatgtcaaagattgtttgatagtgataagttacatttatgtggagctctatggttttgagagcacttttacaaacattatttcatttttttcctctcagtaatgtcagtggaagttagggaaaagattcttggactcaattttagaatcaaaagggaaaggatcaaaaggttcagtaacttccctaagattatgaaactgtgaccagatctagcccatcttactccaggtttgatactctttccacaatactgagctgcctcagaatcctcaaaatcagtttttatattccccaaaagaagaaggaaaccaaggagtagctatatatttctactttgtgtcatttttgccatcattattatcatactgaaggaaattttccagatcattaggacataatacatgttgagagtgtctcaacacttattagtgacagtattgacatctgagcatactccagtttactaatacagcagggtaactgggccagatgttctttctacagaagaatattggattgattggagttaatgtaatactcatcatttaccactgtgcttggcagagagcggatactcaagtaagttttgttaaatgaatgaatgaatttagaaccacacaatgccaagatagaattaatttaaagccttaaacaaaatttatctaaagaaataacttctattactgtcatagaccaaaggaatctgattctccctagggtcaagaacaggctaaggatactaaccaataggattgcctgaagggttctgcacattcttatttgaagcatgaaaaaagagggttggaggtggagaattaacctcctgccatgactctggctcatctagtcctgctccttgtgctataaaataaatgcagactaatttcctgcccaaagtggtcttctccagctagcccttatgaatattgaacttaggaattgtgacaaatatgtatctgatatggtcatttgttttaaataacacccaccccttattttccgtaaatacacacacaaaatggatcgcatctgtgtgactaatggtttatttgtattatatcatcatcatcatcctaaaattaacaacccagaaacaaaaatctctatacagagatcaaattcacactcaatagtatgttctgaatatatgttcaagagagagtctctaaatcactgttagtgtggccaagagcagggttttctttttgttcttagaactgctcccatttctgggaactaaaaccagttttatttgccccaccccttggagccacaaatgtttagaactcttcaacttcggtaatgaggaagaaggagaaagagctgggggaagggcagaagactggtttaggaggaaaaggaaataaggagaaaagagaatgggagagtgagagaaaataaaaaaggcaaaagggagagagaggggaagggggtctcatattggtcattccctgccccagatttcttaaagtttgatatgtatagaatataattgaaggaggtatacacatattgatgttgttttgattatctatggtattgaatcttttaaaatctggtcacaaattttgatgctgagggggattattcaagggactaggatgaactaaataagaactcagttgttctttgtcatactactattcctttcgtctcccagaatcctcagggcactgagggtaggtctgacaaataaggcctgctgtgcgaatatagcctttctgaaatgtaccaggatggtttctgcttagagacacttaggtccagcctgttcacactgcacctcaggtatcaattcatctattcaacagatatttattgtgttattactatgagtcaggctctgtttattgtttcaattctttacaccaaagtatgaactggagagggtacctcagttataaggagtctgagaatattggccctttctaacctatgtgcataattaaaaccagcttcatttgttgctccgagagtgtttctccaaggttttctatcttcaaaaccaactaagttatgaaagtagagagatctgccctgtgttatccagttatgagataaaaaatgaatataagagtgcttgtcattataaaagtttccttttttattctctcaagccaccagctgccagccaccagcagccagctgccagcctagcttttttttttttttttttttttagcacttagtatttagcatttattaacaggtactctaagaatgatgaagcattgtttttaatcttaagactatgaaggtttttcttagttcttctgcttttgcaattgtgtttgtgaaatttgaatacttgcaggctttgtatgtgaataattctagcgggggacctgggagataattcctacggggaattcttaaaactgtgctcaactattaaaatgaatgagctttcaaaaaaacctcgtgccg

SEQ ID NO: 508872 - DNA, 410 bp, Homo sapiens
ttatccccggctctgggtatgctgttactgcggcaaatgtaagggagctgactgtcacagtccacttagaaaaatgcaggaatggcaggcagagacctaggaaggacgcacacttgatcatgcctcagtcaacagagatggcaccacacagctgccattcgcccagaggacgcccctgggctgggcatcaggacacacaagtgagcccagccgaccgcaccccagcccttgggagcagacaccgttttgcccagaagcactggaatcatgacagtcaggcggcaaaggtgaggggggaagatggcaagggcaacacccaggctaacacgagcctgaaatcaactaagcgggagtaaagtcctgcgcccactgcccaggccccggtgacggtgaccgagggcgcctccccc

SEQ ID NO: 508873 - DNA, 1769 bp, Homo sapiens
cttcctctgccaccatggggaactgggctgtgaatgaggggctctccatttttgtcattctggtttggctggggttgaacgtcttcctctttgtctggtattaccgggtttatgatattccacctaagttcttttacacaagaaaacttcttgggtcagcactggcactggccagggcccctgcagcctgcctgaatttcaactgcatgctgattctcttgccagtctgtcgaaatctgctgtccttcctcaggggttccagtgcgtgctgctcaacaagagttcgaagacaactggacaggaatctcacctttcataaaatggtggcatggatgattgcacttcactctgcgattcacaccattgcacatctatttaatgtggaatggtgtgtgaatgcccgagtcaataattctgatccttattcagtagcactctctgaacttggagacaggcaaaatgaaagttatctcaattttgctcgaaagagaataaagaaccctgaaggaggcctgtacctggctgtgaccctgttggcaggcatcactggagttgtcatcacgctgtgcctcatattaattatcacttcctccaccaaaaccatccggaggtcttactttgaagtcttttggtacacacatcatctctttgtgatcttcttcattggccttgccatccatggagctgaacgaattgtacgtgggcagaccgcagagagtttggctgtgcataatataacagtttgtgaacaaaaaatctcagaatggggaaaaataaaggaatgcccaatccctcagtttgctggaaaccctcctatgacttggaaatggatagtgggtcccatgtttctgtatctctgtgagaggttggtgcggttttggcgatctcaacagaaggtggtcatcaccaaggtggtcactcaccctttcaaaaccatcgagctacagatgaagaagaaggggttcaaaatggaagtgggacaatacatttttgtcaagtgcccaaaggtgtccaagctggagtggcacccttttacactgacatccgcccctgaggaagacttctttagtatccatatccgcatcgttggggactggacagaggggctgttcaatgcttgtggctgtgataagcaggagtttcaagatgcgtggaaactacctaagatagcggttgatgggccctttggcactgccagtgaagatgtgttcagctatgaggtggtgatgttagtgggagcagggattggggtcacacccttcgcatccattctcaagtcagtctggtacaaatattgcaataacgccaccaatctgaagctcaaaaagatctacttctactggctgtgccgggacacacatgcctttgagtggtttgcagatctgctgcaactgctggagagccagatgcaggaaaggaacaatgccggcttcctcagctacaacatctacctcactggctgggatgagtctcaggccaatcactttgctgtgcaccatgatgaggagaaagatgtgatcacaggcctgaaacaaaagactttgtatggacggcccaactgggataatgaattcaagacaattgcaagtcaacaccctaataccagaataggagttttcctctgtggacctgaagccttggctgaaaccctgagtaaacaaagcatctccaactctgagtctggccctcggggagtgcatttcattttcaacaaggaaaacttctaacttgtctcttccatgaggaaataaatgtgggttgtgctgcca

SEQ ID NO: 508874 - DNA, 1789 bp, Homo sapiens
tactaaccaataggattgcctgaagggttctgcacattcttatttgaagcatgaaaaaagagggttggaggtggagaacccttcaggcaatcctaaggatactaaccaataggattgcctgaagggttctgcacattcttatttgaagcatgaaaaaagagggttggaggtggagaattaacctcctgccatgactctggctcatctagtcctgctccttgtgctataaaataaatgcagactaatttcctgcccaaagtggtcttctccagctagcccttatgaatattgaacttaggaattgtgacaaatatgtatctgatatggtcatttgttttaaataacacccaccccttattttccgtaaatacacacacaaaatggatcgcatctgtgtgactaatggtttatttgtattatatcatcatcatcatcctaaaattaacaacccagaaacaaaaatctctatacagagatcaaattcacactcaatagtatgttctgaatatatgttcaagagagagtctctaaatcactgttagtgtggccaagagcagggttttctttttgttcttagaactgctcccatttctgggaactaaaaccagttttatttgccccaccccttggagccacaaatgtttagaactcttcaacttcggtaatgaggaagaaggagaaagagctgggggaagggcagaagactggtttaggaggaaaaggaaataaggagaaaagagaatgggagagtgagagaaaataaaaaaggcaaaagggagagagaggggaagggggtctcatattggtcattccctgccccagatttcttaaagtttgatatgtatagaatataattgaaggaggtatacacatattgatgttgttttgattatctatggtattgaatcttttaaaatctggtcacaaattttgatgctgagggggattattcaagggactaggatgaactaaataagaactcagttgttctttgtcatactactattcctttcgtctcccagaatcctcagggcactgagggtaggtctgacaaataaggcctgctgtgcgaatatagcctttctgaaatgtaccaggatggtttctgcttagagacacttaggtccagcctgttcacactgcacctcaggtatcaattcatctattcaacagatatttattgtgttattactatgagtcaggctctgtttattgtttcaattctttacaccaaagtatgaactggagagggtacctcagttataaggagtctgagaatattggccctttctaacctatgtgcataattaaaaccagcttcatttgttgctccgagagtgtttctccaaggttttctatcttcaaaaccaactaagttatgaaagtagagagatctgccctgtgttatccagttatgagataaaaaatgaatataagagtgcttgtcattataaaagtttccttttttattctctcaagccaccagctgccagccaccagcagccagctgccagcctagcttttttttttttttttttttttagcacttagtatttagcatttattaacaggtactctaagaatgatgaagcattgtttttaatcttaagactatgaaggtttttcttagttcttctgcttttgcaattgtgtttgtgaaatttgaatacttgcaggctttgtatgtgaataattctagcgggggacctgggagataattcctacggggaattcttaaaactgtgctcaactattaaaatgaatgagctttcaaaaaaacctcgtgccg

SEQ ID NO: 508875 - DNA, 999 bp, Homo sapiens
  misc_feature (32)..(33): n is a, c, g, or t
tagcggcctgcccccttatggcatcccgcccnnattcttaaagtttgatatgtatagaatataattgaaggaggtatacacatattgatgttgttttgattatctatggtattgaatcttttaaaatctggtcacaaattttgatgctgagggggattattcaagggactaggatgaactaaataagaactcagttgttctttgtcatactactattcctttcgtctcccagaatcctcagggcactgagggtaggtctgacaaataaggcctgctgtgcgaatatagcctttctgaaatgtaccaggatggtttctgcttagagacacttaggtccagcctgttcacactgcacctcaggtatcaattcatctattcaacagatatttattgtgttattactatgagtcaggctctgtttattgtttcaattctttacaccaaagtatgaactggagagggtacctcagttataaggagtctgagaatattggccctttctaacctatgtgcataattaaaaccagcttcatttgttgctccgagagtgtttctccaaggttttctatcttcaaaaccaactaagttatgaaagtagagagatctgccctgtgttatccagttatgagataaaaaatgaatataagagtgcttgtcattataaaagtttccttttttattctctcaagccaccagctgccagccaccagcagccagctgccagcctagcttttttttttttttttttttttagcacttagtatttagcatttattaacaggtactctaagaatgatgaagcattgtttttaatcttaagactatgaaggtttttcttagttcttctgcttttgcaattgtgtttgtgaaatttgaatacttgcaggctttgtatgtgaataattctagcgggggacctgggagataattcctacggggaattcttaaaactgtgctcaactattaaaatgaatgagctttcaaaaaaacctcgtgccg

SEQ ID NO: 508876 - DNA, 741 bp, Homo sapiens
  misc_feature (471)..(471): n is a, c, g, or t
  misc_feature (481)..(481): n is a, c, g, or t
cttcctctgccaccatggggaactgggctgtgaatgaggggctctccatttttgtcattctggtttggctggggttgaacgtcttcctctttgtctggtattaccgggtttatgatattccacctaagttcttttacacaagaaaacttcttgggtcagcactggcactggccagggcccctgcagcctgcctgaatttcaactgcatgctgattctcttgccagtctgtcgaaatctgctgtccttcctcaggggttccagtgcgtgctgctcaacaagagttcgaagacaactggacaggaatctcacctttcataaaatggtggcatggatgattgcacttcactctggtaagtttattaaagaaaacttggaaccaggaagttccctctattcatagatacctttttatataggagatcaaccagttttatagttagattaagtggtggttggatatgttgtatttntttaatgagntttgctcaaaagtatttaccacactttctgccacttcaatattaggatttattcctttaggttttaaagcatttttatttcaggattttcctataaaaatgaaaatatgccatcagaaaagtcaatcctagtgtcctcaccctttgctattctttctagtgtcaaaaatgttaattcactcatgaaaacttatttattctaaaaaaagttcttggttgcacgtgtgaatttgtggactttttgcagcagcaccaccagga

SEQ ID NO: 508877 - DNA, 177 bp, Homo sapiens
catatgccgcgttacatggatttggggctggcagggtcgagggtcatcaaatgcattgtggctaaccgtatgtggtccctcaattccccggcccgttggcggggaaggtggccccggttgggtcgtgcatatagtgggagggctgtggccccggcgttactaaatacaaatgggtgg

SEQ ID NO: 508878 - DNA, 508 bp, Homo sapiens
ccaccctggggatgcggcctattgtgaataatgctgctatgaacgtttatgtacaaatatctcttcaaggctctgctttcagttcttttgggtataaacccacaagtggaattgctggatcatatggcgattctatttttaattttttgaggagctgccatactgtttttcacagcatcgtaccattttatattccctccaatcatgcacaaggattccaatttctccacaacctggctagcaatctttatttcatgtttttcttttttttaatttttgagatggagtctcgctctgtctcccaggctggagtgtagtggtgtgatctcagctcactgcaacctccgcctcccaggttcaagtgattctcctgcctcagcctcccaagcagctgggattacagctacgcgtcaccacgcctggctaatttttgagttttcagtagagatagattttcaccgtgttggtcaggctggtcttgaactcctgacctcagatgatccacccg

SEQ ID NO: 508879 - DNA, 525 bp, Homo sapiens
  misc_feature (245)..(245): n is a, c, g, or t
attcgataagtcgaaactgaagaagacagagacgcaagagaaaaatcccctgccttccaaagaaacgattgaacaggagaagcaagcaggcgaatcgtaatgaggcgtgcgccgccaatatgccctggacattccccaagcattgccttcttattttacttcttttagcggtttaactttgtaagatgcaaaaaggttggatcaagtttaaatgactgtgctgcccctttcacatcaaagaactnctgccaacgaagggcgcgcctgcccttcccctttggttttttttttgggcgggcagggaaggaaaaaacttgcatgttggtgaaggaaaaagtggggtggaaaaagtggggggggacgccagtgaaatttaaagtaaaaccaagctggcccaaggggtcctgcaggctgtaaagcagtttaatcaaagggcccttttttttttttgttcaaaagattttaattattggaaggcccaatttttttaatatgcaaataaaaagtttaaacccttaaaaaaaa

SEQ ID NO: 508880 - DNA, 495 bp, Homo sapiens
  misc_feature (345)..(345): n is a, c, g, or t
  misc_feature (351)..(351): n is a, c, g, or t
ccctgccatgtggctggggcactggtggggcctggggctactgaggtgggccttcttggcccgtttcgggggcccctcccccgctttcctgggcctgtcggttgaccgaagcggcgagccaaaggcagttttatttgcaagattagaggcctggaataatcgggctttttagatggtgtagttccccctgtactagcctggggttcgggagcagctgctggtggctgggccatcagtgggcccaagggttctctgtccctggttcgactgtggtttggctttcccgtgtctttcctggtagagcccttcctcgggcccgtcggtttgggtggggggggggttttnggcctnaatgtccccgccagctcctcctcccccgggcgtgcttgggcttcgttggggtgtggtcatttttggccccgccgggggggcccgtgttgcttttctgtccctgtttgttttggcgcagcttaagcctgcccccatactttgcca

SEQ ID NO: 508881 - DNA, 89 bp, Homo sapiens
ggatttgctggtgcagaacaactaggcttaatagggacatgaggtcaactctcgagaccatcctggctaacagtgaaaccccaaaaaaa

SEQ ID NO: 508882 - DNA, 203 bp, Homo sapiens
tctcctcacagcactaggatccgagttaacagagatacaaattcctgctctgcacgattgttgtgaaacaataggtggaaggagttagtctaggccgctgtccttgaattacattgttcccagagaacctaggagagttctttagctgggcccccaccccagatgccattttgagccccttagccactcctgatcaggtccct

SEQ ID NO: 508883 - DNA, 701 bp, Homo sapiens
tcccacgcctcctccactggcggatgatttgtgtgcgcgcgccccttcttcgggagaagagaacccccccccgcctcgtgtggctagatgtttgttgtgtgtagagcatgcccccctcagctttctgcttgtccttggccatttggtcatgccgatgtctcctcattaggaaagataggttgcgtttggtctcattatcagagcacagtcttttttcttttcttttttcgcggggcgccgcccttctactcaaacagagtgcacacaaccctcgctgagtataagagtgacgcgccacagcctcctcaataactctctgcgcaccccgccacgttgttgagagaagtacaaattcgtaaataccatataatcatgtttttttggtcttttcctcctccgatttcacacacactacgtattccgccttatgtttttgttagtcatctacacttcacataagtgaatattatctctctcttcacacatttttttctttctctttttatgtttcgtttctattccactcaagtatcgttctcaaagatattcccaacgcgcaacaagattcttcctccccatcagatccctcctctgttcaagacatacaagacaatcgatcttccacccctccccatgcgtctcatccgaacaattactactacaattctgatacaagagcgctcccatcaattgtcgcagaa

SEQ ID NO: 508884 - DNA, 336 bp, Homo sapiens
  misc_feature (48)..(48): n is a, c, g, or t
  misc_feature (147)..(147): n is a, c, g, or t
  misc_feature (152)..(152): n is a, c, g, or t
gtaagtcctccgtgaagtttcgaggtaggtatttcattgaagtttcgnctcaagtgtgtgatagaggaagcttttgtggctgcgtgtgtagtcatccctcctcgttctgtgaaagcaaatgcgtgtcggctttgaaggttcagatgncgtanctaggcggtaatgccctccgtgcccacaagagggcaacatcccgagggctttgtgagcgctgtatctcttgttaaacgcgcaggcttgggtttagagaaagttacactgaaacttttaaaaaactgataccacctcttatttcgcgatactaaaaaaagaaagatataaaggaaaaaaaaaaaa

SEQ ID NO: 508885 - DNA, 664 bp, Homo sapiens
gactctcctctcaagctgggggttggtagggtggggttacacgcggtttcgatatgcgtatcgaaataagtgtgatatctgttcgtgcggcccatctcatcctggatcacgggctacctgatgtatgcgctccagctaacggagttcgtcgaaaggctggtgtccagcatcttatgcaagatcttagatatgtcgatagaagacacttgtaatcaagagaaggcgcacatcgctcgcaaaagttcagtgtggcatccaaagcattccggagagagcagctggtagcaggagcttacagtgggataattcatttgaagatttgatagaccgtagaaatgagtgctatcagagttaccagcgatgagctatggaactagaaagttgatcgatggcgatggaaggagagttgaagaagatcaatatcatgaagcgcgcaaggtagatttataatgaacagattgaatgaactataaagagctacagaaagttcatggatatcaaatagaatgtcaagctagatacgatccatcttgatcgcgagcccctcttgcgaggcgaaagggaacccagttggccgatgaatcattggtgacagcagttaacaagaggatgtggaccctggaagatgcttccttaaaaaatctctgtgaccattggcttcatg

SEQ ID NO: 508886 - DNA, 1030 bp, Homo sapiens
cgccgccgcgccgcgcccgccgccttggattcccgcggactccgcccggacccggcctccccaggcatggccgccgctgccgcttctccgacacatcggtcctggctattccccgagacctctccggcctccccgcgcgggtgagggccgcgggcagctcgggcttcgaggccgtcgaggtggcctggcgtacgcggagacgcctgaggcggctggcgcgcgccggcgaaagcggggctggggattgtactgatacaacacgcccccgggcgaccaagagaagggggcacatggggactagggggccgtccccgggcgacaggcggacttccgagagggactggagcaggccgtgcggaatgccaaagccctgggttgtcccaggatccagctgataggactggacgagtaccccaggaagctagatcgaataagcagtcaaggctggcagatggagagcacgaataatccatgggagaacacctggacgggccacatgccagacatgaggcgattagcgaatccagaggaagagacccatcgatggcaacccttgcatgggaggccccgatacaaactaccccgcgagtcccactgaagcccccgcagtacgatataacgtggcacaacgcccccaaagtcaaggacgagcaaagcacagaccattacacagaaagggataaggacaagaacaccaaacctcccaggtaactacaatagggaacaagtcgttccgcagcgcgagcaggccacatgggatgggaaccgtggacaggcaaaaataccgggaagatcatgcccatgaagggcctatggcaggtgccacaggtccccagggcggcaggggagacccaacagaccgagagacgcagagtatccccgtacagtatcatgcggagacaaagacaacagagcaacaggggtgcacccacagacgagcgacagtggcaaacgaccacagggaatcagggcaccccaagccgacgagaggcgccacaccaagacgacgcaaaagaccacaccacgacag

SEQ ID NO: 508887 - DNA, 861 bp, Homo sapiens
gagggagcggcggcgctgcgggccgggccgggcctggtgggcttgaggcctgtgctggagccgtggggtccgcgcagccccgtgccggagcccaccagtgcggcggctgcggtgcctggcgcacctggtgcgtcttcgtgccccgttctccaagcgccgtgcagggccggcgtcccaggcctcagggtccgttgcaatcttcctggcctggctgggctgtctttgcatggcagctggctggtgtacgtgcacttactcgtcctactcggagcgctgtcgctggcctatgtctgccatggtggtctctttgtgaccagtaccggcaaggggatcatctcgggctcctgtctgccagtgacctgtgtgagctgcatatggtggagtggaggacctgcctcgtcgtgatgggacctgggccagcagggtgtacagagggcgtctggcgggacaagggatgtaacacatgaagtgatgggacattgaggagagccatcgagtccaaggacccggtcggatgcggctctccggcgggagcgtggtacatgattggaacaagggcggcaaccgagaatagctcacatccaaggaattccgggtaggatgagcgatcgggttcctcaaggtgaatcttgggagaacttcactttcaccttgaccggacgactagggatatagggccaatgggtccattgcgtcaatcggggtttcgaccttatccaacagaatgggaaccaaatccgggaagtagtcaccaatagggcaaggaggaaggtccaaaagtacacgtagatggaccgcacactgtggacatgcaacgaggtaaaccgatatttccattgcattgattgagatgtccccatg

SEQ ID NO: 508888 - DNA, 460 bp, Homo sapiens
catgtgttgtgccggtgggtaactgagtgaagcgcccaggtttgcaagataggcagcatctatacatggtcagcccgatgtccttctctagaaagatgcaaaacccagaagacctaatggtcattgaaatcattgaataaaattttgactatcttagaaaagaaatgacacaaaatatatatcagatggcgacatttgtaacaacagctggtttctctggaatattctcaaacttcctgttcagacgctgcttcaaggttcaacataatgctttgaagacctatgcatcattggctacacttccttttgtgtctactgttgttactgacaatctttttgtaattcatgctttgtattcagataatatcagctaggaaaactgtgttttcagaagctcactgattggcatagtttgtggtgttttctatcccagttctttggcttttactaaaaatggacg

SEQ ID NO: 508889 - DNA, 857 bp, Homo sapiens
gcagaggcatcatggagggtcccggggatggctggtgctctgtgtgctgaccatatctgctggacttctatgagtgaccgaggacttgtggcgagcaccagaggggaaagaaaggggaggcacgtgcaagacctggcacgacgtgcgtgcgcgtcaggcctcagagggtgagcatatggggatgctcgagggtcccgtgtgccatccgtacagtgcgatccaaggccttaaagggagaccagaggggaaacgtggagccgcttctgggaatacctccgtgcaaggttggtcatatccaggatcacatcggctccccatcggagcccgtggcatcccgggaattaacaggcaccaagggcagcccagtgaaaacatcaaggaccagccgaggccagaccttctccggcattcggcggaaccccccaatggggggcaacgtggtcatcttcgacacggtcatcaccaaccaggaagaaccgtaccagaaccactccggccgattcgtctgcactgtacccggctacgtactacttcaccttccaggtgctgtcccagtggggaaatctgcctgtccatcgtctcctcctcaaggtggccaggtccgacgctccctgggcttctgtgacacaccaacaaggggctcttccaggtggtgtcagggggcatggtgcttcagcctgcagcagggtgaccaggtctgggttgacaaagagccaaacaagggtcaccatttagcagggctctgaggccgagagcgtcttcagcgggtatcctcatcgttcgcatctgcctgagccagggaaggacccccgtccccaacgacgtcgtctggcttccatgctccgacttgtaacatg

SEQ ID NO: 508890 - DNA, 251 bp, Homo sapiens
  misc_feature (120)..(120): n is a, c, g, or t
  misc_feature (154)..(154): n is a, c, g, or t
  misc_feature (200)..(200): n is a, c, g, or t
tagagatggggtctggctatgttgcccaggctggtcacaaactcctgacctcaagcaatcctctatccttggtctcccaaagtgctgggattacaggcgtgacaggcatgccctgccaancacaagtgtatcttaatccatcataccccactgnctgactttctctgttggagatcactccttatttaaaaataaggganaacaccaaaaaattggtttttaaacaagttataatttttggttccaatctg

SEQ ID NO: 508891 - DNA, 1702 bp, Homo sapiens
  misc_feature (415)..(415): n is a, c, g, or t
gtggtgatggttcttctcctgctcggcttgtggtgaaagataggcaatactcatttgttaagggagtttgcttgcgtggggtatgtgtgttttcttagcagcaagttttgtggggggagtttatttttcttccaccgcccctggtccgagtggctatcctgtgcggttttatgctgttgccgttcgccttacacaagaaggatgtgtcctctggaggccctctgttggaggtgcctcttaatagttagagggggggcgggatccctccccgtccgtccgcgctgtggttgtttcgcccgcccccccgacacattgcttgagaggttgtttattttataaggggaaagaggtgtggtggctcctactaatcgaccccccacagagaacctttccttcttctagcgggacaaaaggngagtgtttacttaatggatggggaagaatatgttgatgatactgaggatgcgcccttccaatagacgcacatgagggggggacaccacagggctttccctccgtagggtaaaaaagggggaggttaagaccgccttcgacaagcaggccgttgttgttctcgtttgtgtgcgcccccacgaaatgtggggggaagagctgggtgagtgatgacaccgggttgttttttcataaaaagggggacatcacaatgggggcttttcccacacccctgtgcaccacaggcgtgtttttaatggggagattctttttttccctgttggggtttggttgcaaaatggtggggccccacactttaaaagggggggtaatagtgcaacagcgttttggacaacaccacccacgagtgtgttgtgcgctgctttatattcgtgcacagactttatagtttttttccctctggggggagacaagaagggttgccgctataagagagggggactttttgagagagtatacacttcttcacacacttcgggggggaatttctccccacacaggagaaaggtgtgggggccacacaattataggccctctgtgggcgtctctctctttccgcacacacacagtgtgcgcacactcacaggagtttggagagagagtgtgtgtgtgttctaagagcttctctctcacgagacgcacacttctgtgtgtgtcttggtgagacgctcacatctctgaggaaatagtttgtgtgggagaaacttctgagagggggtgcgtcctcttcagtagtgtcccgctctgttgtgtgtcacactctggttctctccacagggtctcacacactcttgggggagactcttggtggtgtgggtgtgtggagactctggagagagacctctcacaccccctctgtgtctcccaggtctctcgcgccccgctgtgtcttatatctccacacaccgctggtttctcacatgttagagcaagaaccccttctctaaagggaggccaagaggagaggggagaagccaccacgagatgtgcacaaacaccacagggggctctcctgttttcacattcttttttaaaaaccttgagataatctctcagcccacaaaggcggagatgcccccctgccacctctcaaagcctggagaattggtgcaataaacccggagttcttgttaatcttttgtaataaaccggagatgttaatttgttatacgaaagggccagtttgtaaacagacacttgtttttttaataaaaagaaagttttgcca

SEQ ID NO: 508892 - DNA, 249 bp, Homo sapiens
cccccccccccattttctttttccttcccaggggggggggggggccccggtttttttttttaaggcctttttttggaagaaccccccccccccccggggggttttaccccttttccccggggcgggggtgtttggggtttccccctttttccaaaacctttttaattttagttccccccccttttccctttttttttttgccccgggccccgccgggggggggggtttttttttttttttttttttgga

SEQ ID NO: 508893 - DNA, 99 bp, Homo sapiens
gatttgaataatatactttttaaatgtgaatttctcaagttgagtttggaaacatctggagtcctattgacatcgccagtaaaattatcaatgttctag

SEQ ID NO: 508894 - DNA, 168 bp, Homo sapiens
  misc_feature (97)..(98): n is a, c, g, or t
  misc_feature (104)..(104): n is a, c, g, or t
  misc_feature (106)..(106): n is a, c, g, or t
  misc_feature (108)..(108): n is a, c, g, or t
  misc_feature (114)..(118): n is a, c, g, or t
  misc_feature (122)..(122): n is a, c, g, or t
  misc_feature (124)..(124): n is a, c, g, or t
gctgcgaagggggacgcggcatccatctctcctcgggaactttgaaaatgctcagttcttctggcctagtctccgctgggccgccgccgcgcctccnngggccncngncctccnnnnngccncngaggcccgagccttgcggtcgcgctctccgctctttatcttctc

SEQ ID NO: 508895 - DNA, 289 bp, Homo sapiens
cagtgctgtagcttgtaggatgaaccgaggcatttccatgactagtggtggccggactgtagagtggcagttgagggtccctggactggtgacagagctattgcttgttggatgaactgtgacgtttccatggctggtggtggtagggttgtgactggccgtcgtaggatccgtggctagtggtgcctgtggtgcttgtcctgtgagtggtggtttagtggctcttggtagtcctgtggctggttgttccagtgctctctgtaaccgtgggtgtcaccgtgaaggatgg

SEQ ID NO: 508896 - DNA, 1064 bp, Homo sapiens
ccgttcttgccgcgtgtgtgttactcgtggctctgtttgtcctctctgcctgggtgtggcagtgtggttgcgtgtagtgtgccatgttccgttcactaccgtttcgcctgctgcgtctgttgtcggggcccctcgtgtcgattttgccggggcgcgtgcatcgcggtgggcgtgggtgggcctatgggctgtcaggggtcgcgctgctgggcgacgtcttcaacgttcgtgtcctatcgttgatcctggcgtgccgggcttgctcagtctggctgctgatagggtgtcgccctacgtgtcatcgtggcttgagcgctgttgatgtccatctgagccgaagttgttatgcgtctagggtgaaggtctgtggcctgtcacatgggttggtagaccgccgttctgtgcgcgaatccctcctgtgtagtccataccctaatagcgtatcgtataagggtataatcaagcgcggtctgtgggactgtgttagcgtccgcgttgtctccgaggtcgaattgaagcgtcccttgtgcgcctcaaagggaaacgaatgtattgtgtatgtctgtctctatctatgtgtagtctatgtaagtacctcaatacctgtaatctccaccattgcggtacacagttgtgtcctgtatatgcggcgtagtcccggatatcttagtgctgcaaaggctgtgtcgaaccagtccgtagattacgtcgcagcaaggccccctgtctgccctatgtcttgcaagagcctgatatgacgacttactattgtactgatgaatggtacaccactcgacggcagctggacaatgcattgcacgtgaggatacaatacatatggacgcactgctgcacccttggaacatgctacaacaacatgatgtgtgtcggtgcacgcaagaccctacttctaacctccctgttcttatgaattcgatacagcatacccaccgattccagctacgaccaactcatacaccttcctatgattaaacttcctaccatctcaccctagcattacttatatgatatgtcttaatacccatacaatctgcacatccact

SEQ ID NO: 508897 - DNA, 299 bp, Homo sapiens
gattgttcctcagcaacattgtagtgagtgagggtgtttattataagtaatgttagtgtattcggctataaagaatagaggcgaacggcgcctgcgtcgtattcgatagtagaagcctgagactagtctcggactccccttcggcaaagtcaaagggggttcggtaggtctctgctaatgtggagatcaatcctattatggccatatggtcatgatggcagggagtagtctagaggtgtacttgtgtatgagataagggtggacaggttgaaaggagccacttattcataatgttgata

SEQ ID NO: 508898 - DNA, 943 bp, Homo sapiens
  misc_feature (764)..(764): n is a, c, g, or t
cgcggagtgcggagggaggctgggctctgggaagtccgcgcgcgtctccgcttcagaggcaggctcccggtataatgagcacccatgttgcaggcctgggcctgtactaagatgaagctgggcaatccccagtccttcctggatcaggaggaggcatatgacctagcagcgtgcatggtaaccagaaggtcgtggaagaccttacaccgagcgccgcaaatgccactgcagtgagcttccatgatcctcggggaccgtgtagcccggcactcatgtcttcaagcgtcctacccacagccacgacgattgcagcttgtctgctgtaagggtgctcactacgtacattcgcacggtcgcttgacccaagacaacactggaccactggtgcggtaacaatgaagccagctctggtgtagctgctctttagcagccattcgttccgatgactcatcagacgccctttggtagagattctcagcaggcatgtaaggaacgggtagggctgacgagcatcatgagccacacgtagtccaggcgtcgctgactgcctccgggcgactctgttctggcatcgagcttcgtatgctagtgtgccgtgcatgagcgtggactgcacctgcttcacggtcgccgagtatcgccagcggtgcctttcgctggctccgactgtggcgcgcgtggttggaagcgagccgtggttggcagggactcgttgctacggcacggtactctcggaacggggctttcgcttgaggcctattganttggttgctctgggagcagcggtatcacctgtacaatgctacccgtctttaggttgttctcgagtagtccagatgtccacactaattgattctccgtatcgatctaagcgtcaatgcttgagtcaccaaagtatgacctgtacgtgttttgaccgcaaagggcgtacagggggtcaacg

SEQ ID NO: 508899 - DNA, 102 bp, Homo sapiens
  misc_feature (11)..(11): n is a, c, g, or t
ggcatcccccnttacttaaagagaaagttgctaaaaagtcaggaggagctactatagaagaactaactgagaaatgtaaacagatcgcaccgagtaaagaag

SEQ ID NO: 508900 - DNA, 139 bp, Homo sapiens
cgtacccgatcgtctggcgctgtggagcgaggcgctcctatcacgcatcggcacctgcaccttctacggcaccgccaacaccaaccagatggtgatggaagtgatgggcctgcacctgccgggcgcctctttcgtgcat

SEQ ID NO: 508901 - DNA, 151 bp, Homo sapiens
gaacccaatccttcatcaaccttatcaaccttcatcaaacgtgagactgcggaaagcaaccaaataacagcgataattggctgtagtggtcaacttgtatacgggtttagaggttacgatgacaggatttcgatgacaggatttcagatga

SEQ ID NO: 508902 - DNA, 255 bp, Homo sapiens
  misc_feature (37)..(37): n is a, c, g, or t
  misc_feature (89)..(89): n is a, c, g, or t
  misc_feature (100)..(100): n is a, c, g, or t
  misc_feature (106)..(106): n is a, c, g, or t
gcgccgggagcttccttgcaggaaaactgctccgaancacttttaaattttttccctttttttttcttgccctttcccattagttgtantttttatttanttttanttttatttttttttagagatggagtctcactatgttgctcaggctggccttgaactcctgggctcaagcaatcctcctgcctcagcctccctagtagctgggactttaagtgtacaccactgtgcctgctttgaatcctttaaaaagag

SEQ ID NO: 508903 - DNA, 245 bp, Homo sapiens
gttgcccttaagcagttccagcttgacttttccctttatcttagtgatgtggggtcccataagatctattttcctttcacatatgcaatcctttcatatgtacctccaataccttaaatattttgaaaaaaaatttagaggtctcttccgcaattctgggaccacaaatgccagaaaacttccaaatacttcaccctcatcaaaagtatgagctttaagatctggactttgccctttctggttgg

SEQ ID NO: 508904 - DNA, 411 bp, Homo sapiens
agtgtacacattattttccaatttgaagattcatttgaaggtagctcctgccatctgctaatagcagttcaaactagattttttgtcatcaagtccctgaatgaaagtatgacgttaggtccctctgaagtttaattctgatttctcattacgagaaatttgctttcatggtattatttcttaattgctatgcttcagaatcaattagtgtatatatgccctttcccgcattattgtagagtcaagtcttggtgttaaagcccaatgtgacagtgtctgatgtaggtactgtcttactggttttttaatagatccttttgtattagagagagagagggggttttgaaaaacctcctttagaagaggggaaaaagagagacaaataaaaaaaggaaacaaaacataaggggg

SEQ ID NO: 508905 - DNA, 380 bp, Homo sapiens
  misc_feature (35)..(35): n is a, c, g, or t
  misc_feature (66)..(66): n is a, c, g, or t
  misc_feature (101)..(101): n is a, c, g, or t
  misc_feature (110)..(110): n is a, c, g, or t
  misc_feature (119)..(119): n is a, c, g, or t
  misc_feature (204)..(204): n is a, c, g, or t
  misc_feature (224)..(224): n is a, c, g, or t
acccgctggaaatcttggttccggagccctgagangaaagagtcatggtagacctttttggatttnctccataatgatggtccagaattgggtcaagtggngttgcgcgncatggctcntactgtaaccccgcactttgggaggccgaggtaggcggatcacttgaggtcggagttcgaaactagcctggccaacatggtgaantcgcatctctactaaaaatngaaaaattagccagatatggtggcacacgcctataatcccagctactcgggtggctgaggcacaagaattgcttaaatctgggaggcggaggttgcagtgagctgagattgagccactgcacttcagcctgggtgagacaatgagattctgtctcc

SEQ ID NO: 508906 - DNA, 334 bp, Homo sapiens
  misc_feature (110)..(110): n is a, c, g, or t
gggtttggggtttttgttaaaattgggaagaaaccatcctttctttccctttggattttctaatggaaaagcctcagttcctaaaccggaattttttcaaatgaaacttncctggccccgtctttttaaaaaatagtgattttttaaacaagcttatttgggttcccagcccccaacccaatgaggcatctgtcttggggcctttttttgttttttgcttattgaaacccttaaaatgaaagctattttttggatttaagttgaaaaaaggaaaatcttgctttttttggggcccagggacaaatgtttgttttgtgattttgctaaggttata

SEQ ID NO: 508907 - DNA, 341 bp, Homo sapiens
tacctagaggacccaagctccaacagagacaaaggtaggaggaagacaagaaaggaagatccaaaggagcggaagaaacttacttagggacagattagcatcttacatacctaagagtggggggtgaaggggaagaacacgattagagagcatttaaaagcctttatccacacagccctggtgattattggattggaatccaaaccaacacagcctgagattattaagaggttttaaaaggccaccgtggtgtggactggttattgccagtgttaagagagaaattaacttgggtttttaggcccccgaaattggagcaccacccaatcttgttgggagcc

SEQ ID NO: 508908 - DNA, 238 bp, Homo sapiens
tagccatcccgaggttaatctggcttatagtcgacgctgacagtccgcttcccacttttagataagcaccgggatgaagctgtgtccgtgattggaaacccgccgggggtggcgtgtgctggggtaaacatgaaagtattaaacaaagtcaagcatgagatggattttgatgctgagtggctatttgaaaatcatgacgagaaggattccagagtcaatgctagtaagactgctgaca

SEQ ID NO: 508909 - DNA, 182 bp, Homo sapiens
ggagggcggtgtccaagtttgtgctcataagcatggctcttttggtgctgtattaagcttggctctggtcgggtgcttgttgactggtaccgttcccggctggacgttgtggcaaccatttggagcattcagggcgtgggctgaggtggtaacattctgctggtggatgcctgaatctcata

SEQ ID NO: 508910 - DNA, 986 bp, Homo sapiens
gagatggcagaagtagagcagaagaatgacgcggaccttcctgcaatgttcacctaccgcggctgtggacctcgaccagctgctggacatgtcctacggagcagcatgactgcatgcatgtacatgtgctgcgccagctgtgtgtgttggcatgaacctggtggacctgctgcgcaggaatcgcaggcaactcacctgctcgaacgtcgcctgctgcacacggccacacgaagcgaggaaagcacgcccatgcgacgaagcccggaacgtcgcgtgcagacagcacacatagcgaggacacatgatcactccgtacaccgcagcatgggtcggcgcaaagaactgtgacgaggcgccgctctacccaaccgctgcaagacctatcaaaccacggtggcacgatccgagccgcgcagatgactcgagccacataccctggcgcgacgatatcaccaatcacgctacacaacgcccgatcaagcaatggccggcccgggccctccggggcccaccaccacatgccctccgcgactaacagacccctacctccaggtcacacggcccacagcctaccacacacagcgcggcacactgcacgtcccagacaacaacaacaccaacaacaaacaccacgcggagagacaccaccaccgaccacgacgcgccaccgcgcacaccaccaccgagaaaacaatagccaactagtcgagccccaaaccgagcaccaaacaccaacacaacccacctcgaccccccccgcacacacactggcacacacaacggggacaccacacaggaccggcaccccccccccataacagagcacaggccgacaacacacacgcgccacagaaaaaaacgacccgagtgtaaaaccccgggaccaaacactgcaacccgcggcgacacaaacaccaaacaccgcacgaacgcagcacgcacgcagtgctcgcagcccatggcagacacagccaatacagccacca

SEQ ID NO: 508911 - DNA, 843 bp, Homo sapiens
gcttctcaaccttggtggcggggtttccggcgaatctgccgccctcgagaacattggcctccgcccagcaggttgttttcccgccggggtttattcatgccggtgttgtgtggccgtcacaccccggctcgagagtagcgggcccccaacctcttgggggtgttcctgcacattcggtgctggcgagggagcttttttaacacggggccccacgtagcgtccagtgactgagcttcaacccttatccggcgctgggccaccacctgtggccaccgtgggacccaacagttgcgcccggacatgaccccccgatattctcccggccgcattcccacacaggggccccgaaagtccgggtggttgccctcgggcccccttttttccacgaccccggattcccgcttgggccgaggcaacgctttcccacgggggtgtcccccgagcggagactccctttcacccgactgtgaaccccccggcgcaggttatacaccggccttctttgtgcccctttcactttgttagagggctgttacacgtgaacctctcgcacggttcattccgcgggttacttagacccccgcttaagagtggtttcaggactggttaagacggctgttccttcacagttaaggccccccctggcttgggcaaccccccgctggctggccgccgttccccgccttttgcgcccctctggcgtgggacccccccctgtcccccctaccagaaagacccgaactgggttccccggaaccccacagagggccagacccccaccttgaggtgcgctcccaacacttcggggcttttttgccaaaaaagattccggaagcgttttga

SEQ ID NO: 508912 - DNA, 204 bp, Homo sapiens
tacatgatacgaatcgagccggtaccccccgactagcccgacagctttctgtattcccgatttttcctggattctggaaaagagctcggaatacagaaagcgtcccggtcgttgcctgtgaaaaagcagaagtccatgggctgggtttactatatgataggcatgtgattggtgggtcattatgtgctgtcgggctagtcgggg

SEQ ID NO: 508913 - DNA, 221 bp, Homo sapiens
  misc_feature (145)..(145): n is a, c, g, or t
  misc_feature (199)..(199): n is a, c, g, or t
actagtcacgggttggctccgttgcagggtccaagtgggtgcaggctgagccccccacctgcagctccttgaggccacggtcaggggctgtctatgggcagaaacctgccacaatgatgccactccatgtgtgcaggtggtcacnagtcccgttgagcttcaaagctcgttgtccgcctaaggcataaagtgtcatcanggcctcagtcatcatcgtgggc

SEQ ID NO: 508914 - DNA, 375 bp, Homo sapiens
  misc_feature (275)..(275): n is a, c, g, or t
ctcaagtgatcctctcttcccactggtcgggctcctctctcttttctaagcagtaaaattctagagtcaaatcagcaatattcacggtggttaacaatggacacatagtttagcgtacgcggagatattggaagtgatatctacaatcaccccactatagtggggaaatttaaaaaagcaaggcggggtcaggcacaggggctcacacctgtaatcccagcatttggggaggcggagggggatcactggagctcaggagttcgagaccaggcggnccaacagggcaaaaccccatctctacaaaaaaaatacaaaaattaggggggcaggggggtgcatgccggtggtgccaagcggctggggaagcggaggcgg

SEQ ID NO: 508915 - DNA, 181 bp, Homo sapiens
catttacttctcatcttcaatgcaagcaaaatgattgaggtttattcacattgaagatgcagaagctaaagtgttccctgtgtcatttctgaatctaggttcatcagccttctctgctggatacctagggtaccgcagctcgcacattcgtcacatccatggtccatcagctgtttcccag

SEQ ID NO: 508916 - DNA, 720 bp, Homo sapiens
  misc_feature (630)..(630): n is a, c, g, or t
cgtgcgtgacgtgttgtgtcggttgtggtagtgggtgatgcgtagtagttgaggtgcttgggtatgctttcgtgtgttgcggtgtgttggagttggcgttgctgcgtgtgacggatgattatgcgcatgtgatgtgtgcgtgcgcttgaagatcgtcgtgtggtgcgggttgtatgctggtgtgtcgcggtgatttgtgtgagtagatgtggttgtgcgtgtgtggggtgtgtcggcggtgtcgtgagtgtttggtgttgtagcggtggctgattaggtggtgtgctttccgtgtcgtcagtggtgtgaggtttgtaggtgctgctggggataggtgtggcgtgttgtgttgttgggactgtgatgcgatgcgcgtggtgtgttggcgaggttgtgtcctgtatgcggtcggtatgcatggcggtgcgagtggtagtgttgtgcatgtgttgcgtgtgtgagtttctgctatcgtcgatgggttcgttctcttgtcgtgttgagcgcgtggttcgcgctagagagcgtaggtcgtagtgcgtcgtcggtgtgtgcggtgcttcgtgtgggtgtggagcgctcgtgagtaagtgtcgtcgcgcgtattattctcctgcgcatcgtgtggtngtgtgtcgttggtgagtatatcggggtggtgcgtgatcgggtggggttgtgtgagctcggtagcgcaggttgtccgttcaggttgctgtg

SEQ ID NO: 508917 - DNA, 197 bp, Homo sapiens
  misc_feature (36)..(36): n is a, c, g, or t
ttcattctcagaaatttaggaagtgtgatggatttnttgttgttttggttttcctctctcctgccagaatattgatcttagtggtagggttacagacactccagttctatgccctctttagataattgttggacaccttctcttccccatgaatacaccatagccttggacaccttgcttccttcacaggttcaaat

SEQ ID NO: 508918 - DNA, 350 bp, Homo sapiens
  misc_feature (197)..(197): n is a, c, g, or t
ctagctggcagtggtcacgctattccagagtgaggcagcgatcactaggtcaggagtcagatcagctgacacatgagaacctactaaaatacaagtagcaggctagtgtgcatgctgtatcccagctgctcaggagctggcacaagagcaaatccagctcaaaaaaaaaaagaagaaaagaagctgggctggtggcnaggccatcacccttcccttggctggaactactggacagacccttttgagatgtgcctgtgctgctgtggaaatgtgtgtagtggtcttacctctttgttgagcttgtgtgtgtgtggtgtagtcttagctgtatgctgagattgcggtgtttg

SEQ ID NO: 508919 - DNA, 1002 bp, Homo sapiens
gagcatgtgcctgtgtaacatgcactgggggctgtggggttggggagactgaatgtgatttaccagctggatgaggaagagactcgctacctggtgaagatccctgtccccgccgagcgcatcaccctcggcgatttcaagagcgtcctgcacgcgtgcccgcggtgcgccaagtactttttcgaagtctatgtgatcaggatttcggggtggtgaacggacagaaatttcacgatgaacaacggccctgccatcccctgcttcaactggaagggtggtatcctgtgctgcgtgtcctcatgagtaattcccgcaaacccgaagactggccaccatccaggtccaatggagccctcggggcatgaacttggcagccatccatgctcaccgagccagtttagcccgttcccgtttatgaccaaccgcgtgacggacgagtacccaaagcggtccactatagtgggcgaacttccaagtggggccgcgatctcaattcacgtttccccagacaccgttaaagttgcttgttcgccaggccaaagacaccatattgcaagcgcaagaggtttcgcttgagaaaagtcaccttgggaagggaactaggggtaaaaagcccggtgagtgattccaagcggtaagaggattgggttccgaggcgtggcacagcggcccggtgtgtgcaggccgaggggacccattcgggcctagcgtggaaacgaagggcaactaaagggcgacggcatggaacagggccagatttgtgcgcccaggtggccatgcagaacactagcgccgcaccaattgttggcccccctacatatgtgaccatggacgcccccggctcgttgtgaaacaccgtgcgggtgtccatttggcggaagcagccacatagagaaatagcaccgaccccccaagatgggaccctccagtttattgggcgattaggtagctcacggagattggaaaggtgccacacacggggttggcgagtgaggaacaatg

SEQ ID NO: 508920 - DNA, 112 bp, Homo sapiens
tagtttgagcctaatagaagttaagcatgaaatgggaatttagctgggaacttgaggaaatacccagtagttaacagggaacgtcttactctttctacctctgactctgtgt

SEQ ID NO: 508921 - DNA, 373 bp, Homo sapiens
  misc_feature (279)..(279): n is a, c, g, or t
  misc_feature (330)..(330): n is a, c, g, or t
taaaagcccgtccctgggggctgggtgaatgatatggggcgcatccctctgagggaacactaagctgccattaaagagtacagggcagctgtatttgctgagacgtggaaattttccggtgtattctaagtaataaagtgcagaagagtgtgagtagggctgtgtgtatgtggtatgtgtgtttgcatctctggaagtggttgcttcttaggatggtcactgtgggactaggagtggaggagagaaagaaaacttgcttttcaccgtactagaatcttntgcaccttttgaattttgccgtttatactatgtctttacctgtaaagaaanaagaactttgaaataaagttgcatttgcttgaaaaataaaaaa

SEQ ID NO: 508922 - DNA, 137 bp, Homo sapiens
ctctacaaaaaaaaaaattacagatctcacaatgtcttcaaagaacattgtgagatctgtaatttttttttttgtgtcacaaacgtgttgaattttggggtcccccaaattggtggtggcccggttgttaccccctg

SEQ ID NO: 508923 - DNA, 687 bp, Homo sapiens
  misc_feature (6)..(6): n is a, c, g, or t
  misc_feature (46)..(46): n is a, c, g, or t
  misc_feature (376)..(376): n is a, c, g, or t
  misc_feature (385)..(386): n is a, c, g, or t
  misc_feature (409)..(409): n is a, c, g, or t
  misc_feature (411)..(411): n is a, c, g, or t
  misc_feature (432)..(432): n is a, c, g, or t
ccaagnaagcagccaattactcgagcacacaaagctgcgacagaanacaccagccaccatgaatccaccctctagaaggtagattcaagagatgaatccaaaatgtcttcatggtgaaaaaagttaagggaaaagactttgcttttaaaaaaatgtttcaaaagaaaggtattttcactaaaccactgccagtataaaagcaccctgtcaagggccctgacccagagttgtggtctccaaggaggcagcagaactaagtctgaaccgccaagatgctaaattgcaatggaagcttaactttagtttatttctaagcattttttatatctgtgggagtaatagaaagctccattactcaactgggaaaggaccctantgacagggnnaactgaacagattgcacatgggnangccaaactggactttctttgnttcctctttaaaagtttacaaagcagaccattttttgacccttccttttgtttcctctgaggggctggacgccccaagcaaggggccatctttctgatctgaacaaacctcctttgggccaaacggtgctggtcacaaggacttcagaaagtgttgagttgaggcgcacacccccatttccgaaagaaatccaaaagggcagtcctccataagcacaaaggaattggggcaacacaccaaaaaaacactattgtg

SEQ ID NO: 508924 - DNA, 897 bp, Homo sapiens
ggatcattattgctaattacttcactgacgcaggctcttaaggagctttcttgacttgcctccgtattccatctgtccctgggccccaggaaagaactgcagaatggagctgccaggagcgatctttctcacagaaagtggcgccgtagttcacggagggtgggtggcgttgagtgtcaatagaaagaaactgaaatagagactgtgatctttccagtaaaacacggcacgttgattgggtgctgtactggatgggagcatgttgtaaactgaactgctgtgtgatgtggaatccaacgtaagtgatagtacttgttgtcagacgtgcagggctctgtgagtcacctgtagagccatgagtgttgcccttgctgtgccgtggtgcacggtcccatatggtacatgatcagagcttgatctctcctctcatgaaggtctcctggaagtacggctgacgcacgacatccattatcatgtatatcttttcgtaccgattgtggttctcttttatacaatgctgatgttctgagtcgaagaagcgttactgaaatggtataaggaaggacatgttgctaaaggcaaagagtgtttttcttgaccagatgtagatagttgtgagtggttacaaactgccgaagaatggatccgaatcggaaacgcggggcaactgagtggtcatccatgtgcagtacctaggttaacacttcacacttgttgatgcgagtgtcgaccattgaaacacacacttgggcgtctgtttccgccaggtaacaaatgggggtgggtccctgggggagcgcaggggttgcccggggcccgtcaagggggccggcgcccaccaatatattggggccgcgcccaatggaaataaacccaagaggtaggtgacccaaatgc

SEQ ID NO: 508925 - DNA, 412 bp, Homo sapiens
aaattttctttacctgttttgttgaaaaaaaaaatctgttttaattccaagccattattagttttttttcccttataaatcatcatcacttcaggaatcctttcttaagaattgcattggccagatttggtggctcatgcctgtaatcctaacactctgggaggccgaggcgggcggatcacttgaggtgaggagtttgagaccagcctggccaacatggtgaaaccctgtctccactaaaaatacaaaaacaattggctggacatggtggcatgcgcctgtagtcccagctacttgggaggctgaggcagaagaattgattgaacccaggaggcggaggttgcagtgagccgagattgtgccactgcactccagcctaggtgacaaagagagactctgtctcaaaaaaaaa

SEQ ID NO: 508926 - DNA, 292 bp, Homo sapiens
  misc_feature (55)..(55): n is a, c, g, or t
cagcctgctgaggtaggacaatcacctgaacccaggaagtcaaggctgctgcagngagctgtgactgcatcactgcactcgagcctgtgcaacagagcgagaccctgtctccaaaaaaaaaaaaggggtgaagaaatggaaaaaaggttcccttttaaattaaaaaaactgcccggcctggggggtaaaggttggaaacccaagcttttgggaatgttgggaagggggaccccctggagactgggggttaaaaccaaccgggcctaaagggggaaaccccctctccccctaa

SEQ ID NO: 508927 - DNA, 324 bp, Homo sapiens
acccttcctacctatggcccccgcttcccccctgttgaatggaaacccggattgcggaggtggatgccacgtgtggtacgttaagattgcctccaagtacattttatgccagtgcccacagtggctggatatggccccatttagcagcttccagactacaaccgggatccgtagggcatgttttggctgcgcttttaggcgggaagcctatgtaaacaaaagggcagggccggggtttgtggtcccccccccaacccccaacacagcactttgggtcctttaacctgtgccccaggtggcccccaataaaatcctttggtgaga

SEQ ID NO: 508928 - DNA, 146 bp, Homo sapiens
tccgctggccgatgcattaggttgatggacgcctcctctactctggcctcagacaggaaggtgatccagtgacagcgggggccactgtgcggcgctagtggaacgtgtcgccatggcagctctcctcatgagaacacttctgagtg

SEQ ID NO: 508929 - DNA, 176 bp, Homo sapiens
tgtgcacgcacgtcatgctcagctagttttgtatttctgtagagacaggtttgccatatgcccaggtgggtctcgaactcctgagcccaagcagtctgccctcctcagtgtcccaaagtgttgcgattacaggtatgagccacggtgcgttggcccaacacggtgcgttggcccaa

SEQ ID NO: 508930 - DNA, 911 bp, Homo sapiens
gcggctgtacgccatggagttatgggatctagcacgatggtggtggaaagacgcttctgtgcgttagtgtcctaacggttaggaaggattcacagagctgggacatgaggaaggagccagacccctcgggcagaatgcccgcgaggagcactgggtagtggtgggggcaggggtgcctcctctgtcaagtaggagagtcggcgccatcgcatcgttactcgtgcgagctgcgcagcagcgatcgtacagtacagagcgatagcagaacgcactacagggaaagtgaagccggtgagagagtacctgggtaggacggtcgtctggggactgggggcctgtaggagcgccactttgttcgtcgtggaggcagttgctgaagacacatgatgacttacagtgtgaggtctggcgccttactcatgatgacggttcaccctatgagcatcctatcaattacatagggaccacattggaaaccagggaatagaacgcacaagtgatacagtaaatgcataaatgcataaaacagagggaaacctccaagaatatacgcaaaatgactagagacctgagggaaatatagcgtatccacccagctcgattacacttattgtcccgttatagccgcacgttcaccacaaccaatttatactagagcaagacgattgcggatacaggcaatcgcggtctcccatagacagcatttgggtagagagcacgaaggtgatcgcaagtccacgagaaggaatcagtataataaagacccaagcggagtaaacactcaatctagccaccattaaacaggcacaacacaacggactagaacgcgatccaaaacaataatacgaatcagcaaagcacaccaagatgcacggaagttatcgggatattgcgcagaagagcccaacagt

SEQ ID NO: 508931 - DNA, 127 bp, Homo sapiens
atctacaggttcccctcatgtcacctggtggtcccccgtctcccgggaggtcaccataattgtatgcgcgcacttagtgctggacgacccgagtcggctatatgcgcactacagtcctcagaactcc

SEQ ID NO: 508932 - DNA, 1235 bp, Homo sapiens
ggttgagatccgtgccaagtgcagacataccagtaattcctcatcggctaggtggggcggcaaaattcgctaggtgcgcgtactagtgactggtagcacagtgtcatcttacctctgtggcgctgaggactaaggaacctagggacacgtgtatcacgcgatcaattggaaaggaggacagcgcagatccgagaggctgatataggatctggaggaccgttggatccgagaaaccgtgggatatgtgggtggaatgactgccgattgtcgtgggatgggatcctccaatgcgaccgagtcgtcagtatcgtacatcctgcatgaggccaaggtcttgcgtgtgagattgctgaaagagtatggtggaggctgattggctctagcgtatcccaccgctcgtggcaatcgagcgaggagcgaacaaacgtcaccctcaaggggccgccaaaggacgtgtgtgcgaggccgtgcaaagaatacgcatacgaggagtatcatttgcacggaccgtggcaagcgtcatggtgaccatttaggaaatgttgctgataccccaggaagattccattcgattctgtctatgggctcactcaacgggttcgcaggaagtccaggctagattgacctcgggggattcccagcttgttctaaagttaacattccccaagacgaggagcagcgacgaaccgtcagttcgacagtaacgagagcccgctagttcgagtgaagaatcgggggaccgaacgcctggggcagggggtagcacaggctaaaaggcatttggtcgatggcccgaggtccattcacaccgtggagtgatggttgacccattaattgaatggattgtccttggctgagaacgagaagagacgtgttgaggggttggcgagagcaaaggctctgcggagcaaatggatcgatggacagcactccgaatgtagaggctgctttgggacttgaccgtcccagctgtggagcaacgaggcgactggggatgcacgaaaaagaaggacaaggagaaaggggacaagcacccgtgcaggaccaaaagggggttgaggacacccacaggcgccaggacaaagaacagagccaaaggcacagaagactaaaggaaaacaaaaaagagaccggcaaaggaaagaggacgacacaagacagagaggaggggaccaacacaggagagacaaaaaaagacgcgacaacaccgacagagaaaaagaaaaaacaaccaa

SEQ ID NO: 508933 - DNA, 892 bp, Homo sapiens
  misc_feature (22)..(22): n is a, c, g, or t
  misc_feature (31)..(31): n is a, c, g, or t
tgcctatggctgtaccggccgncagggttanatctttgtgagaaatgccattagccccatattgacccctctcatcttgtcatcatccccaggctctggcctgaacaaatcctaattgtcctggtcttacgtttctgaaaccgaacctcactcccccagacaaaccataatgtcctagtatgctttactcacaggcaacggaatcggatggggttcgaaccccgttggctgaatatccgtaacttcccaactggtgcgggtcattacattaggtgtgtgtcccattgaatcaaccctgtagtttccttctgtcatgctttcgcacttcttcctggactcatctctccccagtctacttgccttggtagtcatctgccctggatctctttacccagcagtgatggcctggctttgcttttgggcaatccagccctatccctatcctgtcaggctgtgtggatggtctacctgggtggcacgtagtgaccctgagtgtggatttgggcctggctgtgggtgtggtcttctccatgatgactgtggtctgccgcacccggaggtgggcatcgagatgagtggccgttgcggtcgggggcaggggacggagactgaggtgcttgggggtgactctccagccaggccaggctaagctggaaatctggcccacttcttccctagggtgtagtgcctggcatcttgggacaggctgaggggacaggagctctacaagaaccagtcagaggaagcccccagggtgggtgcggctgaagcaaaagaacgaaggcaagattagcccagaacctttctctgatcctttgaactcttaactccctcccaggtccccgggggctctgaatacctgagctaaaccaacacaatgtacttttgggac

SEQ ID NO: 508934 - DNA, 157 bp, Homo sapiens
atatggtatcagatcaccaaactagagtgcatcagttaaattcaatccatctactggccccaatctctggcttgcctctacctactgctgtccagttggagaccgactaccatgcactgaaagactattaggattgctgcctcctaatttatcacag

SEQ ID NO: 508935 - DNA, 542 bp, Homo sapiens
ctctgctcagggcagacagtgacgaactgtctatgcctgggagtgatgaggtttgtcttaagttttggtctttcactgtctccggaactcagggccattcatgggtctagagcctccatgatactatgtagccacagagaagcatgtgcaaacattgaaataaaatcacatagacgatttctagaattgaaattatgtatgttgcttttcagtaccttgaagagagcccttgatgtcttcaagcagcgtaagttaattatttaaaaaatattctattttatgtgtctgagtgtttttgcctgcatatgtgttttatgtactgtgtgtgcctggtgcctatagaggccaggagttggaattatggtggtggtcgtcaatcacctcataggtgctgggaacagaatatggggcctctggactgttgaaccatcacaccaacctctagtgtaaaattctattctgccctttgtaaactccacatctttcctctaaggcgaattctaatttgaacagcaatttagcattaggttaaaaaaacaaaa

SEQ ID NO: 508936 - DNA, 143 bp, Homo sapiens
aagtggttctggagtcagatctctcctaagtctcttctgttcagattatttcgtcaccttttacatgtaatttcatcagggctcccctgtggccccagttgtcatgtccaagaacgcacaggctttacttataagcgacggtg

SEQ ID NO: 508937 - DNA, 481 bp, Homo sapiens
  misc_feature (16)..(16): n is a, c, g, or t
  misc_feature (67)..(67): n is a, c, g, or t
  misc_feature (92)..(92): n is a, c, g, or t
  misc_feature (131)..(131): n is a, c, g, or t
  misc_feature (134)..(134): n is a, c, g, or t
  misc_feature (159)..(159): n is a, c, g, or t
  misc_feature (211)..(211): n is a, c, g, or t
  misc_feature (218)..(218): n is a, c, g, or t
  misc_feature (222)..(222): n is a, c, g, or t
  misc_feature (226)..(227): n is a, c, g, or t
  misc_feature (230)..(232): n is a, c, g, or t
  misc_feature (234)..(235): n is a, c, g, or t
  misc_feature (238)..(239): n is a, c, g, or t
  misc_feature (245)..(245): n is a, c, g, or t
  misc_feature (265)..(266): n is a, c, g, or t
  misc_feature (278)..(278): n is a, c, g, or t
  misc_feature (287)..(287): n is a, c, g, or t
  misc_feature (303)..(303): n is a, c, g, or t
  misc_feature (309)..(309): n is a, c, g, or t
  misc_feature (332)..(332): n is a, c, g, or t
  misc_feature (334)..(334): n is a, c, g, or t
  misc_feature (345)..(345): n is a, c, g, or t
  misc_feature (478)..(478): n is a, c, g, or t
tgtactttggctccangggaaggactactgcaatttattagcggtatctgtaaacatggggaataantctgaaaacaaaacaaataggaacnctttttagcaccaaatacactgtcttctcataattcctnaanccccctcccctttcccccctgctgncctgccttagtgtttcttacaacatctcccagctcttgtccccatccctgtnggtcccngctntggnnttnnngnngtnncctgtnacctcactagccatacgggnngccacgggcacnaagcctggnggctccactgccaagnccagcnctggtgctcggtccaccaccaangncagcgccagtntttggtccaccgccgaagccagctcctgtgctcggtccaccgctgaagccactggtgcttggtccactgcggaggccaacaccagtgcttggtccaccgctgaagccaacaatagaactgggtccactactgnagc

SEQ ID NO: 508938 - DNA, 351 bp, Homo sapiens
ttttcaggaacaacaagcaattattcctactttccaagttattttgatgccatggtggctcatacctataatctgagtactttgggaggctgaggtggactgatcacttgagcccaggagtttgagaccagcctgggcaacatagcaagactccatctctacaaaaaaagacaaaatttagctgagcgtggtggcgtgttcctgtagtcccagctacttgggaggctgaagtgagtggatcccctgtgcccagagaggtcaaggttgtgatgagctgtgatcacaccactgcacttcagcatgggagacagagtgagaccctgtttcagaaaaaataaataaataaaacca

SEQ ID NO: 508939 - DNA, 214 bp, Homo sapiens
accagttgggcttttggtcttcctctccccatgcaaactggtaaaaggcctcaggatttttgagttgtcctcagccccctcctcttgtttcattttaatacatgttttctaataacccagtttgtctcttcttactttcagaccatcaaactccaaatggtcatgcaaccaaagtcttgaagtctcggacaatgaccccttctgtcgtcttctc

SEQ ID NO: 508940 - DNA, 447 bp, Homo sapiens
aaagaactcttacccataacccacgtgatgcaagtcatatgggggaacctatgtaaatggtcaggataaaaaccaactctgaatgccaagatcccagcactactttatattactaggaaaaatgggggagatagaaaaatctacttagaataatatagtaaaaataaaagagtgggtagtgtatgtacttctcccaccttacagcatttataaaacatgctgccccacatacaaagtcacgaccacttacttttatgtgacactagtagttaggggttaatgtatagagataaaacagctgcatatgagataaagttaccccaaccacagtgaggaggaagatgtacacatactggaactgtcctgccaaataaatataagcccctattagtgctctgttttaatttggagtgggcacagtaacctctatgcttggaatgggtaccg

SEQ ID NO: 508941 - DNA, 156 bp, Homo sapiens
ctttatacaaaatacagaatactttatattggaagtgaaaaaaatgaacgtggacttttacacatgggcatatttttttggaggctatatggattatttgaaatgaaaagcatactaattgggctttaataaatcattttcaatcagcgtttggta

SEQ ID NO: 508942 - DNA, 250 bp, Homo sapiens
gtctcaacattggaaaacctctgtctcactgtccagcagggactcccctgaggggcccagggctcctcctccatggtgggaggtgagcttttaccaggttccaccacccccaaagtgtgtggggttgcgggccctgggctttcagggcaggtggctccagggggccacccagggtcagcactccctgtcccacctggtggacactcatgagcaacagctgctgacttggcaggttctttgctctggttgg

SEQ ID NO: 508943 - DNA, 284 bp, Homo sapiens
agactctcatcatcaaaaaaacaaaaaaatgaaaaagacaaataatttatttggtattactttaacagattatctctaagagtgctgcacagaattcatacgtgtttaccctgatgctacatatcaaaaagatatcaaaacaataaatcacaaaatagaaggtaagaaccattttttatttaaaacatcttttgaccaaatgtttgtctaaattcatgaggactgatatactctgacagccagagaaaattattttttaaatgcataacacggaagaacaaagg

SEQ ID NO: 508944 - DNA, 224 bp, Homo sapiens
atattaatgaggtgggaggatctacttgagctcagaagttcaaggctgcaatatagcaagaccccatctctaaaaaattaggcatggtggtgcatgcctgtattcccagctactcaggaggttgaggtgggaggatcacttgagcccagaagttcaaggctgcaatgagccatgattacaccacggcactacaaccttggtggcacagtgagaacctgactctt

SEQ ID NO: 508945 - DNA, 201 bp, Homo sapiens
acctcaggcagagagaagccttcatggaaggatggaaagaaactttccttggaaagaacaggctcccctaatcacactccttccagatgttaccagattcaataactggaactcctgtcctatcagaatgaagggttaggagctcttcctttgagtgtgataaggaccacatcacatccccacaggagagctcagtctgag

SEQ ID NO: 508946 - DNA, 554 bp, Homo sapiens
cttatttgacccaccgcatcgtttacacctcctcctcccagggcatgtcaacactgctctcgccctggcgggtagcaacaaatgggatatcatcttctgtggtctcggagtcatcatgctggtagaccagccggacacgcaagaggtcttcattggtgaaggatgtcaccatagtggtcttgtcctgtgtcccacgccaagccaacctcccatggcggggccgctccatgacctcatagaggtagctggcactgttgagactcttgacaaagaggtggtcagcagagaggacacccccaccatcctcaggcaccacgaggaggacattggtgaggacaggcgcatctgggtcaccaacaatgtggatggggaaggtatacagtggggagaaatatggtggagctgtgacacggagaacggacggtgtcctcgtactgcctctgaggcacgtgcttgtggccgcataggtcacccggccagcctgtatgtcatcctgggtgaagcctggccatctgacagcttgtgcctgtagtgaaggttgctttcctggagct

SEQ ID NO: 508947 - DNA, 429 bp, Homo sapiens
  misc_feature (272)..(272): n is a, c, g, or t
  misc_feature (429)..(429): n is a, c, g, or t
ggatccctcgggctgcaggattctgttcgaggagagagtgagtgagagtgtagagagagagagagatttagagagagagagagagacctccagagtgactgcgctatacagtgtgtgagctagttttctttttccgtctcttcctcttttcttctatagctcctgttatcgctctttgtcaattgcttttttttttctttcattctattgccttttttttggcttgtattgctcttttcataagaatccctttttgtctggtgccagttctngttccacatatagtttctacttttctacgagtctgccattacctgtgacttcctttattaagcattcccagagaagtaagtttttaatctttctaccatgcatcgaacccttctttgttctcctctttgatgttgtttttttttttggcttcctttn

SEQ ID NO: 508948 - DNA, 703 bp, Homo sapiens
ctggctgcagcggggaggcataattttttctctctgaaccctggacctaccaggttcaagcgacactcccatgggaggggccaaaaacttggttttacaaggggctcccagctcgccaggctatttttgtatttttaggagagaccgcgttttaccacgttggccagactagtcttgaacttctgaactcaagtgatccatttccctaggtcttccaaaatgctgggaggggcgttgtttgccaccatgccccgccaattttctcttattgtttgataaaaacctatttggccgcttaagacttatatgacatgagatcctaagtcttacctgggtcaaaaactgaatgcttgcatgaatgaagaaaggctgcctgttcactcatcgagtttggcaggtctttctggaatgccacacaaattagttttctctggtgagccaaacttggaactcaccttagcttttccaattggaattagggggtgaccagccccatatttttctagacttttctctccgactccaagtgccgggactggtgaagtccatttagattgagggccgggtgggatgaccttctcagccaggaaatggtttggcttaaagaaggggccctttctccaatagataaggcccttttctcccctagagctggggctccctggttctcatatgagggctttgtcctttcagaacgagaggg

SEQ ID NO: 508949 - DNA, 445 bp, Homo sapiens
ctggtggtaccatcagagattgtagaccctatatacctcctgcccgcgtcactggctgccccagatcctggcttgccgccattacctagctctagtatgctgtgatcctagaagtcaagatgagttctatacatatttgactccctcacctttgcaggcaactagaaacaccaaaccctatgcaattgccatggttctgttgatctgaatccatgcccacacagacaaccatgctgaccggtctctttgcagtgcacagccgcggactccagtgaggccctagggctgcgtcattcctactcaatctcccccgtccacgcattcttccacccccgagtgagcagtcacatcgtcacttctttcagatctcgcacaactccttccctctctccgtcattctcaagtgaagaccttccttcctacaacacgggacaactggcgtaac

SEQ ID NO: 508950 - DNA, 161 bp, Homo sapiens
attacccttactgaaccaaagacctactctgggctggatgactacccccgggcttcacacccttcagtaacctgagcggcacctggacctgcgatgttgggtggcactggtgtgccctgtgtgcttgactgctggctggcatgagcatcttgggtagaggc

SEQ ID NO: 508951 - DNA, 595 bp, Homo sapiens
aagatataccagcgagaactaggggtctatcacttgagcaagatgtccgagcctcttctggccggttaccctcaaatccctgtcgtgagcttcaccatccttgggggacaggctatgctgaaggtcgtgactggggactgcctcctgcccagcctcccggggtcagtatgcagggctgtggcagaacaatgctccacgacgcttaggtgtgcatgggggctccccagaccactggggccagacaaggagggaaagaggcaactcactggccccaacgccagccacactgaagggctgccctgcggggcagggacggcgggcgtgcagggagtgggtaaacctcctctctaccaggggaggctggcagagtcaggcttgcagatagagcaactcaggtggctgaggaggggccgaggaaaaaaacaaaaaaggatttgaaaattcaggggcccaagttttctgggtcataaggggtgggctggggtcactgggcccagcccaggagatgtcctctccatctggaggggccagctcaaagaggctggaattgggcaaatggctccggtatgggggctagggaaggttgccaccaggt

SEQ ID NO: 508952 - DNA, 440 bp, Homo sapiens
taatcacagatccatttaagcttgcagaagagtctgacagtatgaagtccagatgtgtccctgatgctgctggaggagggagagtggcagagagttgtgggagagtgagaaggggtgagtgaggacgaatgaagtagggggagtgtggaggaagagggtgaatgggggttggtggggagaagacgataagaaacaacaaatggagccactgcgcccggccataaatgaattatttttaagaggcattgattaaagattcacagcaaatcactagttaagcagattttttttctatttcctactgcaaagttctggtgccacatagtggtcagaaatggaagagagaagctgtcttaagccttgttcaagaagcaggaaaggcatcagaagaagtaacagttggcagaggggtctcaggaaaacatcgtccttcggatttt

SEQ ID NO: 508953 - DNA, 362 bp, Homo sapiens
ggaggagcgggcagccaaggttcctagcaccccgccccccgagggcagctcacacaccccctgccctcactccggactcgcagaccgtggaagcacgagaagacagctgaggtctcattgctgcgcgaggagtgctgaggaacgtgctcgtggtgtccggacgggagtgggctggagcgaagagcgtaggatgcgcacggatagaacgtagggaggcacgcgtacagaggcaatcacgggcatggagagagcgaccgagctctgcttaccatccacggcccacctatgcactgcctagcagccagaacccaaaagcgcgtgaccccgagccgccggggtccaccgagccgggtgactccggg

SEQ ID NO: 508954 - DNA, 1094 bp, Homo sapiens
  misc_feature (4)..(4): n is a, c, g, or t
  misc_feature (31)..(31): n is a, c, g, or t
  misc_feature (631)..(631): n is a, c, g, or t
  misc_feature (671)..(671): n is a, c, g, or t
  misc_feature (674)..(674): n is a, c, g, or t
  misc_feature (744)..(744): n is a, c, g, or t
  misc_feature (756)..(757): n is a, c, g, or t
  misc_feature (778)..(778): n is a, c, g, or t
  misc_feature (783)..(783): n is a, c, g, or t
  misc_feature (786)..(786): n is a, c, g, or t
  misc_feature (791)..(791): n is a, c, g, or t
  misc_feature (825)..(825): n is a, c, g, or t
  misc_feature (834)..(834): n is a, c, g, or t
  misc_feature (840)..(840): n is a, c, g, or t
  misc_feature (844)..(844): n is a, c, g, or t
  misc_feature (849)..(849): n is a, c, g, or t
  misc_feature (859)..(859): n is a, c, g, or t
  misc_feature (862)..(862): n is a, c, g, or t
  misc_feature (879)..(879): n is a, c, g, or t
  misc_feature (883)..(883): n is a, c, g, or t
  misc_feature (885)..(885): n is a, c, g, or t
  misc_feature (915)..(915): n is a, c, g, or t
  misc_feature (921)..(921): n is a, c, g, or t
  misc_feature (925)..(925): n is a, c, g, or t
gganaaagacctgagacttgcatgaacggtnaaccctgtgtctgtcttcctcaaaggaagctgcaagtggattcgaactcctgcaatcatctactctgttcacaccatgacaaccttaattccgatactctccacatttctgttgaggatttctccaaagccagtggtttcaagggacaaagacctgagacttgcatgaacggttaaccttgtgtctgtctatgccccctacttactcatcccattcatacttttaattttcatgttgcggagcccctactacaagtatgaagagaaaagaaaaaaaaaatgaaggaaacaaccatctctaccctgggccagtggttgttggtgggatacaatacaaggaacactggtcagaacccacgtcttcagcagcattggaaacactggcagcaatgcacaagagcaagatggtgtcaggaaccatgtcaaaccctcaccttcttccatttttttttttttttaagacagtctcactctggtgggcccaggcgggagtaaaggggcaggggcattgatctcgggctcactggcaacctgcggcctcctggggctcaagccatcttccttagcctcccaagttagcttagaaactacagggtggtgntaccaacacgttagtgggctaattgtggtttgggtttttnttngtggtggtggtggtggagacgagggtttggccagtgtgtgtgcccaggtgtggtctcgaagcgcctaggnctcaagtgatcnngcccacctcagtctccctaangtgcnggngattncagacgtgaaccacggggcccagcccaaaccttnaccttctangggccngggnatgancagaccgatnggnttgaggggtgggcaaangggntngtgggctaggtataaggaaggggtaccaanataagngtgntgccttaagttcccagcggagagattcataaaaagtgggaccaggacacgaaactgtctaagaacatgggcggtttgacatgtctatgagtcaccgacacaaaatttttgctttgaataaacttcattctggttctcagaatgttcctgtgacaagaaattggtattgg

SEQ ID NO: 508955 - DNA, 193 bp, Homo sapiens
gcggccgcctctactactactactgctcgaattcaagcttctaacgatgtacggggacatgcctgtaatcccagctacttgggaggctgaggcaggagaattgcttgaacctgggggtggaggttgcggtgagccgagattgtgccattgcactccagcctgggcaacaagagcgaaactccatctcaaaaaa

SEQ ID NO: 508956 - DNA, 342 bp, Homo sapiens
cccgtagcacttccttacccgttgatgtcccttcttactgactttccatccatcagatcctttcgcctctattgctcgatcataaatctccatctgtcttagatgcctttggggacgtagagtccagaactttctcctgattgccataatcctgagtataatgtgtgcttacaacgtttaattaacggggctacttctcttggagcagctagtcctggtgggttgtcatggagtacaacttatccacatggtgctgatgtctgactaaggaggtatctcgttatgttttattaatgcgatctgcagaggatgttgatgggacgatagtgttctcctaactgc

SEQ ID NO: 508957 - DNA, 513 bp, Homo sapiens
ccacagactacctcccttactatctcctgttctacaatatgcgctgcaggtaggacagagcaagagacacacaaaggtcagtttgtactacttacaggccgtccagcacaacaactccagaacaaggacttgggaatctgcctaccgggctgtgcatcagatacagtcctcagacagctgtaccgcccctctgtgtcctggctgttatgatagcattgcaatgaggaaagtatctgcctatgtgtgcattgatgggggaaactagagaagtctgtatgtaaagcacatggagcaggccaggcatccattgaagactactgcaggtttgtgcacttactctcatcattgtaatgacacttgatgctataagactataaattagagagatttatagttacaagaggcactgaaaaacaatcactttaggtatgtctaaaatatcttgtaaaacgtgtaaaaataaacaaacccagtcaattaaaaatttagactgttattgaggtaatccgtgag

SEQ ID NO: 508958 - DNA, 103 bp, Homo sapiens
gccgttaaactcagaatctgctgctgccatctgaattctcatctgcctggcagaagttgtctaaaacctgctgatcaccttcggcagcaatggatgagtggaa

SEQ ID NO: 508959 - DNA, 128 bp, Homo sapiens
  misc_feature (99)..(99): n is a, c, g, or t
  misc_feature (101)..(101): n is a, c, g, or t
ggagacgaaacttcccgtcccggcggctctggcacccagggtccggcctgcgccttcccgccaggcctggacactgcgggtggacctgggtgttcatgngngcgcgccggccacacctgcagtcacac

SEQ ID NO: 508960 - DNA, 87 bp, Homo sapiens
  misc_feature (60)..(60): n is a, c, g, or t
acactgtgcaacacagttagaacactgttcaccctgttgtgcatcttgtccccggctttngtttttaagttggtctcaaactcctgg

SEQ ID NO: 508961 - DNA, 192 bp, Homo sapiens
tggtccagtttcatctccagctgctgttctcatgattgtaccatgctttccggggtacttggatcatgtaatggagagggatcccctcatcataagcctgaaggtatgcaccggaaagcatggtacaatttgagaacaggagctggagattaaactgtacaatccaaacgcaggcgagggtcccacactcag

SEQ ID NO: 508962 - DNA, 307 bp, Homo sapiens
caggagaattgcatgaccccgggagacgaaggttgcagtgagccgagatcacgccactgcactccaacctaggggacagagcgagattccatctcaaaaaaaaaaaaaattttaaagagttggagcaaacagggatccatgagtgaaaaaggcccagtcatgattgggggtttgggtaccagaaagttttaaaaagaatggcatttggttaacggtggagggggtccaggttctgggcgtctgaacaaagaatgggcaaaacgcaaaagcaggaaggaatgagggatttacactccaagtgtcaacg

SEQ ID NO: 508963 - DNA, 105 bp, Homo sapiens
gaacaaaattggttttatttcataagatgtttagagacaggcaatggctagtgttgggtcagcagctcagcaatgtggcaactggcatcttcgtggttctcttgg

SEQ ID NO: 508964 - DNA, 994 bp, Homo sapiens
ggggtcccgtgctgctcccttattgggtctctcccctgggcccgactgatctgacttgtaattccttcgtgctggagctaggtgttctgtgccacctttgacgctgccccctactgcccctgtgagcgtgtctttgggttttgtgtgtgtgggagtggggtgtatgtgtgttctctatatcctgagacacctctgggtcgttttgctctggaaacctggctgagggccctgcataccctgtgagcattcttggttgcaacgttgacggcatggtagcgcccaatggctccttgtaccagggccaggttaggcaccaactgctgtcccttatgtctctgcagcctgcacgtgtgtgtgtgaaccgttttcatacgactgacagtgtgaaccgtcaggcaggggcatggatatccagcagcatctgtttatccgaccattttcagagcagttggttatttgctcttgacttgtgacgcgtaggcggggcttacctctctgtgttctcgttgttctttaaccctggctacctcttgacgcgtcttgttggtaccctactacttaacgcttggtggcgttgtgacggactttacacatgccactttttgatcattgcaacactggttgagcaccagggcccaggaacaccaaggtaccgcgggactcacgctcacgtttggttctgccttttactcaacttacgtagggccattcccattcttgcccagttttgcagcgttcagaaagtgacaacaccctcatgacctggcaacgtttggcttgcatggctacgcggttcatccccatgctcaaacctacgacgacacttacgttgtcaacatttgcaacttcccatgaacgttcccagtgcacggtgtacatcttttccaactcgatccgttccacctcttctggcaatcccatccagtgccatctggatattcctttactgtgtggccctgtccaactgtggtgcctatgtttcaccccgatgttt

SEQ ID NO: 508965 - DNA, 403 bp, Homo sapiens
tcgcgaacgtgttatccctaaaagaccatttcctggcccttcagctgcttctgtttctcttcatctacgaataataaattacagtatacaataatcttttaaaatacagcatcattaagtgggaaactgaaagcctgccattgttgttgccgtttaacagctgatacaggtttctggtgatgctactgttgcctatctaccctgaccacattattttttcactgtatcagtggtgtgtcgtatttttttttcgccttcctttttcctttgcgagttatgtcatattttttactgtttagtacttttgcgtgaataagtatcagaaaatcactgcgtcttggaagcatatactttcaggcaggaatgattgtcacgtcgaccccaccagggtaccgagcgcgaa

SEQ ID NO: 508966 - DNA, 307 bp, Homo sapiens
aaaaaaaaattttttagccaggtgtggtggagcacatctccatcccaattactagggaggctgaggcaggaggattgctcaccgtaacctggaacttctggctcaagcagtcctcccacctcatgcttctgactagctgggattaccggtgctcaccaccatgcccaactgatttttgtgttttttattttttgtaaagatggagtctcactcttgcccatgctggtcttgagctcctggtctcaagtgatcctcctgtaatcctagcactttgggaggccgagttgggcggatcacgaggtcagga

SEQ ID NO: 508967 - DNA, 441 bp, Homo sapiens
cccctgtacatgtctttgtgtgtatgtatggggtgagactttacatataaaaattctcatgtcgcattgactaaataacaccttatggttgatgactgttagtacatagcagcaattaaagctcagctacaagttgctgactacattaaagtttttgacagccatagcagtatcacagcctacccaacaattaagaatgtcacatacatgaaaccacagttgtatggaattatgagaaaatactcattagtccatcaggatattttagttaaggaaattactagagatatcaggtgagctggacctgaagaaagaaccagatgccaaataatttcaggctagaactcccaagcgcccatgattaatggatacaagataagaagagattgctgatatcttgaagattgcttattaataaatgatatggaggtgacatgcaaa

SEQ ID NO: 508968 - DNA, 234 bp, Homo sapiens
agtactggcctggcactggtgagtaggctaacttttgtattaggactacaggcgccgccagcacacccagctaatttctcgtgtttttatggtggagacagggtttcgccgtgttggccaggatggtctcaatctcctgatctcgtgacccgcccgccctcggcctcccaaactgctgggattacaggcatgagccaccgcacccggcctccacaaagtactcttaccaaaaaa

SEQ ID NO: 508969 - DNA, 317 bp, Homo sapiens
tggcattggttgtccagtggtagaatatctcgcctgccaagcttggaggcctgtgttcgattcccggccaatgcaagaacgtatagaacatgtaatatcgaccagtatccaaacccctgacgaggaaactctgtgtacgattgccaggccaccagaaatctctggtcttggtcgaattctcaattgactctagaacaatatgactttgcttacatttacagttaggacatatactcattctcaggagactatggtgaatccatggaagactaccagtgagagaggtgatatacttggtgcaaggctttagttgtaaa

SEQ ID NO: 508970 - DNA, 276 bp, Homo sapiens
tctctcacgctctattgtcttttatctcactacacacaagttaaataggccttattctccttctatagtagtctagctatcatatgagtgaactacaaagaaatgaacagaagagcacagtaaaataataagttggcttggcacgccattttctaacactatgtgataatgatttcactctccttggtatcagagatatctgtcaccactgaggaattttacagttgtcagagaactagttaagagaaaacaacttgacttcggtgtataaaatta

SEQ ID NO: 508971 - DNA, 370 bp, Homo sapiens
tcattaaatgtacctcttaattataatattctgataccctaaggcaaattgtgtgttgtgagcacagtactgatataaaaacaggctgctttatagggatgaggtagcaaatagtttcaagtacaaagaaaattggtccgactgagcaatttggcttgttttcaaacttcagcagatgtgtgatcatatcatttgttaattgcctggagtagaggattacagcatattgagtggtagctaacgtatgttttacaatttatttttgccaagaatcaaataaccatatggctaacattaatcaagaaattatgtttttagcatatcccgcccccagcttttttttgtgattaaaaaaaacttcataaagacc

SEQ ID NO: 508972 - DNA, 264 bp, Homo sapiens
aagtcaatcgtctgccccaagacttggaatcaactattcttcaaggattgtatttcatctaatgaagggtaacacaaaatttgggtgatagggctacatgtaagagttggtggtaagcaagagtgccacagctgctaggcgcatcagctcatgcctgtaatcccagctacttaggaggctgaagtaggagcatcatttgagaagtttccaggagcttgaaaccagcgctaggcaacataatgagactctatctcttaaaaatag

SEQ ID NO: 508973 - DNA, 155 bp, Homo sapiens
atgtgagatggaaacaggaagggggcatggcctggggatctggctggagggggaaggagaagcgagagatgagacctcagaatcgacttttgccctggagaggaacgggggaaggaggaaggggcaaggagaccgacgcggtcgggaggtccagt

SEQ ID NO: 508974 - DNA, 641 bp, Homo sapiens
ggccggggggttaactctttgtactgaattttttatccgcgggtgcatgctaccgggaacaagtttttgtacaaaagcttcactcccaaccactgagcattattgtgactctgtctaccactagcctcccgtccctcccgcagaagactgttggattgaacaaaataactatgtatcttgatttacttaaaacgcctgcaaattccttaaggacccgccacttttgactggggatcacctgaggaacactgtcttattaaagcactcaataaatcactggggctgatcacctcccatctaaaaaaaatcaacaccccctcaatctgtgcggcccgcctcgcccaagccactctaaaaccgaccaagctcatgcatgcgggcggaattccagcctcacttggcaactccgcctaataggaggcgaattacaactcctggccgggtgttacaacggcgggactggaaaactctgggttacccacatatacgcttgccgcgaatcccccttttgcagctgccgaaaagaaaaaaggccgcccggacggtcttccaaaaggttcgcacaccgaagggaacggaaaattaaagcggcaaaatctgtaaacaccgcgtaaatccctgtaaaccccggcatttttaac

SEQ ID NO: 508975 - DNA, 1100 bp, Homo sapiens
  misc_feature (262)..(262): n is a, c, g, or t
ccctttgctccagtgaatgttagaagggcatgtacaatctgtcgttctatgcaccaggaagtctatgagatggagactctgcctgagtacaagcgctgaggcttcaactgatcaccgatgtgctgtcctgtccagggaatgtgtgcagctgcgtggtgaagcagattggcgtgggcttgagcgaggccggagactcagtgacaccgacccacactggagagcagagctgcgagttcgaatgtgtcaagcgatgctatagtancatgcatacgcgagtgcccagagccaaacagtgagaagacggccagagacataatgcgcgctcgtgtgcactttgggactctcgggcacaacagcggatcaacaatttgccaatggcaaagggtattgcctagaggcgtgcaagagccacaaagattagcagtcggcacggatgcgatgggataaggacggaagggcgtgggaaatcgacctgcgacgcccataacacctttccgttatggagaaagggtcatggcgtgtgagatgccttagctcgacgttgctctggacctatggtggtctctttcaatggtggggaaaaggggcccgcgacatggttgtgttgctttgtactgaagggcaatcttctgttccacgaaagccttaaattcgccaattccccttgtatatggcgccgcatacccggcgcggtatcttgtggcccagtggatatatacgggtgtaggaatattatattgcaagggtgcatcccagagaaccacggaattttggccagggggttgggagggtaggctcccaagttctcaacaaaagtgccagggtttaggggaacgccaaaaactggaatactagatggcctgttaggccattatggtggtaagaggccttttggcgggccacaaagggggggattaccaagcccagaaaaaatggattccatagggccacccccaagtggacacaatactggccgttctaaactggacaaacagagggccattagagaagacgtctgaaagactcttacactttatgaaatttccgccaccatttaaaaattaacccccgtaggggccccaatgcgcacaccgccgaat

SEQ ID NO: 508976 - DNA, 280 bp, Homo sapiens
atcccggtcgctcggacaccgaggatactacaagcccggatttacacctcgcccacctggagtgcctttgtgaacagacagttcctgccagtgcacggaagtcacaaactggtctatcagttcagacgggggctttggtcaatattcttctgattacttcccaagccccctctgactacagatactaccccctaacagtcctttccagactgcaacaacacccccaggcttcctcttcccaggacaacgaggggtgtcctgggtcccctgggtcttacct

SEQ ID NO: 508977 - DNA, 961 bp, Homo sapiens
ccagaggatcacttgaggccaggagttcagttacagcttgggcagcaaagtgagaccttgtctctacaaaaaaattttttttaaattagccaggtgtggtggtatgcccctgtagtcccagctactcaggaaaccgaagcaggagaatcgcttgaacacaggagtttgagggtgctatgagctatgattgtgccactgcactccagcctgggcaacagggcaaggccctgtcttaataaaataaaataaaattcttaatatgtttatatacttgaaaaactatttgtgtagagacacatgtctgtaaatacacatagatatattgactttttaagctttaattgaagcctttctcttcacaggttttatatatttgactgcagatgactaacagattgaattttaagagtgcgaaacactctggtgctatagggaaggaacttcataaatagcccctcctgtaagggaccagtctttaatttaaaacagtccagcccaggaatcttgcaagaattttgtaattatttgaggagagatgtagatataccctggagttctttgactttaagttattctagagtcatcccagagatggcctagaagacttgaatgtaccccaaaggattctgaatccctttgggaaatttagactatgattttcagtaagaattaaaagccccaggataagcgtggtggttcacacctgtaatcccagcaatttgtgaggccaaggcgggaggatcgcttgagctcaggagttcgagaccagcctaggcaacatagtgagaccccacccatctcaatttaaaaaaagagagaaaaaggccaggtgtagtggctcacgcctgtaatcccagcactttgggaggccaaggcgggtggatcacctgaggtcaggagttcaagaccagcctgatcaatatggtgaaaccccatctctactaaaaatacaaaaattagc

SEQ ID NO: 508978 - DNA, 880 bp, Homo sapiens
tatattttcaaagaaaaaaaaagaattaacatttgggaagttctcccctggaggaagaggggctagtcagaaggaacacgaactgggtcctatgcaggcggccaagtcaggtcacaaacagcttgatgcaaatctcggcgcatggggatttctatcactagcacgcatttttattttggataacaatttcctttcgtcctcgttccttttggtccatggtcttataggttgaggtggtagtttgtttattatttatgtggtattagggttatttatacagaaaaacaaagggtgtgcgggggagagagaaaaaggaaaatttaaaaattcaagaaagaaaaaaaatgtgcccccataagaagaaaacaatgttttgtctcgcgaacagaatgatatctctcatagacataacacgaggagaaatatcccatattagggttccttataactccaagggaaccaatttatttggaaaagtctccgtgggaagtgaaggatatactcatgttggtccccaccagtttatttctacgaacaccacacgcgagaatgttaaacggaatttttttgtggggcaaaaaagagggcgctagcgcgagcgatttcgaggagacccagcctcgattcgttgccacaggactacagagaagtagacgctttcccccctttttgaggccttatcactttttggtcaattttttccaattacaagggggatgtacaaaggggagtgctatccgtggtcctgttgcagaaaccaaagtacagtggcttgacttcggtggaattgcccacccaagcggaccaatgtttacccaagggatgtgcgtggcaagaacggcttaataagggggcaggccactaattgttggggcgttca

SEQ ID NO: 508979 - DNA, 117 bp, Homo sapiens
gataaataatatcctcgtagtccgcagctgctggctcaggtaaaacctctgtattagtagagcgtgtaattcaacgcattgtatattaaacatgcgacatcaatcaaatactagtcg

SEQ ID NO: 508980 - DNA, 264 bp, Homo sapiens
atagcgtcgatcctcagatgtcgccttgatcccagcctacattttcacacttctatgtagcctctacctgcgcgacaactcattcctgtcgcgcaccaatcacatgcctatcatatagtcaaaaccagcccatgacccctaacaggggccctctcagccctcctaatgacctccggcctagccatgtgatttcacttccactccataacgctcctcatacataagcctactaaccaacacactaaccatatactcataaagacg

SEQ ID NO: 508981 - DNA, 461 bp, Homo sapiens
ggtgaacaccctgcaagcagctgctctccgtgcgagcttgaagaagaacactggctacaaggggacgttgccgaatgttctccagcgctctgtataagacccaggcttgctagactgtactatacacgtcgggactggcaccataaacggagatgatgccgaaaacgcaaggcgaaggccaagccaggtatgtgtgtgtcggctgtgatgaaggtggagtggtacataacgtgtctaggaacttgctgctagttggatttattaaaagaatgtagtcttccatggaaagaatcgggctttcaaatagacttcatcagtattctagtctctcttcctaatcatgtattgaagcatttttcttttgccacttcattcatctttacgctttctttgtaaaaaaatgttaaatgacatatttccctgttttctatatgaagtgtattcccacttagtaatatgag

SEQ ID NO: 508982 - DNA, 222 bp, Homo sapiens
tcttacatattccacttacagtaagggtgaatgcattaaacaaggctgactgcaaattggatgtagtcagattgaatgctcttgtcatatttctattggttagaaaacagaacaagccacatcatttgaggcatgcctcatgttccatccctcaatgctctaagactagaaaaaattgttgttctgaatatactattaggagatcaatagtctatttatcac

SEQ ID NO: 508983 - DNA, 799 bp, Homo sapiens
  misc_feature (426)..(426): n is a, c, g, or t
catgatttacaatgatatggatttgtaaacctgtttaacatgaaccagtcctctagggccgatcatgttaaacgagatttacaagatatggatttgtaaaccgtctaattcgcgagtttaataatcagtcagacaaatattcactctttccttagtgattgtgtgataattagtttattttttatttataataattatatagaattcaacggcatttgaacgagcttttagcagctcagtatactagtcgttgatgtcacttaacgattctagttcaggattacttgagagaaggctatcgggacagatgtctatccgtcaactatttgggacttatttcgctaatggtgactggagtaattaatagcgacatagacggccgtattacaccgcatagtaagttttcatagagaagccatctgttgntaagtaaaccacaattattctcggtaacgtctaatccttacatattatccgcaaatcaagctagggggacgaatgctttgtgagaaagttaatacaatttactcgggggtactcaaataccacaataagcttttaactctaatattctagtgagcaggtcttgttaccatcgatcgacatttgtgagggaaaaccttcacctctggccaaactcctgcacagtcacattatgtgtgaagaacagtgtacacgtaattcaccacaaaatgctcgctgctgtaaccttgatcgccactagagtaatgctcttgatcccccaataatgataatggtcctatggaaaacacagtcatgggaagaccaacttatttgc

SEQ ID NO: 508984 - DNA, 393 bp, Homo sapiens
tgatgataagttggcctaccccagtttttttttctggtctataagcatttacccccccggccccactcccccccttttaaagaaaaaaattgaaatgtaaggctgtgtaagatttgtttttaacctgcacagtgtctttttttggatagttacccccccccgaatgtgtctttaaatagccccgtcctgggggtattttcaaaagcccccacccctgcctggtccagtatgggggttgtaaattggcatggaaatttaaaacaggttcttgttggggccccgccccaattagttatatatggggaggggagttttttcctcctccggtgtctctgatccagcttatacgaaaaaattgttgttttgttaactgaatccccccccgtaattgca

SEQ ID NO: 508985 - DNA, 185 bp, Homo sapiens
  misc_feature (83)..(84): n is a, c, g, or t
tttttttttctggcaaaaatgttgtcccttgagactggccacagaaaaccccagttatatttgagtaataactacaatgtagnnaactagattgcattataggtgtttcggtgcatattaatccttcttcattacaaaaacttcagataacttctactataggacttatcatattgaatgtttca

SEQ ID NO: 508986 - DNA, 190 bp, Homo sapiens
aattcgcggccgcgtcgacgaacttgtagggtccggcgcaaaccggatgcaggccgaacttgtcgcctgcttccttcacggccttcggcgagaccatcatgccggcgcggtcggtcaattgggcgatcagcggcgagtagggcgtcttgagcaccagcttgatggtcaggggatcgacgacgtcggcctg

SEQ ID NO: 508987 - DNA, 659 bp, Homo sapiens
  misc_feature (22)..(22): n is a, c, g, or t
  misc_feature (66)..(66): n is a, c, g, or t
  misc_feature (76)..(76): n is a, c, g, or t
  misc_feature (103)..(103): n is a, c, g, or t
  misc_feature (109)..(109): n is a, c, g, or t
  misc_feature (112)..(112): n is a, c, g, or t
  misc_feature (158)..(158): n is a, c, g, or t
  misc_feature (166)..(166): n is a, c, g, or t
  misc_feature (301)..(301): n is a, c, g, or t
  misc_feature (430)..(430): n is a, c, g, or t
  misc_feature (469)..(469): n is a, c, g, or t
  misc_feature (546)..(546): n is a, c, g, or t
  misc_feature (549)..(549): n is a, c, g, or t
  misc_feature (580)..(580): n is a, c, g, or t
  misc_feature (587)..(587): n is a, c, g, or t
  misc_feature (652)..(652): n is a, c, g, or t
gggagggggggccgagggaccnggggcactgaccaggtcggggtcgggggcagcctctgcctgggngaggccgggngaaaagggctgcgggggccggacagcntctggngcngggcctcagcggagacagaggaccagaggtcaggtccctgggggcngagccttnctcagactccggaggaaaaatgtcccagcccagcaggcagtcccggggcagggccagtgtgtgagaggcgtcaaagcccttccgccggtggatgtggtaccggtgcgggggccccaggatcgacagcgggaggcncaccctgacgtgcgcgggctgcgccagggtcccagggccctgctggtctcgcggtgtcctgcacaggcggcagggggtaccgggatccacaggcaccgggaacaggcgccggttgacacggtaacagtncacgcattcatggtcttcctccacgccgctgccactgcnctcacgcaggcctggcaactggggtccaggatggctgccgacacactcctccttgtgggtttcccgaaactcctgcngcntggagaagaaggcctcaggctggctggtganggaaganctggtgttcagagaccctgcaatccagttatagcccaggtatggcctgaggcgccaccccctctnaggaact

SEQ ID NO: 508988 - DNA, 457 bp, Homo sapiens
ggcgtgaaaaatcggtgatgtactacctctgctgctcgaacacacagccacatttgatacacgatgacaccttgcttgttagagaaacatctaacacatctagtagaatactatgcaggctggttggctaccagtttcctgtctgaggtgtatatgttaacttcgtgatcagtttgtatgtaagggactcttgtcctatgtaaagttaaggtgcgccgggtgcagtggctcacgcctgtaatcccaaaggtgttctttttatattctgaatattacccctttatcagatacgttattgggaaatatttggtctcattctgtaagttaacttttctctctgtagatcgtgtcttgggatgcacaaaatttcttaagtttgatatagtcccatttatctaatagggctggtgtctcctttccttagggcgtcatatccaagaaattctttgccaaaatc

SEQ ID NO: 508989 - DNA, 409 bp, Homo sapiens
cgggcgcggtggctcacacctgtaatcccagcactttgggaggctgaggagagcggatcacctgaggtcaggagttcaagaccagcctggccaacatggtgaaaccccatctctactaaaaatacaaaattagccgggtgtggtggcacatgcctgtaatcctagctactcgggaggctgaggcagggcaattgcttgaacctgggaggtagagtttgcagtgagctgagattatgacgttgcacaaaatacaaaaattatggcatagcacgtgccgtaatccccactactgaggaagctgaggcagcagaatcacttgcgcccaggaggcagaggctgcagtgaactgagagcttgccactgcactccagcctgggcgacagagcaagactctgtctcaaaaaaaaat

SEQ ID NO: 508990 - DNA, 176 bp, Homo sapiens
  misc_feature (10)..(10): n is a, c, g, or t
ctcttgaatngaatattaatagaatatgatagtccttaacaatgcatgcttggtcaacagaaaagctgataaaaacaagaatttacctatttatacttaattttgttttttctaatacatttctttgtaattgatataaaaattaattttggaagttcctctaatttgggttttct

SEQ ID NO: 508991 - DNA, 389 bp, Homo sapiens
tagccacttaaacaattctacaaaaaaaataataaaataaaataggccctgtctggtgctcacacccgtcatcccggcacgttgggaggacaggcgtgagccactgtgtccagcctttttttctttttttgagatggagtttcactctcgttgcccaggctggagtgcaatggtgcgatctcagctcactgcaacctccacctcccaggctcaagcaattctcctgcctcatgtaccggaggctgctctgagccgagatcattcacgccgtgctccagcccccggatgacagaatgagaccctgtctagaaaagcaaaccacaaaaaaaataaactttttgaggaaaaccccaacagacctccagagcccgtgtgaggaggggtgtctg

SEQ ID NO: 508992 - DNA, 348 bp, Homo sapiens
gatatattgactatttctgctgcaaggatgggatatgcttgctccatttactcaagctttatatttattctttttagagacagggtctcgctatgttgcccaggatggtcatgaactcctgggctcaggcaatcctccctcctgaataactgtgaccagcaccgagtcactgagcctggcttattcaagccttaattttatgtttattgatatagttttacagtttccatcccagagatcttgcatatttctcactatatttattcctaaatgttttcttctgctgttgctgttgtgaaagggatcttttcctgaaatacattgtcctacctggtttttgataggaaa

SEQ ID NO: 508993 - DNA, 398 bp, Homo sapiens
tccccctgggattacagtgcgcccaccacgcctggctaattttttgtatttttagtagagatggggtttcaccatgttagccaggatggtctcgatttcctaacctcacgcctttaatcccagcacttcgagaggccaaggcaggaggattgctttgctcctgaagccaggagtttgagaccagcctggacaacatagcgacaccctgtatttacaaaaaatataaatttttaatcagctgggtgtggcgacactcacctgaagcaccttagcctcccatgtagctgggactacaggtgtgcaccaccacgcctggctaatttttttttgggtagagacgaggtcttgctgtgttgtctgggttggtcttgcctaagttcagagccagggggtaccga

SEQ ID NO: 508994 - DNA, 327 bp, Homo sapiens
tcaaggtaaacaattttaaaataaattttctacttttttttttttggagacaggggggtcactctctggcccgggcgggagggcaggggtatgatcagggctggcggcagcctcaacctcgggggctcaggtgatcctctcacctcagtctcccacatagcggggaatacgggtgcgcgcggccgcaccgggctgatattgggtagagaggggtctcactatgtggcccaggcgggtctccaactccgggactcaagcaatcggcccacctgggcctcctaaaatacggagataacgggtgtgagccaccacaccgggccccaaata

SEQ ID NO: 508995 - DNA, 1041 bp, Homo sapiens
tggttctccctggggtccgggttctgtgtttactctcggaggccatctgcgccctgctagtgtactcagggggcttctaggttctccctcccgttctttgtctgtcttggtcctcccatggtgggtggccccttgttgtcgtctgttccgcgctatgcgtgtttttggctagtctagcgctatcctttctgttcgtttcgttagtctctccttccttgtgctccttggtttggttatccctggtttccctgttctttacctttgctctttgtgggtacccttgatgttttcgcttccccggttccgggtgtttcctcggtgcctccctgggtgcccgcgcctagttacggagcgtatcgaccaccccggtgtggacccagtaccttcggggccttttcttggggcccctccagcccccgtcttatgttctgtcacagcattgtgcctttctggctcgcctgggcgcttccaggtgtgtcaccgtggcttcctaagccaggggctcccttgggctatttggtggccgactcttgtaagcagatgactggttactgaagggccaatggttccgagacccatcgatcctgaagcccgttcactctgtatcccgcgttttaactctgggagagcaaggtccaggagctcgacatcatctgagcatgttgtgctcttgcatcgggctccactggcttgcatcctgtgctgtgttcacagcattgtttgctgctgccatcgttccccagtactgtgccaggccttctccccctccccagtgtcctctcaatctcaggcaggctcattgcacccatatggactgggccaggcacatggcagtgatgacacgaggccaatagtcgagtggatgagcgggatcctaggatctgatctgtagcccatgctgatgtaacctcactcagggcaatccatctggaggcctgagcaacctggcccaggaccctggcttcatcctggcactgaccaggaaagactgacctctgaccctcttagcagacagaggcccaggcatgggagcactctgga

SEQ ID NO: 508996 - DNA, 177 bp, Homo sapiens
tcaatctttcattggcatttcaaatggcatttcaacatcagggtcatgaaagtaaagaatggtttccccaagtaatatctggcaccaggaacttaaggtacttaacagccatttacaatttccggcaaagccagatgtcgactggggtgctgtcagagccaatagaatgaggatcct

SEQ ID NO: 508997 - DNA, 584 bp, Homo sapiens
gacagatcacctcttccctgcatcagctcctacctgtgcatcgccccatatatactagggtgtagtatagtgtatgtagtgtatgagtgtgtataaaaaatctagtcccaccacacaaacttctctctataaagcagataacagggaagaacaataacaaaagcaaaacaagccaattgctctctctttgggatatgattcatttcccttgtgaatgaagtattcaacaacataagaaaaggaaaagaacgatttcttttgtatactccctaaacacacagagtttactgggtcagatttaactgtgagcatttatatgcctacttccaggcatcgtcatctgatgtttcactgctactggtttcggtgtctgagtcctcaaactctgctttgcaagtgcttctccaaggggagaacaggctggaactgcggctctgcaagaagccattcttcccaaagccatttcttctcagctgctctgtcttcatgtggaactccttgagctcatcctctgtgaggggaaggccattctcatcattttcaggatattcctgccaacccatagctttcaataccctgtgctc

SEQ ID NO: 508998 - DNA, 396 bp, Homo sapiens
  misc_feature (47)..(47): n is a, c, g, or t
  misc_feature (57)..(57): n is a, c, g, or t
taccgggccagattaaggttaatataatggccagattttggtttttnaaccctttangggaaatagggataaaataccacattaccggtataaaccttaattttttttaagacctcagcataaccctttcctttagtcccagtagatataccttcacctatttttgtgtattacccatttagtccactattttatgttttatttttattttttgctttttgaatggagaagctgtttgtttgttttaaaaataacagctttatctagctgtaattcacataccatacaattcacccttttaaaatgtaaatgggctcacacctgtaatcccagcactttgggaggctgaggcgggcagatcacttgaggtcagttcgagaccagcctagccaacat

SEQ ID NO: 508999 - DNA, 167 bp, Homo sapiens
ttaaaaacaacaattgtaactttttattagaggggattcatccttcattggcatttagctgtggggaataaagaaagccacaaagctcattagatatacctcccataaaatacaatacatagtttcaatttcggttctaaaagccaatgttattcatgcagtcgaag

SEQ ID NO: 509000 - DNA, 152 bp, Homo sapiens
cacattggcatttatacgcaggcgaccggtcagaatatacatcggcatatgcctcgaaggaaatcgcaaaggccacggctttgtaaccgcgtatacgctggagctctcccgagcacgataagttgatggatgcggcatcgagcgaaattcgc

SEQ ID NO: 509001 - DNA, 158 bp, Homo sapiens
ttgtgcttcgggacggcgggatgggacacccaacactttttcacttcttcagagggaaactcagatgtccaaactaattttaacaatacgcattaagaggtttatttgggtacatggcccgcagtgggctctctggcccccagaaaggggaacaggaa

SEQ ID NO: 509002 - DNA, 131 bp, Homo sapiens
agaggacagcccacagacttgctaaagagacagtatgaaagttcctgagtcaatgagcatcctacactgtgtatatgatggaagctggagagaaagctaagaaatggtctagttcagatggtctcatttat

SEQ ID NO: 509003 - DNA, 130 bp, Homo sapiens
gcctgcgccgactatagaggatacccagctcgttctaccactccatggagaagatggggtaaggaggggttaacgcgaataacacagctgtctatctaactatgcgctgaccccacttactttttctaca

SEQ ID NO: 509004 - DNA, 534 bp, Homo sapiens
gtgccccacgtgcttaaatggcgctggtcatcatgcatcccgctggtgcttgtggtcggtacttacgacctgaagacggtggtgacggtcagcgtggtgcagttctcgctgttctttgtggacttctggttccagctcgcccgctggatcgacagcaccatcctcgacgcactctacggctgggggtggggctggaaccggccgcactcgaacttcgatccggtgatggggctgaacaatgccttcggcgacatgttgctgaacttcgtcatggcgacgatgttcttgattcttcctgctttctgggttactgcgcttgcgtggacaggtatcagggctggcaacttcctccaaggccttgcaagcggcacaagggatgccggacaagccggtggcaaaggtgccggcgccctcatcagtgcagccaagaaatagtgcctagcgattcaatcgtcctcaaaccgagggtcagggtcatcgttgtaagaggcgggatggtaaaacaagccatcccggtgatcacgcgggttaact

SEQ ID NO: 509005 - DNA, 440 bp, Homo sapiens
  misc_feature (148)..(148): n is a, c, g, or t
taggtttctacactgacccagaagcttaaagaacactgcatagttaattaccaagttaaaacgttttctgggcaaactcatggctttgtgcatcggaagagagaagactgctcccctgctgacaagccctacatcgaggaggcaaggnggaacctaattgaatggctgaacaagtatgtctaacagcacccaagcacaaggcagctgttgcccaaatttgcctgaataattaaccatctcttactatccatgatagcatgactgttaggggaactgggggcaattcagggaccagctagattctcagatatggccttacattggtaattcaagtgttaaaatgtacaaaaccaggaagagcagttgtcactatgtatattcaacttcccctaatgagcagtgtcgacattcaacctaataaagtgatttttaaaacttga

SEQ ID NO: 509006 - DNA, 364 bp, Homo sapiens
gcagcggcgccctttttttttcatttccttcatttcttttggtggcttgctcctaaccactctgccttctgcatttcctttctccctggggatgtacagaccacgaccaaagtaatctgcatattataagtctgcgttgaaaaacaaatgacgcggcgggtgtggtggcacacacctgtaatcccagcactttggaaagccgaggcggttggatcacgaggtcaggagatcgagactatcctggccaacacggtgaaaccccgtctctactaaaaatacaaaaaatcagccgggcatggtggcgggcgcctgtggtcccagctactcgggaggctgaggcaggagattggcgtgaacccagaag

SEQ ID NO: 509007 - DNA, 372 bp, Homo sapiens
  misc_feature (168)..(168): n is a, c, g, or t
tggttacagggcatgtacggaccactttgcgtgacccttttgtgagctttggttgttggacgtgagtgagctgtgctcttgtgctggatggagccagggtgggtccggtggccatgtccatccctcttctgtgacatcaggcagtagcctttggctatggagacagcnccagtgcagggtgttgggatattgcagggccaggattgagccccgcagacctccccagcccctagctcaggagagagtaagccaggcaggtagccagggggactagcccttgtggagactggggggcttgatattgtccccgtggtctctttctttcctttccccagccaggggtgtatttagtcagcaggggctccagtgtgg

SEQ ID NO: 509008 - DNA, 563 bp, Homo sapiens
gagatggggattcaccacattatccaggctggacttgaacttctaacctcaggtgatccggctgcctcggcctcctaaagtgctgggattataggcatgagatgggaggatcactcgagcctaggacttccagagcagcctgggtaacataaggagaccaagtctctataactaattaaaaaaaaaaacaattagctgggtgtggtgatgcaagtctgtgttcccagttactcgggatactgaggctggaggattgccagagcccaggaagttgaggctacagtgggcggtgatcacacccctgcactccagcctgggcgacagagcgagaccctgtctcaaaataaaataaataaaacaaaatacaataaaaacatgtttagatacacgtatacttacattgtgttacaattgcctacagcatttagtacagtaacaggctgtgtaggtttgtagcctaagagtggtagctatactagatagcctgagtgcgcagtaggctatataacatctaggtttggataaatacactgcttgatgttaacacgacaatgaaaatcgcc

SEQ ID NO: 509009 - DNA, 805 bp, Homo sapiens
  misc_feature (388)..(388): n is a, c, g, or t
  misc_feature (399)..(399): n is a, c, g, or t
  misc_feature (431)..(432): n is a, c, g, or t
  misc_feature (434)..(434): n is a, c, g, or t
ggagggcgggagtgcaggagcgtggccaggagctgctgggctgtgagcggcggcgccgccatgtccgactagcgagaagctcacacctggatctcgatcatcgggcgcctgtctggaagtgcagggctcgcggcctggtcaatggaatgtcacagctgacatggagaacgagatccgcggtctgtgcctgaaatcccgggagatttgtccggagccagcccattcttctggagctggaggcagctcctcaggatctgctggtggacatacacgggcagtactacggaccgttcgtgccgactattcgagtatggctggtttccctcccggagagcaagtagctcgtttctgggggactatgtggacaggggcaagcagtccttggagnccatctgcctnctgctggcctataagatcaagtaccccgaganntncttcctgctccgtgggaaccacgagtgtgccagggatcaatcggcatctatggtttctacgatgagtggcaagagacgctcacacacatcgaactgtggaaaaccttcagtgagctggcttcaactgcctggcccatcgcgggcatagctggaggacgaagatcttctggtgccacaggaggactgtacccggaactgcagtctatggagcagattcggcggatcattgcggcccaagatgttgccttgaccagggactggtgtgtgactgctgtggtctgagccttggaaaggacgtgcagggctgcggcgaaaacgaccggggagcatcttgaccttatgagccgacgtggtggccaagttcctacaca

SEQ ID NO: 509010 - DNA, 707 bp, Homo sapiens
tgatgatggttgtgtgacagggggaagcaggatctattggtttcttccccctccccccaccccttccttttgtctctctttttttttctctaagaaaatcaccagactagtttttccatcttgagtaatttcttatgtgggacagttttgatcctcattttgaaagcatgcgtgtgcacatgtgtgttgcctgtggtgccaggtgagacaggtggcactaactccagctgcttggaaggcatcccaagggcgcatcttaaagttggagcagacctcccttttccagcccctggggccattagaccacgtgctggaactagcattgtaaaattcccatcccagttccactcccctgaagtgaaacccttttttttttggtgacagtaacttcttaaaaatcatggtctctttatgaacattctcctcaggtttcttctctgctgaaaatgtaagccaggctactttcaaaggtatctggaaattcggtgcctcatgggaaactgatatgctaagggcctccccaaacccccgcagattttttcttttaatacttggtccttgtacaagtgggtaggctgggcatgcgtgcgttgcctttagggcagcattttaaacctttgccaaacttggccattgccgacatgtacattcttctgctccacctaacttaaaacctaatcagctatttttatcttacccttctggtg

SEQ ID NO: 509011 - DNA, 774 bp, Homo sapiens
gtgtctctttggaaaagtatctccgcgtaggaaacaacgtttttaattacgggcctaacaggaaagcagtagggcgttgcgtgactcttgaagggtgctcaccaccccctcaagccagaagggatttagtgttacttctacagagcccgccagggcctcatctttgggcttaatgagggggagacgtgagcataattcaaacagtcgcaagctttgggcaggtaaagaagtcaacaacaccggggtcgaaacgtcgagcacttttgccattggaaccgctcacaagtacttgcacggttatgtataacaataattcaacgcgccccaacttttctctaaattgggagaattaagcgaacatgtggcccgacactgtacttggcatttgttgtgggggtaataaccaacaatacaactttgtcaacggggacatctgtggcatgcaaccaggaacttattcctcttacggtgaggaatgcgcggctgaacatgaattcctctcgtcaccacgataaaggagtcacggtgatctaccgctccgcttgttatgagggtcatgtctacttgttatgtatatatggcaacggaccggccctcaagtatcgaactggaagtagctcgacaatacaagcgaattaatcggactttcgcccgaccgcgtcggagaagggaaatacttcgtgatggtggcctaacctaaaaggagctgggcagacatttcggagccaactgacttatggcttagtcggccccacggcggtaagcaacattcct

SEQ ID NO: 509012 - DNA, 175 bp, Homo sapiens
acaggctctgtgtataagcgctgtacatattgagagcatgttcttggccagcacctgctcgtagagagtcagtcacactggtacatttcagctagtccggaggctggcggtcagatgttatcactcagtatctcagcagctctcttgcacttgaccacatccatagacccatctt

SEQ ID NO: 509013 - DNA, 202 bp, Homo sapiens
  misc_feature (177)..(177): n is a, c, g, or t
tgtggagaggggtctcacccgtcgccaggcttgagtacagtagtgctatcacagctcactggagccttgaactccggggctaaggatcctcctacctgagcctccggagtagctggggactggtagggtctccctctggtggtccaagggctgggagtggtagtacgtgctatcacnagctgactggcgagcctcaaccttc

SEQ ID NO: 509014 - DNA, 200 bp, Homo sapiens
  misc_feature (23)..(23): n is a, c, g, or t
ggcggacgggccccccgcggcanacggcgaggacggacaagacccccacaacaagcacacttttacacagggccacatgtttcacaggacgggggatttcagaggcgcgcgcgcgacatttgctcaatatttctttcgcgcccctctgtgtgtgacactctccaccgggctctcagacccccttttggagtgtatccccg

SEQ ID NO: 509015 - DNA, 504 bp, Homo sapiens
  misc_feature (34)..(34): n is a, c, g, or t
  misc_feature (450)..(450): n is a, c, g, or t
caccctccctccttctgcttccttttgctcccgngctcttccttccctccctctcgttttttatatttattttatggtgaatttttgtttatgttcctttacttatattcgcggttagggcacttgtttcttaatgacttaataggagttctttacatatttaagacattaatcctttgttatatacattgcgggttttttttctatttggtcatttaccttaatagtgggcttgtggcagatattttaaatgtttgtgctatcaagtatgttagtctttgcctttatgattttggtgggcagccatccttggaaaggcctgagaagaaaggcaggtccttgatcacagagagtctgaagtttatctttgagtagtatcagagccattcagagtagtggggtttaaaacatacatttttgtcttgtagagacagggtttggctatatggnccatgctggtctcagactcctgacctcaagcggtcctcccacctggggctccca

SEQ ID NO: 509016 - DNA, 190 bp, Homo sapiens
aactgcgtatcattcagtgtgtgaggtggaggcggtggggctgtgtagcctggtgtaactccctggttgtagggtggtggctgtaactcggctggaaagtgacgggaaaaaagccaaagtctgtggagggtgtagctgtgatggtgggggtgctggtattggcgcttgagccaggcatgttgctgtactt

SEQ ID NO: 509017 - DNA, 284 bp, Homo sapiens
ggccagagccggggcactttcacagtttgaaggtcactgatagcagaggggcctccatttcaactccagaagtgcggctctgggagggatgttctagccctccctgacatgtcagagccagactctgcctggaggatccctgcatgcggctcctgtcatcctctacactttggccaagcatgaggtgtgagaaccacttggctgctcatgccttctggaggacacacagtctcagtccagatgcctctctggctttctggcccttgctggaccagatcctactc

SEQ ID NO: 509018 - DNA, 233 bp, Homo sapiens
ccaacattggtatttgggttttttttttttgagctgtcactaggctcctgaccttccctctgaactccaccctgcagggcaggccaacagacaagctttctttctttctttttcttttttttaatataagagggaaactcgttctctggcccaggctgaaatgcagtagcacaatctcagttaactgcaacctctgcctcccgggttcaagcgattctcctgcctaagcctcc

SEQ ID NO: 509019 - DNA, 140 bp, Homo sapiens
gctgtgacatatggtgattgttggttaagagacttggactctagtcattggcttctttcagtcttctactgtcacctcaggcagacttcatttagacgaggaagcctatctgtacttgaagattgactttgaacatatgt

SEQ ID NO: 509020 - DNA, 1126 bp, Homo sapiens
  misc_feature (334)..(334): n is a, c, g, or t
tggtctgtcgtcgtcgttctgttgctttgctctgtctccctctgtttttgtctcgcgcgttttgtatctctgcgactgtttgtctcctgctctccttctctgttttggctgttattacacgggtcatttcccttgttttttctcttaccagagtgcgtgctccacggtttttctcccgggaccgccatgggccacaagtgctcgcctgtgccccaccgcccctttggggtgtctcccctgggggggccttactggccgcgccagcctctcgtgcgcgctgtcggcctttccgtccagggccctcccgcccagccagccgcccttttcgtgtganacattcttcagggcgggcaaggggcccaccttctgcttttgtttacccatctctggccgctcacggttacccttctgaaggagccggactccgcccagaattccccttagaccggggctgaaggagtgtcccccctctgatgtgaaaagaaaattgttttattgcgtcacttctgactgttttaactgtttggctgcaacttcccgctttagtttgagatggaaatatataaattttcgtagacttggaagttgaagagggccgaattccccacgcttctcacatccattgtgaatgtgtagcacatgtctgccctctgaactggaacactcacttggcccgttaaacttttcttctggggcactacccggcacagtgtgcaccgaatggcccacgaactttggaggcccaaggcacacccctggagtcacgtccagcactcactataagaatattgggtgaacaccccacctgtttaaaaatttaagtctttgtcccttaacagaccaacttcacgtggttatattattaaaacgttgtgttacttcgctcctataattaaaattgatagagaagaattttaaaaatgtgttttgctttctacctattcacggaactgcgaactagggaaaggttggtatgaaaaaatgtctttccttttttgacatgtaacactagttcaactcttttctttgttaccacttagaactatatccctggatatcacgtctgctttggactccttctgctagtgttaccagatggaaataaaacccttaatttgaacccaca

SEQ ID NO: 509021 - DNA, 905 bp, Homo sapiens
  misc_feature (6)..(6): n is a, c, g, or t
  misc_feature (72)..(72): n is a, c, g, or t
  misc_feature (88)..(88): n is a, c, g, or t
  misc_feature (99)..(99): n is a, c, g, or t
  misc_feature (145)..(145): n is a, c, g, or t
  misc_feature (179)..(181): n is a, c, g, or t
  misc_feature (189)..(189): n is a, c, g, or t
  misc_feature (219)..(219): n is a, c, g, or t
  misc_feature (234)..(235): n is a, c, g, or t
  misc_feature (302)..(302): n is a, c, g, or t
  misc_feature (304)..(304): n is a, c, g, or t
  misc_feature (329)..(329): n is a, c, g, or t
  misc_feature (374)..(374): n is a, c, g, or t
  misc_feature (385)..(386): n is a, c, g, or t
  misc_feature (389)..(389): n is a, c, g, or t
  misc_feature (396)..(396): n is a, c, g, or t
  misc_feature (401)..(401): n is a, c, g, or t
  misc_feature (405)..(405): n is a, c, g, or t
  misc_feature (441)..(441): n is a, c, g, or t
  misc_feature (452)..(452): n is a, c, g, or t
  misc_feature (458)..(458): n is a, c, g, or t
  misc_feature (466)..(466): n is a, c, g, or t
  misc_feature (471)..(471): n is a, c, g, or t
  misc_feature (505)..(505): n is a, c, g, or t
  misc_feature (509)..(509): n is a, c, g, or t
  misc_feature (514)..(514): n is a, c, g, or t
  misc_feature (516)..(516): n is a, c, g, or t
  misc_feature (518)..(518): n is a, c, g, or t
  misc_feature (525)..(525): n is a, c, g, or t
  misc_feature (528)..(528): n is a, c, g, or t
  misc_feature (533)..(533): n is a, c, g, or t
  misc_feature (536)..(536): n is a, c, g, or t
  misc_feature (542)..(542): n is a, c, g, or t
  misc_feature (561)..(561): n is a, c, g, or t
  misc_feature (614)..(614): n is a, c, g, or t
  misc_feature (621)..(621): n is a, c, g, or t
  misc_feature (878)..(878): n is a, c, g, or t
aagggngaggggttttacacaacatgaaagagggaatgcacggggtagggaagttgctattgcacccaggtnacaaagaacacagagngaccaacaggncgcatggcagaactgcatagaagatcgctcagggctcacgtcaggnaggcgcaggaattcagaaaactctaaagcttggnnntgctatcntttgtgccacaaagattaccctgaaaaggnagagagaggtcaaanngcagaaccaaattggggattttcaaaggctgctctctaacagagtttaaaatatccgtaaacatatntncttctgctccctccccttgccttcngcatctggtaaacactttagaaacttaaaccactgttagcatgtnagattgtagannggntgttggnttttntttnttctcatcttgtaccccaaacaacaactctactggnaattgtgatcntgtgantcctctgnttggnaacccggtgagggtcaccaagggggggggtctcngtgntaccngngngataccngcngtgcnaanggttgnggggttctgtgtattattnggggggggagagctgtaagacacaggaatcccaatacgtaagtgctaaagagnaaaaganaactcctttcactcatctattcattatataggaaagagcaaaaagacagtcaaaaccatctgcttcgagcagcagcacagcccagcaatacaggcataccaacaaaccgaaagcaaacactcaggaaagagcctcttggcccttctcaaaggagacttctctcagactggatcttgcccctaatgtagagaccaaagcattataacttcagagactggtactcttgagggagttgagaggtaaggtctaagagaccnaaataacagactgttatcaggtactaa

SEQ ID NO: 509022 - DNA, 133 bp, Homo sapiens
gaacttccccatgttgcaacataaagtcctaggctgcgcatgatggctcacatctgtaatcccagtgcttagtgaggcagcggtgaaaggatgacttgaggtcaggagttcaagaccagcctgggataacata

SEQ ID NO: 509023 - DNA, 499 bp, Homo sapiens
  misc_feature (48)..(48): n is a, c, g, or t
  misc_feature (164)..(164): n is a, c, g, or t
cctcccaggttcactgccattctcctgcctcagcctcccgagtagctngggactacaggcgcccgccaccatgcctggctaatttttttttgtatttttagtagagacggggtttcaccatgttggccaggctggtctggaactcctgacctcaggtgatccgnccacttccacctcccaaagtgctgggattacaggcatgagcaaccacgcccagcctctttccatctcttggctctcccttgtatgtgtgtatgcttcattttctctgcctgtgggctgccttctctgtggggaggtggggcaccagtgcattgggcataggtggcccaggtttgcatctccccagtttagaaaccctaggggaacgagagagcacaccccctccaggtaagccagacagtcgctagaagtgctctaatcaccccagctagggtcacatgctcattcagggccagcactgtggctggggttctaggattgtaaccactggggcccg

SEQ ID NO: 509024 - DNA, 407 bp, Homo sapiens
ttagagacgtgtcgcatgttatactgataaaaggttctatacacacatttagagatatgtgtgtgtgtgtgtgtcggtgtgtgtgtatatttattttacttttttccccccaagatggagtctcactctgtcgcccaggctggagtgcagtggtgcaatcttggctcagtgcaatctccacctcccgtggttcaagtgattctcctgcctcagtttcccaaagtgctgggattactggcatggcactccggccaagacagcttcgtatcccctaggttctgatgaggtgctctatggtactgctctcagggtataactgcagactagaagagtggtaagcggtggtctagaactggcttctccgcaacagtgtacctgtgcttggcttggcaccgagggtctctcag

SEQ ID NO: 509025 - DNA, 1286 bp, Homo sapiens
taaaaccctctatcaataaatggagacattatcagaaaattatgttcaaaccacattttacaaaatgtgccagttatcagggcggggagtttcgaagccaaaggtgagtgttgtggagtgttaaaggtgaaattattagtgtgggggatgtgaagcaaatagtgtgaggaaagtttgagcccaatataatgtgaccgttagaagttccggtgagaaccccgtgtgtggctaccaaaaaattgttgtgagcccgtataaattgcccgctgcggaaatgtgggtgaagggagacatcgaagtatactcgtggagggctggtatagaggagggtgtacaactatagaagaacccagtataaacagtgtggtaatataagcacagggcgctggaaatctatactgtggggttcgccggtgtggtcttccatatttagaactctagtggtggaagctcctccaggtgtgaatgtgacaatacctcccgtgaagtgcagacagttcacataacgggaatgtgtgtttacaggagagtgtgggacacattacatagggggaatataaagacgggggggtgaagtgccgtgtgtgtgggggggcccaaggttgccacccctcccataaagtgggggggggggcataaggggggcataagaggcagggaagagtgcgctcaaaaaagggggctccagaacaaaaaatccgtggcgcaaaagaaacaaaaacacctctcactgaaggggaaacatacaacgaggggattatatccgcgaaaactcaaaaggaggcccatatttgggggaaccaggttgggttgttgtttgtgttggcgcccatatggggatataggttgcatatacatcagagggtataaacaacttgggggacaccaaataaatcggaggacactacaggggacaaagaggatgaatgggaaaaaagatagggacccaaagaaatataagagaagacgaaaaaatgggcgagtgggacacagggacaccaccccagagtggctacaggccggaagggccaaaataaaagaggggactagatagtggcccccgttgaaaacggagaacacaaggaggacgggagataacaccaaacagtgaaaacaacaccacgaaaaaaatcaaccacacgcaaaaagaggaacaaatatagacaggaaagcactacaaccaacaacgagtaacacaactaagagaaaacactaaagaagcacaccagtaatcaccttatcacagagcaaccccaacacaataatgtggaccaccgaaaaaacgc

SEQ ID NO: 509026 - DNA, 988 bp, Homo sapiens
ggggtcacgcggggcgggtccagtcccgggctgggtcgtcgcgggagagaaataacatctgctttggtgccgagctcagaggagaccccagacccctcccgcaggcaagacgcgcatggaagccgtgctcagaggtgcattagaagatgccgggcaggccccgacactcatgcgtgttgacacgcctgtgttcgctgggcctgtgtgctgcgtggatggtgctcgatgttgcttctgagagcactggcggctgtggcgcctgtggccttcatcaggcatggaaccggatgttcactcacgtgcagagccactcacagaaagccttgcgtcgatgcggtgagcacctagattggatgcaagctcgatcgctgaatccatagttgcttgcatgcattgccggaagccctggagaacgcagcaagatgccgtgcatgtgaaggccacactttgaccaccataactgtcgagcgaggaacggagtggggtcgcatgcacacggtgggctgaacagagaaaaggcaacgatcgtgggacagccgtcgatacagcgagcaccgagccctccgatgctgcatggagctgggggcctactgtggctactcagctgtgcgccatggcccgcctgctgtcaccagtgggcgaggctgatcaccatcgagatcaaccccgactgtgccgccatcacccagcggatggtggatttcgctggcgtgaacggacaaggtcacccttgtggttggagcgtcccaggacatcatcccccaagtgaagaagaagtatgatgtggacacactggaacatggtcttcctcgaccactggaaggaaccggtacctgccggaacacgcttctcttgggaggaatgtggctgctgcggaaaggggaccagtgctactgggctgacaacgtgatctgcccaggtgcgccagaatatctagacacgtgcgcgggagcagtgcttggagtgcacacatacaatcgtcctggat

SEQ ID NO: 509027 - DNA, 191 bp, Homo sapiens
tccccttgcgttcacatacacagaatgggataggggatcagcatctggtggccggctccatcaagggcatggctgtggaccacattacttctgcttggtctactagctaggtgctggttgctaggagtagactatatgaagtggcagggctcagtgcacctatgggataggcatggctctaggaaccttgg

SEQ ID NO: 509028 - DNA, 1480 bp, Homo sapiens
  misc_feature (1)..(1): n is a, c, g, or t
  misc_feature (545)..(545): n is a, c, g, or t
  misc_feature (554)..(554): n is a, c, g, or t
  misc_feature (556)..(556): n is a, c, g, or t
  misc_feature (561)..(561): n is a, c, g, or t
  misc_feature (572)..(573): n is a, c, g, or t
  misc_feature (593)..(594): n is a, c, g, or t
  misc_feature (598)..(598): n is a, c, g, or t
  misc_feature (604)..(604): n is a, c, g, or t
  misc_feature (615)..(615): n is a, c, g, or t
  misc_feature (639)..(639): n is a, c, g, or t
  misc_feature (641)..(641): n is a, c, g, or t
  misc_feature (652)..(652): n is a, c, g, or t
  misc_feature (654)..(654): n is a, c, g, or t
  misc_feature (656)..(656): n is a, c, g, or t
  misc_feature (665)..(666): n is a, c, g, or t
  misc_feature (693)..(693): n is a, c, g, or t
  misc_feature (697)..(697): n is a, c, g, or t
  misc_feature (713)..(713): n is a, c, g, or t
  misc_feature (717)..(717): n is a, c, g, or t
nccctggtatagatagtgaacaggtagttgtctgaatgacgagacaaacagcgagttaatctgtggctgggttggccccgctatggtcgccacctcgctgttggcgtcctctcggtcgtctttgtttctgtggtctgtttctgcgacccagcgtttgtgactctcgtgttccgcttttgctccagcaagtggtggagccctggtttgtggcggccgagccttctttactcgtggtttttgaactgcacccgtgtttgtcgcccggggcgcgccgttttcgccatttcctctgcgtgacccttcgtgtggggccatgcctgtagggcctccctgatgttcccgattctgtgcgggcctcgcgtgtgcgcacccctgggattgttgccccctgaggggccctttcttgttcttggtcctatgtgccttgtgctcaacactgttggtggcttaagtcctggcacgcttcgagtatccggcacgtctccgaggcccctcgctgccgctttcgacaccaccctgctaccccgtgaccgctcctctggccnccgcgcggnanagagnccgagatggcnnatgagattgccaaggctcanngtcnctcggnctggtggcganacgatctttgggaagatcatccgncnaggaaataccngncnaaatcattnntgaggatgaccggtgccttgctttccntgancatttcccctcaagcnaccnacaccattttctggtgatacccaagaaacatatatccccagatttctgtggcagaagatgatgatgaaagtcttcttggacacttaatgattgttggcaagaaatgtgctgctgatctgggcctgaataagggttatcgaatggtggtgaatgaaggttcagatggtggacagtctgtctatcacgttcatctccatgttcttggaggtcggcaaatgcattggcctcctggttaagcacgttttggggataattttctcttctttaggcaatgattaagttaggcaatttccagtatgttaagtaccacacttatttttgcctgtgtatggagagattcaagaaataattttaaaaccgcatacataataaaagacattgttgcatggttaaaaaaaaaaaaaaaaaaaaaaaaaaaaaaaaaaaaaaaaaaaaaaaaaaaaaaaaaaaaaaaaaaaaaaaaaaaaaaaaaaaaaaaaaaaaaaaaaaaaaaaaaaaaaaaaaaaaaataaattataatcttaggccaaaagacaaaaaaaaaccaatatataaaaatttaattgaagagttttatataaaacctgggaaatcttgttttttgattaccatattggatttaccagatttaatcccaactatttttaaactttaaggacctaaattttaaaatttatgaacaatttttaaggtaaacaaattataacgtggttttgtaaatactagttatcaaaccaaaatttacctgttaaataaatgccat

SEQ ID NO: 509029 - DNA, 868 bp, Homo sapiens
  misc_feature (15)..(15): n is a, c, g, or t
  misc_feature (138)..(138): n is a, c, g, or t
  misc_feature (147)..(147): n is a, c, g, or t
  misc_feature (245)..(245): n is a, c, g, or t
  misc_feature (251)..(252): n is a, c, g, or t
  misc_feature (267)..(267): n is a, c, g, or t
  misc_feature (270)..(270): n is a, c, g, or t
  misc_feature (281)..(281): n is a, c, g, or t
  misc_feature (291)..(291): n is a, c, g, or t
  misc_feature (311)..(311): n is a, c, g, or t
  misc_feature (329)..(329): n is a, c, g, or t
  misc_feature (340)..(340): n is a, c, g, or t
  misc_feature (356)..(356): n is a, c, g, or t
  misc_feature (361)..(361): n is a, c, g, or t
  misc_feature (371)..(371): n is a, c, g, or t
  misc_feature (375)..(375): n is a, c, g, or t
  misc_feature (380)..(380): n is a, c, g, or t
  misc_feature (384)..(384): n is a, c, g, or t
  misc_feature (401)..(401): n is a, c, g, or t
  misc_feature (405)..(405): n is a, c, g, or t
  misc_feature (417)..(417): n is a, c, g, or t
  misc_feature (423)..(423): n is a, c, g, or t
  misc_feature (438)..(438): n is a, c, g, or t
  misc_feature (460)..(460): n is a, c, g, or t
  misc_feature (467)..(467): n is a, c, g, or t
  misc_feature (473)..(473): n is a, c, g, or t
  misc_feature (475)..(475): n is a, c, g, or t
  misc_feature (478)..(478): n is a, c, g, or t
  misc_feature (483)..(483): n is a, c, g, or t
  misc_feature (487)..(487): n is a, c, g, or t
  misc_feature (489)..(489): n is a, c, g, or t
  misc_feature (495)..(495): n is a, c, g, or t
  misc_feature (497)..(497): n is a, c, g, or t
  misc_feature (502)..(503): n is a, c, g, or t
  misc_feature (520)..(520): n is a, c, g, or t
  misc_feature (674)..(674): n is a, c, g, or t
  misc_feature (784)..(784): n is a, c, g, or t
  misc_feature (866)..(866): n is a, c, g, or t
gcatcaaccaaatgncccagccacttggttacagtagctgataacaacactagtggatattattgcttataccccaagttcatttatacatccattatattttggcaagattacaatcaaatgggagctttggttgtnaaatttcanctatgactactcattgacaactcatcttctaccattttatggtgggatacatgtcaattcttccacatcttgtctcctttctccttccatcgataagntttacnngcctattgccaatcnttnagatggctgcntttgtcactntccctactctactgccttcncttttgtcatgacaaggngatgcatttcngggcctctcctaagancttcnatctggggtntccnctgcnagtnataaatgcccatctgtnatcnagatagattttnaaatgnatatgggtgtgaggnttggggtttgggctcaactgtntcatttncatctncnganaagcnagangngaaaananaaatnnaaacaaaatcaacagtncttgggattggtaatttgacctcccaacagaatgggccccaccccctgccacattaacatcccatggcaggtgtggagctgtggccttgaaatgctctctgtgtgtgtatgtgtgtgctgtaacattttaatttacagagaagcaatgactgantgcctcacgaaagctcccctgctgtcacacttcctagtttaacactgaaaactcagaatgagaaagagtcagaacgaactcacaatagcaccatttcctagactcttggnattagattcctttccgtgtaggagaacgcaggcgcccagcctccagctttgtgctttcacaggctcccaatgcatttgggcnga

SEQ ID NO: 509030 - DNA, 1502 bp, Homo sapiens
  misc_feature (1)..(1): n is a, c, g, or t
  misc_feature (545)..(545): n is a, c, g, or t
  misc_feature (554)..(554): n is a, c, g, or t
  misc_feature (556)..(556): n is a, c, g, or t
  misc_feature (561)..(561): n is a, c, g, or t
  misc_feature (572)..(573): n is a, c, g, or t
  misc_feature (593)..(594): n is a, c, g, or t
  misc_feature (598)..(598): n is a, c, g, or t
  misc_feature (604)..(604): n is a, c, g, or t
  misc_feature (615)..(615): n is a, c, g, or t
  misc_feature (639)..(639): n is a, c, g, or t
  misc_feature (641)..(641): n is a, c, g, or t
  misc_feature (652)..(652): n is a, c, g, or t
  misc_feature (654)..(654): n is a, c, g, or t
  misc_feature (656)..(656): n is a, c, g, or t
  misc_feature (665)..(666): n is a, c, g, or t
  misc_feature (693)..(693): n is a, c, g, or t
  misc_feature (697)..(697): n is a, c, g, or t
  misc_feature (713)..(713): n is a, c, g, or t
  misc_feature (717)..(717): n is a, c, g, or t
nccctggtatagatagtgaacaggtagttgtctgaatgacgagacaaacagcgagttaatctgtggctgggttggccccgctatggtcgccacctcgctgttggcgtcctctcggtcgtctttgtttctgtggtctgtttctgcgacccagcgtttgtgactctcgtgttccgcttttgctccagcaagtggtggagccctggtttgtggcggccgagccttctttactcgtggtttttgaactgcacccgtgtttgtcgcccggggcgcgccgttttcgccatttcctctgcgtgacccttcgtgtggggccatgcctgtagggcctccctgatgttcccgattctgtgcgggcctcgcgtgtgcgcacccctgggattgttgccccctgaggggccctttcttgttcttggtcctatgtgccttgtgctcaacactgttggtggcttaagtcctggcacgcttcgagtatccggcacgtctccgaggcccctcgctgccgctttcgacaccaccctgctaccccgtgaccgctcctctggccnccgcgcggnanagagnccgagatggcnnatgagattgccaaggctcanngtcnctcggnctggtggcganacgatctttgggaagatcatccgncnaggaaataccngncnaaatcattnntgaggatgaccggtgccttgctttccntgancatttcccctcaagcnaccnacaccattttctggtgatacccaagaaacatatatccccagatttctgtggcagaagatgatgatgaaagtcttcttggacacttaatgattgttggcaagaaatgtgctgctgatctgggcctgaataagggttatcgaatggtggtgaatgaaggttcagatggtggacagtctgtctatcacgttcatctccatgttcttggaggtcggcaaatgcattggcctcctggttaagcacgttttggggataattttctcttctttaggcaatgattaagttaggcaatttccagtatgttaagtaacacacttatttttgcctgtaaccacacttatttttgcctgtgtatggagagattcaagaaataattttaaaaccgcatacataataaaagacattgttgcatggttaaaaaaaaaaaaaaaaaaaaaaaaaaaaaaaaaaaaaaaaaaaaaaaaaaaaaaaaaaaaaaaaaaaaaaaaaaaaaaaaaaaaaaaaaaaaaaaaaaaaaaaaaaaaaaaaaaaaaataaattataatcttaggccaaaagacaaaaaaaaaccaatatataaaaatttaattgaagagttttatataaaacctgggaaatcttgttttttgattaccatattggatttaccagatttaatcccaactatttttaaactttaaggacctaaattttaaaatttatgaacaatttttaaggtaaacaaattataacgtggttttgtaaatactagttatcaaaccaaaatttacctgttaaataaatgccat

SEQ ID NO: 509031 - DNA, 167 bp, Homo sapiens
ccacgtggtatctttaaatattgaagcctttaaatcctactttggaacaccgtgctagactccagatactcttgtggcttctgtctatttcctgggcatgtcctacaatgtgagctaaaataaatctctacagtgatatgagaccttcgtgagacttctgcgtttac

SEQ ID NO: 509032 - DNA, 134 bp, Homo sapiens
ctggtgaactctcttttaattgcgtgaatttgttgctgtatttgttgaggattttgcctgtagttttctttctttgttgtgtccttgtctgttttgtatcagggtaatgctggcctcatagaatgaatttagat

SEQ ID NO: 509033 - DNA, 893 bp, Homo sapiens
gatctggtgtccggatccgtgtctctgtgattatgtataatgatgatggtgatgctgatgtgtcgtgcctgtaagggccgcggtcaacggtgcaggcgctattcgcgtggcactaccttgtgcccgagtgcgtgtcccatagggtacatacggcccagttaagcaagattcgctcagttcgacaacatacgtggacggccgtcagtcagtcagggcacatttctgaagcgagactgtcttcgcatgcctatgtgcttcccaatgtctgtactgtgaacgctacattgactgtgtgagttgtgcaattcacatgataaagtagtcacggaatcgatctcgtgaagcccgcagggaccgaatacccggagcaccgaatgttatgaccatgtcgggtgcgtagcaccccatggctacgcgcgcccagccaaatagcccactgtcaacggaagcattgacttccttgactagacattgcacagtacagggcctattcctcgtggcatgccaatacacgtaaaacactgggaaacttgttacaacaagaacaagaattccaagacatgtaccaacacagagcatttggcgctgtttccctcgagccgcaggggccatgtattgcttagatgggcaataagtttttggggcaggcactgtccccacaaagtttgataaccgacatctaggaagccattcgattgttcaactttcaggaggaccacgcgaagcaaggcccagtgacaacagagattcccccgcataacgttggagacacgggtacgtccaccgcgaacacttcgtgaatcaaggcccaaaggacgctttgacacggaagacaccagcggggtgcctctcgaaggagttccctcatgctacccacgcctactagatagagc

SEQ ID NO: 509034 - DNA, 1231 bp, Homo sapiens
gggtaacgggggaaacgtggggaatgtgggtgaaccgaggtggcaaccagtgggaagatggtgcgtgcttggaggagatgcttgtgggagccaaggatgcaccttgtgacatctggagtcttggcagtgagtgatgactgggtggaggggctagctctgatggcagggctggtgggtgcctgatggccatgtggacggacgttgttgagagtatgtgttgcccaatgcatctgttgcatgacatgtggctgacatcaggcttgtggtgactgattgtggccttaggctagtgggctggaagagaagtggtggagccagtggcagttcgatccctggtcacctttttggttacagggactgttggcatgcttggtttggcactgacgtgtggatgctgggttggtgcaagtggctttgtgagtccccatgggtccttgggtgcaaacgtgagggttgtaagctagtgcaggacatgccgagtggcatcggttgagtgaaccgccagtctgggcctgtgtgcatcggttgatgtccccttaccgctctcccatgggcctctggcttcccccaaggcgcttcttggcaaagacacgggagcgtctcacggggactccgcgggtgctggcgagggggagaaagcaagaacacgcctcccagtcagcagtggggccagtggaactgtgggggccaggacgagctaaagcgaacacgggtggacattctttcatcggggggggaggcctgtagacgtggcggcaaggggatgagcgggggcttatggagccccggttccaggggcagaaaaaggagccacgagtgggcaccggcacggggagcaccaggggcgctgtgcccagacggtaaggggtccccaagcaccggtgtgggcgggtgggggtaccccccaagggccctaggggtcacagacacagggggcacagaggggcatgtgagacgcaacgtggagccacagaaagggggggggccccccacagttggtcaagcccagttaaccagccgcggcaggaggaacacagtgtgagaagcactaggggagccgagagtggggctcgcccactcgcgagacaggcggagttccaaaagggaacgaaagatgagtggagacaccacaacagaagcgggtgggagagcagacaggaagagaaaaagcaggatgccctcggccggagtacagtgtgtacaggcaggagcaaccaaccagtgaggcggg

SEQ ID NO: 509035 - DNA, 244 bp, Homo sapiens
  misc_feature (70)..(70): n is a, c, g, or t
  misc_feature (82)..(82): n is a, c, g, or t
cctcctcccccttttcctcccccttcgccgacctcacccccggcggagggggctcaggctagcactacgnacagcaccttgnagtaattgccctttatcggacacaccttcttagtgctgcacagggtcacatggacgaagatgttcaggaggctctgctccagatcatacaaatcgcggcacgcggcttgctgtgctagccgttagccactgcactgacagtatcctgttttactcttgctgg

SEQ ID NO: 509036 - DNA, 275 bp, Homo sapiens
cagactagagtgcacacctacaaaattagtaactgtccgctcagacaggttaagccccaccgcgtgttacacaggaataaatggcatagctccaaattcacacccgggactccctgggctttctcaccgcacatattgccttcttactggatctcacctgacataatgagactcacgttattacccgggattcaccaggataacgggcaaagtttgcatgacccgaactagaacacgggccagtgactgccgttctggtgttgtaccatggcctt

SEQ ID NO: 509037 - DNA, 718 bp, Homo sapiens
tctggctccgatccgggcgactatggcggcgctgcggctcctggcgtcagtgcgggggcgcggggtccccgccggcggctctgggctcgggctgtcccacggctgcgcccgctgctttgcaccagtccccggctccgtgcaagttctacgcggacccggtggatgatggtgaaggacatctctgacggggcgacctgtcatgatcggtggcttcgggctctgcgggatcccctgagaacctgatcgccggctgtcaggacccgcgtgaaagacctgcaggtgtgtcaggcagcaactgtgggctgtggcaggacttcgggctgggcctacctgctggctgccaggcaggtccgtccgcatcgtctgttcctacgtgggcgagaacaccctgtgcgagagccagtacctggcaggagagctggagctggagctcacgccccaggcaccctggccgagcgcatcccgcgcggggggcgccggggtgcccgccttctacattcccgcacggtgctacgggaaccctggtccagtgaagggggcgccggccctatccgctaaaccaccggaggggcacctggcgctcatggagcccagcccgatgaggtgagggagttcaacgtgtgaccacttccttttggaggcgcgccatccgggcagacttcggcctggttgaaaacgggtggaaggtcgacaggtgccagtgaaacgtggtcttcag

SEQ ID NO: 509038 - DNA, 864 bp, Homo sapiens
tggctgaccggattctgaccatgatatctgaactcagggcacgattagaagcgctcaaaacccctgggacctggaaccgcatcactggatcaagattggcatgttcaggtttcactgggttgatcccccagtgcaggttgatgtatctggtcatattgaaaaggcacatctacctgctgccaagtggtcgaatcaacgtgagtggcttagaccaaccattaaatctagattacgtggctcacctccatccatgaagcagtcaccaaaatccatgtgaaggaaacacacaaccgtccagtaccaccaaaggtagttctctgtcatgtgtgtgccctgcctgcacatgacctacatgtgcatatccatggattagagacacttgcgggactgaaagggctgcgtctggtgagggcggcctcttgtgtaatagccgggcccacgagtgaagaagaacatccccttgatgatcgaagtttaggaagacgtgggattagggcctcttggaggtcaaagcagaactcaagattcttaaattaaggacataaaccatgcagtacttcgatcctgtagaacattaggtctcttgtgcctctcactgaaggaggagtgtttgtgtgtggacggcacgtggcttctgatgtggtgtcgactctggtgctgatgctagtcccccgggattcgagttggtctgaccggaggccacgggtgaatggtggtgtccggccggcggcgtaaattctcatctgcacccgaagggtctggtcccccggggcttctggctggtgggcctgagccaagggtggtcctagggactggcggggacggtttacatgagggcggcgtcatttactgccactttccacg

SEQ ID NO: 509039 - DNA, 278 bp, Homo sapiens
gtagaatgtttatatctccagcaaactctttacactctgcaatttttctccagttgcacttcgttctctgaagattcgtaatccttatctgaactgtcatgttcctgacgaatccttagtccaaggatgtgccttaatattgagggaatttaaattctgtgtagtttgggttacatttctctgatttgctcccttgttaggagttcccaggaccttaattatttctaccaactgatccacaccactatcccctgtaaatattggttgtcctagtaaca

SEQ ID NO: 509040 - DNA, 870 bp, Homo sapiens
tttatggctgcgacctggggcccgacggccgcctcctccgcgggcatgaccagttagcctacgacggcaaggattacatcgccctgaacgaggacctgcgctcctggaccgccgcggacacggcggtcagatcacccagcgcaagtgggaggcggccgtgaggcaggagcagctgagagcctacctgggagggcacagtgcgtgcagtggctcctgccagatacctggagaacgggaaggagacgctgcagcgcgcggaaacacccaaagacacacgtgacccaccatcccgtctctgaccatgagggcaccctgaggtgctggccgccctgggtttcttaccctgcggagtatcacactgaccctggcaggggcgaatggcgatggacccaaactcaggacaccgagcttgtggagaccagtgccagcagggaagatggaacccttccagaagtggcgcagctgtggtgtgtgccttctggaagaaggagcaggagatacacggttgccatgtgcagcacgcgaggggctgccggagcccctcaccctgagatgtgcgagccattcttcccagcccaacaatccccatcgtgggcctcgttgctggcctggttgtcctggggtgtccctagcttgtccctaggagctggtgatggctgtgtgatgtgtagagaggaagcacctcagcgtgcacaccggagggagctgccctcagggctgggtccagcacagtgcccgggctccgattagtctctccatcgcttgtaaagcctgaaaagtgcctgtgttggcctgaaagcacgattcttaaccttccttgggatcaaagctcggattcttcgcacagcctgagttccgctggacagtggg

SEQ ID NO: 509041 - DNA, 1744 bp, Homo sapiens
  misc_feature (88)..(88): n is a, c, g, or t
  misc_feature (98)..(98): n is a, c, g, or t
  misc_feature (147)..(147): n is a, c, g, or t
  misc_feature (186)..(186): n is a, c, g, or t
  misc_feature (287)..(287): n is a, c, g, or t
  misc_feature (420)..(420): n is a, c, g, or t
  misc_feature (422)..(422): n is a, c, g, or t
  misc_feature (542)..(542): n is a, c, g, or t
  misc_feature (584)..(584): n is a, c, g, or t
  misc_feature (633)..(633): n is a, c, g, or t
  misc_feature (695)..(695): n is a, c, g, or t
  misc_feature (1165)..(1165): n is a, c, g, or t
ggtctcccttgtctccgacaagggttgttagcgccacaagaccctaccgactcttgacgccatcaccttcaccaaacggctgcgatgntagagcactncacagaacactttcagtgaacgcaggactcactgagtagacctaagagnagcacctgaatagagtctcgctctggacttgtcgactcntacattgacctcacacgaactagattaccatgagagccactaatgcactggcgcaggctacgctaagcttgtaactcagtctctttatgatgtccgcgcgnctgctaagtatggtagtgccacccaaactctccactgacattgagtgcctacgactctagatcgaaaccggtaacttaggtgcgagccgacaacctaaacacactcgtagcgtcagaggtctggagcgtaaancnccttccacacaaagcataattgcatcacggccgagtgaccagcacttacgtgaatagtgcatgagagccctggagtcttccttaatatctacgggtattcccctctagatgctactcttngctattgtggcacacctagagcgtatcatcgatctcttccgngagcttgctcttagctcatcaacatacatttgtagcacgaacaacgcanacccaaataatacctcgataatcacaccgactaggcccaattaggccgaaatgccctccccntattattagaccaccggagcgccgctagggatagaggtttaattatgaggcctatctacttgctccgtaacttgaagtttagaatatagcttggcgccgtaagccccacagcttatacgtctaccctacaaagaaggcgtaagcgaccccatagaaatttccctctttataattgcgccccctaggtagctttaagggtttaattatacaattcgggaaagacctcaatttccaagtccccttattcattcaaatttccaaaaacgcgataggtaacggcgccccgttcgcggtggcgaggggaaacggccccttgtataggaccttcggctttgagacagacaatttatcgtgtgggcgaagggcgcccaatcacccttattgggtcaaattggcaagccggataaaagtcatgtgggacaaggtcgggccgcaacaccacttaagtgctacaacttactggcacaagncatcttatgttaaagacttcctttaggcggcttggttataggagactatcaaattcattgcttttccagctaaaattggcttaaagttttacgctgactggggaggtgaataaccttataaaaaaatcactcatgggaagggccttttgaagtggcccaaaaggcgcccaggttttttgacaccgcatctgtatagagataagacgccttataaccgtgggacgacggaaatgagaaaatggagccccacgcaaatagaagttggcggaatataatgatggtgagcaaccaaacggcacggagcacccagaaagaaggggggcgaaaaaggagcccccagaataaagcaccccgggagaagcacaaagtagagaagcaccgccacacaacacataaggagggcagcgaaacaaaggacggagagccaccaacagacggatgaacgacaacgaaggcggcgagcaactgagaaagaacagatcaagagcggaccgaagaaaaccactgaaacaagcagctcagagaaaaggacataacaaccacgagaaataaccagaagatacatgaacgaaacacgag

SEQ ID NO: 509042 - DNA, 436 bp, Homo sapiens
ctcggtacccgtgtccatccccctttgtgatccccctgccctctttgaggcaggggtgatgttgccagagcaccctgcacatgacaatatggatgaggatgataatgtatcaatgggtgggcctgagagtcctgattcaatggatcccgttgaacccataccaaccatgactgttcaaacaacacttgttccaaatgaggaagaaacatttgcattggagcctattgatttaactgttcaagaaacaaaagccaagaggcgatttaatgtatacgttacaaagtcacagcctgatttgtcaggtaagaaaatggccaaagccctttgccacctcaacgtccctgtcactgtggtgctagattctgctgtcgggtacattatggaaaaagcaaatcttgtcataatttgtgctgaaggagttgtttaaaacaaaagg

SEQ ID NO: 509043 - DNA, 174 bp, Homo sapiens
agcttgaacacaggcatgcttttaaagcattgttacaggaatgggtgaatgaatgaaggagagaaaaaaatcccggctgcattatctacctataaaagaaatacagaaccatctggaaggtgtagaacaaagaaaggtgatcttctgccacgataaggtgatcttctgcacgat

SEQ ID NO: 509044 - DNA, 362 bp, Homo sapiens
  misc_feature (53)..(53): n is a, c, g, or t
  misc_feature (352)..(352): n is a, c, g, or t
tcttcttggctaattcttggcagggatctttctggaggaaaagctggggccanccagggcaggagaggtttaaatctgccacgagggcctcctgtttgccacccagccaacttcctgttgctggccctgccctctgcccttttgcctgtcctaggccgctggagcaaaggaaggcagctcattcctcatgggcgatcactccgcatctatagggtcgagcctaggggagctttaggaggctgggcctcctcgtctgatttcagctctcccatgcccctccctagaacacagacgcttcaacaaggctgctggtttcgagcactgctcacctcccaaatgtatgaaagggtgngatgagggac

SEQ ID NO: 509045 - DNA, 949 bp, Homo sapiens
  misc_feature (31)..(31): n is a, c, g, or t
caaaatattaatcctccaaccacacataatnactcactcactcactgtcgtttatttcaccatcgtaacctactatgtaaacagtgttttggccccaagcattgttctaaaaattcttgagatccatctcttcccgggtattaacccctcctctactaagatggacttcctctatacgccacagttcctgccacaaatatttgaacaccccacgggccccacaatgtcgtaacgccccaatgtatttacattgcgcctcagcgcttgtaaccaatgcaaaacttgcagtctcttttcaaccgcccccccgtcccccatgtcagcaactcccaccttgtattacaaacatgtcgttattccaaaaggattttaattcaaagtcaccacaccggataaacaacttattgcttcgtggaaatccatgagagccacccctcgttttccccgaccctcattgccacccccttgtggcttataaatagttctttcatgacaaggctgcgatatagaaccttcagttgtgcgcaatcctcccgccccctcataattcgcccgtcacaattagatgcctctaatacccccatgcagagcattttcatccccctcccgaaatctattctatggataccgccccttaccaccagtaggcagctgaatggtcggtggaccacctttagcgagatgcaccccgatggagccttacctcccccggacctcctcatgtcccgccccgcagaagcacccagtcaataggcgaagggtgtaactcagatgattcgaggtgttttgttactcgtcaagattcggagaccccaaaagtatgtttaagggatgtgagaaatggggactctgggtgataaaaataggggagccctaatcaagatccaaattccggctctccagtgtggggcgtgcaaaacaaaacaaaatcccccaaaccacaagacaa

SEQ ID NO: 509046 - DNA, 166 bp, Homo sapiens
  misc_feature (13)..(13): n is a, c, g, or t
  misc_feature (36)..(36): n is a, c, g, or t
  misc_feature (102)..(102): n is a, c, g, or t
actgtttaggatnaaggacacactatgaaaagtgancattatgcaacattaccaagacaatatacattcacggaatatgagagtcataaatgacatgggggnaaactgtaaacagtgctacggggtttagcgagaaatacattccttctagacagggttcgagatc

SEQ ID NO: 509047 - DNA, 131 bp, Homo sapiens
cagctccaagtaggctgggagtacaggtgtcgccatacaactggctaattttgtatttcttagtagagacgagggtattcagtatgttgaccaggctggtcttgaactcctaacctcaggtgatccaccta

SEQ ID NO: 509048 - DNA, 487 bp, Homo sapiens
cagaggatccttgctatcatcggcacctatttttaaataggattattgtctttatggtggagttgtaagtgttctttatatattctagatacaagtccccagtcagacatgtgattggcagatattctgtcctttccataggttgcctttcactctgtggtttctgtggtgacactgaagccttttaaatttgatgtagtctagttggtctactttggctatgtggcctgtgcttcatggccagatccaaggtcatgaactttcctcctgtattttctgtaggagtcttatagtttcaggcctttcatttaggtctttaatccatttggagttaattttggtatatgtagtgagatagaagttcaagttgattctttcgcatgtggatattcagttgtctggtaccattggttacaaagactattctttccccattgaattttcttggcactcttgttgaaaatgaattgaccatagttataaggat

SEQ ID NO: 509049 - DNA, 1027 bp, Homo sapiens
gagtgcatatcatcttccttataaagatcccaatcccatgacatatagatgcctatcgttcaagcatgcgagttggacctgggtataggtgcatgtccgaactcctgaaccgaccaatgtttacccagaattagattcgtgtagcaagtaacagcgaggtatggacactatcatatacgtacctccagaaatcaattgcatcccagtacggatctagtacagatctggatggtcatccatagaatggactttccgtgaaatgtctataatgtctaggatgatacaagacgtgtgcatgtgtggatgccagatgaaagtataccacattcgagatagtatgttatgaagaagctgtggtatgattcaccatttgaaaagtatatatatatccgtatatgaccatatttacctctagggaagagataggcttccatattgactggtacactgacgatatagtccagggagccgtacggcaatcttacagggtacctaccttgagactggaaacaaggcctgagatggaagcttggtcggctcggtctgaagatataccataagaaagctaagggggcgaggtccatatctcgcttgctttagaaatgtgcattgaactgtagtgctttaaacaatgtatctcatttaacagggggttgcgtcagcctggatggtttactattaacttgtcgtgtgggaccataagagaatattgtacttccgtgctagggtagttacgtcttctaaatcctgaagagtaaatatagtaatttggggtttcaaagtatgaaaatttgggtggaggcgtgggtaccaaggaaggacaacattgagtccacgctgtaggtaaagttcggaccacttaagtaattcacccaagtgttaccctacggatttttaaactttatccgtgttgcacaagagggcagcgttggaaactggtgtggccgtaaatctttacaatttttttaacctcctttcaaaagaactcggacgacacggctgtttcacctaacagtgtcacgcatgc

SEQ ID NO: 509050 - DNA, 583 bp, Homo sapiens
tgggtaggatctcactctgttacccaaagtggagtgcaggggtgtaatcacagcccattgagcctcccatctcagcctcccaagtagcggggactacgggcgtgcaccaccatactgggctatttttttttttttcccgtagagacggggtttggctatgttgtccagaggggtctggaactccggggctctagccatccactttttctcagccctcccaaagtgctaggattacgggtgtgagccaccataccgtggctgcgggcttctggtggcaaacgtgtcccttacaaccccggggccaagaccctgcacagccccttgtaatttcacaccgggggctctgtttcttcatagcaggtgtaggggagcagaaaattagcagaaccccgggaatttaggaggggtgaggctcctaattcctaggtgcctcccttcgtgcacagggctcgctctgggatctcttgcatatcctgggggctgcagttcccctcatatggacaacgaggattgaccctagactctgcggtttacaaacagggttccagggaaactctggcagaggtacctcagggggtagaag

SEQ ID NO: 509051 - DNA, 1092 bp, Homo sapiens
agtgatgaaatgaagagtggtgacggagatgagggagctgatgagccatgtgcgatgtgcacctgcagggctctggtggctaggtgagtgagctgatggtgcaatggcagagacgcagtgatggcctggagatgaaatgaatcgctgcctgctgtgcagtggaatgactagtgcttgcgggttccctgtgtgacttgcaagtgtccatgtgctatgtggctacgtgtaacctgcttgcgccagtggtcgagctagtgcagtgcatagctgtgcggcacgcagcacgcatgcgacgcggcacacagagccgggcgcgttggcgcgcacggcaaacgtgggggcagactctgagtgtgtgcgacgacgacgaaagcccactgcacggcgcacgcacgcagcacgcggatgtgacatggccttgtggaaacgggacgcacacccgcacacccacgcggcttcgacgcgcacgcgcgcggacctacgcaagccgcgcacgcacacgtgcacggccacacgacacagcagctggtaccgcaaccgcgccacgccacgagcacacacgcggggacacgcacggcaacacacggcggacgaacgccaagtcgcaaggggcgctacgggagcaggagacttgcccacattgtaacagtgggcacgggctgcgcacgccaacgcggcgcacggacgttactcaactgcctgccttgcgggcacgtacacgcacggtcgtcaccccggtccgtggcctcaagcgggtcacgccacggccacggcaatgcaaacgcaaggcgcgcgcataggcaaagcgtgtgggcacacacccttgcttaggccgcaccacgcgcggcggaacgaacgcgaaggactctcacaaggtgacggagtggtgtgaacagtcacccccaacggggggccgcggtacgcaaggcactaccacatcttgggcgcaacaaaggaggcggacatccaagagaagcatatgggcgtgacgatacatgcacccatggcgcgagacgacgcgtgcacctcaaaggcgagcagcgaacatacccttgggcggtcgtgcaatccccagggggaaggaagcacacg

SEQ ID NO: 509052 - DNA, 491 bp, Homo sapiens
gagggggaattctttcccgccccttcactggcaaagggccacattaaaaggccaggctcctcttttacaaatagaatttgagcatcagttgggtttaactaaggccctcttgaatctctgaatttgaaatacaacactgtctctgggatccctgatggctttttaatctttgtaaaagcaattgttggagagcccctcacacagccttggcctttgctcaattagcaaaaacagggataaggcacacctgtctttcttaaggagggtgaaagccccaactgttgtcccaaacatgcgcttccttgtttaaggtatggtccaaacaatgcctcccccttggagagaaaaaccttaattagataagggaataagagcccccccattttttttccccttaggaaaaattccctgttaaaaggggggacattctccccgattattttttccccacacatgtaaaaaatgtcttttttttttaaaaaggggtgctc

SEQ ID NO: 509053 - DNA, 377 bp, Homo sapiens
ggtgcgtacccttcccatactaataaatcccattatctacactagccttatcataacagtaatatccggaaccatactagtaataatcagctcacactgactactcatctgaatcggatccgaaactacacctattagcaataatcccagtattaataaaaattttaacccacgagccacagaagcagccacaaaatatttcctaacacaagccacagcctccatgatactaataatagccatcatcatcaacctcctatattctggccaatggaccattacaaaaatatttaacccagtagcaataacaataataaccctggccctggccataaaactaggactctcacctttccacttctgagagaccgctcttc

SEQ ID NO: 509054 - DNA, 339 bp, Homo sapiens
catgcgcgcagccattctccactccaaagttagacaaaatgccaggattgttcttctctgcttaacccaaaggatttggaaagggacccactcattccactcttaggacggccaaaattgcaaaaagaggaggcccaagagtcttttgggaattggtatattgaaggccatacctgaggttctatggatcccaccaatcttgggatcctgggaattgaaatccttcccaagtgcccaaggtggtactttcctgctgctggaaggaattggcaatggtcttcaaatcctcctaggaaaaacctacttcgccaaccaaaactagtgcaaaatagtccttgt

SEQ ID NO: 509055 - DNA, 466 bp, Homo sapiens
  misc_feature (62)..(62): n is a, c, g, or t
  misc_feature (82)..(82): n is a, c, g, or t
  misc_feature (112)..(112): n is a, c, g, or t
  misc_feature (183)..(183): n is a, c, g, or t
aagccaaaggggcagccccaagaacccaggtgttcccttgccccctcccccgggttagttgncccaaacccggttagcctgncctggctggttaaagggtttttttcccacncccttcccgtggggtgggggaacaatgggccaccggggaaaaaattcaagaccccccctcccgggttgggntccggggggtcctttttttttttcaacaagctccccgtgggcaaaagcgggtggcccccggggaactttttttttttttccgttgggggttggggtttggccccccccttccccccaaaaggcctttcccttttttcgggttaattggttggccgggcggccagccccccccccccggggtttttgggttgcccgaggattttttggccggtcccccctgtttattttttccgggggccccgcctgggaattaagcccccccccctgccctggggcccctcca

SEQ ID NO: 509056 - DNA, 560 bp, Homo sapiens
  misc_feature (24)..(24): n is a, c, g, or t
tggtgggttggggggggggggggngggtgagaagaagagggggggtctggccgcatcagcctttatttgaactactgcattgctaccagattacatcacttttcagagttagagtaacataatacctgtggaaacggtagcaaacagcttgacaaagcaagagtacattaattcctacatatatacttttatttttagggaccacatttctttgtttcaggtgtaaaattaaaaaatatatgtggacactgtagcatactgtggcctaccaaatcccggtctaagttcgtgaggggggcgtctctcctcaaaggtatcatattgaacagcattttaaatttagagagagagtttgatgatgcagggtttaaaacaaataagcatgtgtgggaccaagggatttaagacaaaagttttcaattggttacaggcttgggtatgagagggaagatgcaaattaaggggcctttttgttctagctacgatgtgtggttgacttactcgagaaccccttaaaaaaagggggcagagtaccggtcttgggggatagtgagcaacgg

SEQ ID NO: 509057 - DNA, 182 bp, Homo sapiens
  misc_feature (71)..(72): n is a, c, g, or t
gcttaaacgcgccccatctcgtctgatctcagacgctgagttttcacattaccgttcttcgacttataaanntcagctgatttgtttatacccaggtcccaaataatctaatcaaacttcaggcacgtgtgttttgctctcctaggcccttgtaactcttgtacacaagtgctgtcagacat

SEQ ID NO: 509058 - DNA, 353 bp, Homo sapiens
  misc_feature (185)..(185): n is a, c, g, or t
cacagcctaattattagcatcatccctctactattttttaaccaaatcaacaacaacctatttagctgttccccaagccttttcctccgacccccgtaacgaacccctcctccttagagtactaactacagctgactcctacccgctcacagatcatgggcagagccaacgggccacttatccangtggaaccactatcacgacaaaaaactggtaccgtcgtctatactacgatctccctacagaatctcctgtaagttataacagttcacaggctcacaggaacttagatcagtactttgtactatccttcccttccgccacacccacgacgtttaatttccccgaccgtg

SEQ ID NO: 509059 - DNA, 714 bp, Homo sapiens
gtcctggtgcttgatggtcgagcccatttcctgggccccctggcggcacattgtggctaaaccggtactgctgggcccgaaagtggtggtcgtacgctgtgaaggccatcacacatattttggccaaattttcaccagaaaccagattgaagttacctggctttcctcccccaagcggtatggacaccccaccctttccgagggcccctaccacacttccgggcccccacagccgcaattgttgttgggcgtggccgtgcgagaggtatatgctgcccccccaaactccacgcgaaggccacaggccgccttctggaccgcttctccaaagtgttttgaacggcatttcccacccggcctcttcgacccacgagataaagccggatggtggtttcctcgctgccctccaaggttcgtggcgttctgaagcctacacacaagaaagtttgcctaatctggggcgccctggctcaccgagggttggctgtgagagtaccacggcacgtgacacgccacaccctggagaggagaaagaggaaaagaggaaaagcccaagagtccacctatccggagaagaaagaaaccacgctcatgaggctacggaaaccggccgagaagaacgctggagaagaaaattgacacaactacccccgaggtccttacagacccccggactcctggttctgagccccataaagactgttaattcctcca

SEQ ID NO: 509060 - DNA, 436 bp, Homo sapiens
ttgtgagaggaggttagtcaagctcagaactccaaacatggatttagtcacctatgatgacgtgcatgtgaacttcactcaggaagagtgggctttgctggatgcttctcagaagagtctctacaaaggtgtgatggtagagacctataggaatctcacagctataggttacagttgggaagaacatacaattgaagaccatttccaaacttctagaagtcatggaaggtaattttcttctgcaagctgatgagaaaatgcctatgaagaaagtttaaccgtgtgctacaagtaataaagaaaaccaatagggtacaataagcactgctttcagttatgggatgtttacttactttccataaaatccatatatgtccatggtcaaatacgtaattattgtttgcaaggcattccattagttccaagacagagaaat

SEQ ID NO: 509061 - DNA, 103 bp, Homo sapiens
gtggcataggggcagtgactgctggggtcatcatatcaaaaggctccaggaactgaggtgcagggtgaggcccgtcacccggatgctgtagtccagctccggt

SEQ ID NO: 509062 - DNA, 1163 bp, Homo sapiens
  misc_feature (329)..(329): n is a, c, g, or t
ggaagtcggccatggtactggataacgaagttcttcgtcggcgccttagcgatgcccaatcacctgtccaagacaaacacacaaagtgagacagaagtaagttacgatagatgcatcgaaatggttttattaaacctaagtattactccgattggaagggaggtataaaaaacgactagaatgatttctatagaagcaaccatgccccgggtatttgattatgagggataatgctagttgttcataatcacacatgtcctgccagagtgctcgtggctgaacgtgaagaccacgccatgtgcagtcctgctcgtggcgtaagcagaagnctagaacattgggtcttcggaaaacagaagagagcaaatgagaataatgcgtgttgccaaagagtggcgcacctgtgggtccttctggtggggacctccctgtggtcacgagccacctcgacctccgtggtcctcgtgatcatcctgtgggtccaccaataatctcgttggtttgtagatcgtagcggatccccggagagtgtgcgtggcagtgtgtgcgcacaaaatacaacagttcgttctgataacaatcttgtttgcctacgcgaaagtagtggtttcgtccctatgaataggacatttggaaaataaatctcttttataatgccacaagcaaaagacgtgttgtcacccaatgtgggtctatcaccccgcaaggttccggtccaacccgtatgttcactgatccctgtggaaagttaacttcatatagtgcgtactttctacgacacacgaggtgtggtcaaaccccaattgaaagaacgccccgtttggtccatctcctcaaaagcccttgtgtggggtgggaacacaacgtcattgcaaggggctccctggggtgccctcgcaagatggagagcttccagttccaatagagggcgcgcaatttttcgacctctttgggaaatgtactgtaatttcccccttggtgggccgcgaaaaacatctgcgtggaccaggggggggttttatgacaaacgggggagaggtttatatccgacacccaaacagttaagatcactttcgtggaagacaacgaccatgccagacaaaattcctgctcaactatgggcacaccaggttttggagcgtcacaggcaaaatgttgtacac

SEQ ID NO: 509063 - DNA, 435 bp, Homo sapiens
cttcacagcaaagacccaaaaatagtagattcactgacagcttgcactatgcacctggaaaacccacagacactcagtgcctggctttgagagcagctgtgtgggatgggccctgcggagccacagtggagaagctgctcaaggccttgggagcccacccttcgcatcagtgcggcctggatgtgagacaaggagtcaaaggagattattttagagctttaagatttaatgactgccctgctgggttttggatttgcttggggcctggagtccctttcttttggtagatttttcacttttggaaagggattgtttacctaatacctgtagcctcatattatcttggaagtaactaacttgttttttgttttacaggcttataggtgaaagggactaggcttgtctcagatgagactttggactttagacttttta

SEQ ID NO: 509064 - DNA, 184 bp, Homo sapiens
ggtccggtcactcatccatggctgaaaaaaaaattaagaagactgattaatggaaagatgttccaggttaatagttggaagattcacatgtgttaagataccagtattctccaaagtgacctacagattcagtgcatccctctcagaattccaagggtcttctggcagcaatggatgagtggaa

SEQ ID NO: 509065 - DNA, 95 bp, Homo sapiens
ttaatgggacagaaaaaaatatccgctttttgcaacaacgaatgccaacccttcgaacactaccaccaaagtcattctacgccactggacgcgtt

SEQ ID NO: 509066 - DNA, 288 bp, Homo sapiens
ggggggggggggggcccccccccccccttaaaaaacggccccccctttttgggggaaaacccctggttccccggccccgggggggaaaggggggggggccccccctttgggggccccccccggaaaaaaaaaaaaaaaacccgggggggtttttgggggggtccgggccccccgggcttttttttctttggggcccccccttggggggaggggggggcccccccccccctttttttttttttgggttttggggtttttttttttaaaaaccccctttttttggcccca

SEQ ID NO: 509067 - DNA, 107 bp, Homo sapiens
gagccacggaaagagctgtaagtatgggatgccaccaacacacaggttcttttctttggggagcaatactttcgaggtaaccccctttcctttctggtgcaatccat

SEQ ID NO: 509068 - DNA, 373 bp, Homo sapiens
tctagcaggatcccccgttatagcacgtggtacgaatagtggttgttttgtttcacttcttaagaatagttcatatatttcttggagactaatagtagtatatatgtcgtaaatctagctacaaaattgtttcggagatagattttacaatgttgtatgtatatgtatcaatgtataattaaatgtatctacagaatatcttattcagattacttttgaataaccttgaagattgcctattacactgctagattgatcgttgacatgttttttgtcattaaataagtatgatatttacagtatattgcaccgaaggtgttacaatgaacttcatagatcggatctttattggtgaattaactaccacggtgct

SEQ ID NO: 509069 - DNA, 142 bp, Homo sapiens
  misc_feature (130)..(130): n is a, c, g, or t
tatctaacgttgagagatatacaggatatgtacgtacatcttctttgagaaatacacagtttacaatggctccgtaaagtgaatgcttcctcactaaggcagattagagtgaaacgcattttcagtctangcagcataatgg

SEQ ID NO: 509070 - DNA, 809 bp, Homo sapiens
agcggggcatccagttgggggtccactgccgcagtgtgggaggttgttctttcgctctttgcaataaatcttgttactgctcaccctgggtccacactgcttttgtgagttgtaacactcactgggaaggtctgcagcttcactcctcaagcccaggagaccgcgagcccaccgggagaaacgaacaactctagacgcgccgccttaaaagcggtaacattcactgcgaaggtctgcagctttactcctgagccagcgagaccacgagcccaccagaaggaagaaaccccgaatacgtctgaacgtcagaaggaacaaactccagaagcgccacctcaagagctgtaacactcaccgcgagggtccgcggcttcagtcttgaagtcagtgagaccaagaacccaccaattcgggacacaatacctataatcccagtactttaggaggccagggcaggcggatcatctgagctcagggggttggagaggagcctgaacaacataccgaaaccccgtctctacaaaaagtacaaaaattaaccggttgtggtggccggtgccggtagttccagctagtgggggactgcggaggtgggaagctgaagcgggaggatcgcttgacgctggcaggttgaggctgcagtaaaccagggattgcgtcaggacactccaagctggggaacaggagcgatgccctaaaacggctgggtgagcttggactggagtccaatcttcttgactctcaattcttccaccatgccggaattccactttgcatttctggccaagaaggtcgtttacgcttcaagg

SEQ ID NO: 509071 - DNA, 911 bp, Homo sapiens
  misc_feature (15)..(15): n is a, c, g, or t
  misc_feature (67)..(67): n is a, c, g, or t
  misc_feature (128)..(128): n is a, c, g, or t
  misc_feature (149)..(149): n is a, c, g, or t
  misc_feature (160)..(160): n is a, c, g, or t
  misc_feature (162)..(162): n is a, c, g, or t
  misc_feature (176)..(179): n is a, c, g, or t
  misc_feature (181)..(181): n is a, c, g, or t
  misc_feature (185)..(185): n is a, c, g, or t
  misc_feature (196)..(196): n is a, c, g, or t
  misc_feature (208)..(208): n is a, c, g, or t
  misc_feature (218)..(218): n is a, c, g, or t
  misc_feature (220)..(220): n is a, c, g, or t
  misc_feature (223)..(223): n is a, c, g, or t
  misc_feature (246)..(246): n is a, c, g, or t
  misc_feature (250)..(250): n is a, c, g, or t
  misc_feature (254)..(254): n is a, c, g, or t
  misc_feature (260)..(262): n is a, c, g, or t
  misc_feature (272)..(272): n is a, c, g, or t
  misc_feature (287)..(287): n is a, c, g, or t
  misc_feature (309)..(309): n is a, c, g, or t
  misc_feature (316)..(316): n is a, c, g, or t
  misc_feature (340)..(341): n is a, c, g, or t
  misc_feature (343)..(343): n is a, c, g, or t
  misc_feature (366)..(366): n is a, c, g, or t
  misc_feature (379)..(379): n is a, c, g, or t
  misc_feature (381)..(381): n is a, c, g, or t
  misc_feature (385)..(386): n is a, c, g, or t
  misc_feature (390)..(390): n is a, c, g, or t
  misc_feature (393)..(393): n is a, c, g, or t
  misc_feature (397)..(397): n is a, c, g, or t
  misc_feature (402)..(402): n is a, c, g, or t
  misc_feature (410)..(410): n is a, c, g, or t
  misc_feature (436)..(436): n is a, c, g, or t
  misc_feature (438)..(438): n is a, c, g, or t
  misc_feature (467)..(467): n is a, c, g, or t
  misc_feature (480)..(480): n is a, c, g, or t
  misc_feature (489)..(489): n is a, c, g, or t
  misc_feature (497)..(497): n is a, c, g, or t
  misc_feature (514)..(514): n is a, c, g, or t
  misc_feature (519)..(519): n is a, c, g, or t
  misc_feature (541)..(541): n is a, c, g, or t
  misc_feature (558)..(558): n is a, c, g, or t
  misc_feature (564)..(564): n is a, c, g, or t
  misc_feature (578)..(578): n is a, c, g, or t
  misc_feature (607)..(607): n is a, c, g, or t
  misc_feature (615)..(615): n is a, c, g, or t
  misc_feature (638)..(638): n is a, c, g, or t
  misc_feature (651)..(651): n is a, c, g, or t
  misc_feature (668)..(668): n is a, c, g, or t
  misc_feature (685)..(685): n is a, c, g, or t
  misc_feature (736)..(736): n is a, c, g, or t
  misc_feature (759)..(759): n is a, c, g, or t
  misc_feature (803)..(803): n is a, c, g, or t
  misc_feature (805)..(805): n is a, c, g, or t
  misc_feature (810)..(810): n is a, c, g, or t
  misc_feature (814)..(814): n is a, c, g, or t
  misc_feature (839)..(839): n is a, c, g, or t
  misc_feature (848)..(848): n is a, c, g, or t
  misc_feature (900)..(900): n is a, c, g, or t
ggcaacattttaaantcaggcaatcagtaatcacaactaaatacaaaatttcaggtgaacttgcctntcaaaataaatcagacccttgccacaggaaattgccccccgagtctttttccttgtccaanaacagtcaacaccactttgcnaaaggcatacnanaatacaatataaannnnanaagnctcccccagcntaatagccaacngccgcctatnanacncaagccattcagtcgagacaccngtcncccncacccnnnctgtcctccntagacaatcccagangtcagccggcttttgtcaaccntgccccngacgggtagagaggctatctcccnncntcccctggggtcctctgaggccnagaagccaccccngncagnnaccnttntggncaatngatttggnagtcgcagccggttttccagagccananctcgtcctcccccccccccccccaccccnacttcccaacccngagccagcnggcccctnccgtcctgggccgagtnctggnggggctgccggtccttcttccnggacaggcttagaggtnccttangttacccacatganaactgcaaggttgggtgactttcccagantagaagcngcacgtggattccacttggagcngccgagtccagcnggggtaaaatccatcanggttggctaagcatatntcctggaggctcctttaaaacccaccagaagcaagttcaccttctggagcnctggatgagttccaacagctctncccaaaacttcagaaacgcccagattctgggaaagaaatctgantnatggnaggntggaaggggcccaagggtggctgcngagccagcnagccccttggaattgcatgaggaggacagaattgcatggttccagaagaacnttcaaacttgc

SEQ ID NO: 509072 - DNA, 134 bp, Homo sapiens
gagaagacgacagaagggtggggaagattagaatctcccccagggttgggtgtggtggtttgagccaaggtgggtggatcacttgagcccaggagctggaggccagactgggcaacatggcgaaacctctctac

SEQ ID NO: 509073 - DNA, 361 bp, Homo sapiens
aaccaaataatatgaaacatatttcaaaagataaagagggaatcctccctcaatcattctatgaagtcagtatcaccctaataccaaaaccagaaaaggaaataacaaaacagaaagacagcagcacaaaaatagcagcacaatttgcaattgcaagatatggaaccaacccaagtgtccatcgaccaatgaatggataaagaaaatgtggtatctatataccatggaatattactcagccataaaaaagaatctctttagcagcaacttgaatggagctggcagccactattccaagtaaagtaactcagggacggaaaaccaaataccatatgtactcactcgtaagtgggagctaagc

SEQ ID NO: 509074 - DNA, 521 bp, Homo sapiens
  misc_feature (55)..(55): n is a, c, g, or t
  misc_feature (67)..(67): n is a, c, g, or t
  misc_feature (76)..(76): n is a, c, g, or t
  misc_feature (78)..(78): n is a, c, g, or t
  misc_feature (115)..(115): n is a, c, g, or t
  misc_feature (117)..(117): n is a, c, g, or t
  misc_feature (127)..(127): n is a, c, g, or t
  misc_feature (138)..(139): n is a, c, g, or t
  misc_feature (153)..(153): n is a, c, g, or t
  misc_feature (155)..(155): n is a, c, g, or t
  misc_feature (157)..(157): n is a, c, g, or t
  misc_feature (161)..(161): n is a, c, g, or t
  misc_feature (170)..(171): n is a, c, g, or t
  misc_feature (175)..(175): n is a, c, g, or t
  misc_feature (180)..(180): n is a, c, g, or t
  misc_feature (193)..(193): n is a, c, g, or t
  misc_feature (201)..(201): n is a, c, g, or t
  misc_feature (203)..(203): n is a, c, g, or t
  misc_feature (218)..(218): n is a, c, g, or t
  misc_feature (232)..(232): n is a, c, g, or t
  misc_feature (234)..(235): n is a, c, g, or t
  misc_feature (238)..(238): n is a, c, g, or t
  misc_feature (255)..(255): n is a, c, g, or t
  misc_feature (263)..(263): n is a, c, g, or t
  misc_feature (271)..(271): n is a, c, g, or t
  misc_feature (283)..(283): n is a, c, g, or t
  misc_feature (288)..(288): n is a, c, g, or t
  misc_feature (307)..(307): n is a, c, g, or t
  misc_feature (330)..(330): n is a, c, g, or t
  misc_feature (336)..(336): n is a, c, g, or t
  misc_feature (339)..(339): n is a, c, g, or t
  misc_feature (349)..(349): n is a, c, g, or t
  misc_feature (402)..(402): n is a, c, g, or t
  misc_feature (421)..(421): n is a, c, g, or t
  misc_feature (444)..(444): n is a, c, g, or t
  misc_feature (460)..(460): n is a, c, g, or t
  misc_feature (491)..(491): n is a, c, g, or t
  misc_feature (493)..(493): n is a, c, g, or t
  misc_feature (502)..(502): n is a, c, g, or t
cgtgttttttctctctctatagatcttattaataaattttatttggacaagagancttgtgccacancagtttaancngcatgattaacgcctgccgccctcccaccccccgtcncncgtatgtacngtatgtgaagnngttgcacctcaggncngntcangatcaggtnnaaancaccngggatacattatnggtctaantnatttccttcgggtcntggccggcatgggngnntcngacacagacactcagcnaccattcngtaaatgngtacagcaatangctgngcttaggggtttaagtcantcctacttgtgttggcatcaggncctttnggngatgtaaaancccctcctttcccatttgcgcacgtcacaaacgattcacacacagggctgggntgggcagctggccacagancccagcaagtccttcctgggagngaagagttagggctgntactgaaggtctctttcacatctggggacangnctgccttcnggctgtaagaatttcattt

SEQ ID NO: 509075 - DNA, 257 bp, Homo sapiens
aacagaagtatactcagtacaggttggttaatgaatttgggagaagctcagctctgtgaaatagctcccgtattaatacaatgggaccctaaatagttccgtgtgctcccattgagagcagattaatatctgccaatcagaacccatccctaacacatcagataatagtggctttgacctagggaagaagaggttgagcgaagaacccccaccaggtatgatttgagagtctttagtaagggttaaattgggcggga

SEQ ID NO: 509076 - DNA, 635 bp, Homo sapiens
tgataaggggcgcggagcggcccggagggggtttttccggtttttggggccaaagttgggcaacgcgccctctgccccttttttgggccgagggggggggagggtggttttttctcggcgttcttttccgcggcgccttttttttttggaatgggggccaagggcccccctttggggaggccagggggcccccctggtgttttgtggttcccgccttcttttggggggtcccacccccccaggccccccttgggggtttgtttagtgtttttttcccggggggtgggtccggggggtgggggggcaatgggcccccccctcaggggggggggggggccccccccccccccccaaaggggacccccagggggggggggggcaggttttttgggcttggggccgggggggggggggtccccccagggttccccttcccgggttcccctttgggggggcccgggggggaaaccgggggcccccccaaatgttttttgggttcccccctttcccccccccccggggggtgtggtgggggggggttcccggggggggggtttttttcccccccccgggttttccgccctttttcccgggctttttggccccccctttttttttttttttggccccccgga

SEQ ID NO: 509077 - DNA, 845 bp, Homo sapiens
  misc_feature (270)..(270): n is a, c, g, or t
  misc_feature (311)..(311): n is a, c, g, or t
  misc_feature (315)..(315): n is a, c, g, or t
  misc_feature (336)..(336): n is a, c, g, or t
  misc_feature (363)..(363): n is a, c, g, or t
  misc_feature (378)..(378): n is a, c, g, or t
  misc_feature (385)..(385): n is a, c, g, or t
  misc_feature (387)..(387): n is a, c, g, or t
  misc_feature (392)..(392): n is a, c, g, or t
  misc_feature (396)..(396): n is a, c, g, or t
  misc_feature (441)..(441): n is a, c, g, or t
  misc_feature (468)..(468): n is a, c, g, or t
  misc_feature (554)..(555): n is a, c, g, or t
  misc_feature (586)..(586): n is a, c, g, or t
  misc_feature (588)..(588): n is a, c, g, or t
  misc_feature (610)..(610): n is a, c, g, or t
  misc_feature (623)..(623): n is a, c, g, or t
  misc_feature (638)..(638): n is a, c, g, or t
  misc_feature (670)..(670): n is a, c, g, or t
ttagaactgatcttccatttaactactacagaaagcagtaactatgcaactatctaatagttcacacaaaagaattaaaagcttaaaaataatttttaggaaacacaatattcaaaatctaaacacactgataaattattaagattaagattatttatgtgataaatgaaatctcctaccaatccatccagcctttaccaggaagaaaagcaattatttcatttcagatagaaatacaaaaaaaaaaaaaatacttttcttaaaagccanatatggttaaatgttttattatccataatgatctaaactantaanattcaccaaaaagtaaaaatncaattttacaatatacttttttttttnaaactattgggcttnacctttntnacctnggtnctccttactggaagtcctctggcttccacttggatctgggttttngaagtctcttaataatgggctggggcnttggtgactcatgcctgtaatcccggcacttggggaggccagggaggtgatcacttgagcccaggagtaaagaccagccggggcanncatagtgagactccgtctctacaaaaaatanantttagcggggcatggtggtgcncatctgtagtccnaccaattggggaggntgaggcaggagaatcgttgagccccaggctcnaggctgcagtgagctatgattacgacactgcactccagcctaggcgacagagcaagaccccattctcttacaaagtctctattataaaagtacttccatcaataccatcccatttaaaatgggctatggtaatttacccacattatcacattctcaggaattatcaagaatgtgg

SEQ ID NO: 509078 - DNA, 1199 bp, Homo sapiens
  misc_feature (498)..(498): n is a, c, g, or t
  misc_feature (539)..(539): n is a, c, g, or t
  misc_feature (541)..(541): n is a, c, g, or t
  misc_feature (543)..(543): n is a, c, g, or t
cgggtaccgggatcgcgggcaggctcggcacgagcgccgagccccgcgcctccctcgcgtgctgtccaatgtccctgccccgcaacatgagcgtcacttccgccatccccgtgcagcggttggtggcggggcgcacgggggagggggccaggtcggatttgaagcccgcccgtgcccgagcccgcgcccgagcagggactacatttcccgaggggcctcggctgttttttgcggcgactgtggcgcggaaacgtcccccggaagtggagcccgggacttccactcgtgcgtgaggctgagaggagccggagacgagaccagaggccgaactcgggttctgacaagatggccgggctgccccgcaggatcatcaaggaaacccagcgtttgctggcagaaccagttcctggcatcaaagccgaaccagatgagagcaacgcccgttattttcatgtggtcattgctggccctcaggattccccctttgagggagggacnttttaaacttgaactattccgttccagaagaatacccaatngnangccctaaagtacgtttcatgaccaaaatttatcatcctaatgtagacaagtggggaagaatatgtttagatattttgaaagataagtggtcaccaggactgcggatccggcacggaggtctgcttatcggatccaggccttgtcaagtgctgcccaagtccgagatgatccagttagcacaaatgatgtagcggaacgcacgtggaagagcaacagaagcccaagccagtagaagaacagtctagagcatgggactaggctatatgccatgagtaatatggaacatgatacgatcactcaagtgtgatcattctcctgttctgcaagagttactcctctttgttgcctttaatggacacagtcttagaaacattacagagtacaccagagccagagatcttcgaaaggaggcacatgatgtacaacatcgaagagcaaagcatagggggacttatgatgccggggggggaccaggggcatctcagaggggcatgggggaaggacggtgtccgagcccactgctttaccagggcaagctgggggcaccgaatgcgcgggcgaaaacaagacccggtgacgcataacataggcagggacccggcaccacgagagacgcgccggacaagggcactcagcccaaaggcaagacagtacag

SEQ ID NO: 509079 - DNA, 325 bp, Homo sapiens
catgaaaattatcatgtaagcatcattatccctattttactggtgagcatttggggaagaccagggctcctcattttttgacagagtgggtttagaaaagtgccttagttaccttcttgtctaaagtatatatattacctgaatctttctacatctttttcttcctttaaaaaatgaattattagctgggcatgctgcttacaactgtaatcccagcactttaggaggctgaggtgggagagaggatggctcgaggccaggagttcaagactagcctgggaaacacagcaagaccccatttctgttcaaaataaatcacaataaa

SEQ ID NO: 509080 - DNA, 902 bp, Homo sapiens
ctcatgtgggcgtctgttggtgccgccccttgtgctgccccctggcggttgtactcgtgcggatgtggccgcgctgtgttgtgcggccggagttttggcccagtcggggggttgtctcgccgccttggtgcgtgagtgttccccgcgtgtgtgggaccagggttcccctctaagggattaaagggaggtcacctctcgaaagccgctgccgttgcgccctgtaaacgcccgctggggagacagttggtagtccggcccgcgccccgactgtttcttagtgacgcggccccccccctttttggggacatcaattaccgagggggaggttcatgagcccacattctttaggcgcccgttttcctcagcaccacagggggaggacatggtccggtgcaacttgcgcccgtgggtcatcttggctcccagatctcccctcctgtgtctacccctcctccgctggcccctctgtttcccctgcggttgtacgacctccgggctcgccgccctcgcgcccgctcgtgttgtgtgcagggccagctccacttgccctgcccccgcgggcacgctgcgtgaagactcatctatggcgccccgctgtctcccgtctccgcgttatcccatacattgttcacatatgagcccgtgtttcaccagtagctagcccatggctcctcctgtatccccacaacctctgtgattccaccaaccgcagaaatagtcaaacctccctttgttcccacacgcctgtgagaattaacttgtctccacataacaagttcctactcctcttcacggactcttatattttatagtttcccctttattgggggcaggaggatatatttcttttatattaaacaagacccaatatttccccacccagaaaaaaaccccacatgaca

SEQ ID NO: 509081 - DNA, 120 bp, Homo sapiens
ctagctacagattagaatgatgacaagagtaataccttcctagtgaagatgacttttatttcaggactatattaagtttcccaacttctgtcatgactatagtccacacagagaacctgg

SEQ ID NO: 509082 - DNA, 1423 bp, Homo sapiens
ctagtactagtcgcgagcgcgcccttatttattttttattttccagtgttaaagtatttaattaaatcaaacaaggaaatctcccaccactggttggccacttaaacagcttttatcacaatgataaaggactattatctattggtttcacaaagaaagtctaaaatttcaaaaacattcaaagagctaacacagtaaaaggtcatgcaagttccataaaataggtgaatcagtgacagaaactcattacatttaatccattatacctccaaagaggcccatcaaccttaacaaaaaaacttctcaaaaccagagaaccattatcacataatcgtgaatattcacattctacaggaattattggacccgtgttaaaacaccgatacgtggctgagataggaacgtacattcaaacccataacgtggtaaaacaagggttttccgtagaagagacctcacgtgcgtgcaaaaagtgcattgacccgtgatatttacaatattgtgagtgtattaatacgaatgaacacatgtgccaacagtgactttatcccccacaaaaatatagagagagagccacgtggcccccacacaagaggacagtcacccgcgaataaaatccccctaagaaaattccacatatacttaaaaaccaactatccagtaataaaacctacgcattcagagagtatccaaatacaacctagaaatctacaaccataaaatacttacatacgaaaaaaacccgaaaaccaaaaattaataacacagacaactgactataatacaccaaaattataaacgtgagggaatcacaataatatatacacccgatacatataaagagagccttacaagagataacattgacgacagtgcaccccttttacagccaagttgttcgcgaaaggagacatctaacaggagatcacaaacataataaacatggataggacccaacaggggcgtatcacacaggagaacatatccagcgacacaattaagtagagcgccgcagagtttatcacctaaagtaaataggtggtttaaaatccggacgaaataatatatttgacaacttatttaactagtcccaaaaaatttcacaatatagtgagtttaaaaaagaccgacacggcacagaataaacagaggacatatgaagataaacaacgatgaggaatgaaccaaacaataacgcgaaggttgttagccacacacaataagcaagatcggagcgcctataccaaacaacacaacatggcagcgcgaagcaaaaaataaccaccgaagagcgcaagaagcaagtacaacgagcgatacaacagcacaaaaagtgacaaatagacaagcacagagcaacataaagagagaaagcaccaccatatacaaccagggagatggacacgaaccacaacaagcgaag

SEQ ID NO: 509083 - DNA, 384 bp, Homo sapiens
ttcatttgctagaccgactcagttatttttaaaagcacattatcatacattgaaaagaaggatgtcttcatatatctgataagggggttaatatacaaaaaatatttaaggaatacaaaggcaagaaaacaaacagcctgatttaaaaacgagcaaataatctgaaagatacatttctcaaaagaagacatacaaaagggtcaaccaatatatgaaaaaaatgctccaacatcactaatcatcagggaaatgcaaactaaaaccacgatgagatatcacttcagaactgttagaatcgctattgccaaaaaaagacaaaagattacaagtattggtgaggatatggaaaaagagaacccacgcacactgttggtagaaattgaa

SEQ ID NO: 509084 - DNA, 130 bp, Homo sapiens
  misc_feature (18)..(18): n is a, c, g, or t
  misc_feature (69)..(69): n is a, c, g, or t
  misc_feature (71)..(71): n is a, c, g, or t
cagagtttcactttgtcntccaggctggaggagggatagcaaagccaatagagaaacagagattctgtngncctagggcactctgccttggctcatgcccttccctcttttaaaatttactgacaatgat

SEQ ID NO: 509085 - DNA, 429 bp, Homo sapiens
  misc_feature (91)..(91): n is a, c, g, or t
  misc_feature (215)..(215): n is a, c, g, or t
gaaagattaagtcctgtaaaacttgtctaggccactccccaggaacttcagttggccgagtctttactgtcaccttgactggatttaggantcatcttgggagatgccccttttgagtggctgggctgtgaggacagcaggccagttcttgccaccctggacagaaacacatctcaccttttctggctcaaggaatctgaacacctgtctcttgnctactcgggcttctagtcaggcattttgtcaccttgtcaagggtcccagggacacaaagctccctcctctcacccacagcactctgggtcctaccctcagtgcttcagggacatttaatcaggtcaaattgggatcaatggctttgatgcagaaaagaactgtggactaatagagatagggtttaattaaaaaatatatctttttaattttaaa

SEQ ID NO: 509086 - DNA, 673 bp, Homo sapiens
  misc_feature (135)..(135): n is a, c, g, or t
  misc_feature (310)..(310): n is a, c, g, or t
  misc_feature (320)..(320): n is a, c, g, or t
  misc_feature (371)..(371): n is a, c, g, or t
  misc_feature (412)..(412): n is a, c, g, or t
  misc_feature (417)..(417): n is a, c, g, or t
  misc_feature (440)..(440): n is a, c, g, or t
  misc_feature (459)..(459): n is a, c, g, or t
  misc_feature (483)..(483): n is a, c, g, or t
  misc_feature (497)..(497): n is a, c, g, or t
  misc_feature (506)..(506): n is a, c, g, or t
  misc_feature (575)..(575): n is a, c, g, or t
  misc_feature (582)..(582): n is a, c, g, or t
  misc_feature (625)..(625): n is a, c, g, or t
aaccacactgtgatggccctaatggcttccttggatgcagagaagccccaaggacaaaagaaagtggaggagcttgagggagagatccctacatttaaccataagcttcaggacgcgtctgcagaggtggagcgncttagaaaagaaaaccaggttttaagcgtgagaatcgcggccaagaagtactaccccagctcccaggactccagttccgttgcggcgccccaactgctgattgtgctgctgggcctcagcgctttgctgcagtgagatcccaggaagctggcccatcttggaaggtccgtcctgntcggcttttngcttgaacattcccttgatttcatcagttttgaacgggtcatggggcaacncggttaacggggaaagcccggggtaaccggaaaagggcctntggancaggtttggaggggccatggggnaatcctgggtgtggggacncagtcgggtttacccagggctgtntccctccaaagccnccctccggncaatgagtcccccctcttgtttccccccctaaaattgggcatggggtgcggtgtggggggcatgtgctncctgttnttatgggttttttttgcggggggggttgcttttttttggggtntttgagctccaaaaaataaacccttcctttgagggagagcccccctga

SEQ ID NO: 509087 - DNA, 186 bp, Homo sapiens
actacagcatcacaatagtagctgggacacaggctacacaccactacgacccagctaatttttgtatttttagtagagacggggttcaggatggtctcaatctctctttttttttttgaaaatggagtttaggccaaaactgggggtgaataaggaaaaacctaatggaagccttaacttcggggg

SEQ ID NO: 509088 - DNA, 238 bp, Homo sapiens
ccagtcgctctcctgggttcatccgcctcccatgccaaaggaagaccctccctccttggtcacagccttctctagcttcccagtgcctccaggacagagtgggttatgtcttcagctccatccttgctgtgagtgtctggtgcgttgtccatccagcttctgctcagtgcttcatgacagtgtccagcacatgtcagtctccactctctcagtgtggatcccacccctcttttcatct

SEQ ID NO: 509089 - DNA, 157 bp, Homo sapiens
gtatactctcagtcagattagcacggtatggtggaaggtactgtggaagggccgtgaatagtccaatccaggagggctgatgtcagttaatgagatggattttgtcaatgggagaggaagatggctgatgtacagtaattaaatccctgctgcttag

SEQ ID NO: 509090 - DNA, 425 bp, Homo sapiens
  misc_feature (260)..(260): n is a, c, g, or t
  misc_feature (300)..(300): n is a, c, g, or t
ttgggcctcattcagggcggggtcagaagcagaacaagtccaggtagcttagtcctttcaaatgaaaaccttggtcagggcctgcatcaggaaggcttttctatcctgctcctatggctccagaacggcctgatccgagcagctgatgatcgggaagaggatggctgctcccaggccgttccatgggtgccactcacagaggaaaatgaggaagccagggaaaacgaacaatttcagcagctgtggcgcaagctaggggntcggccccctgcctcggggcaggaaaccttcgggcgaatnccagccaagctgagtcctacccagctcgggagggcagcagcttcttggagtcaaccagaggaggaacagaagctgcagccagagcggcagcctaaagtcccgggagagcaagggcctgaagggag

SEQ ID NO: 509091 - DNA, 1379 bp, Homo sapiens
gtctgttttctctccttttgcttttgcgcggggtcttttctttttctcgttttcttgtttgctctgtccgtcttttctgctgttttcttttttcgtcttcttttgttttttctcttttttttcttttttttctctttctgtcctgcgtcccttttcctgtcctgtcgtgtgtccgtcttcctctgtgctctcgtgcttctctgtgctcctcggcctgcggcttgtgtctgttccgtgtcccttttggtcctgtttttttcgtcatttttcttctgtgtgtgagttgtgttgtgtgcccgttattggtggtgtcttggtccgtgttttttggtgtcctgtttttgttgtccttagttggtatttgtggtttttgttccctttggttctttcttgtgggccttctggttatcttgatttctgctgttgtctcctcctgggcctcttggtaggctgtctgtgttgggtgttctttccttttttttgttcctggtttgtgtctctttgatgcgctattgtggctgcttcttctgtccttcgtgctgctattggctcctctttgttgtgtctttgtgtgttctctatcagtcctcttcgtgtgtctgtatgtggttctctctgcgctttgtcgtctcttgtgtccctgtgtgtctcttgtctatgtggtgcgctattggtgccttgcgcctatgtggttttctggtgtgtcggtttcccagtcttttgttccgtgtcccatcggagtatggatgtcgtgtgccttactgttcggtagggaatgtctgtccgtctaggtgtctcttttgtgttggagtctggtatggtccatgcttccttgtgtggtggccagtgttgtgctctgtcctagagtatttgtgtagtaattctgtccattcgcatttgctactatggatagtatgtctcaataggtacattaatgtctatcgagtgcggtccatcgtgtctgtatcgtccgatcattcaacgactggagtaattgtggaagtgcctaatggtggtgtgggtgtgtgttatatgttctgagtctgtccacgaggtggtctcgtatgagagcctggcctggatgatgatatggctatgatagctgagtggccgagagattggacgttgcgaatttgatgagtatacgcttaatgcagttggcctgtgtggttaaacatcgatatcgagacctgctgaatgttgttattgtcttgtcttgttaaccattttaatttgttggctggatgtataatatgatgttctctaaaatattctagttgctttttcggggtaatctgaattacttttttaatgatctggggttccatttgactgtttgcatgtgagacttgcgatgtgcaccattctggtttgtagtt

SEQ ID NO: 509092 - DNA, 277 bp, Homo sapiens
tgtgtacctacatgcagttcattgaaggagggaggcgtttccagtgctgtatttgcagctgtatcaatgatgtacccccccagtattttcagcagctggatcataccggggttgttggggagagaggcttcaccgtatgtagtggaccatggggaatctggccctttgcgcgtgcaaagcgctgcaaagcatacatgtgtcccttcatgcagtacatagaaggagggaggcgtttccagtgctgttttagcagatgtatacaatgatgtccccccca

SEQ ID NO: 509093 - DNA, 123 bp, Homo sapiens
ggaattatggcacagaaagactggctaactacaccggaggcattatccgaataccaggacaccacattttaaccattgtcgtttccgtggctgggtggggcatcactgatgggagaagatgcg

SEQ ID NO: 509094 - DNA, 524 bp, Homo sapiens
atagagcaaatgaatatagatttaaacatggtcaattagaagaattaaaagatgaaacaaagaagaaagaagatagaacagtatgtaaaggaacaagaggaatttatcaacaaatgattaaagtaatagaagaaagaatgagagtatatgaagatgaatatcgtgattataaagctgatttgaagaaaacaatagaaattataaatgtagctcatggaaaatgttataatggaattattgaaggaattgaaggtgatcaagctaaatgtaataaatgtttaaaattaagtgaatttattttagataaagcaagagaaggaatgaaaaagaaaacaattacaagaatgttattagcaagatgtggtgcagatgatcaacaaagaacatgttattcagctgctttaagtttaatggcaaactttgatgaaaatatcattaataaaacaccattagagttttgtgttaaatcaaataaatgtgtagtcaaagattggtaagccattttttgaacaatttaaaaaaaa

SEQ ID NO: 509095 - DNA, 277 bp, Homo sapiens
cgggctggagtgcaatggtgcaatctcagcccacagcaacctcagccttccaggttccagcaattctcctgcctcagcctcccgagtagctgagactacaggtgctcgccaacacacccagttaatttttgttttttttcttagtagagtgtcaccatgttggccaggttgatctcaaactcctaacctcaggtgatccactgcctcggccttccaaagtgctgggtctacaggtgtcacccaccatgctgggttaataaattgcatcaatcgtaaa

SEQ ID NO: 509096 - DNA, 382 bp, Homo sapiens
cagctgttgctgcggtgactctccaggatccccggagtgcgttgactggcatgtcggtctgggctgttaagtgctccaacgtaggttgtcaccgccatccgtggggccatcatcctggccaagctctccatcgtcctcgattcgcagaggctactgggggaacaatgatcggttagcccctacactgtcccttgcaaggtgacaggtcgctgcggctctgtgctggtacgcctcatccctgcacctcaggggcacttggcatcgtctccgcacctgtgcctaagaagctgctcattatggctggtatcgatgactgctacacctcagcccggggctgcactgccaccctgggcaacttcgccaaggccattcaacgcctccg

SEQ ID NO: 509097 - DNA, 393 bp, Homo sapiens
agactttccatctaatgaccccactgaacacttaacatttacctgaggaatttaagtgtttggccatgcctaaaatccaggatgccatgcctttcattcttatctaattattaatgaaagctaatcgtgaaaactctaccgctagacgttgaccggctccttgatttgtttcccaaggtggaccaattggtttctagacacttatggagtccaacctgtttaagtgaatattaaaaagtggcttagtcaactcatacctgaccaatctccaacgaatggcttaagctcagttttcatagtactcatgaactatatcctgcgacatgccaattataatacatggaccatcgttagttcgaaagcctctcactaagtatgacctatgctatattc

SEQ ID NO: 509098 - DNA, 436 bp, Homo sapiens
caaattgcgcacagaaatttatttctatacaaattactacatgaactaagtctaaatcataacaaaaatgcctatcctctactttgaaatcaatagtcttctctcataaacattttattcaaattattaccctgtctacaggcttgtgtgcactaaccaggaagtgaaaccaaatatcatcattttgtgaaagcagagtaaaatgaaagaacacaaatttgaattatctgaagcattattaatatttcatctgaaaatccaattcccttggagacaacaatttaatccaggaagttataataggaatttcaaaagcatgattcttcattttcttgtgtggcagtgtccccagtcttctatgcgaatatcttttcctgtagcctggctggctcatcttaaacacaagctttcaccaacccgcctggtgaatactggg

SEQ ID NO: 509099 - DNA, 724 bp, Homo sapiens
  misc_feature (330)..(330): n is a, c, g, or t
  misc_feature (461)..(461): n is a, c, g, or t
  misc_feature (468)..(468): n is a, c, g, or t
  misc_feature (511)..(511): n is a, c, g, or t
  misc_feature (532)..(532): n is a, c, g, or t
agcgggagtccgagcgcgtcacctcctcacgctgcggctgtcgcccgtgtccgccggccgttccgtgtcgccccgcagtgctgcggcgcgcggcaccatggctgtgttgtcgtgctcctggcgttggtggcgggtgtttggggaacgagtttagtatattaaatcacagggtctgttgttttccgaaatggaaatttgcctataccaggagagcggatcccagacgtggctgcattgtccatgggcttctctgtgaaagaaacctttcttggccaggactcgcagtgggtaacctgtttcatcgtcctcgggctaccgtcatggtgatgntgaagggagtgaacaaactggctctacccccaggcagtgtcatttcgtaccctttggagaatccagttccttttagtctagacagtgttgcaaatctccattcactccttattttctgaggaaactcctgntgttttncagttggctcccagtgaggaaagagtgtatatggtagggaagncaaactcagtgtttgaagacngttcagtgcaccttgcgccagctccgtaatcgcctgtgtcaagaaaactctgttctcaggtcactcctcctcaattctctgactaggtacaatgaatcgacctgtcatctcgttcagcactgcaagtgatacatgatatcttcaagccttctgtcttcctacatcagtacctgggataacgaggataccaag

SEQ ID NO: 509100 - DNA, 823 bp, Homo sapiens
ggcgactgagctgttccctgcgctgaaggtgcttcttcctaagtgactgtgtcgagattttgaaaagtagccagactaagttgctgctttgtcctgtgtgttacaacatagatttagtcgtatgatattgggagtgtaattacaaaattattcaactctgggttgaagggacccaggaatctttagtcgattgcttgtgtatctatgagatttgagttctatttagcatgtgcttttgttaattataagagttgagagttggaatagagtattgtcgataatctctagtatattctgtggggaatcccagtgcctcggaggttctgcaactagttatgagctgtcggatgaatgcgtgtttgcttcaggagccggacttgtatttgagattgatttttccgattcatagacgtccgtccatttttcgactacctacagtcttgtatgtagcatcttcctgctcattataaatcctctgagctggaagtaaaatacatgaaacggcctatgtaccctctaactagcacactggagtgcagcttcctgcacgctccagggtcatagagggttacctccagttccttttgtacatgtcttgtttaccttccgtgtctggcacgtattaccgtgctaaataaatgaataagaggaggaatggggattttgacgtgcttggtggaggctgctcagtattgtagctgtggaagacgtgcgaatatgaattaataatcctgtggatgtctggaatgcctgcccgaggtgcaatgtagagactaatccctaattttgaaaagcttctttatctatgcaatttaaaattgac

SEQ ID NO: 509101 - DNA, 760 bp, Homo sapiens
  misc_feature (330)..(330): n is a, c, g, or t
  misc_feature (497)..(497): n is a, c, g, or t
  misc_feature (504)..(504): n is a, c, g, or t
  misc_feature (547)..(547): n is a, c, g, or t
  misc_feature (568)..(568): n is a, c, g, or t
agcgggagtccgagcgcgtcacctcctcacgctgcggctgtcgcccgtgtccgccggccgttccgtgtcgccccgcagtgctgcggcgcgcggcaccatggctgtgttgtcgtgctcctggcgttggtggcgggtgtttggggaacgagtttagtatattaaatcacagggtctgttgttttccgaaatggaaatttgcctataccaggagagcggatcccagacgtggctgcattgtccatgggcttctctgtgaaagaaacctttcttggccaggactcgcagtgggtaacctgtttcatcgtcctcgggctaccgtcatggtgatgntgaagggagtgaacaaactggctctacccccaggcagtgtcatttcgtaccctttggagaaatggcaagtttccctttttagttctttggaaccagggtggctttaggcccaaaaaactttttttcccccaaatttttcactccttattttctgaggaaactcctgntgttttncagttggctcccagtgaggaaagagtgtatatggtagggaagncaaactcagtgtttgaagacngttcagtgcaccttgcgccagctccgtaatcgcctgtgtcaagaaaactctgttctcaggtcactcctcctcaattctctgactaggtacaatgaatcgacctgtcatctcgttcagcactgcaagtgatacatgatatcttcaagccttctgtcttcctacatcagtacctgggataacgaggataccaag

SEQ ID NO: 509102 - DNA, 379 bp, Homo sapiens
  misc_feature (104)..(104): n is a, c, g, or t
  misc_feature (295)..(295): n is a, c, g, or t
  misc_feature (375)..(375): n is a, c, g, or t
aagaaatgttggaataagacgctccctaatacatttgcacactcattccctacacagtcatgtattcatttgttaaataagttcctgacttgggtgggtgtggngtggcacgccctataatccccaacacccagaagtcccaaggtggaagaatcgcttgaggtctagaattcgagaccatccttggcaacatagtgagaccccatctctacaaaaagtaaaaattagctgggtatggtggtacacacctttaggcccagctacttgggaggctttggcaggaggatcacttgancctgggaagttgaggctgcagtgagctaagattatgccactgcactccatcctaggtgacagaacggcagacaccctagnacta

SEQ ID NO: 509103 - DNA, 768 bp, Homo sapiens
  misc_feature (615)..(615): n is a, c, g, or t
  misc_feature (644)..(644): n is a, c, g, or t
tgcaccactatgatagaaatgtagaatcatttggaaaaatgagatgtatgtagttccaagtatgcaaagaaatgtcaccattttattccattcaataaagaacaaaaccaatagtgtgttatattactttcatctgaaacaattccatgtgtataatctgagccttgaagactttcatttggagtatgtaacccgttttggttgcatttcattttggggagaacttaattaacgtgagattggcaatgtgaaatgcaggtgcagtttgctgttaatgtctatgcgtgttgtttaggtaataggaaatattaagtaattggctgtagatttttgtaattttgtttccctgagttcctgtctagattccgtatgtctagtaggtcacatgtatttttcaggtgaaatgcaaaaatattcccattatctttgaccagtatgaagtttttgagatcttactgctgtgtcacttgaatcccgtgattgtcatacatctctggtgtaagcaacatttgatttttgaagtgttgtagaccatcgtgttcatatgtgcaagatgttaatttgaaaatttgtgcattttaaaacagttgtgggcataatcctagatggaggctnctaagttacatgtacctgtgcatgtgacnctttgtggaaaggagattttggatgtataattttgtgtttacttgtaacttgtctggttatttactgcttgaatctggggattccaagttactgaggggataccataaggaggaaccgcaggag

SEQ ID NO: 509104 - DNA, 112 bp, Homo sapiens
gccgatagtggtgacggccggcaacatgtctgtggctttcgcggcccgaggagcaggcaagggggagattcacttccgcttgcgattcagaagatgttggatgacaataacc

SEQ ID NO: 509105 - DNA, 193 bp, Homo sapiens
ttctgagctaatgggaagaaaactgagagtcatgcgttctgttaataaagaaaaactaaaacaacagaattcaaatccaagcttgaagaaggatgtcattaaacctaagcaaagacttaattttacttccaaagaaggaaaattccattccaaagaaggaaaattccattccaagaagcatttatggagaaaa

SEQ ID NO: 509106 - DNA, 240 bp, Homo sapiens
tgttggcggtcgaaatttaagggtaaacttgcgtgaacaaaggtccccgaccttttctcagatgtcacgggggtggagactgccagcagtgacccagtgccaggcggggccaactctgctagggcccccttccggcttagaagtgtgagcactgataagggattttggttctagaagttcttaaattttagtttggctgtgattcgaagtggttgcaattttagggatatttccaccttg

SEQ ID NO: 509107 - DNA, 280 bp, Homo sapiens
taattcatacccctttcgacattttgctgtttattcaacattgcatgctcgtttgtcatgtggctcgttaggcaaagcttgctctttgtgtgtggcttccttcccttggtgctgcctgtctggtgaccacctctgcctggtttccacttccatgaactctgtgtgtctccttcctgattttccatatgcttatgcatgtatcgttgttccttttcctttattttcccttttgtacacttagggtgactttccctgcctctgtttctaaggatgtattgta

SEQ ID NO: 509108 - DNA, 115 bp, Homo sapiens
tgccgacctagatgatcccccgttcctgcttcttgaaagggaggcctcgtgggtctgaagaagtagaagtcacacgtgttcctaggggaactggtttcaagaagcaggaactagg

SEQ ID NO: 509109 - DNA, 1309 bp, Homo sapiens
tttttttcctgcgattgggtccattttacgtttgttttttgtgtgctcctgtttgctgtttgtgtcgtaggggtgtccttttgttctctgctgcacttggcgtattcttgacgtgttcttttgtgttgttgctgtgttttgcgtattgtgtgctgtttgtttttcgctcttttcttctcttgcttctttttttgtttcttttttgttttctctcattatgtgtttttgtttgtgcttctcttgttcttctcgtgcttttgcgggtgttacagttgtttgggcttcgtgggattggttttctttggtgtgtctgcttgttgttttccatttactttggttggtgctctaattgtgcggcttctttcgttttatcttcgcgtgtgtcctctttgtttcatgtggtattgttgtatttcttttttttatttgttgtgttgctcccatctgtcttgtgatcgttgcacaacgttttgtggggtcatagtttgcatgtgcggttatgagtacttggcatcctcatatttcttctttgtagtggatttagtggttccataccaattttattttacacctcgtcatcgtcttcgtcgtcgtcttctcttgggtggaggttttagtagtggttttggtttggttcctatgttgtcttctcgcgtgcgccatgcgtggaggcgacgaggcgtgggggtgctcgggtcgacatcgagaggggagcgcgcgtgttggatgcacgccgcactgcgaccacttgcgctctcacaccccgagggcccattgagaggaaggcgggggatcacagagtgcacagcctactctcttttcgctgttttgtttgtatcttgtgtgttaaggggttttttgtgttcgcttgtggtcacgcgcgctgctctcgctctgggccgcttgtgtctcctgtgtctcttgttttcgtcgctcctctccccttgctgtgtgcgcgcagaagtgagcccgcttgcgaggcacacacccaccagcgccataataccacattcgcacacacagcgcactcatttggcaagggggcgtcagtgcacagctatgtggctctctcgccgcgcgcgcgcctcgcgcgcgcgcacgcgcacacaccaccacagccccaccgggacagagcaccaggactgccctgcgggggacaaacacacaccacaccacccccgcgtgtttctcccgcttgtacacacacaataggatagcgctgggccccccccccacgccacgacaccggagaccccggcccccccccggagggacggacacacccccccccgttccctacgacaacaca

SEQ ID NO: 509110 - DNA, 147 bp, Homo sapiens
cacatgagccttgtgactgccaaacatggaagaattgcgctgcaaaaaataaccgaaatgaaaccagaagaactgtgtgggagttagtgaagcctacgaggatgaccgccaatggtctgctgagtgatgaactgaactgccaagcct

SEQ ID NO: 509111 - DNA, 371 bp, Homo sapiens
atgcctgctagcctgactctagagtatccccctggagtccacacgggagtagagcggctgcctgccaaggacatacagaccaggtgtctacatcaagcacccagtgtccctggagcaatacctgatggacgcggcagctacaacacagtgttcctggccaacgggtaacatccccgccgagagctacaccttcttcattgacatcccgctcgacactatcaggttattagatcgctgccctgccatcgagtaatgcctaccgagaaaactccttttcactgaggtccaccctggatcctcttcttcatacacaccccagcaagatcagccccccggtgtacctacctcggaattcgtcaatcatcgtccta

SEQ ID NO: 509112 - DNA, 352 bp, Homo sapiens
  misc_feature (285)..(285): n is a, c, g, or t
gctaaaatcttttttcttatttatttgttaaggttcttttttaggtttgttattagaaataattgaccttggccgggcgcggtggctcatacctgtagtcccagcactttgggagcccgaggcgggtggatcacgaggtcaggagatcgagaccatcctggctaacacggcgaaaccccgtctctactaaaaatacaaaaaaaattagccgggtgtgtggcgggcgcctgtagtcccagctgctggggaggcttaggcaggagaatggtgtgaacccgggaggcngagcttgcagtgagccgagattgcgccactacacttcagcctgggtgacagagcgggactccgtctc

SEQ ID NO: 509113 - DNA, 228 bp, Homo sapiens
gaccttcccaagaggcctagaattgatgtggcttcctcttaaatattaattattagtcctgaaagaaagataacatatgtgatttttgtgtggtaggagagtgtcaagatatgtttttttcttcagccttctctgacttttctctttgggggcttcagattttatgattacatcttgtcccccccagaacatcctcctcttctccccatactgctttttaaacagatg

SEQ ID NO: 509114 - DNA, 498 bp, Homo sapiens
tttggtggcaggtgcctgtagccccagctactcgggaggctgaggcaggagaatggcgtgaacctgggaggtggagcttgcagtgagccaagatcacgccactgcactccagactgggagagagagcgagactttctcaaaaaaaaaaaaaaaaaaaaaaaaaaaactttgtgtggggcgcggcttgggccttggaaaaagttttttaaacaccatatccgtgttggggcgcggggggcccacaggtaggtgctacggtgagacctggggccaaaagcgcgtggttcccaaaggagaaactccgggggccattgagccaagggcgctgggggttctttcccaattttaaaagagagcgcccgggggggcacaaccgggagcgcgtttctggacacaatttccgaggatgtggggttccgggaggctcatcaggggctctctttcacggggggttccagggcagccccgaatttctcaattttgcccgccgtgggggcg

SEQ ID NO: 509115 - DNA, 235 bp, Homo sapiens
tagcccacaaacaccgcaatctcatgaaaatgtattcctttaaaatattgttttcctactttctatttaacaagatgattcattttactgtatggggttgttgttaatataaatgttgctctacaccagattgcttaaaagcatttttattatatttatgttgttgaactaatatatgaaataagtaaatgtagctcccacaaggtaaacttcattggtaagattgcggtgtttg

SEQ ID NO: 509116 - DNA, 293 bp, Homo sapiens
aacaggttagtttacctactgatatggttgttgccatggaatcctgtcagacagagaacgcaggtcagacatttggtgatggttggtaggagccaatggggaagtacattgtgggatatatgaacgcttaatcaaatcccgccagcgaagatacggcagcgcccggagctcggttggctcgataccggtcccccgcctgtcccccgcggccgcccccccccctccacgcgccccggcgcgcgggagggggtgccccccgcgcgcgggaccgggtccggtcggagtgccttcgt

SEQ ID NO: 509117 - DNA, 201 bp, Homo sapiens
gacgctctctctgttggggccctgaggacggggccctcaaatctcagtcctgctgtgagtgagaccaggcctgcctcgcttaccatcctgctctcgtgtgtcgtgtgtgagcccagcagaaccccgtggaacacagtgcagcgtgtggacaagtgtgccatggacgtcccgtgcactcgtgggccctgttcctgtggcatc

SEQ ID NO: 509118 - DNA, 383 bp, Homo sapiens
attcccatacactacatccgcatgttctggattcgagagatacttgacaatgtccacagagcaatggaagagcagacagatggtgacaagaaccgctgaatcatgctggaacaaaagtggcagcaagatgttgtcagagaggtagcctgagtccagtaagaactgcttggattgggagtcggaggcgagctgggcagcattgacgacgacggcccgcgccatggtagggatgcagccccgccacagtgtgaggacaccctcttcccgggtgattcgcatcagggcgttaaacacatttttgtagccacggcgctggtcagctggaagccggccatcggcagtcatgcggatgagagccacttcggctggtgttcccacaacgg

SEQ ID NO: 509119 - DNA, 917 bp, Homo sapiens
caaagaggaacagctctttggacactaggaaaaaatcttgtagagagagtaaaaaatctaagacccatagtgggcctaaaagcagccagcaatctaagaaagcgttcaagctcaacagtcactacctacaaaatcccaagaccatataactgaactcctcacacccaagtggaccaagtctatcaccctatagaagaacgtagatgttagtcataatgtaacatgaaaacattctcctccgcataagccctgcgtctagcattaagacactacgtgaactgacaattggaagcgagcccaatatctacaatcaaccaagaagtcattattaccctcactgtcaacccaacacaggctatgctcataaggaaaggttaacaaagaagtcaaacggaacttcggccaaaatcttagcccgtcgctgttaaccaaaaagcatcagctctagacatacaccagtattagaggcaccgcctgcccagatgacacgatgtgtaacggccgggtaccctaaccgtgcacaggtagcataatcacgttgtccctgaattagggacctgtttgaatggttcaccgagggttcaagctgtctctaactgtaaaccagtgaaattgaccctgccgtgaaagaggggggcatgacgaccagcatgaagagaatgaccctatggagcttgaatttattaatgcaaccagtaactaaggaaacccacaaggttctaaactaccaaacctgcttctaagaatttcggttggggcgactcggggcaaaaccaactccgtgagtcattgctaggcttcccagacaaaggaactctatgtccatgggcatactggccaacggaacataccaaggtaaaacggactctttaaagacaatcaaacaggttcgcacccattgagagaaccctgtgaca

SEQ ID NO: 509120 - DNA, 439 bp, Homo sapiens
  misc_feature (439)..(439): n is a, c, g, or t
tcgtcgcaccgtgagctggtggtcatcctcactgcatcattacatgctaactcatactgcattagcatgctaagagacactcccaccagcaccacgacagtctacaactgtcctgcaatcaggacagttaccctatatggtctaaaaaggggaggcaaccctctgtggcggagaattgccccatcgtctttcctcagcacactcatgaataatccaccccttgtttcgccatatactcccagcaattccaaataagtgtccagcaactgagcctgcccacaccgctgctctgcctcatggcagtcagcactcttttcattacttcactctcttaataaaacttgctttcactttattctatggatttgcctcaaattctttcttgagtgagcaccaagaaccctctcttggcgtctggattgggaccctttccggtaan

SEQ ID NO: 509121 - DNA, 872 bp, Homo sapiens
  misc_feature (162)..(162): n is a, c, g, or t
  misc_feature (218)..(218): n is a, c, g, or t
  misc_feature (383)..(383): n is a, c, g, or t
  misc_feature (498)..(498): n is a, c, g, or t
  misc_feature (545)..(545): n is a, c, g, or t
  misc_feature (636)..(636): n is a, c, g, or t
  misc_feature (639)..(639): n is a, c, g, or t
  misc_feature (642)..(642): n is a, c, g, or t
  misc_feature (648)..(648): n is a, c, g, or t
  misc_feature (659)..(659): n is a, c, g, or t
gagatcggaggagactggccggtcgttttacacgtaggaggcggggccttcggctttgggcgcgatggttaaaagacagttggtgtcggttcggcttctcgggtcggattccgggtcccaaccttccccatggccgaccctgaggagttgcaggttcttcgncgccccgcgcctccctctctccctcctcttcagacgcctctgcagcatcttccccngcggccagtgagtttgggctggccagttccgagcaggagcagcggccaacggtggaccagctggaggaagtggagctgcagatcggagacgcagccttttcattaaccaaacttcttgaagccacatctgcagtatcagctcaagtggaagaacttgccttcaantgtacagaaaatgcacgtttccttaaaacgtggcgggacctcttgaaagaaggctatgattctttgaaacctgatgactgatttggcatacttcgtttgtgtaataatgactgcnataattcatacttcttatgtcatattttgtacattaccacacatatnggatgacctctgtccagcagttctgtatatctcagaatgaaatttttcttggttttcttggtttttgtgaaagcagaataccgatgctatnttngtngcggancagtacttgtntgtccttaaatactttatgcctctgaactttcatagaatcctttatgaaagttaacttcatcaatagacggttaatattaatagagccacagcgctaccagtagcaaactaggtagaccattatttgttttgcaacaagatgctaagcatggcagacttgaagttgcgtttcatcttaaggaccagggaggtacttaagtgcacagcgtgact

SEQ ID NO: 509122 - DNA, 761 bp, Homo sapiens
  misc_feature (48)..(48): n is a, c, g, or t
  misc_feature (178)..(178): n is a, c, g, or t
  misc_feature (191)..(191): n is a, c, g, or t
  misc_feature (272)..(272): n is a, c, g, or t
  misc_feature (387)..(387): n is a, c, g, or t
  misc_feature (434)..(434): n is a, c, g, or t
  misc_feature (525)..(525): n is a, c, g, or t
  misc_feature (528)..(528): n is a, c, g, or t
  misc_feature (531)..(531): n is a, c, g, or t
  misc_feature (537)..(537): n is a, c, g, or t
  misc_feature (548)..(548): n is a, c, g, or t
ccaagtcccagccggggagcggtgaaacagccacagcgcggccagagnggtccgcgaatcccacagcacgacgcacgcgcagtgaaaggcagtagaaggcggggcgacgcacacggcttcctgggaggtgtagttttctctacgagtgcccttcgagatcgattggaggctcgcgcangagccgtgagttncctaaggcagccttttcattaaccaaacttcttgaagccacatctgcagtatcagctcaagtggaagaacttgccttcaantgtacagaaaatgcacgtttccttaaaacgtggcgggacctcttgaaagaaggctatgattctttgaaacctgatgactgatttggcatacttcgtttgtgtaataatgactgcnataattcatacttcttatgtcatattttgtacattaccacacatatnggatgacctctgtccagcagttctgtatatctcagaatgaaatttttcttggttttcttggtttttgtgaaagcagaataccgatgctatnttngtngcggancagtacttgtntgtccttaaatactttatgcctctgaactttcatagaatcctttatgaaagttaacttcatcaatagacggttaatattaatagagccacagcgctaccagtagcaaactaggtagaccattatttgttttgcaacaagatgctaagcatggcagacttgaagttgcgtttcatcttaaggaccagggaggtacttaagtgcacagcgtgact

SEQ ID NO: 509123 - DNA, 1785 bp, Homo sapiens
cgtagagtcggtctgaggagtgtacgtgtttcaagctatgtgctgggacggaacccgggtcgctagttcagcatcccgtgcctggcgaccatattcaaccgtccgccaaactttatacagccagccagcactcagttacagtgtcgctccaggtccgtcgaacggaacgctaccacgattctcattgagggcacagtctggcggaacggagcagagcggagctgcgtgcagttgtactggcctgaacagggaacagtctgggtatcatcgtgcggaagagagcggcacatgtaacatccacgaggcaatcggacatctttgagatgcactgatctaatctaatcacacgcctagtgtcaaaacacgttgggtaatcgacataatctggcacatgcacgtaactatcaagcccgaggtcgcactaggtctttgacctgatcattttgggactcggaggtattgatgatgaagaggaagcagagacacctgtggcagcgaatcaatatgttttctctacaagcatgtacttcaatgcaggacgaaagagggcatatgactgtttaggaaggaccatctgggagtgggaaaagcctcgatcgaacaacctataattgtagggatgaggcgcgtcacttgttttggatatagaaaggaatgaatacacggggtaataaaggacagaatacttgtcgtaacttgcacgctgtggtacggagcgtaggcgtagacctggacacttgtgaaaataggagaaggattgcattggacaatagtgcacatgtaattgtgagagacacgaataactaatagatagacggattcacagataggccactagacgtgtgagttacaaccgttggacaaccaccataggcggttggagttcccaattggtaggaagggcaaccccaaatatgtaacgggcgcctctcgaaatatggggtaggggttagaaacgaacctaattggggaagtacggcgtcaattattaaacctttgcgagatttgacacgccagggggttggcaaccattggcccacacttcgccattcttggacaatcttgagaggggtcgccaggcacacttcttgagaatcacacaagaggaaaggtaatgttttcgcccatggaggacgaagggaggcacgcggggcgacccgcaatcccccaatggaactggtcatgaggcgcaggcgcatggttacatcaacggtatttgcaccccgaggcgacatattggaagtggagaaagagcacagggggcgagagtcacacgaaaatgggggggggaaaatgacatctggggcgcccaataaattctacttaccccgtattaacccgcgtgtgagctgctgacacattttccccagtggatgtccacggcgcgcaccaggcaatagtttcggaagcctaagagcggcgataagcccaaggcaaccaccgggatactgagtatacgtgttggttcgtcacaagcccaccacttaccaacaagacgacgcggggtaatagagcccaacaccgtgaacgacacgaggaaaatctgggcccccaaacaaagaagaaacacaaaggggccggcaacacagaaaaccaaccgacacagaggacagacgatagcgacaacaccatggtgaccaggcagaacgaccacaagagcggagcagaacaagagaaaggacgaggagaaccaaacgcaagtagcacgacccaggaacaccaagacaacagaggagtaagaagcagcagcaaagacgcaaacgtagtcagaccaaagcgaggaat

SEQ ID NO: 509124 - DNA, 107 bp, Homo sapiens
aaattgcataggggaaataccataaaagtactggtctcatttgttggctttttcattactgtccttatcttcctgggctcttagttcctcagctgcctcgaaatcac

SEQ ID NO: 509125 - DNA, 340 bp, Homo sapiens
  misc_feature (196)..(196): n is a, c, g, or t
  misc_feature (201)..(201): n is a, c, g, or t
  misc_feature (220)..(220): n is a, c, g, or t
tctgttctagagcggtgtaatatttgccgagctccttgtactataatgaatcctatactgtataagccttcctgtgttggcgtatgacagccagggtaataatgacttgttggatgaaagttgatatcgggcttgtaaattgtcagttcagtgcttctaatctgcactgcatgcttatgctggaggagcaatgttntcatngttacttatactaacattngttcttctatagggtgatagataggtccaattgggtgtgaggagtccagttatatgtttgggatattaaaggtagtgggtgttgagcttgaacgcttacttacctggtgtctgctttaag

SEQ ID NO: 509126 - DNA, 360 bp, Homo sapiens
gcagacgggaggtgaccgatccttggaggtagcacagaggggcccaaagccctagatcctcagggcaagaccaactccaagtccagggaacagctctatgcacagggctgcccgtcatctctgacaaacttaagtggcgtggcttatcttctgaccttaaagatgtcgttctgggtaggggtgtcaatgcacaaatggagcatggcctctctggtcacctcaaaacaatcctcttctaagctcctctctgggtagggcagccaggagaaggcagcaccctcaggaaggtgccactggagcctctcgtcctcaatggctcctttgcaaatctgatagaagatgtggaagttcctctcactg

SEQ ID NO: 509127 - DNA, 435 bp, Homo sapiens
taaagatggtcgactgaagaggattccatgtgcgccgccaggttctgtggacagtcacactgggaatccaatgaagggtctgtcctgttcgagctgctgctcgatcctggctgtcttctgccattcaggtcatagccttgttcctgtttttaaaatcctaacccaactgctgactgcaaaacagccgtcaattgttcatctgattttgatgcgtgtctcattaccaaagctgggttacaagtgtataacaagtgttggaagtttgagcattgcaatttcaacgacgtcacaacccgcttgagggaaaatgagctaacgtactactgctgcaagaaggacctgtgtaactttaacgaacagcttgaaaatggtgggacatccttatcagagaaaacagttcttctgctggtgactccatttctggcagcagcctgg

SEQ ID NO: 509128 - DNA, 363 bp, Homo sapiens
acgtgtgaatcagtggccctcatgaatcattatgccttagctggttgctagtgcctgctatgcccttttcctatactctcgaaaggaagctaactaaatactaacgtctctagacgctcaggagctagaacccggctgaagtatcctgtccggcatcatcctaggcctcatcggcctaccatccctacggcatccgtttagataacagaggaggtcaacgatcgctcccttgaccatccactcaattggacaccaatggtgctgaacctacgagtacgccgactacggcgggctaatctgcaactcctacgtactgccccccattattcgctagaaccatggcggactgtgcaatcaggtgtg

SEQ ID NO: 509129 - DNA, 223 bp, Homo sapiens
gatgtggtggcatactgccatgtactcccagctatacaggaggctgaggcgaaagaattgcttcaaccatgggagacggaggatgcagtgagccgatctcacaccacgttggagtgccaaacatgggcaaaaaagtaaaactcaaagaaaaaaagccataaaaattttccacattttttatgaaacacacaagcaaagcaagtgcagcaatggctgggtgtgc

SEQ ID NO: 509130 - DNA, 189 bp, Homo sapiens
tctttaattttagggtacttgtgacatatagtatgccttagagtaaaagtatttttcttcccatgaggacagataatatgtcttcattcatttcattcatgcagtcaattattcttctagtcatttatcaatctgataaacatttattaaaaatctacactgtggcaaccactgtgttacgtaagacat

SEQ ID NO: 509131 - DNA, 888 bp, Homo sapiens
  misc_feature (1)..(1): n is a, c, g, or t
naacaagcgaaatgacagaaaagaacaccctgcaatacacgcatgccacacatgatgtggtcgctgccccacatccccggggagcaacagtgcgcaccaagaggtgtcgcgagcgccgtgcgttggaccgcgtgccccggcatgaaccgattcccgcccctccaagtcataaggcaaaccaggacaacaacaaagccgccttcgaacaaaacctgggctgggctcgcggagccaactacctccccagggcgtcaaaattggtgaaatttcaaacccgggcccaagagttgcaaccaccctggacgaccacgggaaatcgcgcgtccgtcaagaggccccctccttatttccgggaaggaggaaccccctggcaaacctgcaccgccgggcaagagccgaaattaataggaaatcaggggcatttgcgcatgagcctaccaggagagccctcactgcgctccatgggccacccggtcatgccaagagtgtttgggtctttcacatccacacacccgaagtgtcccgttacaacacacaagggttccccgcacatcccacgcgtatggccccagggccatccccacacacgacaaaaccctgggttaacacaccaacacgggggtctcaccattgcgtctatgacaagaaagggaggggtcagaatctcggggcaggccgagccctaggaagaaaacccacactcggctggctgaggagcacaacaaagccgcttgtttcaaaacagtattcccaagcaggcgtgccccaagccagagaaacgccgcatcaacgagacgatctctggaggcataataattgaagtacggttcaccaatgccacccattcaggaagcattttaacaaaagcttaaggttcccaacaaaaaa

SEQ ID NO: 509132 - DNA, 237 bp, Homo sapiens
gcagagttacggagtcgcaggcagaggttttataaaaacttttaggatgtataataatagacctgtccgggggcataggagataaatattcattatctagcagaggatattattacttgaatgttctcagggaggcaacaggtcagaaggcctaggatctagtcctagctacatcatttaccaactgagtgaccttacttcacctctcagtcttgctcttctcactagcagcagtat

SEQ ID NO: 509133 - DNA, 526 bp, Homo sapiens
ggttcaaccaatcaaattccaatgcttattagaaggaaagagacgaaggattatggaactaacgcgtctgtacgaaggaactcattaatccaggagaaacctgtttaatcagttgaagatgttgtcaccaggtggatctagtgtatggaaactgttgaggttcttcagaaggagggcttgatggtcactgagtgctatagatgctgttggacgagagagcagggaaggtgataggacaatgttgaaggctgccacgggatccgggcgtccacgtctagttgtgtacattgtacgaaaatgttggagattctcgagcgaggagaaaaaagttgatgctgagactagttgggagagtgaagaggtttattgcatggagaatgtctttgtggtacgagacagtcatgagtggttctcccctttatctaatcgaggaagcgacccaatagaaacatcatgcttatcgggtgacgacggtgctgcagcatgctgcggggactccaaccggattcgaattccgaacgctgtg

SEQ ID NO: 509134 - DNA, 225 bp, Homo sapiens
  misc_feature (38)..(38): n is a, c, g, or t
tagtgtatagtgagcggagcgagagtagtgtgcataanatgataggtctagttagagatcagtcgctttactgtggttggttcatcgtcgggtagtgatcagcatgtgggtggatagcgatgtgagagaattggggtgggatcataagggggaataaatgtccgactgcgggggtaggctagattgtgggggcctgactgaggaacgatctcgccatttaggtcc

SEQ ID NO: 509135 - DNA, 546 bp, Homo sapiens
ccccacactgggttcgagttcctgacggctcttatttgaaagactctaatttatttccttacgtgtttgttgtttggggtcctttaccttctttgttctgcccccgatttaaatactgtgaggactaagggagaagactaagtcaaggacgatcccccaagtttctggtttgggcaactgggtggaagatagtgccattcactgagatggggaacagatttgggactgacagagggaagatgatgagctctgttcagggtacctacctgatgtaaggtacctgtggggcattgagaaagagatattagtaaatgactggatgcgaaggaagcactgctctggattggtgacttgtagagagggtaactgaagccacagggttcatactaagaaagtagagaacaagaagactagagcacctaggatacagctctgaggaacagcaacatttgaaagaccaagaaaagccatgaaaaaccagagcaggtccgggaaaagacaagatcccttggcaagaaagacccacagagccctactctgcatgca

SEQ ID NO: 509136 - DNA, 653 bp, Homo sapiens
gcaacgcatccgggtcggctcctggccgggagcacagatggctgacggcgatcgggagccgtcggcagcatgctctcatgaggagggccttccacgccacgtcgatgaacttcatcgatatccagaaagataggacaatccacatcgagtgtccagacatgggaaaatgtaagcgttctcaggcatacgctgactagatcggattcatccttagcctcaaggatggtgtgaaggggaaggaagctgaccgttcgaggtacagcattgtctcacgatggcctattgagaaatctagatcgctcttctcaatcacagctgtgacgaaggtgcgattgagtgagactcctccagtggaccatgcctctcggtttgggagtatcggcatacaggacctggtatgtccaaagttgatgagtgaaagcaggaacacttgtggtggacacagtggtccctacccatctggcagcttgctgtgcctgacggtggctgtttacctaaaggagtcagtggggaactccacgcgcattgactacggtcacagggcattgaggcagccttcgctgctttcctctgctgtctctgcaagattggggtgctccgggtggatgaccaaatagctattgtcttcaaggtgttcaatcggtaccttgagg

SEQ ID NO: 509137 - DNA, 290 bp, Homo sapiens
agaggatggttactgtagaggagtgagaaaaggaagaagaagggagaggaatggcatgaccagagagcagagaggagatggggagaagagcctgggaagggaggacagatgtgagggtgacctggacggaaccaacagtggccagtaaagcaaaacttccggccctgaaacccaggctggggaactctcggtttcgggcccctcgtcggtactctctgggggcgccaaggactccagggctcacttgggcccctgcggggcaattaagtccccccaagctccaagggggg

SEQ ID NO: 509138 - DNA, 113 bp, Homo sapiens
ttcttgggatttttctcatgaaccacagacagctggttgactgtgacttcttctcaggttctgtttttacagccttggtttctgtgggattcgtactggaagacttgctgggg

SEQ ID NO: 509139 - DNA, 700 bp, Homo sapiens
cgcgatgtctcgcatagtcaagagttacgccccgcctgagccgaaatcggccatgatccacctgggcgaaagagcgaaatctgtctcaaaaagaagaatttccctatttaggaaagaagaagaaattagaaaaactacctggttgagtctcaattctcctttgtggacccttggaatgaatatctgtgcacattccccagcctggtatctatctttgtccagcagcctgggagccacagagggtgaatgtgtgtcacttccctctttgctcaaggcccagagcagcgccggcagtgcaaatgctctgggccaacaagttgaatgagtggggatctggggcctccggggagggaaacagtgacctctgccctacagagctgaggaaggttctcagaggaagtgaattccagcctgacctggagaatagaggggttggagtattgcagagaagggaaagttgcacaagaggtgccgggaacggttaccaatgacacaggggagcatgatatgtgaggcgaccgtaactatgctgctaaacacgctcgcatggttgagagaattggcaggagcaccaggctcctttctcacccgggcaaggaactggcgcagtgttcggatagacacactacatcaagcaggcacgcactaccctagagagagaggcaccacccgaaagggaggcaaaaaacggagaaggaat

SEQ ID NO: 509140 - DNA, 110 bp, Homo sapiens
gcggccgcctactactactactgctcgaattcaagcttctaacgatgtacggggacatgcaacgtatagagtttccgatcaccttcggccaagggacacgactggacatt

SEQ ID NO: 509141 - DNA, 135 bp, Homo sapiens
gtgagggccacacgtcctgactcagctgctcagaccacccctcgcatggaagtgttaaaggccaagagtaaaacagcacgtaggcccattcgcctcaaagtgactaagaatacaacttgcccttgcatctcgacc

SEQ ID NO: 509142 - DNA, 903 bp, Homo sapiens
cacaaaagggtttttattcaaaaaacgccaagtataaaaaaaaaaataagatctctttaatcccccgtgttaacagtatttcacctcagaataaggaccagcgagggtaccggagggtcaaaataaatgccccagaagaaggaatctggaaggcacaccaatccagaactggctgtggcataattatcctatatacacacggtcgggaatgcccctcgcgatctacccacgagagccggggacccacctggataagtagtgtagacggggccccacagaatgccacgggagctgcagcactttgtccctgcctgattccctgtgaccccagaaaaaggagcaatgctgtctggagacctcccccaaaaggtccccagggtcagaggaggagaggaggaaacgaaaaacttagggcacgccagcgtattggaacgctttggcaataggcaacgggtaaccaagataagctaacgtaagctaatataccttaacattggacctccaggttaaaaggccgcatctttcaaagacaagaaacgaaaaaacgggtaagccctaccttaaaggcaaaagtttcttaaacaattagatccactacaagtctttctggtatacgtaccatgccagagttgtacacacatttacagcgtttcgcggtgggaatgcatggtggagcattaagggcagtgtgaggactgggtttggaaaacagttaagtaaaacccaaagaggggaagaccaggtcactcggaggttccaactaaaggggcggataaaagggccaggtggtcacaggtttgtcctgaagccctcttccagggaccttcataattaaggagggggggtgggcacacccggcacaaaaaaaatggggacaaacccggcaagtttggggaaccccgg

SEQ ID NO: 509143 - DNA, 680 bp, Homo sapiens
tacaaatgaggcaatttttaaccccagccagggttgggctaatgcttctggtgggcagctgccacctgtccgggcaattctgtccaaatctcttggtccctggagttgccaggtttggcgggccgccattctgggtccttttccaccattttcaagcccctcccagggtctggagaggacccggggggccaacctctctagggacgcctcggtctagaatgtggggctgggcgctctagaccgcctgtttcctcctagactgtcccccataagtatcttgggccatggagagcgccaaacccacagggagcccaccccggagaggtgtacagtggtggcccgctcctggtgggaacacacggtctccgcgttgtaagaaccatgttcctacatctgaaggagacgcaagctccttatggtggctagaggccacgtttggaccggtatccacccatttcggggagacttaccaagcttgcccgggactaatttgggagagaagggcttgccaagagcttcttgacagaacctccattgagtggacacacgcttttttttcccacgcccatgtgacccctataacaaggggcccctcttcagcccctcctaatgaccctccgggcctagccaatgtagaattacacttccactccataaggcttcctaataataggcctaat

SEQ ID NO: 509144 - DNA, 356 bp, Homo sapiens
ggtggggtcttgcattcaagatgtgtgatcacagtagagagcacctcctcagcctcctgggtagctgggattataggcatgcatcaccatgcccggctaattttttttaaatttatttttagtagaaacagaggtctcgctgtgttgctcatgatggtttcaaactcctggcctcaggtgatcctcccaccttggcctcccaaagtgctgggattacagactgtgctcagctgctgttggtttgcttttgtttttgtataaatggggtttttttgagacggagtctcaccctgtcgccagtctggagtgcagtggcaagatcctggctcactgcaacctccgcctccctggttcaa

SEQ ID NO: 509145 - DNA, 182 bp, Homo sapiens
tactttcacaggtgctatgtcctatctggagaaaaaggtctgaccttccaaactcttcacaagcacactgagcatacaaagcaagtgtcatgccaggtgatagcccagagcttccacgaacatgtcaccagccttctatgcggaaattcacactccatggacatatacgtaccaacagaggg

SEQ ID NO: 509146 - DNA, 909 bp, Homo sapiens
  misc_feature (379)..(379): n is a, c, g, or t
  misc_feature (557)..(557): n is a, c, g, or t
  misc_feature (588)..(588): n is a, c, g, or t
  misc_feature (591)..(591): n is a, c, g, or t
  misc_feature (595)..(595): n is a, c, g, or t
  misc_feature (600)..(600): n is a, c, g, or t
  misc_feature (604)..(605): n is a, c, g, or t
  misc_feature (609)..(609): n is a, c, g, or t
  misc_feature (617)..(618): n is a, c, g, or t
  misc_feature (624)..(624): n is a, c, g, or t
  misc_feature (626)..(626): n is a, c, g, or t
  misc_feature (637)..(637): n is a, c, g, or t
  misc_feature (657)..(657): n is a, c, g, or t
  misc_feature (659)..(659): n is a, c, g, or t
  misc_feature (684)..(685): n is a, c, g, or t
  misc_feature (690)..(690): n is a, c, g, or t
  misc_feature (699)..(699): n is a, c, g, or t
  misc_feature (704)..(704): n is a, c, g, or t
ggaatttgaatgaggagcctcagcgctttcgggccattttcgagtgatgcctgatctcatcaatctagcgggagagacaggcatcatcgaaaatggcaaaaattacttggagcaaagggcagtcggggagttcgccaaggtgggcagtcggtttgtgacctgtagcagagaaccaattctggagaacagcctcacttcttgtgatggaatacttacataatgcattggaacatgaccatgagattaaggttcaatcaatgatagaatggaagaccacaataaaagagacctctacttagctcagcaattcttacctttcttacctatttgatgaagatgtcttttgaaaggtgtactggcaagggacacacaaatgttntgtaaattctccttttaccaagggtggataatttactgtaccttcctcatggaaaacgtttctatttaaaagtgttatttctcattgaatacttatcaaaaaggaaaacaaaaatgactaaatttggagatagatgggtctagtaagtatagttatatcacttgcatatctgggagangaaataagagatatcatcagtaattcccatntantaanaattntttnncctngtcagggnntacttntnacttccattantactatagttgaccctttantnagactaatctcacagaaataagtanngtctnacttgttcntaaanacatcaggattcgagagctttgtagcatgaagggaattttgggaaaagtgtaccttggaaaatgaaacaagaggcgtgggcgataagagagggataaatacgggtacagaggagaaagagaagcctagaggaagagaaataggggaaagcttttgtggttgtgattttccttgttaagagaaggaagaataagggaaaaagaaag

SEQ ID NO: 509147 - DNA, 1053 bp, Homo sapiens
  misc_feature (129)..(129): n is a, c, g, or t
  misc_feature (523)..(523): n is a, c, g, or t
  misc_feature (701)..(701): n is a, c, g, or t
  misc_feature (732)..(732): n is a, c, g, or t
  misc_feature (735)..(735): n is a, c, g, or t
  misc_feature (739)..(739): n is a, c, g, or t
  misc_feature (744)..(744): n is a, c, g, or t
  misc_feature (748)..(749): n is a, c, g, or t
  misc_feature (753)..(753): n is a, c, g, or t
  misc_feature (761)..(762): n is a, c, g, or t
  misc_feature (768)..(768): n is a, c, g, or t
  misc_feature (770)..(770): n is a, c, g, or t
  misc_feature (781)..(781): n is a, c, g, or t
  misc_feature (801)..(801): n is a, c, g, or t
  misc_feature (803)..(803): n is a, c, g, or t
  misc_feature (828)..(829): n is a, c, g, or t
  misc_feature (834)..(834): n is a, c, g, or t
  misc_feature (843)..(843): n is a, c, g, or t
  misc_feature (848)..(848): n is a, c, g, or t
ggaatttgaatgaggagcctcagcgctttcgggccattttcgagtgatgcctgatctcatcaatctagcgggagagacaggataacctgtccgagagtatagcgccactatgactccgccggaaaaatnactttaaaaatcgccatcatcgaaaatggcaaaaattacttggagcaaagggcagtcggggagttcgccaaggtgggcagtcggtttgtgacctgtagcagagaaccaattctggagaacagcctcacttcttgtgatggaatacttacataatgcattggaacatgaccatgagcatctacgtggtataaaagccacaatgtcccgttctaaacagttgcgaccattgtgcaatagcattctattctaacaccggtattaaggttcaatcaatgatagaatggaagaccacaataaaagagacctctacttagctcagcaattcttacctttcttacctatttgatgaagatgtcttttgaaaggtgtactggcaagggacacacaaatgttntgtaaattctccttttaccaagggtggataatttactgtaccttcctcatggaaaacgtttctatttaaaagtgttatttctcattgaatacttatcaaaaaggaaaacaaaaatgactaaatttggagatagatgggtctagtaagtatagttatatcacttgcatatctgggagangaaataagagatatcatcagtaattcccatntantaanaattntttnncctngtcagggnntacttntnacttccattantactatagttgaccctttantnagactaatctcacagaaataagtanngtctnacttgttcntaaanacatcaggattcgagagctttgtagcatgaagggaattttgggaaaagtgtaccttggaaaatgaaacaagaggcgtgggcgataagagagggataaatacgggtacagaggagaaagagaagcctagaggaagagaaataggggaaagcttttgtggttgtgattttccttgttaagagaaggaagaataagggaaaaagaaag

SEQ ID NO: 509148 - DNA, 582 bp, Homo sapiens
ctcttcctcacagagaacaaactctttatattcaccacggagtgccccacaccagaagctcattaaaagattttctgtttaatatgatgctataacgcaacctctcttatatcaacattgtatttttatattaggttccataagaaaaccaaaaaccagtataaatctgcccccgccccttttataaaaaatttctttctttattccccccacacctctcccacctcccccaagttttttgaataagctcgaacgcggttataattttgcggggtgtataaacacccgcggagaaaattcttgtcgccctccttcgttggtttatgtctatcagctcgggatcgagcggaggattttagaaacaagccaccatgcatcccccattaaaataaaaactgtcaaaaatcaccccgttcttgttgcaaacaacaggtgtttctttggtgccgcgtcgcgcgctgatctcctccactggggttcctgttgtcccccgggtgttgcccttctgttgttattcttgttgcgtgccagacgaacaaataacaccgtgttaatgggctggatataacaatagacagacaa

SEQ ID NO: 509149 - DNA, 265 bp, Homo sapiens
taaatgttagagttagcctgactcagcatgagcctggcttctcctgccggccggcacaggggtgggtaccatgcacatggtctccccgccctgcctaccatctgctgccctggaacccttggtgggacccgctgcccacagacaccttgcccgtgccccaatgccaggcagaggcccctgtgctctgaagagtgaataaaacgtgaaactggctgggcacggtggctcacgcctgtaatcccagccttgtgggaggccgaggcgg

SEQ ID NO: 509150 - DNA, 220 bp, Homo sapiens
gccgcggcttatggtgcagacatggccaagtccaagaaccacaccacacacacccagttcccgaaaattggcacagaaattggtattcatgagaaccccgttcacaaaggatacggattctcttaaggggggtggaccccaaggttccttagggacaatgcgcttttgccaaggaggcacaacaaaaaagggccttataggaggatgcaggccaacaatt

SEQ ID NO: 509151 - DNA, 218 bp, Homo sapiens
tccccccggtaacacgtagatatggccatgttatatatttcgattatatgctgcttatattactgtacatgtctgtaaaattcacagaactgttcacctttaagatgggtgagattttattcgtatgtacatattatacctcaccgaaagtgctcattgtaaagacagagaatgggaatcttgacgaggaaatcagtacatagcgtggcatcgatcgc

SEQ ID NO: 509152 - DNA, 940 bp, Homo sapiens
  misc_feature (940)..(940): n is a, c, g, or t
cggcctcgccgtatacgcaacaacgagaagcggctccagcatagactggcactacattttggaaaggtggtcgttaaacatttcccagcacacacctcggatctgcatcttgctgtgtcaattgaaccactcactaggatctgtgacctcagttcttcgtagactctggaatggagctggaagctcgcatcctcagcacactaacgcaggatcagacaacccagcactgaatgtccccacttatcagcgagacctgacgcagcagatcacttggacctatgaaggggaacaacacactctggggcctgtgaggtgctaggacagcccatctaaaacacccagctgccccctcgggctcattccgtccgctacccgcccatccccgtcgcaaaccccgccagtagtgcgcgccactaaactacatccagttcatcatgccccccgccatgtcgatcttgtacagatgcgcctgtcaaccgtacccgcgtccccccgccacagacaaagtacgcagcgtccgcttgaccaccccactgtacgcaactactggtagacttccaattcgccactactggccggctcgacattctgtatgccacttcacctaccgtccgtcgggtctctgtacgacattcctcctgcacccctgtgtctgctgttcctcacatctgccttcgtacttctcgactgctcctcaccaccctgtcccccatacctcactcgttctaaccacctcatcccccgctgtctctcgccccgctcccccatcccctatatacattcccccatatatttgcccctgtcttacggttgccatagacttgctctctcctctctcccacacttctcactctttccatactccctctcacaacaaaggctcgaacccaacccacccctcacgcgggtgctcggcatgttagccatgtccccccacctn

SEQ ID NO: 509153 - DNA, 108 bp, Homo sapiens
atgatttcatgtttgaactctcagacaagcctcttctcccatgctacaacctccaagtgtcagtgtcccacgggccctgcaactggttcctcttttccgatgtcttga

SEQ ID NO: 509154 - DNA, 324 bp, Homo sapiens
aaaaatatctcccaacagtttccttaaagtccataattttgggccaggcacggtggctgatgcctgtctgtaatcccagcactttgggaggccaagaagggcaaatcacttgagctcacaagtttgagacagcctgggcaacatgatgacatcccgtctctacaaaatacaaaaattagccaggcatggtggtgtgcgcctgtagtcccagctactcaggctgaggcaggaggatcgcttgagcccaggaggtggaggttgcagtaagccgagatggcaccactgcactccagcctgggcaatagagccagcccttgtctcaaa

SEQ ID NO: 509155 - DNA, 531 bp, Homo sapiens
ttagggcacttatgaaaggcgccgggtaggtttggagcgtagccagagcattcgacgtctgtgcgaatgtcagtgacgcgtcgtattcggaaagcgtcgcatggccggccagcaggatgcacccggggctggcgcgccggagatctgcaggttacgggttggatgggcgtgggcttccccgtgaaggctggcgcgacgccgtccctgatgttctgaagtcgagtagcgtcgtccaagtagtacgcgtcgaagtcatcaccaagtatcacgctggtgagatggcatggcgggtcggcatcgaccagcaggacccgatgcccttgctcggcaagcatccagccaaggttgtagacggtcgtagtttttgctgacgccacccttgtggttaaacaagaccaatcgctttgccatcactgaactcccagagatcaatcatctcaattgtaagtatcggggatggagagccctatcttgctccaaacggaaggcacttgcgcgattcaacggggcttaagttgcccgccaatcgaa

SEQ ID NO: 509156 - DNA, 220 bp, Homo sapiens
cgtggtacggagtgactataggagtcactatgatatgaggggtagttttagccctaatgggctgagccaactggaggtatatagggaagtgctaaattgcagaggtatcatgttgcccagcacttgatcaaatcctagatcctaggtctgcttggtagcatgcttcctaggtagtggatctgaggctacctatagaacttcctttgcagtcgtagtcact

SEQ ID NO: 509157 - DNA, 229 bp, Homo sapiens
acatgatgctccacgctcatcctggctcgctgtcaccttccagcagatgtggatcagcaagcaggagtatgacgagtccggcccctccagtcgcccaccgtaaagtgcttctaggcggactatgacttacgttgcgttacacccgtttcttgacaaacacctaacttgcgccagaaaacacagatgacgattggcactggctttatttagtttttttgtgttttcgttt

SEQ ID NO: 509158 - DNA, 558 bp, Homo sapiens
tctcagacacactcgaaccgcatcaccagatgatcaagatagtatgtggtattgatgaatattacgaagtgcgtgtgtaagagcaaagttccgcagctgctcctgaagacattccccatctggaaggagaaaattacgcatctcgcatggaggaagtcgattaaatccatccgtccatctgtaaatccctgatcactttaatttccgcaatcattccttaaaaccctgttctctttgaccctgtagaaaggtatacctgatatctctgtaatgattcctgaaaggatcataacgtgtaactgaagcatactgtccacttttttctctgttttgagccataatgaacttttgttttttttacgtaacgtgttcatggatctatgggttgctacagtattgtctgagcacaatgagcactgtgtttcactgatactgagtctgtgctggatcgagtcgagcatgattttattctgcatggaaaaggcggaaagacctttgcttgagtgctggcctgtgttgtgttggtttccagaaattaaaacacatggtgaaacctga

SEQ ID NO: 509159 - DNA, 1184 bp, Homo sapiens
cgcgagcttggagctgctgtgcctgggagcctgggagccgagcgcgcctgggctggtggccggggcctggagcggatgcggagtagggagctgctgcccggcccagccccgagtcccgcgcttccctcccgccgcagcgcgggcccagcggctgccgcccctagctcatggagcaagactaatcagcccccgaaagatccgagttcacggtccctgctgctggagcccgcaccttgtacccccgagtgcggcgggagcagattcggagtgcgccggccctacccctggctaccctcgtgctgaccagtgaccagatcatccccagagatagatgaagaccggatccccaacccacatctcaagtccactttggcaaatgtctccacagacaacggcaagaagatgaccaaggaatcacacccaacaaatgaaacgagctcccacactgactcgcgttcgaaacatcaaacctggacagccaaaccaaccagcacacggcagaaggcaacacctgaaacgagagcaccagcagcacaaccaacagccaaaccgccaaagaagatcacacaacacaacccaagagaacaatcccccaagcacaacccagcaaagtgcaccactccaaaagccatagaaacaaacccatcaatgagcgcacccaaccccacaaacccaccacctgcccccccaactgccacacaacctaacaaaacaacaacccacacacaacacaccaaccagaaacacccagacacacacacccaaacaccatcacaacccacactcaatcaccccaaccaacaaggcgacaatacgacaaaacagcaaaacccccaaacccatcacccacatcactacaacaaaccaaacccaacgcgaacacagcaaactaccaacacggccaaaaccacagaaccacaccaactgcaccagatcacagcgcgaacacaatctcacacactccaaacacaacaacgaagaaaaccacacgagaacacaccacaaaaaaaaatacccaatctcaaaacaacacacaagcacaaaaaaaaaacaacaaccacacaaaccaccaacaaaacaaacacacatacaatacacaccataacaaaacaaaaaccaacaccaatacacaccaacacacccaaaacacaacacaccacaacctcaaacaaaaaaacccacac

SEQ ID NO: 509160 - DNA, 174 bp, Homo sapiens
cagctaaccatcttaatgccccatctcttccaaacaagctgtccccaaaatgtagtggcactttcagtggctcagccaatgcaacaagcacagcccaccgcacccattacaaacattcagtgcatgcagcatttgaccaccaccatggcagctcataccctcaccatgcaacac

SEQ ID NO: 509161 - DNA, 359 bp, Homo sapiens
gagtacccgcccgaaattaatactgaacagtacacaaccttcacttctcataaggggtgatcgctaccaacggctcgctccagctggaattacagtaactgataatagaaagacaactgagaatattaactcgcttcaaacaatatattagtcattacgccgacattacataaaatcgccagtttcaagctcagttcagaggctcggaaaaaaatattctatacctagtaaagtgcctccattcataaaatgaaacatccaagattgagacaatatcatactgatgcgcatctaaaataggtcgacgtatacagtatataaccagcgcctctaagttgccatatttcagtaagtggaat

SEQ ID NO: 509162 - DNA, 602 bp, Homo sapiens
  misc_feature (261)..(261): n is a, c, g, or t
  misc_feature (417)..(418): n is a, c, g, or t
  misc_feature (443)..(443): n is a, c, g, or t
  misc_feature (456)..(456): n is a, c, g, or t
  misc_feature (458)..(458): n is a, c, g, or t
  misc_feature (464)..(464): n is a, c, g, or t
  misc_feature (480)..(480): n is a, c, g, or t
  misc_feature (486)..(487): n is a, c, g, or t
  misc_feature (499)..(499): n is a, c, g, or t
  misc_feature (502)..(502): n is a, c, g, or t
  misc_feature (505)..(505): n is a, c, g, or t
  misc_feature (507)..(507): n is a, c, g, or t
  misc_feature (510)..(511): n is a, c, g, or t
  misc_feature (514)..(514): n is a, c, g, or t
  misc_feature (517)..(517): n is a, c, g, or t
  misc_feature (522)..(522): n is a, c, g, or t
ctacaaccagtcaagcaacaaatgtttattgagcagctattatgtgccaggcactccactgagcatttggaatacaaagatgaattgaataggatccctgggatagacagataaatagggaacacaataaactgtggtaagttgtgctagaggggagaacaggtcctgtagaggccttggggagggtcagctaataaaagatgctgtggacaggccactcatttatccgcataggtgtgcatacatctcacaactcccgtntgccactcacagacaactttgtaaggtggtcctggtcttgaagttatccaggagagaaagataggtttgaaccaagggagagacaattcaggaggggaatcatttaattcaaaaagtattctggagttggaattgacaatagatttgagataaggnntaagggagaggaagggatccggctnataacagtccctntnaaggtnctgaggcttgagtgtntaaggnnaaaggaaaaccngcngancngcnnatnggnatgancaaaacctgagggacccctgccctctcacgcctcacttctccttatcttagaacctaacccagagggaatcacttctctc

SEQ ID NO: 509163 - DNA, 109 bp, Homo sapiens
  misc_feature (51)..(51): n is a, c, g, or t
gtacaatgttcaacttcctgcatctctctaaggattactccacgctcacgnttcaatctctgctactcccaatgtgctagtattgtattactatcagcaagaatttcta

SEQ ID NO: 509164 - DNA, 150 bp, Homo sapiens
ttaggggtgtgggtacaatggtcagcctggtcctcgcacctgccctggcgtcatgtggctgcaacgtgccaaatgatcagcggactgtggtctggggcacacagagagtgcaccttgtgattagctggatgtctattcctgtgattcaat

SEQ ID NO: 509165 - DNA, 898 bp, Homo sapiens
  misc_feature (698)..(698): n is a, c, g, or t
tagatattaataattaaagctgataagggtatcaaacatgcacataacttggatcatcatgattaagtggtaacttggtgtatatataaatataggtggtttataaatatatggcagaaagtatctggtaaagctctttaaatgaggggactgtggttaagagtatatattcgcttattttaaacttcaattatccattcttctgccttataataaaattttaaggcagagaactgaactaatatagaatttctccttgggagagtacataatgtacatagtgaacattcttataagaagaacagaataggtctaaagtggatgaatattataggctgcaaaggattttttacttaaaaaaatccatgaatatcttggatttattataaagcatttgtaaattatgtgcatttgagctgtaagattcataaacatttacatttcccaatgattctattgggattgtaaaacaatatacggggcagctacattttaaaagcataaatcaacagtttattatatacacatccagtgcacaaacacacaatatcattaatacctccacagtagtacctgtgacactatatcagatggatatccctaatctctaattttacagcagagggaaaccggaaatccggagaatttaacatttccaaaggtgacacaggctgcacatgacccaaattggaagtccntaacatccaggttcataatgccgacccctctaatgaatggtatgacccccaatgtcaaatactaatagtcagggaggagcatggcaaaatggtttacgcaacagaagtcacacatctggttcgaaaaaccggaaatcggggggagcgggaaatttacgaaattgataacgtgaatatcccgggggagaaaaaaaagtcgg

SEQ ID NO: 509166 - DNA, 620 bp, Homo sapiens
ggagcgaggagcccaagagcgagcgcgcgagcacgaagctcgagccgcctccgccgcgcgagcccacctcggccgccgccgcctgcgccgcgagatccgccccggcctccccgagagcgagccccggccgccgcgaccaccagccgcgctaaccggccgaccaaccgccaccgaggcgcctgagcgagagcagaggaggaggaggcatgagtgaggcgggcgaggccgagcaccgagcaggcagcaccagcctcgccgcaggctccggacggaggcggccgagcgcggatcccgcaggaccccgacgcccagagagcccgcgtgggcagctggtgcgccaccaggccgcaggacccgagcgcccgacgaccacgatcgcaggaaaccccggtgagggacgcggaccccgcagccacgggcaccagggccgccgcctctttagcccgcgccgacgtgcagctgaagacgcgcgagaaaaaagttctcgcgcgacaaagtacgttggacaactgtcaacatggttcaacggtcacgaaatgcgatatggcatttataacatcgagaatgacaccagaagaagatgtattagtaacatcagactggcatcaagaagaataacc

SEQ ID NO: 509167 - DNA, 896 bp, Homo sapiens
ggtcgtgccacccagaaatgtcgcctcccccgagtacagggggcaccaactccgtgcacaaatacgcgggccgtctacgggatgcccttaggccgctgcgaggttgtgcgcggtatcccctgtgcgggcgaatagacggcacctgccgaggttaagcccccacaggcccgcgccgtctgccgccgctaagggaacaattggcggagacaaaaccgggccacaggagacagtacacgcgcgcccgcgttggcaagttccatgtagacactggggaaaaacctctattgagggcgccgagcgacattcaaccactttccggcctggagctttctttcaaaacgacttaaaagctataggggcgttgtacttctaccccctacccagagggagaaggcccgcgtgatcctcctacctcttttattagtcctgactccgaggaacgccctcgctgcaccttcgggatgaaggcaccaccgttgggtattcaaagtgcactgtccgtttattcgccgtcgcgaccccatttctataccccgtggtcgcaggctccccacgcaccactccagggcctcatttccggtacctacaaacacggggcttcatttaaacagcgtgaaaaagtctggtcgagtgtaaaacgcccggagtaccaagcttcttcgcgcggattagagtactaattaaatgctccgagaaccccatggagaggtggaatgaaaccaaaacttttgtttcttctctataggcccacattccaagatattgtaataacagcatgtgtatgttgtcaccaaaagggagggttcctgctcatgtacgcccccgcaagggggaggccgggcatcccccgggatttttcctggggcacaaatgaagacccctctccaaacaaaaca

SEQ ID NO: 509168 - DNA, 369 bp, Homo sapiens
agatctttttagtgtgtggctcagcctggcactcacattccataaaggatcacatgaaactaactgaagccctttgttcaagcttcagggctcttagagcatggaaatgagaatgtgactagtggatagtcttacaggaaaattcttgtatgtccctgaatgagagcacagaggcattgaattcacagagctgcaaacttgcctgataaatgagggagtggcagtttatagataggtgatcttttttccttcctccaggtgtccttgcctttcttcccaaagtcattcatttctgatgagtatatgaatccccctcttgctagtaaggttctatttgggctcaaacaaggctgaatttttaaagagtat

SEQ ID NO: 509169 - DNA, 418 bp, Homo sapiens
aagtattccagaaggtgacagaccatgccaccattgccctgctccactatcagctgccccagatgccggatgtcgtggtccgatccttcatgacctggttaagaagttacataaagctgttccaggccccgtgccagcgctgcgggaagtttctgcaggacggccttcccccgacatggattgatttccgaacccatagaagccttccatcagacctagcggcactagtctgagacaggaaccagagttagtcctcagacagtatctggccagacacgcaggaagccacagaaggctcactggttcctcactgcccagatgtgtaagctgtctcctttcataaagcacgcatgtgtgcagaggcactcttgaagagcagactccctctgtggctgatgggactaattattcccactag

SEQ ID NO: 509170 - DNA, 543 bp, Homo sapiens
  misc_feature (78)..(78): n is a, c, g, or t
  misc_feature (93)..(93): n is a, c, g, or t
  misc_feature (122)..(122): n is a, c, g, or t
  misc_feature (133)..(133): n is a, c, g, or t
  misc_feature (143)..(143): n is a, c, g, or t
  misc_feature (171)..(171): n is a, c, g, or t
  misc_feature (192)..(192): n is a, c, g, or t
  misc_feature (259)..(259): n is a, c, g, or t
  misc_feature (267)..(267): n is a, c, g, or t
  misc_feature (269)..(269): n is a, c, g, or t
  misc_feature (295)..(295): n is a, c, g, or t
  misc_feature (307)..(307): n is a, c, g, or t
  misc_feature (332)..(332): n is a, c, g, or t
  misc_feature (345)..(345): n is a, c, g, or t
  misc_feature (351)..(351): n is a, c, g, or t
  misc_feature (405)..(405): n is a, c, g, or t
  misc_feature (411)..(411): n is a, c, g, or t
  misc_feature (423)..(423): n is a, c, g, or t
  misc_feature (426)..(426): n is a, c, g, or t
  misc_feature (450)..(450): n is a, c, g, or t
  misc_feature (455)..(455): n is a, c, g, or t
  misc_feature (487)..(487): n is a, c, g, or t
  misc_feature (501)..(501): n is a, c, g, or t
  misc_feature (511)..(511): n is a, c, g, or t
  misc_feature (516)..(516): n is a, c, g, or t
  misc_feature (519)..(519): n is a, c, g, or t
ttttggagattcatttttttttgaccttttcaggatggggttagtgtccagacccttgcgggagggtggtgggggctntccttttgcaggcantgtgttttcttcaggggtgtcttcagaanacccttcttgntccgtggggntcttcagggagccatttcaggtggagtntcaggtctcaaaaacaaattntccaggaggccaaaaaaagactgggttggcttttggtcctcatgacggcttttatcctcctgggacnctttgggnanattcatgggcattgtttccatctgtnttttctacctgngccacccctgccctgattccacggntgcctcaggcagncaggcnaggagttaggccggtgcccggccctggcagcaaggggtttttgtgcagttgganatgctnccgttgtggcanagngtcctgcagccccgcttccatcancaggntttggggtgggggctttgcaggggatgctttntgatgtttgttccnttgtttaaanaaaangcncttatttttgtttttttttttgca

SEQ ID NO: 509171 - DNA, 780 bp, Homo sapiens
agcggcttgccgcctgttcctggtgtgcgcccatgacactgaaccatggcttctagattggttgggaaagaataatcaacagattatttcctgacatctgacaattacatgaaatccacattttacgtgtctatcagtttatgggcaatgcagccacactaatttacatattatctatggatacttcttgtgctcataatcgggaaaggttccgagtagctgtctacgatgaacctgtagtatgtgtgtcttgtttcactatcgccgcttgtctagctcccgagatcatgcctgactgcacaatcattacctgacaagcatttgtgaactgcccgtgatggtattgctagattcattactttctctgctaccaattcatgccctgtatctcaaaaccaagaaaatgtaccttttgaagtgtttaacccttttcaaggctacactgtgaactatacgacctattatctgatctatattgctaggtgaccttgtgttgctaatgctgtgtcgcctttaaactggtaagacagcaagtagacctgaacaagtagtcaggaacttactcgagtccgacaatttattccccatagcatgggtgggcggaataagccacacaaggatccgaaggaaacttcattaatatcttggactagaaaacgatcagcagggtagaaaatttcgcagaaaggtaaattagatacatcgagcgcttgcaaccccagaacttgttgacccacatgtagccctatttagataggcccaaaacctgagagaatccag

SEQ ID NO: 509172 - DNA, 905 bp, Homo sapiens
agcggctggaagtggctgatgcttggggcattcgctggaacatcttgacagagtgaaactgaagcttcagaaaggcgaagcgacttacccacagaccaagtggctattccgttcttgagagtatgtaccgttttgcccagtacacggggctacaggaatgtgccaccatgccctgctaatttttatatatctacttttgcctattttggtagagatagacgctcacatcatgttgcccaggctggtctcagtaatctcgggctcaacgtgatccacccatctaggcctcccaaaatgaaagacttgtggatatagtttgaacgaattagtccgggcgacaagtgggtcacacctgcaatcccagcgactttatgcagaggtgggtgcatcagttgagtgccatgacgttcaagaccagcctggccaagatggtgaaagcccatatctcctagatatacgagaattagtcagtcatggtggtgcacccctgtgatcccagctactcagaaggctgaggcaggagagtcgcttgaacctgggaggcaaaggttgccgtgagctgagattgtgccactgtactccaggctgggcaacagagtgaagactgtgaaaccgacacgaaggatcgacggaatgacgcaccagaccgacccagacggagagagcggaggaagcgcgggacgttgccgtatatcctcaaagtagatagcatagatatcaacccccatattcctgaaactcacgatgaccactgatggatgtcctatgtgagaggtgcctccatatcctggaggaaacgacatctttctcttctgacacacagggcacaggacaaaacctgaaaaaaggcccaaataatcccccagtattaccctggaatcattgtccggaaaacttattcctcc

SEQ ID NO: 509173 - DNA, 200 bp, Homo sapiens
agaggcgaacacgacgacactagccatccctttaactgcatgatgctattttatccctccagcataatgccaggcaccgacaaccataaagctcgccagcgttattaagtaatgcagtgtttcactgtttctcatctcttttctctttttaaagatggagaagatttccagtcatgtctgatttgtattgcacggcgatt

SEQ ID NO: 509174 - DNA, 121 bp, Homo sapiens
gatatgagtagaatggacgcaaagtagcgtagtgactaaaatgactgtagctgccctggaagttgtaataggcctgattccaaaactatgtggccttgacaggatatgcctaagtctcctc

SEQ ID NO: 509175 - DNA, 918 bp, Homo sapiens
  misc_feature (440)..(440): n is a, c, g, or t
  misc_feature (844)..(844): n is a, c, g, or t
ggaccagtgctgagactacaaggttcggagatccgcggctcacgcagagattatgaggttggtccttgtcccctcgcccgtgagttcaatgctctagctatctatgtcgtctgtttagttctactcgtgctatccagaatcagtcggtaggtcaagtcatttatgttgcattacctacgtagaactaatctggcataggcgatctttaaggactgaatggatgacgagtgagattcatatgtccagatcggtacctgatgtgtagtgcgcgagatttgtccctggttctactatgatcatggacactataacgatactatcaccagggatcgttaccaagtgcgtttgtaggcaaaggatcattcgtgtaaaccatggcaggctttgtaagatagcaaggtaaccattcaggaactggttgcaatacatgttatgataanggactgcaaattgcctagaggttacatcgttatgaggtaatatttcgtaagtactcgtatattccattgcggagagaaaacacaatatttaatcgaatcataggattcaagcatcgacttatctttattagaaaaggttccacatgtgtataagactcgttttaaagtataagaaaaacttgatttgtattcattaatagagaaggcaaatgcgtaatattttaatgcaatatgtgtatcttcacacgtaattttcgtacatatcatttggccacgtgttaacctaaatatctcacactcatccatataagttataattccagagaaggagactgtgggttttaactctctggtgattacgacggacagcgtaatggggcacgatgtgctatggtagaggcagntcagatgaactcacgtgaagtgctttgctggaaaggaaacatttgagtgtttacacatgtggcgatggaatatc

SEQ ID NO: 509176 - DNA, 108 bp, Homo sapiens
gctgacctagaggatcccgccagccaacaggatcaaccattaactttccctctacacttatcatcttcacaattctaattctactgactatcctagaaatcgctgtcg

SEQ ID NO: 509177 - DNA, 104 bp, Homo sapiens
  misc_feature (93)..(93): n is a, c, g, or t
gtcctagccgcgcagtggctcggactacaggcgcccgccagcgcacccagctaatttttttgtaattttacgtagagacagggtttcactggncgaggctagga

SEQ ID NO: 509178 - DNA, 204 bp, Homo sapiens
tgattagaggatctgtacagaatcctaacagtaacactgtgattctgaggtgccacagaggaggggctttactggcccctgggtgattactaccaaactggcccagaggccagagagagagggcaggaatttgccccactaacctgctcagtcattagccaagctgcttgccttcatgcttgtgccatgtggtgtgcctaccag

SEQ ID NO: 509179 - DNA, 296 bp, Homo sapiens
  misc_feature (47)..(47): n is a, c, g, or t
cccgttttaaaaccccttttttttttgggttttccccaaaaaagganttaaaaaccgggcccgggccccctggggggggtttaaaccaggcaaaaacgtttttccattgggccgggggcccaaaaaaatggccttttccccgccccttaaaccccggggggcctttaaaaaaaccccctccttggttatttggggcctttttcctggtaacccccagggggctttttggggggccctataaaaaaaccccctttttcgggggggggggggccaaaaaccccttttgggccgggtta

SEQ ID NO: 509180 - DNA, 596 bp, Homo sapiens
  misc_feature (220)..(220): n is a, c, g, or t
  misc_feature (311)..(311): n is a, c, g, or t
  misc_feature (316)..(317): n is a, c, g, or t
  misc_feature (401)..(401): n is a, c, g, or t
  misc_feature (481)..(481): n is a, c, g, or t
  misc_feature (511)..(512): n is a, c, g, or t
  misc_feature (525)..(525): n is a, c, g, or t
  misc_feature (532)..(532): n is a, c, g, or t
  misc_feature (538)..(538): n is a, c, g, or t
gaaaagaaggacaggtgctcttcatttattgtgaaagcaatctcatgtgagagtgcatatatggttttttctatttaataatacaccactctgaaattatgtgccattgaatcccaaagatttggtacaaatagcacaattggtatgcgctttcctctttcctttcttcagacaaacccaatataaaatgcagtgtgaaagaatgacccgcgtctagagnctgacttagaaatttatgctgactcgttctaaaaaaaattatgttggttaatgttaacctatctaaaatagagcattttgggaatgctttncaaannaggtcaagtccatgtcatacagctagaaaagtccttgaaaaaaagaattgttaagaagtataatacccttttcaaaacccacantgcagcttagttttcctttatttattggtggtcatgaagcctatccccatttctccataaaatcctccttccatactgtngcattatggcacaaaagcctctaagtgccnncagacaagaggcncagagtntctgantatacacaatgatgctgggtaatgtttatatgagcacagtgtatatgtatggtcagct

SEQ ID NO: 509181 - DNA, 177 bp, Homo sapiens
tgcctacacgttaccgtgtctccccgtcccacatactccggaccctcctgctctatccacggcgcccgcggctccatcctctggctcgcggcgtcgctgtcgaaccttcactttccgtgtctccccgtcccaatactcaggaccctcctgctctatccaccgcgcacacaacccgta

SEQ ID NO: 509182 - DNA, 188 bp, Homo sapiens
tggaccgaaagcttatagtgaagttgtagagatgatggtgtttcacctacatggtggggattttggacagcaatgagtggatttaatgatttaggtttgacattaactccaaattcaatgatgtcgtttaacaaactgtatacccattaatcgttatgatttgttttatcattatcggaaatacaggg

SEQ ID NO: 509183 - DNA, 542 bp, Homo sapiens
  misc_feature (220)..(220): n is a, c, g, or t
  misc_feature (257)..(257): n is a, c, g, or t
  misc_feature (262)..(263): n is a, c, g, or t
  misc_feature (347)..(347): n is a, c, g, or t
  misc_feature (427)..(427): n is a, c, g, or t
  misc_feature (457)..(458): n is a, c, g, or t
  misc_feature (471)..(471): n is a, c, g, or t
  misc_feature (478)..(478): n is a, c, g, or t
  misc_feature (484)..(484): n is a, c, g, or t
gaaaagaaggacaggtgctcttcatttattgtgaaagcaatctcatgtgagagtgcatatatggttttttctatttaataatacaccactctgaaattatgtgccattgaatcccaaagatttggtacaaatagcacaattggtatgcgctttcctctttcctttcttcagacaaacccaatataaaatgcagtgtgaaagaatgacccgcgtctagagnctgacttagaaatttatgctgactcgggaatgctttncaaannaggtcaagtccatgtcatacagctagaaaagtccttgaaaaaaagaattgttaagaagtataatacccttttcaaaacccacantgcagcttagttttcctttatttattggtggtcatgaagcctatccccatttctccataaaatcctccttccatactgtngcattatggcacaaaagcctctaagtgccnncagacaagaggcncagagtntctgantatacacaatgatgctgggtaatgtttatatgagcacagtgtatatgtatggtcagct

SEQ ID NO: 509184 - DNA, 465 bp, Homo sapiens
  misc_feature (123)..(123): n is a, c, g, or t
  misc_feature (131)..(131): n is a, c, g, or t
  misc_feature (140)..(140): n is a, c, g, or t
  misc_feature (306)..(306): n is a, c, g, or t
cagcacacaggcagccacccgtggccaaaggcttaaggggttcaggggttcaggcacccgtccccacacaagggccccgtgggtgggcctggccctgctttttacgccaatgttatgccagcnccatgttntcccaaaanccgttgatgtgaattattttaaaggcaaacccgtgctctttattttaaaaaaccctgataatccccctgcggtaggtcattcttttgccccatccctatagacccctgggtttggcaaaactcaggcaaaagtggagccctttttagacatcactgtcagccttgntatttgaaggtaccccccatagggtgggaggtgctgtcccccctgccccccgttgtccctgaaatttacccccccccctgctgggggtgagctgtacttttttgactgcccccccctgtgtaacgactccaaaataaaacttggttttgaatattttta

SEQ ID NO: 509185 - DNA, 146 bp, Homo sapiens
ccggcttaaatgaggtcgggttctctcgcttgacttcgagagcgattcctgagtcaggtagtgcagtggtgtaaagtgcagcatattcatttccaagctagagggtttcgtgtccggattcaaaggggcccaggcttgagctgggt

SEQ ID NO: 509186 - DNA, 407 bp, Homo sapiens
ttttatatttatattaattttttaaagatggggtcttgctgtgtggcccggactggtttcgagctcctggccttaagctaccctcccacgtcggcttcccagtgactgggattacaggtgcgatccactgcgcccagcccaacaacaattcttttctaattaaacaataaaaaatatctcacagtgacagttcagtcagccctgcactgtggtaaaggtaaaggtaaaggagagagtagtacatctccattttttaacttgaaaaacttagggttaaaaggaaaaagtcggtcttttaaggttggcccggcagttcagcagcaacaaagcaaggactttcaccccaggcttaggggagatcccattcccgcctctctcaacaaggtgttcccgggggctttagaggt

SEQ ID NO: 509187 - DNA, 971 bp, Homo sapiens
  misc_feature (143)..(143): n is a, c, g, or t
tttcttttttagttgagttatgagagaggaaaaggaagagtctgagagtaggacagaagacgagaaaacaatggtctcagccttattggcctcttttacatatatggctgccgccaatcgtgtccctacgccgtttttccctnggggatatttactttgggccccaaaagagaactctcccagctaatttggcgccgcccacttcaaacaaagtttgccagggtcccttcaagttatcccgctgcctggcacacaggaaaaattttgcctgtgtgctgaccccggacctaccccttggttccccccggaaacttctttctcccgttagccaacgagattgtcacgaaagcaacccccaccatcagtgagtctcacggggcatgaaaccagatggccttcaacaggcgggtcacagacacccatagatcaatcaacgcagtgtggcggctccccgggtgcagactcccttgggaatgaaacacggtggcgcaacccctgccttcaagatgattagggggtacttaaacagcatgtctaagatgaacatgtcactcgagagaggcccctcgatagccaccttatcaaaaaaggcagatttctttgtgcgagaacctccttgtggacgacaactcccctcgataggcacactgactcctctggtgggggcacctcgagagatgaatgtgcgacgagttgctactagacagaaccaacaacagtagggagagcgtgtcgctacctccatgacatgggaatgactactccgctctggagatctgcacccactgtgcgccagtgtacacccacaaaggcaccagacagaattgttttgttcacacagcagaacacaagtggcgagcggggtctctgttatagcatccctacgcctatcgggcgggtcacccaactgcgaccccaacctttttccaattttctttcccccaagacaaaaccaaacgcccaacataaca

SEQ ID NO: 509188 - DNA, 933 bp, Homo sapiens
  misc_feature (355)..(355): n is a, c, g, or t
ggacttgccatggtcgtcttgtctgccggcctgcttccttgtatatccacaggagctgcaaaatcctcttagagttctaagggcgctccctgaatgtgggatgctgcttagttgcccaagcataacatccaagtccaggtgtcatttcttgcgtgctcacgaggtttacagtcagtcacttttgcggaagagcatagatcatgattgagaagatgagatgtagagagaggttctcttggtggtgatgtaagcaaagatgcgtgacagaagccctgggaaggttgtatcaacagagtagagacgcagaccattgaaagacgttgtaagatttagaggtcgtcatcgtttctcttgntgagaaagacagactgagggaaacatttaggaaacagaaagtgatttcctctgaacagtctattgattcttcaagactacccttcgtgtgtaatggacactcacctttatgcagaatttgaaagcttaaatttactatacaagtctatacctatgtatgggagaagcgtataataagaacacattaagaatataagagaatgttacatttatccctttttgtaatcatctcatctcagggtacatcaagtgacgaaaagtcttccatcatacatttaaatttcattagataccgtgaggaaattactatttggagagtacagcatatgaatttaggggactgtggcgaacgctttcatccttatacctctgattgatactagggagaacccctgataaattcatgctgataggctgttgaaagtctgacgatgaatcaattcttcagatgcccttcttctgggagcacctctagtgttgatgtaaactttgcggcaactgtcgatgaatcttggggaaaccaagcgatgggaagggcacctctatcccagcccaaggatgtatggccgagacgaacgg

SEQ ID NO: 509189 - DNA, 174 bp, Homo sapiens
gtgacacaaatcagtgtcaggctgaccagagagagctcttccctcccccagtccagtcagtctcgcagtcccctctattctctccccatcatctttcttaaatctgtcccctcatactaatagcagtgatgaggataatagcagctcttgccaattaagcactgtgctctgccg

SEQ ID NO: 509190 - DNA, 177 bp, Homo sapiens
ccttaactgtgaaagcagagttgataaatgaactcgttgctcaaacaaggtaattcacatattgtatttctgttgaattaactgaaactgttaaatctacctgtttatgtaatgtaaacagagtgtcatatgtagttaacatgtgtttttttgtaaagtaaagccaagttgcaagca

SEQ ID NO: 509191 - DNA, 512 bp, Homo sapiens
agcggggatgaggagtgagaaagctactctaggtgcctgacgaattagggccgtaggaatgaatcctgatggcccgtgcagctcttatctcactgtgcgacatggactgccgggtccacattgcgacccgatcgtgccgtgactgttgggtgctatcgaacgtgactcttggcgatgtatcctgcgtagacagactgtgtggagcggagccgtccacatccaggccatggtcccagtctaactacctatagggggctggcacgactgactcctggcgcgtagaggcatagacttgcaagccatggagagcgaccgtggtttggtcccacgttcagagaaatgggtagtaccataagaggatgtactagttcggggcgcactgtgagaaagcgcactcccgagaatacgcgtgctgggaggtgcccgacgcccccgtgcaaattgcggaagtccctgtccttgtgaccacccttcgcaacgatggccccttcggcaggtcgccttccgaaact

SEQ ID NO: 509192 - DNA, 576 bp, Homo sapiens
ccaaggggtgacacacaccttttttgggagaggttttatgttaaaccaccccccaatgggggggggaaacaaaattttctttgggggaagggggaatttccctcccactaaacaaaaagggggtttccatagtgggtttaatttggggaaagtgggttcggaaaattttgggaaaggggggccccttttcccgggaacccccagggggggtaagccctgttttgtttttttaaaaaaatcctaaaaaaattacaaaaaaaaaacggggtgtttttaaaaaggcagttcccaaggagaatttttggggggaaggggcggcccccccccctaatttcctggctaaccacccaaaggttcaaaattgttttaaaggggaaaagggccccttgggcccaaataaaaaatcccccattaaaaaggggggggcccccccccccccgaaaaattggtttgaagccccccctgttagggcccctaaagggggaggaaccccccccgatgggttttaaattttttttgaaaaggtttttaaaaaaaaagaaaaaagggttaagggaaaaaaaaaaccatttttta

SEQ ID NO: 509193 - DNA, 763 bp, Homo sapiens
ggcagacacctatattatgtttgttcggcaaaaccaagatattcttcgcagacaacaggtcaatgaggaaatgtcatcatcagcaaacagttcatttgatcgaatggtacagcgagttccatgaacagtccatttgcgtgtggttgcactgcatagcattcagcacctccgaactcctatcatttcacccagctgcacagacgctcatcaagattgtgaagaaaacctacagggacttatcgattgcagggtgtgatggaaggaacactgaacagtaagacttatgatactgtgcacagacagttataacagtagaggaggacacagactctgctatcagcacaggcaggcaggacttcagggcattcatcatgcaaagacagtgcacgaagcaagcaagaaggctgcatatccacgacagctcttgccagcaccggcacggcaagcaccttgaatcggacactccgttataataagtgataatttattacacgagtgtgatcacgtgtgatacagtatacgcatgaacgatatgctcatagatagatgcggtacaaaataaaacacattgcatatgggttaaatagtccattctaccaacaaaggctaaagcccatggacaatggtgaccaggataccaaacggtaggacaactgccgcacagaagttcaaggagcgtcttatatcaacagatcatacacatgagacaagagcgatactagaacaagacacggcaacagcaatagtaatggaggcaagcaca

SEQ ID NO: 509194 - DNA, 82 bp, Homo sapiens
gcacgagattccactgttttaaaagaaatctcagtttttattttggaatataaaatgtgtatttggtatatgtgaccaattt

SEQ ID NO: 509195 - DNA, 171 bp, Homo sapiens
tttaatacgtacacatggagtgtgactgacatcagggcactgaggagcaccagaaagtcaccccgtaacacaggcacacacacacacacacacacacacacacaacacacacacacaacacacagatatactgttaagtgtatatatatgtgtcccctctgaaactcatgt

SEQ ID NO: 509196 - DNA, 126 bp, Homo sapiens
agcttccgtggtggtggggccgggtagcgggtgctgtgctgtgtctgagcttcgtggtgatggggccgtgtagcgggtgctgttctgtgtctgagcttcgtggtggtggggccgtgtagcgtgtgc

SEQ ID NO: 509197 - DNA, 872 bp, Homo sapiens
  misc_feature (25)..(25): n is a, c, g, or t
  misc_feature (183)..(183): n is a, c, g, or t
actgctcaattattggaaattatancttccatgacatacatcaaggtcactagtgactacaactacaatggggcctacatcgaccacacatgtgatgctgaatcactacaccacatgtgtccatctaatggccgtctcatagctgtctcggattgcccctcacgcggatattcctcagttacntcaaggtccaagagtgtgtgtccacgagcttagtccctacaggcgttactagaggtacgcccttcgcaatggtccttatggggaccatcaagatgaagaaacatgtgcgctaggaactaaagagtagcttattgtgtttaggcgccgagaccataattcgtcatatgtcgggtctcagtgaagcagaaatcactactttcagcatgtgggctgaaccaatgaatatatgagcttttattgctttcatgccctcgacccagcagaattttatcagattacaaaatgatatcgaattctacttagtaaataattttcgtggttatctgttttccactgttagtatggccatgagtctagatcgatctttatttctcttctggattactgaaatcatcttctaccttatttgctcctttgttttcttttcaaagttcgtctttcgagatccattatccatttcgatagcataacagggtgtgtccttaactcgccgggtggtccacaagcgttcatggaaattcctatgtggcctcgagttcgtgtagcaccatcaattcccatgtgatctgatgttggctccttcttaaacttctccattatatttccttccttcggacatttggcgggccacaaggtaggcgaaaagctggggggccaggcctggcacttaagttgcaaaaaccctgggt

SEQ ID NO: 509198 - DNA, 274 bp, Homo sapiens
cgtttactggcatttacatccaaaagagaggaaattaagacccctagtgtggctgtgagaccactcactacacctttcagggactggggagagatgagcggtctgcccgtcacaagcatgctgcggtacatggttaacgcagtatgattctgccagatggtaggagcagattgctcctgcctcgcatgcataggccactacgccatttgataagtgcaaagcagctgctgaaggcctctcacatacttgacactcacaggaaaactctccagtg

SEQ ID NO: 509199 - DNA, 115 bp, Homo sapiens
gatctagaggatccctcgaatcgacggtttctcaagcgtgggtggtcacagactatcagtgggttgtaaatcatcaagtcagacaagagctacattttttacccacaaggcatag

SEQ ID NO: 509200 - DNA, 578 bp, Homo sapiens
cggcgctcggggttaccccttgcaagcgacgccccctggtcccacagataccactgctgctcccggccctttcgctcctcgagcgcgcaatgggcacccgagacgaccgagtacgactacctctttaaagttgtccttatgggagatcctgggtgtaggcaagagtaaatctcctgtctcgatatactcgaacatgagtttaatctgggaaagcaagagcaccaatgggagtagagttggcaacaagaagcatccaggtggatggaaaaacaataaaggcacagatatgggacacagcagggcaagagcgatatcgagctataacatcagcatattatcgtggagctagtaggtgcctaactggtcaatgacatggctaaaccatctcacattatgaaacatgtagagcgatggctgacagaactggagagatcatgctgatcgtaacatggtaatcatgcttgagggcaataagagtgatctacgtcatctcagggcagttcctacagatgaagcaagagcttttgcagacaagaatggtggtcattcattgaaacttcggccctagactctacaaa

SEQ ID NO: 509201 - DNA, 158 bp, Homo sapiens
tgtcagacgtgaactatgtgggccacgctgccgctgctctgcgccggggcctggctccttgggagtccccgtctgcggtgccgccgagctgtccgtgaactccttagagaagttcacttcaagtcatggatttctaagcaccgtaagacctacagtac

SEQ ID NO: 509202 - DNA, 337 bp, Homo sapiens
agctcggtaccatccacactggcacgaactcctggcctcagcaatcctcctgctcccaaagtgctgggactacaggtgtgagccaccatgcctggtctccctctctcttttgaatggagatatgtttacttttagaagtagtatgtacttaccacaaaaaatgttaaatgatatggaactgtatgggccagaaattgaaaagcttccatgtctccacccctaagagtaattgacacccctttagcatggtcagattttgtacatacatactgtccccactttttctttattcttgcttgtttgtgtcgttaccttcaggtctccagtgtggagagag

SEQ ID NO: 509203 - DNA, 579 bp, Homo sapiens
  misc_feature (359)..(359): n is a, c, g, or t
  misc_feature (489)..(489): n is a, c, g, or t
  misc_feature (552)..(552): n is a, c, g, or t
acaccctaggtcatgtgatgacaggggcttttatagcagctgtcttaagtaggtgccacctatttttccaccaagctgggagggtcaagattctcttgcctcaattccgcatctggacacataactccacatcttctcttctcctttgagattcataacacgtttgcagtttcatcctttacggctttcttgctgtcataaactttctagtcactacatctcatttattatatatttcggcaccgaatgtgtctttcttttttatccctattcctgtcattaactaggataacttcagtggtcattgcactttctagtgaacagcttagtttcttgttggcttggctttttctaagccnatgatcttcaaattcattccattttagatagccacttccatacctccaacccagaccatgttttcttcagaaagtgctccttttctgaaatatttacaacctgcttttggatcacaaactcttatccttntagtttttacaaccactattcctcaacctcatcaggatctacaatttttttgctcccttgttnatccacaccccctctgggtggctttct

SEQ ID NO: 509204 - DNA, 122 bp, Homo sapiens
accactcactttattactaggatgatttgtgacaatggttaccggtatgtttgcaacattgatagctgtatgtctaattggcaatgttgtattccagtctggtttacccttatttagattga

SEQ ID NO: 509205 - DNA, 150 bp, Homo sapiens
atcactctaatgagaggacccggccatccacgtactcactaagccctcctggtgacttctgatgttcactaccttcacctgttttacaagggaaagtcctttataatattggagtatcccacactgagcaggctttggggcccaaaataa

SEQ ID NO: 509206 - DNA, 648 bp, Homo sapiens
  misc_feature (539)..(539): n is a, c, g, or t
tagtatagcactgatgcatactatatgctcagtaaggatctgcagaattaattaatgctattaatatatttcttttaaatgaagatgttcattaataagttagatgtgtcatattttaaaaataccttaaattgtgttttgcttaacaagttagctgtcgcatactttcaaaataccttaaatacctttatttattttagacttcacactagttgtatactatgtgtttccaggaaataaaacattttcaaacaagagaaatctgaatggtaagagaactgtatcatcgactcagggactgcattccctttcttcacctccagaggaggcatgcccatgtgccagatgcctcaaggaaggggttcaggtggtaatggtgacgtggtccttggaggacagagtagttggctcacacagaatgtgaacaagagcacagaataccctatctactaaatgtttgagtttacaaccttagaatcattaaccgtatctgtgctaaaatataaccactttgctttgaatgagtcagtcttgtcttncttaattagactgtgtacttctttaggaccatgaccatgaattctttttctagctaaatatgaggctggctgcaagtaacaggtatacgagaaaactgtatggctggta

SEQ ID NO: 509207 - DNA, 721 bp, Homo sapiens
tggagacagagctctcgcgttggtcgccaggctgggagttccgggggcggtgactcctcgggctccattgaaccttcgtgccttcgggggtcaagcgattctcctgttggcctcagcctcccaagtagcggggcctcacagagtgcttgccaccacgccaggctaattttggtttttcagcagcagagggggtcccactcagtgtgggccaggagttggctggatctctggacctggtgatctacctgcttgggcctcccaaaggtgcggggtttaccgggcgtgacgccatgggcccagccattttggatttttcgacgagacgggcggtctcatggtgttcgcccacggctgataaaagttcctatacaggtatgtaatcctaagggtatctactctaaccccctgtaattgtgggtgactccctcaggtaacttaactaactgcggcatccattacatcaattctgcttcgaactggcaacaaaaaacaaacacaaaaaaaaaaaaatggtgcgggggccgcgaccgagaaaagtttttacaacccaaccggtggggggcgggcgcccagtggtgatgtaacagctgccaggggtcccgagaaaatcgcctcgaaatcgggttgggtttccccaaaaaaagcgcggcgacgagtcttggcacaccacgggctggggaccagggtacaacggacaggactatcgccgcgcagggagtgt

SEQ ID NO: 509208 - DNA, 721 bp, Homo sapiens
  misc_feature (49)..(49): n is a, c, g, or t
  misc_feature (65)..(65): n is a, c, g, or t
  misc_feature (87)..(87): n is a, c, g, or t
  misc_feature (90)..(90): n is a, c, g, or t
  misc_feature (92)..(92): n is a, c, g, or t
  misc_feature (112)..(112): n is a, c, g, or t
  misc_feature (125)..(125): n is a, c, g, or t
  misc_feature (130)..(130): n is a, c, g, or t
  misc_feature (138)..(138): n is a, c, g, or t
  misc_feature (143)..(143): n is a, c, g, or t
  misc_feature (161)..(161): n is a, c, g, or t
  misc_feature (168)..(168): n is a, c, g, or t
  misc_feature (305)..(305): n is a, c, g, or t
  misc_feature (389)..(389): n is a, c, g, or t
  misc_feature (393)..(393): n is a, c, g, or t
  misc_feature (435)..(435): n is a, c, g, or t
  misc_feature (465)..(465): n is a, c, g, or t
  misc_feature (542)..(542): n is a, c, g, or t
  misc_feature (550)..(550): n is a, c, g, or t
  misc_feature (554)..(554): n is a, c, g, or t
  misc_feature (624)..(624): n is a, c, g, or t
  misc_feature (697)..(697): n is a, c, g, or t
tggggggggcgggcgggccgccaaggccgcaggggcaagcgcgccacanggcgtggagcgccganggcgcgagggcgcgcgacgcgnggngngaggtcgctctttacttgcntgaaaaccttcangccantcttcacnttcantgtacattaatccttgcntggtcangccaggatttttggcggggggacttggcttcatagaaaagttcactgatctcttcgacatgctctttctcaatgctgtccttcccgttgattttagcaagcaagttggccggggtcagctgctgctctgagtacctnagtgtggtcttggtgccaatctcccccaggtggttcagtgcctcctcactgatgttgattccttccgtctgggcacggtttttnttgntctgtttcatttcctgtggggtatacagcatggtccggtttntcatcactcggtccagaaggtcaagagggntgccgtgaggggatgtgatgtcctcagtgcctctgatgacacagttgcctcggttggttgctaagatgacgttgggngcgtttgnagantccagggcgcggtgcaggtaggtgaagcactcaatgtccagcatgtggacctcatcaacaaacagcacanccgggaccagctcagcaatgccctggtcgatgtacttgttcaccaccttattaatctcccctcgaagtttgtntgtgatttctgtcttctttggctt

SEQ ID NO: 509209 - DNA, 816 bp, Homo sapiens
ctttgtgacttgaagaaccctgactttgtttctgcaaaggcacctgcatgtgtctgtggtcatggtggacatgggggtggggtaggaaaaaccaaaaacgaaacagtgacagccaagatgaccagcgcagcgcactataagaagagagaagaaacgaaaacagacaacaagcgacacacaaaagaacgcgagccacatccgctacacaaaaggcgaaggagcattttttcaacatcaacagaaacacgcggacaaagaaaggcgacgaaagaggaaaagagagagaaataggaaacaaaaagagcagacaaacaaaaagcaacacgtacagaaacaaaaaaagaaaacagaagacatcgcaaccaagcaggcacacaacgaaacacacagcgcaacaagacaccacacaaccgataaagataaccaaaggcagtgcacacaacactacaataatatcatcatcaaaaacacaaaaaacacaaaaaaaacaaaaacaaaacacaaaaaaaagaaaacaaaaaaataaacaacaaaacaaccacaataaaacaaacacaatataaaaaaaaaaacacacaaaacaaaaaaacaaacacaggcaaagacaacagcgcagacaaaatctcaacaaaacactataagtaccaacgacaaaagaaatcacgccagccccaccccacaaaactaaacaaatctaaccaactaaatacaaaattactaaaaacaaaaaacaaattcagaccaacttctactactcccataactacaaaatctcacaaacaatcaacacaaataatcaaacaacagcaaatacac

SEQ ID NO: 509210 - DNA, 197 bp, Homo sapiens
tgtttactcttagaatgtctgaaaacgcctggacctctttaaactgtgagagttaccaaaccatgacatgactagccgagaagagatgtcttcaagcatcctgccccaagcattacctaccttggactggcatataacccgagacggaccagagtaaggactctgagttcagactgccgaaggatggactggttgac

SEQ ID NO: 509211 - DNA, 211 bp, Homo sapiens
tgaaagcctgagttatcgtgctataagcttttcatggaccacttccttgccagaaactgatttataactcatttagagaatgtcctggcgtcggtttttagcatctgtcgtatttaaacagagctagaatctgatgtctgaagttaatgctgcatttctgggtctcttatgtggatcagaaagtaaagtgtgccttctgatgtgaaaccga

SEQ ID NO: 509212 - DNA, 801 bp, Homo sapiens
ggtttctctgtgatgcttttttcgtcctccttttgatgggttgcactgtttttcccgcttctttcccgtgtgttgtttcacggtgcgcgtttttcgcatgcttatggttagcatggtcttggggtgacgcttggggtttaattgtttgattgggtgggcttttgcctctacatgggcctttttgcttttgggcgccattgctttattagcccctcgtttgtgatcaattcctttgtcttcggctgataaccttttatggtactccgtttacaatggtaatcttccatcccctattactcaccacccctggatggacttttcaatggtcggtagcactaacagtgagttctggatgccactcaaggatctctgtttgtatcgtcttcaggggctcaactcttcattttcattatgtttgtgtttttatcggtgtatcttattttcctcttgagactgggtctcgctttgttgcccaggctggagtggagtggcgtgatcattggcatgtactgtcagcctttgcctaccccgagcatcgagcagtcctgacctcagcctccggagatagctcggcggaccacaggttgcatgccagacccatggcccagtccaacgctttgcatgatattttgtagagatggggtatcacagtgttgcccaggctggtcatcaaactcctgggctcaggcagagtccaccatgtctcagcctccacagagtgctgggacttacaaattgtgagccacacgtccagctgaaagggtcaacatctttaacattcagcaagacatctgcatttta

SEQ ID NO: 509213 - DNA, 264 bp, Homo sapiens
  misc_feature (59)..(59): n is a, c, g, or t
  misc_feature (69)..(69): n is a, c, g, or t
  misc_feature (102)..(102): n is a, c, g, or t
  misc_feature (105)..(105): n is a, c, g, or t
  misc_feature (110)..(110): n is a, c, g, or t
  misc_feature (244)..(244): n is a, c, g, or t
atgagcgctcttcccacgctgagctgtgcgtccctccccaatcatctttcgtgttccanagaggtgggnctgaggtgtctccatctctgcctcaagttcgtngtncagtnagctgtaagttcttccttcccgattaaaattagaaccggagtataaattggactttctcaaattctgtgccatgataggttgatgagttaattagaggagaagattcctaaaatttcagagacgggatgagtgnaacacatgacaacgttccag

SEQ ID NO: 509214 - DNA, 455 bp, Homo sapiens
ctgtagaccacgacatctgatgtaagctggcacgacggtacttacatatgaaattctaaggggagccaagttggcctgtcaacataaatttgtgagtcattcacatatggtagttgaaatcatggtcctaggaaattgctcatgaaaggaatatagtgcccaaagcaggtctactcttattccttaagaaatctgatcatttaatcagccaggtcagcagaaagatgcagcacagaacacagcaaaacagcaacatgagcagcctgagagcaggaggaaagcaaggggcagtgtggttccccagaagctggggtgagagtgtttcaacataggcatggcaatagtgcccaagtgctgccgcagcacatctgcaaaacaggaggcctggggaaacacccatagggatttagcaacaatgggggtcttggtgagcctactattaaaatatcctccaa

SEQ ID NO: 509215 - DNA, 674 bp, Homo sapiens
aaaaaatacaaaaattagccaggcatggtggcatgcacctgtagtccccagctactcgggaggctgaggtgggaggatcgcttaagcccagaaggttgagaggttgaagctgcagtgagctgtgatggcaccactgcactctagcctgggtgacagagtaagaccttgtctcaatcaatcaatcaatcaatgaaacaattagtgaaatgcctgacttcattgtaactctccctcactcaccttctggaatcttcaaagtcactaaattcaagtccaaattcttgaaattgaccttgccatctgtattagcattctctagaggggcagaactaatggaatatatatatatatatgagtttattaaatgttaactcacatgatcacaaggtccacaataggtcatctgcaggctgaggagtaaggagagccagtccgagtccccagactgaagaacttggagtctgatgttcagggacaggaagcatccagcagggagaaagatgtgggctgagaggctaggccagtctaaccttttcacgtttttctgcctgcattatattcgctggcagctgattagatggtgcccatccagattaagggtgggtctgccttccgcagcccattgactcaaatgttaatctcctttggcaacaccctcacagacatacccagga

SEQ ID NO: 509216 - DNA, 248 bp, Homo sapiens
atcacctgcaggcctgcactcttgagcactgcctctgtattgaaatcgtctggactaggtgaatgctcagtggaccttaaatcatgggacctaccagattgacctgccagaggcaagactgaccagcccttctgggccccaggacaagccagacactgagtgacaccaaaggctttgtaacaatgtcttgagggtctgctgccccagcctgacagcagagaaccgccctccccaaacacccacagcca

SEQ ID NO: 509217 - DNA, 397 bp, Homo sapiens
gtggatacggtgtcgatagccccttgaagcatcgtataattgtgtgtatttgattcttctctcttttctcctttattagtcttgctagtggtctatcaatttggctgatcttttcaaaaacccagctcctggattcattgattatttttgagacttttttaaattgaagatggattttttgttggagactcttttggattgacgaccattgttttccgttgtaattcttgggggagagagagatttgaggaacagtttcaattccatgtgttcaacaggaacatttctggggccagctcacagaatgcctgtgtaacagagcctcctctggtgtgggaggcccagaacggagcccactgtgggctctgtgtcagctcatgcacaatttgtcgagatt

SEQ ID NO: 509218 - DNA, 535 bp, Homo sapiens
aaataagcaaatcaaagaagatataagaaaactgataaaatagttcaaaaattataaaaagtggagataggagaaaaattgcacacagaaattgatatcacagagcaaaaggaaaaagaaattggatgtaagagtggtggctgaatgtagcctatctggatgttcgtataccatcacaattgaatgtcaactttgcgggtcctgcagctcattttgaacactactggactccaaaggaagggactcaattagaaagaggaagtataactctttggcataacttgaactactggcagctattaagaaaagaaaaagtgcctgttcataaagttggaaatactcctctagatatgaatcaattccgaatgctattttctacctgcaaggttccaggaattactagagactccattatgaattattttaggactgagagtgaagggcgttccccaaaccacattgtagtgctgtgtcgaggccgagcttttgtctttgatgtcatacatgaaggatgtttggtcaccccgccagagct

SEQ ID NO: 509219 - DNA, 912 bp, Homo sapiens
acatgatgtatttctgccagatgctggtagttgtgaaaactatcaatgcagccattggagtctctacgtcaccggtgctgccttctctgatccagctttcttgagaagcaaattttattttggttttatccatctttgagcatccatggcacagaacctgcgtgaacaagagctgtgcgtccctgtttgtgttatatttcgtgggagtagcaggttgaaatttagcagtcgtactctttctacaatgctgacggtgcaattgacatggattggcaaggtgctcactatggctatcgttggactctgtggcattcccttatatcccactggcgtatgtattggtggaagcttgtctcatgtagagttctagtccatataccaatattacaatgaggaccgggaagattcaattttcacattgccagtatccagtgaaagagtccaagttggacttttccctcttgtttgcttggagactttagtcgtaataagtgactaattctctttaggtttatacactaaaattttcgttcatcctttattaaaccagtcgcagtacggccgctattggacaaacatgacagaaaaagatccactaagaagaaagattcaagatggctttcttgccagtttgagcgctaatctgattcttacagtattaccttcttgaaccgaattgtgaaaaagttcagtacaagtgttacaagtgattaaatgctcagtgaggctatcttcctttttccccagtaacaattccttgaattactgtgatcttatagtaggtacttgcatgacatggattcctggatatctgaattgagaaggtcgatctggggtacttccgtaatgaacaccaaaaggttcggcccacccaaccctatctcaaggttcagggttggtctacagagctgc

SEQ ID NO: 509220 - DNA, 261 bp, Homo sapiens
gccacctctgaccgagtaatcacacactctgagcgagtacccaccatactgaccgagttcccaactactgaccgagttctcacctctgaacgagttacccacactctgaccgagtactcacctctgaactgagttccccccgaatccggagtgacggagatgggcgcctgagatggagtacagagcggtaacgcgacctgatcccggaaaagccagtgagacgcacggggaagaagtactctttccttagtgaagggcagg

SEQ ID NO: 509221 - DNA, 172 bp, Homo sapiens
agcactgtgagcacacagcaaaccttgagagccataaactgttaagcaggtcttactctagtactctcagaatggaagaattatatggactgaaaaatcacaaattgctcagcaaggtcctactccagtgccccctagtcatccaaaaactgagcttttcaaggagggcaca

SEQ ID NO: 509222 - DNA, 148 bp, Homo sapiens
agttgacccagagacactttgcagaaggctacagactgatgaattccagcttcacactaatgtgaatgacgggacagagttcggcggctccatttaccagagagtgaacaagaagttaggagaccgctagtcaatctatgcctggcac

SEQ ID NO: 509223 - DNA, 726 bp, Homo sapiens
  misc_feature (26)..(26): n is a, c, g, or t
  misc_feature (74)..(74): n is a, c, g, or t
  misc_feature (123)..(123): n is a, c, g, or t
  misc_feature (245)..(245): n is a, c, g, or t
  misc_feature (322)..(322): n is a, c, g, or t
  misc_feature (340)..(340): n is a, c, g, or t
  misc_feature (380)..(380): n is a, c, g, or t
  misc_feature (399)..(399): n is a, c, g, or t
  misc_feature (404)..(404): n is a, c, g, or t
  misc_feature (406)..(406): n is a, c, g, or t
  misc_feature (414)..(414): n is a, c, g, or t
  misc_feature (426)..(426): n is a, c, g, or t
  misc_feature (442)..(442): n is a, c, g, or t
  misc_feature (447)..(447): n is a, c, g, or t
  misc_feature (449)..(449): n is a, c, g, or t
  misc_feature (470)..(470): n is a, c, g, or t
  misc_feature (481)..(481): n is a, c, g, or t
  misc_feature (496)..(497): n is a, c, g, or t
  misc_feature (503)..(503): n is a, c, g, or t
  misc_feature (507)..(509): n is a, c, g, or t
  misc_feature (513)..(513): n is a, c, g, or t
  misc_feature (525)..(525): n is a, c, g, or t
  misc_feature (532)..(532): n is a, c, g, or t
  misc_feature (547)..(547): n is a, c, g, or t
  misc_feature (550)..(550): n is a, c, g, or t
  misc_feature (556)..(556): n is a, c, g, or t
  misc_feature (565)..(565): n is a, c, g, or t
  misc_feature (579)..(579): n is a, c, g, or t
  misc_feature (583)..(584): n is a, c, g, or t
  misc_feature (586)..(588): n is a, c, g, or t
  misc_feature (594)..(594): n is a, c, g, or t
  misc_feature (598)..(598): n is a, c, g, or t
  misc_feature (611)..(611): n is a, c, g, or t
  misc_feature (614)..(614): n is a, c, g, or t
  misc_feature (622)..(622): n is a, c, g, or t
  misc_feature (625)..(625): n is a, c, g, or t
  misc_feature (633)..(634): n is a, c, g, or t
  misc_feature (696)..(696): n is a, c, g, or t
cctgaaacagaatcgcagattgccancccttttcccgacccctacggaaagacgaatccaggggccgtcctggngaggtcaaaacatttagtctggtcttttcagcgtggaccctgccagcanccaggccatggagctctctgatgtcaccctcattgagggtgtgggtaatgaggtgatggtggtggcaagtgtggtggtgctgattctagccttggtcctagcttagctctctacctacgtancagacagcggtacaaccagctcctgggcgctattgtgtcagcaggcgacaacatccgtcctccacctggggcatgtngaccacctggtggcaggncaaggcaaccccgagccaactgaactcccccatccatcanagggtaatgatgagaaggntgaanangcgaggtnaaggtcgggganactccacattgggtangcttnanctgggggctggtgttgagccnagccgttgagnagtgtcgttgacatnnaaaggngtgnnnaaanacaaagaaggtngaaggangaagaagtacaaaangcncccctnaaaatcttnaggataagacctgnctanntnnnaagccntggnctcatcactgtgnggntcaaattngtnaatgatanngaggagctggctgtggctaggccagaagataccgtgggtgccctgaagagcaaatacttccntggacaagaaagcgagatgaaactgatcta

SEQ ID NO: 509224 - DNA, 1482 bp, Homo sapiens
  misc_feature (1131)..(1131): n is a, c, g, or t
  misc_feature (1482)..(1482): n is a, c, g, or t
tcggatcccgggcaacatgatggtcgctggagcagaagtgcgcatgagcatatgtggaccactggctgtgcgctgtggtacgtgctgacgccagctagcagggctgaaacgtagacggccagaaccaaggtctcagcggcggcactaaacggcggtcggagcgctaatcccacacatccgactgtcctccctggcacacgtcatggcctggccggtgatgcgtcccggtactccaaggcacggtgttggttctgctctcatgggccctggacaggggaactccatagatgatcatcggggagacccatccccaggcgtagacctgccgacgcctgcacactccccacctgtctcgcaacccaacctagtgcacactgggcgaaagctacccgggcggattcccgcaaacacgccatatgcacacccctgggccaggcggcacccctaccgctggccacaacactagcctcctcgtacgacaacagctacccacccttcccacactcgcacccccatattgccgcccccggctccccggctcccatactcagccccgcgcgccagccgctcgcacagtcgcaacaaaccctacgcaaccatacgcctcccacccccagccacggcgctacaacaccaccgggagacggagaagacaggacactccaccattataacccggcacaccgcctacgcccccagccgccgccatcacaccacgcccttgggctacgcccgcaatgaccacccgacgccacactggaggacctggcggcccgcccttgcacccccctgcacctcgtccattatcgctcggagcgcacagcccgctgcgcgcaacactcgtaaccgcctgtacccgcagacgccccgccgttcccccccgtaacgctgccacccgtgtgcggcacccccctctcgggcctaacaacgacggccccggcaccctttgcaaccgctcggtaggttgcccccctggcatggcccacacctctgtgcgcatggaaagtagtccccgcccgatagcgccgtggtcacctaccacccctattggcaataggcgtatccccgctattggtgcaacacacactaaagcctcccaccaccggggcgcgatattggcatgactacaanaaacctcatcgtctcctcccaaccacaccagtctccaacaccaccctgagtcactacacgtccggcagctgctatcctgggatcacccatctggacaacgtcacaacctcctactcacccaccccttatagtcgcccgcccttatggtagcccctccctactactctagatggtcaccactactatcctcctacacatatgtgacacacgtcgactgcgacatcatagtcgccacactatacacttatccacaacaactcactacacactcacagactgcaactcttcctccacgacaacatgatgctgtacttcccccaccactgtactaacctccatcaccaacatatn

SEQ ID NO: 509225 - DNA, 385 bp, Homo sapiens
ttctcggcgtgatcgtcgttcaaggcatcacccgtccgctcgcacatctcgtctccgttcttcaacgcatggcgcagggcgaaatcgattcggagatcaaagaggccgttcgcggtgacgaaatcggctcggtcggccgggcggtcgaaggtatcaaggccatggtggcacgcaaggccgccgaagaggcagaggtcaagcgtcgggccgatgccgctgctgcggcggagcgtcggcgcacgatggtcgaactcgcggatggcttcgagcgtgccgtgggtggcatcgtcgggaccgtttcgtcatcggccactgagctgcaagccaccgccagcacaatgaccgttaccgcgaccgagacggccagccaatccacgacggtggc

SEQ ID NO: 509226 - DNA, 334 bp, Homo sapiens
  misc_feature (22)..(22): n is a, c, g, or t
  misc_feature (47)..(47): n is a, c, g, or t
  misc_feature (179)..(179): n is a, c, g, or t
ttaaagatcaattcaaaatccngatgaaagaaacggttgaagaacangcaagcactacagaaagagtatttcaaggacagacagtacccaaattgatgctgcgatcgttcgaattatgaagatgagaaaaacacttagccacaatcttcttgtttcagaagtctacaatcagcttaaantttccagttaaacctgctgatcttaagaagagaatagaatccctcattgaccgggactacatggaaagagataaagaaaatccaaatcagtacaactatattgcatagaatgttggccttggaacttgtcataatgctgtagccattggataaac

SEQ ID NO: 509227 - DNA, 896 bp, Homo sapiens
caattgaagttctgccttatgtcgatgaaaaatgtgtttgcccctcaaatggggcatgtttgttttatgccctgagccgatctggagagataatggcgcggctcccccgctataaagcggcctggagaagtttgccccccgagcggtggagtgtcataaccgcaagcgccccacatgaaattcgtggttgcacactacagtcccccatggagagcttcactgctatctgtggggtattgaacattctctgccccgcgttaagtcggcaaaactgtgcacccgtcctcgggctagcgcaagcaatttgtctcctcacaacgaaatgtttttttagatatacggcggccgcacctttgccggacacaagggccgccccactctcctcattggcgcgacatttgttcagcacacaagtaccgggctgtgcgccccctctactgagaaccccgatgctgattactaggagaaaacaagaatactccaccttctgtgaccgtctcccgtttgtgtgagcttgtctcgcacgagtattcgtgcgaaagtaagttctgttgcttctccaaaccagaactctcgttcttgcgagcctactctgagcgcgttctatgagtttttctggggaccaattggccacattgtcattggtgtttcgcatactgtcttaatgtcgctttaaagagcccgtgatgctctaaaatacgcttattgataacatgtaccccctcttctgtcgtagggagaggatcctctcgttggagaacaaaaattaaggaaaactgggtagtttcttccgagggtcaccaactgtcgtcaacagtagactgcccggggggatcactaccctgggccctcggggaaggacacaaaaaatacaatccaaggcttttaacatacaa

SEQ ID NO: 509228 - DNA, 188 bp, Homo sapiens
  misc_feature (167)..(167): n is a, c, g, or t
aggtcatttatgcaatattcgccattttcttcgggctagtcccagttagatggcatccagtcctccatcaagattcgttgtctataattacctctctgtggtttagggcagaagggaattgctcaaagtaaacaatggccgagggactaacttgtttagcagttagnagttagctaaagcctgtttat

SEQ ID NO: 509229 - DNA, 319 bp, Homo sapiens
cgcttggtttatcagctgatttactgatatcgaagtcctttgttgtcatttcaacgatgtcacagcatctttgccagcagtagatttcatctcaagaaaccactttctgtatccacccatatgaagcaaatcctcatctgttcaagtttaatcatgagactgcagcaattcagtcagatcttcaggctccaccacttctagttatctagctatttctaccacatttgtagttacttcctccactgaagtcttgaagtcaaatcaagactcagttatctgtgaaggttggaatcaatttcttccaaactcctaggatgtc

SEQ ID NO: 509230 - DNA, 766 bp, Homo sapiens
  misc_feature (16)..(16): n is a, c, g, or t
aatgatacatgagaangacactaccattattacgccaagcttggcactaagcattgatcataggagaacagacaaacaggaactgcactctcgggaagccgccgttctacaactatcggatcccacgggctgcatgaatgacgtacaacgttgcaaggacatcatggacttgaagcaagagctacacaactcggtcgccatcccagaaaaggaaaataccaaactgcagaagcagagagaggatgagctaatccagaagatccacaaactggtgcagaagagagacttcctggtggacgatgcggaggtcaagcggataacggagcaagatgaagacaaggaaatggctgatttcctgagaatcaagttaaaacctctagacaaagtaaccaaatcttcagccagcttcctggcagaaaataaagcagagcccccacctagcaagcccactgaggccaatacagggctggcactgatcaatgattgttgctgggccacccactgcaacatcatgtagcccccacgtggggtgccctgggccattggggaatccccccaccctatcggcttattagtccccatttcacctggccccaaaaatcttttcagggtcaaacggggtataatgcttatccttttacatgttacacataagccttgtgcaaccttaggaagacccctggtcctccttttaaacattattatcactatggagacttcttcacccctttcatttgtcactccccctaactttgtctaactccaa

SEQ ID NO: 509231 - DNA, 584 bp, Homo sapiens
taaccccctctttagtttattgcgctcaaaaaccaatttaaaccccccccccatgtaacgggggggtggtgccaaaaccagaaaactgccgtgatggccagcctggtagtccacctgatggttcctgtgcccccggccagttttgtccgcccgtgtgtgggatgttgggtgttttttaatgtctgtgctccctagtagtgtggcgtggcgttgaggcatgcgacgggggtgagacgacttcctgtggggggcgcattgtgggccagctgtgaccccctcgtggtgatgagcttcacgagggggattgtggaataagcggccgctgtgacccggccggagtgttccggggaaaccgtcgggctggttcccaccaaagaagtcatgggaagggcaagagggaggagggtgatgaggcgaaggggaactacccaaagggttgctcaggagagggctgctcccaatgggcacaacagaaacaggggcgcgaccggggctgagcacatgacggaatgacacagaaacgtcgcaaggcggcaccgcagcggtttgctaccacggaggttcgcacaaagatgggacagagg

SEQ ID NO: 509232 - DNA, 508 bp, Homo sapiens
  misc_feature (278)..(278): n is a, c, g, or t
  misc_feature (296)..(296): n is a, c, g, or t
  misc_feature (399)..(399): n is a, c, g, or t
  misc_feature (422)..(422): n is a, c, g, or t
  misc_feature (425)..(425): n is a, c, g, or t
  misc_feature (446)..(446): n is a, c, g, or t
  misc_feature (456)..(456): n is a, c, g, or t
  misc_feature (459)..(460): n is a, c, g, or t
  misc_feature (470)..(470): n is a, c, g, or t
  misc_feature (490)..(490): n is a, c, g, or t
agcgcatgcccagagccctccgaaggccgggccgcgccgcttgggagcctgtccgacatgaatccgtccgttccgaagttcgccgtcgtcgtgcagccaagtcccatcgacgggatgggcgtgttcgcagcggagccgatccccgcgtacaagaagatcggagagttgcgtggcgagtcgatcagcgtgcgggaggcgcgtcggcgagccaagcggcagcagcgcatcatgatcgtcgaggtgtccgacaagcgggcgatcgatgcgtcgcaatcccnagacgccatgcgctacancaaccactcatgctcgccaacaccgtgctgcgcatccgcaggggccggttcgagtttacgccttgcgcccgatcgctgcggaaggaactgacggcaactacgntagaccacacgaaagcactttgnctngccgtgcggtcgccaatgcangaccttaggntgnntgatttggantggtaaccttacgggtacanttgaatctatatggatag

SEQ ID NO: 509233 - DNA, 152 bp, Homo sapiens
agttacaacagttcaacgagagcggagataaggaggctctcatgtcaagacgtccagatgtgatggttacggagaacctctggctaagcatagcgtacggcttggatgaatgaccccgagcgattcatgagacggcaagtagtctgactaat

SEQ ID NO: 509234 - DNA, 411 bp, Homo sapiens
ggatcccccgctctcagctataccagatactctgcaaggtgactactttaaccagaacatctcaaaacagacagcatgaaggaggactctgtggtccgggcgcgtgggccctggggttggaagtggctcagacgcactttacattttccccgaattcaaccttcggaagtcccattaacccctcttcagtgggataaatggccaactcattagctctggacacattaacctcccgaactgacttcctggtgactatgcctgccttatttcttttctctcctcccttacattttccgctggcacaaagccaaacacagcaccgtggggggctttcacgcttctgtgccctaggacacgctgttcctgcagcttggaaggcctctgtcctccatcggggtgggtggagagcgg

SEQ ID NO: 509235 - DNA, 381 bp, Homo sapiens
agacgtttgcagccatgacagaggtattataactaaatttcactactagattgactgactcaaatacacataggctactgaggtacgacttctgatggatttgattgggatgaatgccatctatctagttctaacagtgaagttctactgtctattaatattcagggtaaataggaatcattcagaaatgttgagtctgtactaaacagtaagatatctcaatgaaccataaattcaactttgtaaaaatcttttgaagcatagataatattgtgtggtacatgtttctttcgttgggtaaatgtttcttttaaagaccctcctattctataaaactctgcatgtagaggcttgtttacccttctctctctaaggtttaca

SEQ ID NO: 509236 - DNA, 130 bp, Homo sapiens
atactgcatttatacggatgaacacctagcaaaacgaatataaatatgctagaaaaacaaaattacaaacagaatgaaagaacttaacagaacacacagacattaagaaggactaggcagagcaatggtc

SEQ ID NO: 509237 - DNA, 80 bp, Homo sapiens
ccgcggtctaacggcagagtagacgcagtgagatccggtgacgagcgaacagtagcagttcgcagtactgtgatgtgact

SEQ ID NO: 509238 - DNA, 142 bp, Homo sapiens
cgatctagaggatccctgagagaccgtgttgcatgatccaagacgaggaaggcattctccatgaccagcagaggttgatcttatgcctggaaagcggggggaaagatgggctgcaccctgtcgtgactacaacatccagaaa

SEQ ID NO: 509239 - DNA, 169 bp, Homo sapiens
gctgaagatcctggtgtcgccatgggccgccgccccgcccgttgttaccggtattgtaagaacaagccgtacccaaaggtctcggcttctgccgagggtgttccttgatgccaaggattcggcaattttggaacttgggcgggaaaaggcaaaagttgatgaggttccc

SEQ ID NO: 509240 - DNA, 1006 bp, Homo sapiens
  misc_feature (41)..(41): n is a, c, g, or t
  misc_feature (66)..(66): n is a, c, g, or t
  misc_feature (69)..(69): n is a, c, g, or t
  misc_feature (88)..(88): n is a, c, g, or t
  misc_feature (144)..(144): n is a, c, g, or t
  misc_feature (176)..(176): n is a, c, g, or t
  misc_feature (245)..(245): n is a, c, g, or t
  misc_feature (250)..(250): n is a, c, g, or t
  misc_feature (256)..(257): n is a, c, g, or t
  misc_feature (264)..(264): n is a, c, g, or t
  misc_feature (277)..(277): n is a, c, g, or t
  misc_feature (279)..(279): n is a, c, g, or t
  misc_feature (305)..(305): n is a, c, g, or t
  misc_feature (327)..(327): n is a, c, g, or t
  misc_feature (356)..(356): n is a, c, g, or t
  misc_feature (359)..(359): n is a, c, g, or t
  misc_feature (363)..(364): n is a, c, g, or t
  misc_feature (393)..(393): n is a, c, g, or t
  misc_feature (407)..(407): n is a, c, g, or t
  misc_feature (411)..(411): n is a, c, g, or t
  misc_feature (453)..(453): n is a, c, g, or t
  misc_feature (493)..(493): n is a, c, g, or t
  misc_feature (545)..(545): n is a, c, g, or t
  misc_feature (872)..(872): n is a, c, g, or t
  misc_feature (883)..(883): n is a, c, g, or t
  misc_feature (909)..(909): n is a, c, g, or t
  misc_feature (942)..(942): n is a, c, g, or t
  misc_feature (973)..(973): n is a, c, g, or t
atgattggaagaggggagaaatatgaagaatagttgaaganggggtttttatgttagattagagtnggngtaagtggtttgtattggngggaaaatgggaggtagtggttttagtagtgtgatttgttgggaggatttataagnggggagtaagggtaaatttgagtttgattggngaaaataaagatgtaagattttgttggatgaagttgatggttaggggtgggttgtatggaggttaagantgggngggttnngggaaanggggggagataangnggggagtggggaggaggtttaaagangagggaagaggtgagtgaaganttgggagtggagtagagagagagtttganggnttgnntggttgtggtgttgagggttgtgggagangggtggtgaggggntgtntgtggaggggtggttgatgagatgatattttgaaaagaagtngatgaagaagttggggttttggtgagattgaggagtttgngagttgtatgagtttgggagggtaatgggttaaggtgaagaagtgatttgantgtgttggatgtgaggggggaggagggtgtgggagtgagggggggggagggggtggggaaaggtgtggagtgtggtgatgggggagtggtggggggggatgtggttggggaggtgggggttggtgttgaaggtggaggggtggtggtatggtggggagaggggggggtgtgtgggtggagtgtagttgtagtgtgaggggggctgtaggtggagtgggtaagtggggtgggaatgataggaggtgaggtggggagaggtgagaaaagggagaatgatgggggtgggagatggaggtggttgaaatgtgggtggtaagaatggtgagnaggggtttgtnaggtggggatgaagggtggggaggtnatagggtgagagagaggaagggttgatgtagantggggtgttgtgggttggaaaagaggtgganaaaaagtggagtggtgtagagaggtaaatgggg

SEQ ID NO: 509241 - DNA, 6083 bp, Homo sapiens
cataaatgtccctatattataggtaccaccaatcagcctgtaaaaatgacacccaaccatggcttgcacttgagcttcaggatgttgaccttctccaacaacgtggagccagccaatggcttcctggttcgttacctgaggaggaagctggtagagtcagacagcgacatcaatgccaacaaggaagagctgcttcgggtgctcgactgggtacccaagctgtggtatcatctccacaccttccttgagaagcacagcacctcagacttcctcatcggcccttgcttctttctgtcgtgtcccattggcattgaggacttccggacctggttcattgacctgtggaacaactctatcattccctatctacaggaaggagccaaggatgggataaaggtccatggacagaaagctgcttgggaggacccagtggaatgggcccgggacacacttccctggccatcagcccaacaagaccaatcaaagctgtaccacctgcccccacccaccgtgggccctcacagcattgcctcacctcccgaggataggacagtcaaagacagcaccccaagttctctggactcagatcctctgatggccatgctgctgaaacttcaagaagctgccaactacattgagtctccagatcgagaaaccatcctggaccccaaccttcaggcaacactttaagggttcggcaatcactgtcacccccggacagcagaacgctggcatcagctatcttagctcctcctctcccctctcctctttcagagcactggctctccagccccaggaggagaacaggagggaggaggagatgaaagaggagggacaggttcttggtgctgtacctttgagaacttcctaggaaggaatggtggggtggcgtttgggaacttgtgccccctaaacacatttactggcctcctctaatgactttggggaaaagatgattctgggtctttcccttgacttcttgtttcaattacaaactcctgggctttctggggaggggttcagaaaacatcaaaacactgcagcagttcctaaatgattctcacaagcaaccctgagagagacagtcttgtgagggagatctgggggaggcaggaagctcctcagattttctcacagacccttcccaattccatcaccactgccaacaactcctcccccagagatctggctggagcccagaaaaagaagcatgtggtttaaaaaatgtttaaatcaatctgtaaaaggtaaaaatgaaaaacaaaaacaagcaaacaaacaaaaaacaatggaaaagatgaagctggagagagaggaaccagttgccaaggtagagagctgcccgctcctgccctctggatgacataggggacatcaacaagacggctgccaacctgagaagtcaccaaaccacaaaaataaccttacagccttcagggaaagactaccagctctgtctttctaccctctaatttaacaatgcataagagtcaataaaccctacttttttatttttggtttttattttgttttcatttttttctcccatttgcctatttatttttttgtttcccttttttttttctttttccgtttttccatttcctcacatgtccacgagatgcttgggttgcttttccaggggctagtttggcttttccaagtgggttttctttggagaatctgatgccatgcaattggcatgacacctgccatgccactatctttggcatccatggggcttatatgagacatgaagcattggctcagaagtagagggagaagaggaacccagttcccttgacttcccttttgagagcacacgttctgctgggtagctcaattgccagcctctgtcatgagaaggtatagccccatcttgatagaagagttactccgagctttatcatggaccagaggaaaaccagaaaactgaaaacattcctctgtcttgtggccagtttggcctttcactgcactattctgatggtgcctgactgaatccaaatatcctagctggctcttactatttttcacaaatgagtattcacatataagagatgaacatccatgtgagatcatcccaatcagaatataagactcaaggagtttgacttggtggccaatacctgccttccaaagagatcctacctttgcagatttgctcctttcccattgccttgaaggtctggcaatccctgttctttcatttgacaagtacttactgagtactcactatatacaaatcattaggttaaaacagacacacacacacacacacacacacacacacacacacacacacacaagacctgggcccttaagtttacagtccagcaggaaatgttaacctccattcagctacgcccccttgttatctagaccttcgggatcatctaagaaatgtagctgaaacccaaggagccagctagaaagaagcttttgattagatgtacaatacattgggggcagaagatctgggatcaattaagatggagcctgaaggactatggaatcttgcttgtcaggaatgggcaagtctacttcctgccatttctgaaagccccgcgggaccagcttctaggctgagctgcctagtaggctgaagcttcaggactctgcaggtcaaggatatgtgatgagcaccggcctaagtgtttgctcttcagattcctaagtagcacaagactttatcagaatctataggcataccaacctggatcactcttccacccaaccgaggagtagatgcatctgaatcttcatatcggtatattaagtccaaaagatggtccgggctgcccctcacaaaagcttctgcatccacgtggtaagctcccatggatgacagggttctgtatgatggagactattattgctattgctgctaattccatgagctgtgaagatccctaaccaactcagctgtaacatatgcaattctgtggtgggaagaggctgtgtgtccaaggatggtgctgaaatcactgccttaaggtctctgctgtgcagaatgaggaggcccccgagctggctgttctaacttagaaggaagagaagactggatgggcctgcttgggatctaggcctcttctaaaccctatcctaagctccagttccatggcaaggctcagacttttaatgccatcttaatctgatggttgagcgcttcactctattttctggtgctgcccagccagtgccttctgccatggatgttactggctacttgagaaaaaggagaggggagaaccccttctttcattccaactgcctccgaccccaaagggattcttggctctctggtaaccatggataccaccatgaattttatttggatcctcagcaggttgattctggaggcctcatgctatgactttttatttctcttcctgggatccaccaccctctactctcagctgactgctgcatttaggccaggtctccaattgctttcctccagaaagtgtgttcccgtctagtgaggtagtattgaagcctcggctttccctctggagcctgggaccctgtttacagttgcacatctgggcccctcactgtggggattgatcattctcatgaaggaatcacagttatatggcaactgcagaaggctgagcctcctcatggtgctataaccccttgggacactcatccagacttctctgaagcagaaaacctgagctccccactcactgccctagaatttatggcaaggagcaaatctacagcattctctcccacctacgtcctgcttcttggttgagactactgggatccttcagaaaagaaacactgggtcccatagctaaattctcaaccgccaggcaccttcagaagaatccagcctaatactggaatttgtgctattatcttcctctccagccccccaactccatccctcaccacagttgtctaggaaatgacatgaattcaatatctaatgtcaaccaatggggagagccacaactccaggagaggttcctgagctgagtcccttaatttctggatgaagaagaccaacaagttttgtccaatgtatttgtttctcagaccttgcctaggcactaaaaataaaatactaggtcattggaggctaatgtgggacctgatgtctgcgtgtgtgtgtgtgtgtgtgtgtgtgtgtgtctccctctctcacacacacaagagcagtttgctgttgctgtttcctaccttctgaggcttcaaagtattttttaaaatctatgctttgtggcagctctacggtgcttatctctgtctttgtgtcaatccttaagtacccatgtctttttcatgtctaaccattgggaaggtagaggctggcagggaagacaaatctgctacaagtccatgggaagaccctacaatgaaatgttcattggttggtatactgttttagtcttgaattgccaactttccaactgatctatccatattccttaagtactaaagacaaaatagagggcttctttttctctcttaatgtcttgccttctggttttcctggtttgcaagactaagtgtacctaatctcaccatctcttcacttctagctctctgaaacaagggtcacactactcagagggataaccccttacagtggtctgaggagtaactatttcctaaagtattctaaaagagtaggaagagagaaatggtagcctgctgcttctcacagacacctcacatcctcacttgggatggcatccacatagaaaccctgcatttaggtaaaatttgcctgactgaaggggactcagtcctccaaatcaaggtcaagaagatatctgcatgagaccttaagaactctttattgccattatttggagagggcgggggaattatcctaatcacacatttaacacagggaataagtgctgaagtgacccagatcaccaagcgcagttcctcatcatactttatttttgctttccttattccttggcactgactaagctaaagttaagaagccgacttcataagccaacccctgtgatgggatggaaaaatgggcttttgcagagggtttattaatagagatggatatactactcacaagttctggctcatggctccactgagaaggccatagtaataaaatgatcttatgaacactgttccccaaaggccaaagcctgaagatattgccccttataatccaatcagccttatattttaataagtcctgaatcaacctgactacggatatatggggccaccagggtgcatgggtgcatgtctgctcagcctagccctggaagtgagcactgccggccacagatcctgggaaaggtggtagtaacccagaagatgtagccttgaagggaggatacctatcaaaatgccaaagctgcagggacacgaagacggttgaaaattcaacctatgtatactagatccttccagtttgatggtttggtcattcttcttcatgattataccatggagaattttctgtgacaagggtggtcatggaagtaagtgagtgatcccctggtttctcattccttaaagcagtggttcgcaaagtatggcacaagaccagcagcatcagcagcctttgggaacttgttagaaacgaaaattctcaatcccatcccagatctgctgaatcagaaactctaatgagaggacccggcaatccacgttttaataagccctcctggtgattctgatgcacactaaattcaactgttttaaagggaaagccctttatagtattggagttcccacactgagaggctttggggcccaaaataagaaggttctaggttgtcattcagactttaacattaatttcaaagtcacctttctcatgcttccttgtgtttctgtttttccatttatgattttaacaaagaaaggtatgtgtgcttttgggtggaagttaggagaatgtttgtgtctttcctagttgaatacaaccttcagagaaaaaccttatgccttggaaattactacctggcacacaaaggggcttcaacaaggaaaagcagttggaggtctcttccagattgctcttctgccgaattatttgtatctattccgagctgattatgtaataggatggaaaaagt

SEQ ID NO: 509242 - DNA, 210 bp, Homo sapiens
  misc_feature (28)..(28): n is a, c, g, or t
  misc_feature (59)..(59): n is a, c, g, or t
  misc_feature (95)..(95): n is a, c, g, or t
ggacatcattcacactactccccatatntaacaacgtaaaatacaatgaagaggcaagnccatcccaaaatactgcttttactaaagcagaatanaagcgaaagagaaatgaaaatgttacactacattaatccgtggaataaagagaagccgaatataaatgacgagatgagatggggatcaaggtggatggagtgtggctgcgcgtgc

SEQ ID NO: 509243 - DNA, 972 bp, Homo sapiens
caacaatgctgcgtgaccatccgtgggtgcactcataggctcgtctggtgctagcctgtcatacatcatgtgtgtggcaatgaatcgcatccctggcggtatgtgtgatacttggaggctatggcaccacttcaacagctggtggaaaacccatggaaattactggcacacatacggaaatcaatctatggataatgcaattgatcatgattcgagaagctaatagggattattatgtacagccaggctatggtctctgtgcagacaaagctcaataccccatgctgattaggtaaatgatgctcacttgaagtcaaggctaaaaaagtcaggttggaaattcaccctagttgtcgggccgtaatgcctggtcagcttagtgtgtcgtgctggctgaggctggggtgccagtatgacatctgtgtatgggcaatggatgagatcatccatgattttccagatacggattatggtcctctggtacttgggagctcaggtgactctgtataattcagcagctcaagaagatcccaactctattatagcaggcatgccagtccttgaggtctggaaatcaaagctggtgattgtttatgaagaggtcttgggtgtggggtatgctgcggtgtgcaatgcaatcttctagagaacctagcacggcatgcttctaggtgatgccgagaaaacatgtgacgcgctcaggcgaaagttagagaatctatcagaagtaaatattaggattcagcgtggtagttaataatgcacctctggcggtcgggaccggggatccaggatccgtacccgggggggccccggggcaagctcggggaaacggcacttggaagcccgcgcaccggtagcgagtttcaagggggccccctttgaaaggggaaccacagggccggggatggggagcacaactttcagggaggccctcatgggcgcttccccccacaagcgagagggtggtgc

SEQ ID NO: 509244 - DNA, 399 bp, Homo sapiens
  misc_feature (65)..(66): n is a, c, g, or t
  misc_feature (290)..(290): n is a, c, g, or t
gaggggacgtatcgttggcaggttggagccgctgccgtcgccatgacccgcgttaaccagtgtgnnctggcccgccagaggatttgagcacgcagcgcgtctcttttaagggacagcgcctttataacacactttctgttgccggccgcaagcagatctacacgcttattttgcagtaccagcataatacgccaacggatttatcggggttcccaagttttctccttgtttggcgttctatccccttgccctccgccttcgcacctggtcccaaaatgatcaatggttgnggtcaaatctccagtaccccccccctttaacggtcttccatttcacttcattccactcttcacatccgccccccgcctctcctccgggctccttcccttttttcccccg

SEQ ID NO: 509245 - DNA, 489 bp, Homo sapiens
  misc_feature (355)..(355): n is a, c, g, or t
ttacttgctcgagcgccatggtgtacgggatcggctagccgggggaagtccgaagtagggaaatttatttccaacaacccagttaggggtttctttttcccacaggggggaatcttccccctggggttttaaagctttaaaaaaataaaaatttgtttaggggttggcccccaggggggtaaaattgggggttttttaataattttcccccggggaggggggaaaaaaaaaagggggcttttttttttttttcccactgtttgaaaaaaaaaaaaaaaccccgcggaataaaaaattttttttttttttgggaagggaaaaagaaaaatttttttttgttgggggggcaaacaantattttattaattattccgccgccgggtggggggtattccccccccccccccccgcgcgggggggtttttttaatttaaaaaaaaaaattttttttttttcttttcctttattttttttttggggggggggaaa

SEQ ID NO: 509246 - DNA, 105 bp, Homo sapiens
tagtaatgaaggaactggtagtgccgatgcaattgatggttatgaagctgatgatgctgagggtggtgatgggactgatccaggtacagaaccagaagacagtat

SEQ ID NO: 509247 - DNA, 199 bp, Homo sapiens
cagtatcaactgctttcaattcatcagcattctgcagtagtcatccattgtccagtgtatctggacatattcatataggatcctgaatgtacctgtgccacaccgtgggagttagaccaaaaaatgtatctaagcaacttacacaatacagtaataacaaacaatatgtttgattctgcaactttataaggaaagtatg

SEQ ID NO: 509248 - DNA, 208 bp, Homo sapiens
gccccaaaatggggttggggggggcccctttaggggtttcccttcccccttagggggggaagggggggcttccctttcccccaaaatgggggggctttcccccccccccctcccgccccccgggggggggggggggggtattttttggggggcggggggggccctttgggggggggggaaaaaaaagacaaaggggggggccccccca

SEQ ID NO: 509249 - DNA, 480 bp, Homo sapiens
  misc_feature (395)..(395): n is a, c, g, or t
acctctggtagaattcggctgtgaatgcatctggtcctcgacttgttttggttggtaagctattaattattgcctcaatttcagagcctgctattggtctattcagagattcaacttcttcctggtttggtcttgggagggtgtatgtgtcgaggaatttgtccgtttcttctagattttctagtttatttgcgtagaggtgtttatagtattctctgatggcagtttgtatttctgtgggattggtggtgatgtcccctttatcattttttattgtgtctatttgattcttctctcttttcttcattagtcttgctagcggtctatcaattttgttgatcttttcaaaacaccagctcctggattcacagattttttgaagggtttttttgtgntctctatctccttcagttctggctctgatcttaaataactaagatcagataaatggtatcttaacacaggggtccccaacccctg

SEQ ID NO: 509250 - DNA, 127 bp, Homo sapiens
atcattgtgttactttcatgtatgtaaaccactgtaggatgactaacacgttaccaatatgtagttttggccagtgcgccaatggctcgatgcctagtgatcccccgcactttgggaatactgaagt

SEQ ID NO: 509251 - DNA, 120 bp, Homo sapiens
gggcagtgaagctcatcctacacagtcgctgcctcctcatttgggctcctcggggcctgcagtggaggttctcgcacctcttccaggcccctagattcctggcaacctcccttcccttgc

SEQ ID NO: 509252 - DNA, 1269 bp, Homo sapiens
gtgcgtgctgcagtgcggccgagctgggactggctgggtcgtgctggtgctgctggtgcgaggagcctgctggtggcttgtgctctgtgctgtgccaatggtggacatgctgctgtggtgtgtgcctgatgtgattgctttgctgtgtggctgtgtatgcttcctggctgcccgctcgctgtgtgacttgctgctgcctgttgcctcacacatgcctgatggctgggctctggctgcacatgtctgctgctcctgctgctctgctgccctggtgtgcagctccagtgttgctgagcagctgcgaggatgagctgctggcccttcaggaggcaagggcgaaatgtattgacagagattgtccgacaagtggtgtagcatacaagggacagacaacgttggacgaagcgttacacagtgatgagcggtctatttcgtacagacaacaggcaagtacattcagcgcggctggacaggctttgaatgcaatgacgcacagattccagttttacacaagtattgcgtggagaaccactgaacgttgtactgcaggaaacgatgattgagacgtgtaagtttggggtggacggatgagacatcaaacgcgttcgactccaagcgacaggttcaccatgagacgaactggtatcgggcaggcatccgcgcccttgacggtcgaccgtcccgacgccgttcagctgcactgcgccccataggtcgaaacctcgaccgtagaaactgctttgctgggcagacacccaggaagcaaagggccacgagccagcatagcggcgtcaggccccacaggagcccccgcgcccacacccccacggtcgccccaggagcaacaacgactcacccgccggggcataaccccgagcgcgcatcgcgaccccatgcgccccagagccgcgcgccgagagcagcacagcacacacatggagcacacgaacaggaccgactcggccgacgccggacctcggacgagagagcaccgacaccccgggcgcgagaaccacacgcacgccgaagcggaagcagcccactcgctgcgaccggggaacgaggcgacgacacccggaggccaaaacgagcgacacaacaccaacgccgactcgcacacggaccaaaattagtccccacacgacccacggacgcgcgacaccacacgccacacaccacgaagacaaccgacccccactcgagccgccgaccccagacggcgaagagacagacgccgcgaccgagctacacacgcgaccacgaggcgct

SEQ ID NO: 509253 - DNA, 401 bp, Homo sapiens
gggagtattcacatcaccctgaggctcacccacatagttctaaatatggaaacccacccggaaccccaatatattcacagccctgcttattaccacattttaactgggtctctattttaccctcctaccagcctcacgaggtacttcgaggtctcccttccccactttccgacggcattttcggctccacacttttttgtagccccacggcttccccgggcttcacgtccattattggctcaacatttcctcactatctgcttcatccccccaactaataatttccactttacaaacccaaacatccactttggcttcgaagcccccccctgatactgcgccattttgtaaatgtggtttgactatttctgtatgtctccatctattgatgagggtcttta

SEQ ID NO: 509254 - DNA, 129 bp, Homo sapiens
gcgtcgacttggaaagcatctagtccagtgggaagcacaggggttggagaaggtgctacatccctcttcccatcaatatgcctaaatgtgggggagggccagagagtggcacccaagagcctgcgggga

SEQ ID NO: 509255 - DNA, 781 bp, Homo sapiens
  misc_feature (702)..(702): n is a, c, g, or t
atggtactgcttatgaaacacagaataaaattcttcacgctgtgtaaaactctttctggagtctgtgaccacatcatatccctgtcgacagatcctctcggtttcacagtctgctcacctgaaagagatccaactggtatacattaaactaagcgaagggctggtaagagataccatgtttatcaaaaccaccatctttcagtttagagctaatgatgaggacaaagcagtctatgaatgtgggaatctatgaatgtcaacaaacactgaacattttggtattttcttgctggaggatttatgctagtggaatttagtgatgcatgataagaaattttatcaatatcattgaaagtgaaggaaaattgaatacggcgacttttgatttaatctacttggggactcatttagctttaatgacatttatttcacctaacctcctataaaaagtcgcttagatttataaggaagtttatagattttaataactaaacacccatagcgtccgcttccctttagggaggcgtaaattttcatcctacttaactgactccctagacttcgacacctccgcttcacaatagcagaattattcttttacatctgccgattcccagcctctcgaagattttagagataactcccgaaacaccttgaaacaaaaaggcctccttaacgtacatatcctttacacgcaccttntacctgccagttcacataccctcccccacctaacattttgtcaaaataatactcgaacatacaccgtgcatacataaat

SEQ ID NO: 509256 - DNA, 1015 bp, Homo sapiens
cccgcgtgcgtgcctcctgccgtcgcgtggaggtccatgggggcttcctagtttctcccccgcgtggctctccccaggtctgcttgggtggtcgaggctggaggagtgttgtgtcagccgatggtgcttcctgcgcgagagagatatgagccgccccgggatgattagtagtgcgcgcccgcgtggagcgacttcatctcgggtgtgggtgagtcggccgcgcattgtcttcgtcgctgcgtgagggcgggctggtctcttgcggagcggggggacctttgctgtcccacccccagggccgggccttctttccaggaactaccttaagcgggtgcgctcccccccgcctggttcatcatttcgggctcttgccttccttccgtgggcagccgcacctaagcttcttgtccatcgtaaagagtggctcttgctcgctgagccaccacctgcgagcggtttattaatcacatcatgttgctgctagggtgcaaagtctcctctacggggaaaacccgttgcgcctgtacacgatcatgtaatcagaagcttggccacgtgattatcttcttacttgcgaccgccacttaagtaagttcagtgcgcctctgactttcaagcagtgggcggagcgtcactcccccgcacccatgccacgagaataaactgttccccctcgctgtttacttactcacctcggtgcaatcttgtgtcgtccactcacgccacccccatcgccttggatatgttgatgaatggtgtccgctccgccccctctaccgtttctatcttctcgaaaatattatagtttctggtgttcctaagaggagaactcatgtgccactggcgcggtgcgaatcaatacgcaatcgggggggcggcacgcaacttaagactacggagaggaagacgcgcacccggacgtatttttttatgtaacaactaacatacacaagaagaacaaccgccaagaacaggaaatccaacaaacaagaaaaacaacaccacatgttcgcaa

SEQ ID NO: 509257 - DNA, 135 bp, Homo sapiens
ctcgcttggtgatgctggtcctgttgtccccccggcctcctgtacctcctggtccccctgtcctcccagcactggtttcgacttcagcttcctgcccctagccacctcaagagaaggctcacgtatggtggccgc

SEQ ID NO: 509258 - DNA, 626 bp, Homo sapiens
gatctgcttcaagaattaacgaaatgcaggtgtcaagacagtaaggattcaaaccatgttgccaaaacatgagtctaagtgcatgtactctcttcctggcattgattgcgtggttaccagtggtccagtactatgattattgattttaccggctgatcaatttatggggcagatcgatcatccaaactgatgcaaccagaatgttactgccctgaaaggctacccaagtgccatgtactgtgatgagctgaaagttgaagaaagtgtagccaagtggtggtcctccatggagatctagagtatcttgacgcgttagtgaataaccaggattgacctatattgatgagaaggcctttgacgaagtgtaaactgatactgcagttggcatcatgtctaagatcgagcaatcgcttctagaagagactccaaagataccaccgggagagttttctctacacttgaatgcaactgagagaaggctgtcatataaaccagcaatcagactctgacaggagctctgtgtggtcccgacgttccccaaatctctggcaggatcttgcagcttactcataaccatggatctacaaaggctggggcgtccttttcgaagggattgtgtaaaacct

SEQ ID NO: 509259 - DNA, 134 bp, Homo sapiens
aaaggaccagttctttagaagacattaaagcaaaaattcaagcaagtatagaaaaggttgttctcttccaaagtgtagccaaatcactaatttataagatttcttcggactacttaccaagaggcgattcaaga

SEQ ID NO: 509260 - DNA, 144 bp, Homo sapiens
ataatactatctggtatacatcttccttaataggggtataccgagatgtctcctttatactaaacttggttcaattccacaccaagacaatgactacctccgttgttctcagatccagcaacggtcaagccggttccacacggt

SEQ ID NO: 509261 - DNA, 107 bp, Homo sapiens
ccgcctgtgaatagcactgcactccagcctggacaacacatgtagaccccatctcttaaacaaaatgaaagaaaaaatgaaataagtgtgacagctgaccattgggt

SEQ ID NO: 509262 - DNA, 197 bp, Homo sapiens
tacgactctgagcttagtaccctcgataaggcaactaggagtgtatttgccagtcataggaggcgtcattcactgagtttcccgctattcttcagtgctacaccctagagcaaaactacgccaaaatccatttcactatcatattcatcggcgtaaatctaacgttcttcccacgacactttcttggccttatcgag

SEQ ID NO: 509263 - DNA, 325 bp, Homo sapiens
cgtcgacttttttttttgtatttttagtagagacagggtttcactgcattagccaggatggtcttgatctcctgacctggtgatccacccgcctcggcctcccaaagtgctgggattaaaggcgtgagcaccgcggcctggcctggccactaattattaatgcatttggcataattagaaagttggaagttaacttttttttcttcttttaacagacatggaagaatgaagggtttttttgctctctataaaggcttttggccaaattggttgagacttggtccttggaatatcattgtatccttttctgttgcaatgtcgacgc

SEQ ID NO: 509264 - DNA, 333 bp, Homo sapiens
tcagccatattgtatccccgctacactgctaccttcccagcttttgttaccatcattctactaatctatcgtccctgagttaattttctaatattttgcacccatatgagtgagaacacatggtatttgtctttctgtgcctggcttatttcacttaacatggtatttgccagttccattcatgttgctgtgaatgacaggatttcattcttgtttatggctgaatagtattccattgcgtatatgtactatattttctttatccattcatccaatgatgaacacttaggttgattaaacatctcggctattcgtgaatggtgctgaaactat

SEQ ID NO: 509265 - DNA, 378 bp, Homo sapiens
aaaatactgggctcaagcaacactcccacctcagcatttcaaattgatggaattatggatgcgtgccacccatgcccagctaattttttttaagagatggggtctttctgtgttgccccatctggtctttttttttcccttctttttctttctcttttgaggcacagtgttgctctgtcacagagtagtggtgcgatatcggctcactgcaacctccgcctcccaggttcaagtgattcgcatgcctgtaatcccagctactcgggagactgaggtaggataattgcttgaacctgggagctggaggttgtggtgagccgagattgcgccattgcactccagcctgggcaacaggagtgaaactctgcctcagaaaaa

SEQ ID NO: 509266 - DNA, 182 bp, Homo sapiens
ttttcccttcccccccccccccccaaacccaaagaaatttttggggcctgcttttgggttttgaatttttgcccctttttttttttggtcctttgaaaaagggaaatggctatttggggccttaaattttggggccttttcgtttttaaaatgttttttaaataaaggtccttttaatccca

SEQ ID NO: 509267 - DNA, 1195 bp, Homo sapiens
  misc_feature (246)..(246): n is a, c, g, or t
  misc_feature (1195)..(1195): n is a, c, g, or t
gattacccccgttaggtgactatatgattgcacactcaaactccatgctagatagtgcagggggtggcggggccgagagcctgcgcgtggcaagctctctggaagacaactgtgcgacaattcatggcatcgtcggtgcagcgtagagtctcgcggtgaaacgagcgtgtgttgacagctagagactctatagatttagcgcttctgttcctttattaggcctggagaacgcgagcgtaaatgagntctctagggtcgccgaagatttcagagtgtccagctgtgatatattaattgtctacctttgaatgtggcgaatctttgtgtagggagtatgcctgtgaaaggttgcttgcgttttagcacaaagagaccaggggatggggcccgcgagtccttgcacgggcatagcttggtcgccaggccacggggtcaggtggcatagcagtcaccaggggcaatgctgaggagcgcagtgtgagagctgcgcgtcagagccaggctaggaggtccggtggacttgggcttctaggcgaagctaatggggccctcaggaaggcgttagggcctttggaggcccaggcatccctacaggagcagctccctgaggatgaggtcggggggcgcggggcaagtccagggcaagttcccaggtcacgagatgatggaaggcgctgaaagtggcatggcttcctcctggcgcagagcagggggtccttccagaaagactggcaggccaatgaaacctctgagcgagcagatgtactccggccggttggctgggcgtctgctttctggtgcaggagcctggccaagtctgtagctctctggtggggtgagcggggggtgaaccggggtcttaagggggttggggggtcctccggcatggggggaatccctcgccaaacgtcttaggggtctgggagccccccaggggtatgaatcggcaagagcgcgggaatagagggaacaaacccgggggggtctgtagcgggcacccacagcggcgcagggccacagcgaagcgccctgtttccgcggcacgacaagaagcccccgcgggggatgcattggcgtggctcgaccaggcgacccccgcatcggtgggaggaacatgcctcacggacgagtcatagggcccgcggtgtagatagcgtaggggtgggagccgacaaggcaactgagacagaccgtn

SEQ ID NO: 509268 - DNA, 422 bp, Homo sapiens
  misc_feature (311)..(311): n is a, c, g, or t
actctagaggatacccagttcgaccgagactctcgatatgccagctggagaggcccgagataggtctccaggtccatagttcccatcttgacttcgcatcatgacataatctcgtattatgtaagctcccccgactaccacacagagacagttggtccagaagtcaggatctagacctcacgtttcaagactggagatcttcagcgctgaagtacatttcaaccgcatgttccaatatctgggctgctttagacagtgatgtggggttctatggctacagaaagaaagacaggttgctgtgaatctccacntccagcgcaataaatagtctctctgacttcatatgtcttagttctgtgacttctgtttctaccctgcccgtgtcgtgctctagcgaggctgtcagcataattgcagctgga

SEQ ID NO: 509269 - DNA, 893 bp, Homo sapiens
gcagacaggtcttataacatatctatatgtgtatatgtgtatatagagatccatgcaaacacacatgcatatgtatgcattcatatgtcagaaacaaaaggaataaacaaagggttatttccttcatatgacttttttttttttaaatttgccagccaacagtcaccattctgaaataaataatacagggtactgaacatctctctcagcaaatcaatgcctacagttcctaagaacattgcacagtttgactctacaatagtactgtacctcagaatatgagatgttaactagtgtctgcattgcttgtcaaatatccatttgttcttttaaaggacacagataacactatccattggtgatttaaaattgaaaaaaaaattaggaaaatggggaaaaatcctcttgagaggaggaaaaaaaaaaaaaaaaactaccctttaccatgatggccggggaatttcacaacttgttgcaatcagtgccatttggctagtgtacagaatctgttatgtaagcaaccattaatttccactgagagtgtctcacttttaaccagatttcttaaattttttaaccttctaatggtattctagggagggcaatgtccaactcctgttaagggcttacactccgcggtgcctttgtgttttgtacatacttgagatttgcgtgcacagtcacagatgtcccattggaataccaattaatgctcaggggttgggcccaaacttatacccaatgcagttttactacgctttgttctggccgggcccggcgcaggtattttacccccttttcttcaatcttgggaatcccgacacttagttccccgggttctccaacggttggtttgccacctcctcccaagagtctttctgttactcctcccg

SEQ ID NO: 509270 - DNA, 282 bp, Homo sapiens
  misc_feature (2)..(2): n is a, c, g, or t
  misc_feature (78)..(78): n is a, c, g, or t
  misc_feature (81)..(81): n is a, c, g, or t
  misc_feature (114)..(114): n is a, c, g, or t
  misc_feature (138)..(138): n is a, c, g, or t
  misc_feature (144)..(144): n is a, c, g, or t
  misc_feature (148)..(148): n is a, c, g, or t
  misc_feature (150)..(150): n is a, c, g, or t
  misc_feature (163)..(163): n is a, c, g, or t
  misc_feature (165)..(165): n is a, c, g, or t
  misc_feature (170)..(170): n is a, c, g, or t
  misc_feature (174)..(174): n is a, c, g, or t
  misc_feature (176)..(176): n is a, c, g, or t
  misc_feature (194)..(194): n is a, c, g, or t
  misc_feature (206)..(206): n is a, c, g, or t
  misc_feature (276)..(276): n is a, c, g, or t
ancgacgaccgacgacgacgcggggagcgagaagaagaagggccgcaacaggagcaaggaggagcggaagcagcaccnganccgggcccgggagcagcggaagcgacgcgagtncaagaagcagagccggcaggaggnccagcnggancngcagaaaggcgananaagcncgancncaacaacaaagcccaganccaccgcaaaancaagaagaagcggaacaagaagaaccaggacaacaggaacaccaaccaggagaagcaggcccacggcgcncacacc

SEQ ID NO: 509271 - DNA, 405 bp, Homo sapiens
cattctcgtactacataggcagaacacccaagattgagcagctttctactatgattgttcagtcttgcccatgccgctcatattctagtaaaagtgtcaagaccaaggatgacagtgatgatgataatgatgatgacgacaacaaggatgatgcttgtaacaggaaaacgtaacagagccatggtccatcactgttaagaaatatgagaaagatggcgctactaggtcagacactttggaagtgtgtgtcctgttggttttacctggcagtctgactacatagaaagttgactggcctctatactacatgtcacctactttgtgggtgagagtgacaagaatctatattagtcgatagaacaaaatgggcactggatccatgtctgagtgtgtcttatgtggtct

SEQ ID NO: 509272 - DNA, 983 bp, Homo sapiens
tgcgggggggctgagaagaaagagattatatgctgtatataaatatatatgtaaattgtatagttctttgtacaggcattggcattgctgttggttaattgtatctccctctgcctgctgttgggtggtgggcactctggagacatagtccagcttctaaaatccaggactctatcctgggcctactaaacttctgtttggagactgaccctaagtgtataatagactgggagtccgtgcaattgtactgcggactccactgagttcttttctggtgggaggactatatggccccgatgccattagttgtcaaaatctgattaagtcactctgggtctcggccttgtccagggaggttgggctaaggagcagatggaaactgccctgggagaggaagggagtccatgatcccatgaatagccccacacgaggtaccggctctcagagggtccgtgcattcctgatctccggagcccgcaaagggcccagcatggtgggtgcacgcagtatcttagtgagcctcggagcaaattatccacttaagaggatttgcatttacgtccgctcgaaacgtaatccatccatgcttagcgatctactctgtataacgcatgagaggggaggcaaggaagaaaaagacccgcagtaagggctttaaaagactggatatttaatatctaccgcagggggggggacaggacagaaagcctgggctgagggctgcggcgcgacaggaaagctcttcactccgggagacctaccagagttccaaagagcagggccaggccggcgagggggtgagcctcccctctcactccgcggggccaggtaacagacgggggggtgagagagagcgcacctgagacaaaagttggggataaccacagggctgaccacaaagggcgcacacacacaaaagggatccccagcgggaaaagacacccaacaaggagaaaacacaaagagacagacggaaaggaccc

SEQ ID NO: 509273 - DNA, 207 bp, Homo sapiens
tggccaaagtagtacccaaatgctgaaatactagtgaggggtcgggtgtggtgacgcttgcctgaaatcccagcactttggaggccaaggcggacggatcacttaaggccagcatggtgaaagccatccctactaaaaatataaaaattagcagggcgtggaggtgcatgcctgtagtcccagttacttgggtactacgctttggca

SEQ ID NO: 509274 - DNA, 228 bp, Homo sapiens
  misc_feature (15)..(15): n is a, c, g, or t
  misc_feature (25)..(25): n is a, c, g, or t
  misc_feature (59)..(59): n is a, c, g, or t
  misc_feature (114)..(114): n is a, c, g, or t
  misc_feature (117)..(118): n is a, c, g, or t
  misc_feature (122)..(122): n is a, c, g, or t
  misc_feature (132)..(132): n is a, c, g, or t
  misc_feature (176)..(176): n is a, c, g, or t
  misc_feature (227)..(227): n is a, c, g, or t
ttaggtggtcccggncccttgagancaacctagtccccggcggcccttattcgtccganaagatgaagaaacaatcatgaaccaggaaaaactcgccaaactgcaggcacaagngcnnatangtgggaaagnaactgctcgcagaaagaagaaggtggttcatagaacagcacagnagatgacaaaaaacttcagatctccttaaagaagttaggggtaaacaatana

SEQ ID NO: 509275 - DNA, 886 bp, Homo sapiens
  misc_feature (496)..(496): n is a, c, g, or t
caatgctggtgtcaacccttcgtgggactcctcagcccacacaatgccggacctgtgacggtgccgcctcgattatagatgcccagttcatttctactgggtgcgtggtgaagaaattattcctcggtggtcatcgaagaggtcgaattgatgacttgcgatgaccagatagatgataaacgcgaaactaacgcgagattcgaatatccaagcaactcgcagacggtttgtagccagtcgcgattacttctggtccctataggaaatcccactactatataagatgtaacacccatgacaaatcttccattagttgcaagacggcagctatgaagaaccacagtatctgttggctcatataaactgcagatccttgctgttacggtcacacccagttgcatcgtgcttgaccctgcacgaagattaacggagaggcgaacaggcctctttgcaggactatgagacttgctgcctgcagtctagcattcagcatagntgtggtcctttggtaagagcgttagagtgccttcatgtgcgaatgccctgtgttcgctgtctgggacgtgcggagcccacccaagccttatggttcatcaagggatcccgtggaaggtgagaagccaggactgtgtacgtcgaagcgtctgtctgattcctcccctaggcctgctgaattcacccagtgagtgtgccacacatactaacgttttattccctattattctcctgacctaccgcagacttaaaactactttttgggccaacgttgaaacttaaccagccaaaagtctgaagtccacaaaaagtacagccgccttcgtgaaaaaaaaattactaatgctcggggggctaccagccaaaaggtaaaggccccttcctatgtaat

SEQ ID NO: 509276 - DNA, 380 bp, Homo sapiens
  misc_feature (153)..(153): n is a, c, g, or t
  misc_feature (308)..(308): n is a, c, g, or t
gcattgagagatcacacgatgcttaccgtgtagttccagctactgggaaggctgacatggtaggattgcttgagcctgggagtttgaggctataatgagccatgatatggaccactagaactcctatcctgtagtgacagtggcaaggtcctngtttctgtaataacatgtgtgcccagtcaggtttcgtcttcctgggattcagaaagtctttcattggtaggtcctagttgtccagtccattttctcatattccaagcactggagaatactagtgacagtacgttgttctcaagtggaatcttcangcttagggtgggctacttttaataacatataaaaatctctttccttctaaaggtaacatccttctcaaggcc

SEQ ID NO: 509277 - DNA, 393 bp, Homo sapiens
  misc_feature (153)..(153): n is a, c, g, or t
gacactgggaccagaatgagcgttacctggtggtgctcaacttccgagattcgggccggtcagccaggctaggggctccaacctccctgctggcataagctgccagccagcgctaaacttttgcttagtaccgacagtgcccggcaaagcgtngaggaggacacctccctgaagctggaaaacctgagcctgaatccttatgagggcttgctgttacagttcccctttgtggcctgatccttcctatgcagaacctaccaccctcctttgttctccccaggccttttggattctagtcttcctctccttgtttttaaacttttgcagattacatacgaattcttatactgggtgtttttgtcttcaaataaaaacatcacccctgcctcatga

SEQ ID NO: 509278 - DNA, 315 bp, Homo sapiens
agctctctcagcagacgcagctcaccaccacctccgcctccctggttcaagctattctcgtgcctaagcctcccgagtagctgggattacaggtgtgcgccaccatgcccggctaaattctgttatttttttttagtagagacaggatttctccatgttggtcaagctggtctcgaactcccgacctcaggtgatccaccagcctcggcctctcaaagtggtgggattacaggcatgggccactgtgcctggccatcaagtgaggactgaaaatcagagtggtaaattgactctggagctgcgtctgctgaggag

SEQ ID NO: 509279 - DNA, 184 bp, Homo sapiens
actactagatttctatatggggatgtctcacaggcatataaacatagcatgctcaatatggtgatcatctcttcccaagtaaagctgtactactgccagaatttaccctccagaaaatgccagaatgccaatcctgaaagcacagaaaatcttgggaacatctttaacctggtcccttttccct

SEQ ID NO: 509280 - DNA, 137 bp, Homo sapiens
ctccattagccaccgcaatgaagctgcaagggcggtacaagttttttgaggcaagcttccagcaggacatggagcagtacctgtcactggctacctgcagattgcagagcggcgagagcccataggcagcatgtcat

SEQ ID NO: 509281 - DNA, 207 bp, Homo sapiens
gcccggcaggccacgctccttggctgcctgttcctgtggctgggagctggaggaggcgccgctgtcagctggccagagggctggcagttcttcctgtgcagcgcttgcccagtgttgtgcttggagcactcacatctacgtgtgccctgcttcttcccagctgctgtcccgtgggcgctcatacccccatctggtgaggtgctagga

SEQ ID NO: 509282 - DNA, 124 bp, Homo sapiens
tggatgacgtgtcttgacacatctgtaccttcgggaacggagttcacatgtagcggtggaagccaaacaggtggctcagcaggaagcagagagtggccagatttgtggtgtgtcagaacattag

SEQ ID NO: 509283 - DNA, 518 bp, Homo sapiens
cggcacgagggagggcagggaagagaagttgaagggagcagtcagcttggaatattgattactgttagttgctgtgacagtttggctgtagtcagtctttgcctctcattcaaacctaactctttcaaaagccaaacaaaatggacagaccctacaagatggaacttgtgaatttgaaaacttaaacaaaatagaaatatttttgaagacgattaccagattgatccaaaaataaattaagaacttcaatagaccagcgttagagaaattgaagcagtagtccaaagtcactctcccaaaagattgaggtccaggattttcaggaaagcttttatcttcttgttgagggacatatatgtattccgttttaaaacaagtttctcggctgggcatggtggatcacgcctataaccctagcactttaggaggctgaggcaggagcatcacttgatctcaggagtttgagaccatcctgggaaacaaggtgagatcttgtctcaatgaaaaagtaaatatta

SEQ ID NO: 509284 - DNA, 421 bp, Homo sapiens
ctgtagttgcacttcacagcttcggcaagctcccgtgcgtacttctcatacctgccggtcatcttagagttccacacctcattcacctgctgccaaaggtttagctcaagcttagcacctaccagtccttcccggttacgggacagcccagaagtccgcctcctgtcagggcttgccacatagctcaagccttaaaagtagccaaagtcctgtgtaacctttctttccctctcccaaggtaacctcgttcggaaagtgctcgtgtgcccatctcgattatatggcccaggtgaaccagtgattgccaatgtctgcgtttctgccctcatatggcccacaggcactcttagagtgctcctatcgtgcccgaggggttaaatatgatctcagccgcgtttattctgtacatgagctcgtgcca

SEQ ID NO: 509285 - DNA, 810 bp, Homo sapiens
  misc_feature (9)..(9): n is a, c, g, or t
  misc_feature (167)..(167): n is a, c, g, or t
  misc_feature (181)..(181): n is a, c, g, or t
  misc_feature (194)..(194): n is a, c, g, or t
  misc_feature (231)..(231): n is a, c, g, or t
  misc_feature (233)..(233): n is a, c, g, or t
  misc_feature (247)..(247): n is a, c, g, or t
  misc_feature (254)..(254): n is a, c, g, or t
  misc_feature (260)..(260): n is a, c, g, or t
  misc_feature (262)..(262): n is a, c, g, or t
  misc_feature (269)..(269): n is a, c, g, or t
  misc_feature (287)..(288): n is a, c, g, or t
  misc_feature (290)..(290): n is a, c, g, or t
  misc_feature (304)..(304): n is a, c, g, or t
  misc_feature (376)..(376): n is a, c, g, or t
  misc_feature (407)..(407): n is a, c, g, or t
  misc_feature (412)..(412): n is a, c, g, or t
  misc_feature (421)..(421): n is a, c, g, or t
  misc_feature (491)..(491): n is a, c, g, or t
  misc_feature (494)..(494): n is a, c, g, or t
  misc_feature (577)..(577): n is a, c, g, or t
  misc_feature (596)..(596): n is a, c, g, or t
  misc_feature (598)..(598): n is a, c, g, or t
  misc_feature (608)..(608): n is a, c, g, or t
  misc_feature (635)..(635): n is a, c, g, or t
  misc_feature (642)..(642): n is a, c, g, or t
  misc_feature (652)..(652): n is a, c, g, or t
  misc_feature (655)..(655): n is a, c, g, or t
  misc_feature (705)..(705): n is a, c, g, or t
  misc_feature (789)..(789): n is a, c, g, or t
ataaaaaanaaaaaaaaaaaaaaaaaaaaaaaaaaaaaaaaaaaaaagaaaaaaaaaaaaaaaaaataaaaaaaaacaaaaaaaaaaaaaaaaaaaaaaaaaagagaaaaaaaagaaaaaagcagaagaaaaaaaaaaggaatgaaaaaagactggaaaaaaaaaanaaaggaatgaaaanaaaacgaaatatnaaaaagtgtagaatcaggtcccctgtaatgtgattgnanagtgtggaaaaggnccgaaangacgananatgagcngtggaagggaatgggggnngnagaagggcaaaaanagaagtattggagggagaggccgggctctcaggaagcagcaggaacgtgccaggtggaagccagctgcaggnaggggaggaaggaggcccttactcttccttnttgtncatgggacnatctaatgcagcctgcagctttgcgtgctcctccagcaagcggtcgtattccttggtgaggccctcagantgnttccgcatggccagaacctggttttcagctttctctagtttttgcttagtgctggccagctcgtcctttagcttctgcaggtnagccttcaggctcctgttntnttcctccaanttcacctcagcattcccgaaatccaanttgactncgtaaaaagnagntccctttttgagctggtaattctcctccatgtacttcttggccgcctcantagcactctccgcctgctttttaaaggcttcattggaggccagcagcgtggcctgctgcgaaatgagagtaacaggcgtctaanaggaaggacagcaccaggaaa

SEQ ID NO: 509286 - DNA, 3185 bp, Homo sapiens
acaaccctgccaatctcaagcacctgcctctacagttggtacagatggcattgtcccagtctgttcccttctcggccacagagcttctcctggcctctgccatcttctgcctggtattctgggtgctcaagggtttgaggcctcgggtccccaaaggcctgaaaagtccaccagagccatggggctggcccttgctcgggcatgtgctgaccctggggaagaacccgcacctggcactgtcaaggatgagccagcgctacggggacgtcctgcagatccgcattggctccacgcccgtgctggtgctgagccgcctggacaccatccggcaggccctggtgcggcagggcgacgatttcaagggccggcctgacctctacacctccaccctcatcactgatggccagagcttgaccttcagcacagactctggaccggtgtgggctgcccgccggcgcctggcccagaatgccctcaacaccttctccatcgcctctgacccagcttcctcatcctcctgctacctggaggagcatgtgagcaaggaggctaaggccctgatcagcaggttgcaggagctgatggcagggcctgggcacttcgacccttacaatcaggtggtggtgtcagtggccaacgtcattggtgccatgtgcttcggacagcacttccctgagagtagcgatgagatgctcagcctcgtgaagaacactcatgagttcgtggagactgcctcctccgggaaccccctggacttcttccccatccttcgctacctgcctaaccctgccctgcagaggttcaaggccttcaaccagaggttcctgtggttcctgcagaaaacagtccaggagcactatcaggactttgacaagaacagtgtccgggacatcacgggtgccctgttcaagcacagcaagaaggggcctagagccagcggcaacctcatcccacaggagaagattgtcaaccttgtcaatgacatctttggagcaggatttgacacagtcaccacagccatctcctggagcctcatgtaccttgtgaccaagcctgagatacagaggaagatccagaaggagctggacactgtgattggcagggagcggcggccccggctctctgacagaccccagctgccctacttggaggccttcatcctggagaccttccgacactcctccttcttgcccttcaccatcccccacagcacaacaagggacacaacgctgaatggcttctacatccccaagaaatgctgtgtcttcgtaaaccagtggcaggtcaaccatgacccagagctgtgggaggacccctctgagttccggcctgagcggttcctcaccgccgatggcactgccattaacaagcccttgagtgagaagatgatgctgtttggcatgggcaagcgccggtgtatcggggaagtcctggccaagtgggagatcttcctcttcctggccatcctgctacagcaactggagttcagcgtgccgccgggcgtgaaagtcgacctgacccccatctacgggctgaccatgaagcacgcccgctgtgaacatgtccaggcgcggcgcttctccatcaattgaagaagacaccaccattctgaggccagggagcgagtgggggccagccacggggactcagcccttgtttctcttcctttctttttttaaaaaatagcagctttagccaagtgcagggcctgtaatcccagcattttgggaggccggggttggaggatcatttgagcccaggaattggaaagcagcctggccaacatagtgggaccctgtctctacaaaaaaaaaatttgccaagagcctgagtgacagagcaagaccccatctcaaaaaaaaaacaaacaaacaaaaaaaaaaccatatatatacatatatatatagcagctttatggagatataattcttatgccatataattcaccttcttttttttttttgtctgagacagaatctcagtctgtcacccaggttggagtgcagtggcgtgatctcagctcactgcaacctccacctcgcaggttcaagcaatcctcccacttcagcctcccaagcacctgggattacaagcatgagtcactacgcctggctgatttttgtagttttagtggagatggggtttcaccatgttggccaggcttgtctcgaactcctgaccccaagttatccacctgccttggcttcccaaagtcctgggattacaggtgtgagccaccacatccagcctaacttacattcttaaagtgtcgaatgacttctagtgtagaattgtgcaaccatcaccagaattaattttattattcttattatttttgagacagagtcttactctgttgccaggctggagtgcaggtagaattgtgcaaccatcaccagaattaattttattattcttattatttttgagacagagtcttactctgttgccaggctggagtgcagtggcgcgatctcagctcactacaacctccgcctcccatgttcaagcgattctcctgcctcagcctcccgagtagctgggactatagatgcgccaccatggccagctaatttttgtatttttagtagagacgaggtttcactgtgttggccaggatggtctccatctcttgacctcgtgatccacccgcctcagcctcccaaagtgctgggattaacaggtatgaaccaccgcgcccagcctttttgtttttttttttttgagacagagtcttcctctgtctcctaagctggagtgcagtggcatcatctcagctcactgcaacctctgcctcccaggttcaagtgcttctccagcctcggcctcccaagtagctgagactacaggcacacaccaccacgcctggctaatttttgtatttttggtagagacgggtttcaccatgttggtcagactagtctcaaactcctgacctcaagtgatctgcccgcctcgacctctctcaaaatgctggcattacaggtgtgagccacggtgcccggcccacaattaattttagaacattttcatcacccctaaaagaaaccctgcacccattagcagtccctccacatttccccctagcctgcctcccctgcctcaccagccctggcaactgctaatctactttctgtgtctatggatttgccttctctaaacatttcatataaatggaattacac

SEQ ID NO: 509287 - DNA, 373 bp, Homo sapiens
ccggcaagcgcctgccggcctgtacgctgaaccattggtccatgaccagcggtttgtccttgaagttttcggcaaacaccgcgagggcctgggctttctctgcttcgaacggcgagttcaccaacaccgccaacgccgccaggcgtacggtcatgttatcgctggtgtcgaactgatccagggtggccgccaatacttcaggcttgccgctgagcatcaagtaagacagcgcgacgttctgcagcgcacggcgggcgaagcgctcggcctctgccacgtaaggcgtttgcttggacagctagcggttgttctggtagcccatgcacaagcctttgaacaggttgtcggccagctgcttgcgggctaactcgcg

SEQ ID NO: 509288 - DNA, 775 bp, Homo sapiens
ccacgcgtcgaacgaggagaacgattcgtgtggacattttggagaaccagaccatggcacaagcatatgcatgttgggcatgatctgctacgatccagaatttggcttggacaagatctctgcctacatgaagtccagcccgattcctcccaagcacctgtgttctcactaggatggctgtctggggccaaccaagatagggccgtatgaaggcacaggaaggtgggagttgacggagcctcgatactcagcgctgcttgcccaggctgtgcaagcgtcagacttggactcatgctgtcccagtcactcttgtcttccttcgtgtccttttctccatgctttattcccatctattactcccgaagatttctattgtccctccttcaactcctcgcctaaagcccgtgctcctctatgcaagggccccttttgaacacgcctcaatgctaccgctagcatatctcctctccgttgaaacatctctcacttctctatcattaccccatctcgcctgcacttgaacgttcaggctcctggtcttatctcgtttccgtggtcagtggggttgtggtcttgcttgtctataggggggccttgccctggtcgcccgtctgcccgtgtgggagctcgatgccccggggtctggtccgccagtgttcgcatgaaaggaagcatgcatatgacctcgtgtttacatggccctgtgtcctgctggcattggtgcccctggcctgtatggccctatcctggatggaaagtaaaggcctcaaaccac

SEQ ID NO: 509289 - DNA, 797 bp, Homo sapiens
tcgacccacgcgtcgcccacgcgatcgcccacgcgtacgcgtgacgcgtggtgtccgctgtccagcgcatcagcgagttagagaggaatgtggcaagaacttaacgcggaaagctgcccaaaactccggggcaggcagacatatattgaacacacgtagtatatactgtgaagcaaagtgcagaagatgttccgaagactttagcatggtgaacttgatgaacagtctaacacacacgtagacaactcctcacttgccacacaaactgcaagagtcagctgatgccagacaggcacagccgaactgctacacaacatgaagccaaaaacctcttctagcgtcaagcaacattagccaagcctgcacaactggctcccaagcgcacttcagcacaccgacccatatgcacgcacaactcacgagataccttcgcacagatacaagcctcacagaacattcagccaacgcacctgccacagcgcagcaaacgtcccggtgcaacctaccctaacacacgggcctatcacgccagcaaacgcttgcctgtcgtatacggcaccacttgcttggtacaccagaggacgacctcccacactgggctgacgcgaacccacgggtaaaacccaacctaaccctttcacacacaaccctggacgctccactggcctccatcctccagccttacaccaatctagccctcactctcaagctggtgccgacactcacgcactccaggccaatgggacccctaaacttacacgctacccggccaccccggccgttactacacacaaaca

SEQ ID NO: 509290 - DNA, 278 bp, Homo sapiens
aatgcagcggactcggcaggtgcggggcggggccgtgaagactcctcctaccgagctcccaggcgctcggtgtttgcataaacaagagagctggagaggctgcctcaacagtgcgctggggcaaggggagggaacgtgacaggcaggtgtgggctagggacttctcttccggtcagagcaagggtcgtccgaaagcaaaaaaagcctctttcccttcatctcggcccgggatccaaatgtcttgggggctagggctgggggcgggaagtggcacggga

SEQ ID NO: 509291 - DNA, 204 bp, Homo sapiens
tcaaaaaatcataagttgaacatccatgaattcgggatcacatgtattcagtacatgcaatagagtaatctgactaaaaagtctaaccaactatttgcagacaccatacaagaagtaacaggagcttgttcaacataacccacagggcatgcaatccagcacaaacccttgcacatgtggcgaaattcccaaagcaaccaaata

SEQ ID NO: 509292 - DNA, 397 bp, Homo sapiens
  misc_feature (196)..(196): n is a, c, g, or t
tggtgtttgttgagggtggaggatacgaggatagagaatgggtaacttctagggagggtttagatgtagtacgactggggtgtatctgggatactttgtttagggatactccccaccatggttgggtgcctgttcagcaggaagagctttagggcagtaggaagggggagtggttccaggtgaaaaggaaagaagnttggtggcagggtggcaggagggatgggaggtcaggctgacgtccactggcgagaacacttcagatgaagatagtgtggacccctgcccagtcccaacacaggccccagacgccctgaaaccccaggggctcagcccaagcaagggcaggaagcattgctttactgagaaaccataaaaatgtagaattccacctcaaaaa

SEQ ID NO: 509293 - DNA, 388 bp, Homo sapiens
ggtcagagctatggtatggagccaacttgcaaatgtctcttccattagatgtagatcttagaagcataaggaaggcacataaagatgagtaagacccagtcctaaccctcaaagttaataaacaagtacgaagtaagacaaactgtagatacaacgatggaggcattacaactttataaaagtattatggaggactcaacaagaggaatacaccaatatgcagtcagacaaaggttgcttacttctcagacagttaacacagtagaactgtacatactcaaatacttaaactacattaattgcttttgcgctcaacaaatttggtgaattagtaataaagacgaagtcccattcatttcaaaatccaagcaaacttcaaactcattca

SEQ ID NO: 509294 - DNA, 821 bp, Homo sapiens
  misc_feature (60)..(60): n is a, c, g, or t
  misc_feature (102)..(102): n is a, c, g, or t
  misc_feature (149)..(149): n is a, c, g, or t
  misc_feature (320)..(320): n is a, c, g, or t
  misc_feature (665)..(665): n is a, c, g, or t
gagctggaactaatccccccatataccaagggacaaattgtatctgtttttacaattatncagtaggagacattatgttccatgacaatggtaatttttaangacagtttttaattgagtgaaattaccataaaaataataatagtagnagctaatatttactgagctgttactaggtgcctataaatagcatagatttttaaattctccataattcttccttatttcacttaaccactctatcttaaattactcatgcttgcctcagtagcacacatacttaagttggaacaatagagagattggcacggcctctgtgnaagaatgacatgcaaatttgtgaagcattccatatttttttaaaaaaagagaaaaaaattactcccagattttcactgtgtttgtgcatatgaccttttgtttaggttgaattatatccaaaggtgaaatttccagaagtgagattactgtgagtcacagggcatgagcattcttattaccctcgatgtaaattgcaaagctttcaggcatggtggctgtcagcctgtaattccagcactttgggaggctgaagtgggaggattgcttgaggccaggagttggaggaggcagtataatgagtcactgtctgtatgatttaaaaaaaatttccaagctttatgctngaaggcttatatacattttaaacaccactaatactacaagtattttctgtgtgataaatgaaagacctcctattagctgggattgcaggcatatgccaccatgcctggtaatttttgcatttttagtggagacatggtgacactttgtctctacta

SEQ ID NO: 509295 - DNA, 875 bp, Homo sapiens
  misc_feature (60)..(60): n is a, c, g, or t
  misc_feature (102)..(102): n is a, c, g, or t
  misc_feature (149)..(149): n is a, c, g, or t
  misc_feature (320)..(320): n is a, c, g, or t
  misc_feature (665)..(665): n is a, c, g, or t
  misc_feature (842)..(842): n is a, c, g, or t
gagctggaactaatccccccatataccaagggacaaattgtatctgtttttacaattatncagtaggagacattatgttccatgacaatggtaatttttaangacagtttttaattgagtgaaattaccataaaaataataatagtagnagctaatatttactgagctgttactaggtgcctataaatagcatagatttttaaattctccataattcttccttatttcacttaaccactctatcttaaattactcatgcttgcctcagtagcacacatacttaagttggaacaatagagagattggcacggcctctgtgnaagaatgacatgcaaatttgtgaagcattccatatttttttaaaaaaagagaaaaaaattactcccagattttcactgtgtttgtgcatatgaccttttgtttaggttgaattatatccaaaggtgaaatttccagaagtgagattactgtgagtcacagggcatgagcattcttattaccctcgatgtaaattgcaaagctttcaggcatggtggctgtcagcctgtaattccagcactttgggaggctgaagtgggaggattgcttgaggccaggagttggaggaggcagtataatgagtcactgtctgtatgatttaaaaaaaatttccaagctttatgctngaaggcttatatacattttaaacaccactaatactacaagaaaatggccatttcactgcacctttgcccacacaggtattaaaatttaacaagttattttctgtgtgataaatgaaagacctcatattattactttgtcacccattcttttttcttttttgagacgcagctcacctnccggcctgggcaacaacagcaaaactccgtctc

SEQ ID NO: 509296 - DNA, 918 bp, Homo sapiens
  misc_feature (324)..(324): n is a, c, g, or t
  misc_feature (493)..(494): n is a, c, g, or t
  misc_feature (662)..(662): n is a, c, g, or t
  misc_feature (815)..(815): n is a, c, g, or t
catagcttcctgaatgtgacgcagtatgtggtaagcccaagaatccggcaaacccagtgcatcgtatcctgggtgaacagctggatgccacaagggtttccctgcgggtaagatggtgtcccagcataattctcaccagaggtgccgcgctgatcactgaatcattggactgcggaccacgggtaagatatctcttcctgtaaccatccagaaaagtgcaacaggaaagacattgcccctactttaacactctatgtggggaaaaagcagcttgtagagattgagaaggttgtttctacaccctaatactcccaggtagatatngggctcatcaaactcaaacagaaggtgtctgttaatgagagagtgatgcccatctgcctaccttcaaaggattatgcagaagtagggcgtgtgggttatgtttctggctgggggcgaaatgccaattttaaatttactgaccatctgaagtatgtcatgctgcctgtgnntgaccaagaccaatgcataaggcattatgaaggcagcacagtccccgaaaaagaagacaccgaagagccctgtaggggtgcagcccatactgaattgaacacaccttcttgtgctggcattgtctaagtaccaagaagacacctgctatggcgatgcgggacagtgcntttgccgttcaagacctggaggaggacacctggtatgcgactgggatcttaagcttgataagagctgtgctgtggctgagtatggtgtgtatgtgaaggtgattccatccaggactgggttcagaagaccatagctgagaactaatgcaaggntggcggaagcccttgcctgaaagcaagatttcagctggaagagggcaagtggacgggagtggacaggagtggatgcgataagatgtggttgaaagctgatggg

SEQ ID NO: 509297 - DNA, 327 bp, Homo sapiens
ctagtaccgaatttagtgcacgagcgagtactcactagaacgaccctcagtacctatgccagttttatgccatcccatctattagcctcagccacgtcaagtcgtaagcccaattcttcgccaattagagagcccccttcacctttttaaattcctttaattaccacatattaaccacaaggaaaggtatccccctttttccagtacaaaggacacccgcaggatcttgaacggagtgggtaagacgtgaagactccaacacgacgagattaggagtacgaccacccgacgttcgtagagactaaattctcacgagacgagcaaaaa

SEQ ID NO: 509298 - DNA, 418 bp, Homo sapiens
  misc_feature (8)..(8): n is a, c, g, or t
  misc_feature (92)..(92): n is a, c, g, or t
  misc_feature (187)..(187): n is a, c, g, or t
  misc_feature (239)..(239): n is a, c, g, or t
ccaaagcntggagtatgccaagaatacgggcctccctccgaagggctcagtcatgttcataggtccctggtcccgcatggagagcataatgncaaaatcgtgtaagaagttaaaactgctttggaaacttgagacatgacccagaagcatcagtgtgcattacgcagcccaggtccaggaccacatntggccactgtgcagaactctgggtgccgcacgggaactcatgggtgtgttantcaaccccacccaccgctgagccccaactgtaaacctgcccacttcccacagcggcgctcctggatcatgcaggcactgggctctgaagatgtccttgaagaagtggcgtccgtgaaccccaaaccctcctagggtggttgagttccaaccatgctccctataaatgtcatgtggctta

SEQ ID NO: 509299 - DNA, 951 bp, Homo sapiens
  misc_feature (936)..(936): n is a, c, g, or t
acaaactgattaaaacgcgacagattaaaatgcaacagacctgaagcaatgcactcggtgcccatgggattcacggatcttcccataggtcctaccagccagaagcagcatgcctgattgatagaacagtggaatggcccaatgaaggttatgcaactgagcctgttgagatctcatgacatgtgaggatggagtgctcttttacaaagtactgtgtctattatgaagcacattcaataggagctgattcttgtatggccagaatacttgggtttgggaaccaagggataagagtgggactggcttcatttactattgcacgtagtatccacacccaataaagttctgcttcttaccactgcaactttgagctctggaagtttagagaccttagttcccaagggaagaatgtctctaccagggaatacgatggtttattgcatggagagttgagactgccacctggacatttggagttcattacaccactaagccaataggcaaaggggaaggttagtgtcctggctgagaagactgacccctaatatcaaagaacagagatttgctccacacatggggacaaggaggaatatgtctgaaatccattacatcctttgaagatgctctttctatttcattgtccaaagggagaaatcagtggaaaactatagcaacgccatacaggaaaaaccatcaagcgctcagaaatgaatggtcaccccaacaaataaagaacaacgatcagctgaggttcaaattggaagaaggccaactgtggcctcaggatcagttgcagacttgagaacaattgcagcggcctggattttcatgatgttttatgtatttgtatataccaatttctgttttttccttcttttccccaagtgttcacattggttacatttattactgatctttaggatataagattgtggnggcatggaggtgtac

SEQ ID NO: 509300 - DNA, 300 bp, Homo sapiens
agggacaactagtaagccactgtaacttcttttacttcaagagaaatatcaagcaaggatctagtatatgtatatcttggcaggagtaaaatggtgcatccttctttcatattataaattactcgatggctgtacttaacctatacattaaaccaaaattcattatttttgtttatgaaaagtaaactctttgggagttccacaatattgataatgggtttttctgaagctatggcatttagttatcatgctcctaactgtttaaattcctgctttaaaactcaaatgtaggcaccgggg

SEQ ID NO: 509301 - DNA, 1175 bp, Homo sapiens
  misc_feature (12)..(12): n is a, c, g, or t
  misc_feature (14)..(14): n is a, c, g, or t
  misc_feature (314)..(314): n is a, c, g, or t
  misc_feature (1175)..(1175): n is a, c, g, or t
tcgagagagctncntctgaggaggagggcggccccggggcaagaggttcttctttaggggggggaatccagtcttggggacggccacccactctttttgatggcgctgctgcgaatagggaacacgtccgtggtgaaaccatggatgtgttgacatgttgcacagaattgcgactggggggacagaagggctgacttgaacacaaggtagggacgctggagtagtgactgcatgggaagcaaggcagtgtcgccttgggatttgttcggcaagaatgcaagaaagcacgcctgctcggccttgtcgggactganaatgaatgtaaaggcacgctggggtaccagctgtcagcagcatgggcacaagctgggcccttcacagaagactgtctatttgcgcctgaatgtggcggagcgctgcacacatgtgacatgacagatggaactatgttgtgtcagtgacgacgatgtaagacagcagaggggaaagcaagctagggcaggaaatgcaggcagtgtcgcgtcctgccctgaatgaagagttgtcccacaaagggatcgatataagggaatgctgcgccgcacagagtgtccgcccatgagtaaggtatgttggatgcagcgagcatcgaggcacgactgtaggcgaaatgtggagaaatgaagaatgctaacttctgcatgtgtggcagagcggggagaaaggaaaagcgtagaatacgcagcatgaggctttgtggattggttgggattgtggtgcatcacggcttggacctggaatcagatcgaagtgggttgtgttcagtgcccccaggcggtacaagaaaaaatggccctcgggtggagctgcaacgaaggaaaagtaatgaaaagacgaattatcctttcaatggaggcgtcacatagccgtgatcgctgcgctggggtatactcggagtatttctggctttttacaggccctaccgcgaagacagaacattaacagacgcttcaaacgcaggcaccgacacgcatcgctccaggctggcagagggtgcaatatgctccggttaccaaactttgttaattgttatatgtccgcagcgccgaagcgagcaatccagacccaatgggttcctgtcatgccagttagtctcaggcgcgaggttaataatataacgcgttctagagagctgn

SEQ ID NO: 509302 - DNA, 943 bp, Homo sapiens
  misc_feature (389)..(389): n is a, c, g, or t
ccgggcgtggtggcaggcgcctgtaattccaggaggctgaggcacaagaatcgcttgaacccgggcagcagaggttgcagtgacctgaggtcacaccattgcactcctgcctgggcaacagaatgagactctgtctcaaaaaaaaaaaaaaaaaaaaaaattatttctaataagctcaatattaaatattttaacaaggtgggggtggggtaacagtatatcttgggcccagggctgggcaaatcctggtttggggcagcattttccataaactctgggccaaggtggtcaccggatggtgggcaacgtttaacagtctggctatgggttctggagtccttaaatctataagatggtattttaaaaatatataacatataaatttgggntccggtaaatacgcctcctttaaaaaacaaaaaacaaaaaccctctggagggccacccactagtgccgggggcgcgggaaaacggagcgttactggaacgggcgccggggcgtcattacgctggctttccgggacccagttctcttggtcccaagcggcgaaacctgcgccggcgcccccaaataagggggaggccgaataaaattcgagaaaacgccagggtaccgggattaggaggccgccgcaaaatcgccgaccaacaaccggcacgagcgccaggggacgtaccggggggggttaccaactcttgggaacacacagagggcgggcgcgaaacccgcctacgcaacgtgggccacacgacgcacggaccgcgcaaccgaagcagagaccaccacagcaccacagagacaacaacagacgcacgaccggaacggcgcagcaacagtgcgcgaagaagggagcaacgaacggcagacaagcaaaaaagcacagagcacacgcgcatcaaaaggcacgagcaaccgcgacgactgcagccgggcacgcagagg

SEQ ID NO: 509303 - DNA, 707 bp, Homo sapiens
  misc_feature (23)..(23): n is a, c, g, or t
  misc_feature (31)..(31): n is a, c, g, or t
  misc_feature (35)..(35): n is a, c, g, or t
  misc_feature (102)..(102): n is a, c, g, or t
  misc_feature (110)..(110): n is a, c, g, or t
ttttaaatcgtacaggtctttgnactccaantaancctacccatccattagcaagtgtacagagatatcgtcctggcaattgtgcatctttctcctttgacntagcagtnttgcatggcagattgtgccaagatgaggcctgtccagggacccatgcaataaaaggttagattcttttaaagctttttgataattattattatttccagaaagatatttttgtttgccccatttaaaaaaggttaaattgagtcactgtcttcattttcatgagtaccttgtagaaaactattaataatgataaataactaaacttctctagattaccttaatttttttgttgttgttctcagtacatctaagagagtagcatataggccatgtgtatgtggtgataaatgaaaatgcaggggtcttacttggttatttaggacttaagattttatctagtcattttcaactgtgattgaacacttccctttaactcccttcagaaactccaagatcatattgtatcccaggtactagaatttctgttcagctgtttataggcctccaccacaagaaattggctccaaacctattcccattacatcatcacccactaatgtcattacaccagaatgaaatctgctttgaggcttgtattgttgttttccttccatttctttcccctcatcatttcctttagaaggaaaagggaagga

SEQ ID NO: 509304 - DNA, 128 bp, Homo sapiens
tgtgtcgtgtgtggtgtttgtggtgggtgtggtgcatttgtggtgtgtgtggtgtgtgtgtgtaggcgtatgagtggaggtgtggtgttggtgtcgggaggtgttggtgtcgggaggtgggggtgtcg

SEQ ID NO: 509305 - DNA, 957 bp, Homo sapiens
  misc_feature (4)..(4): n is a, c, g, or t
actnttatcgacaagaaaaagacggaccgcgaccgggcgaaggcaacaggaaacacacaagtttgcgttgctcggacagttaactgcacgacgtccacaacatggagaaatctcttggggagacgtactatattgcaagtagtagagtgtccgcacagtgttgtgtacttcgaaacctaggagtgaacatccagggcctctgtccatcatatgtgggcgcgtggtacccaccaagacccggggatgtacccagcgaccaggggacgcaacatgccggtacccggccaatatcgcccctgggcgcccaagtgttcacgcgacgcagcgcaactaggatttgttcgccctataagcttgacaaaacagctttggctgtgttagccgggcccacccgcgtggtgcgcaatcatctcccccggtaaaggaagaaaccttccgcccgagtcctggccccacgtttccacatgaggcacatcaaatttttggcaagtgcgtctgacggattctcttgcaggtggcccgccccccgttggtggaaccaacacggggtggagacacgacacggcgagtctgcctgtcaacactgtaggcccaccacccgcggccccggcccatggggtcccccccgaaagcccctgcaactccctgggggcgagacacacacacagacgcaagccccccacgagatgggaggcaccaccagacccacgccccgaccacgaactgcggtgcggtaacccccgccctctggggttgacaaaagccgcaatttcaacccgggcgccgcgggcgacgcaaacaggcaggcaagacccgctgcacatcgtggtggagcgagtcggtcggaggcaaggcacccgtaagaccccgaaggcaggggggctcgtagggcagcccggcagccccgtgtccgagaccccggggccccaacaaggcaacccccttccacaaaagaca

SEQ ID NO: 509306 - DNA, 361 bp, Homo sapiens
acctgagcacagctggagacatcacactacctcacttcgacatttcaaggctacagtaaccaaaacagcatggtaactggtagaaaaacagacatatagaccaatggaacagaatagagagcccagaaatcacgccacatacctactatcatctgatcttctacaaagtcaacaaaaacaagcagtgggaaaaggactccctatttaatacatggtgctgggataactggctagccatatgcaaaagaccgacactgcaccccttccttacaccatatacaaaaatcaactcaacatggtgaaatctcatctctactaaacataaaaaaattagctggacgtgctggagggcacggaggct

SEQ ID NO: 509307 - DNA, 690 bp, Homo sapiens
ggcggggcgcggtggctcacgcctgtaatcccagctctcagggaggctaagaggcgggaggatagcttgagcccaggagttcgagacctgcctgggcaatatagcgagaccccgttcctccagaaaagggacacaaaaaaaaaaaaacacaaaggcacaaaaaaaacaaacaaaacaaacaaaaaaaacaaaacgtgtgtggggcgggcgcctggggacccgggagaaaaggttttaaaaccctattccggtggaggggggcaggggaggccccaatggatggtgacataggaaaccttgcgcacaataacgggtggacccagaagagagaacatcacggggccaacagcaaagaggggcgcgggcgtttctcacccaattaacaaaagcggcggcgcgggggagaacaaccgagagagtgtcttgtgcggaacaccacttccagagagtggaggcggtacgaggagagagcacaaacaacggagggggcacctcataaccagaaagggggcggtcccaaaggagaaagaggcggcaaaatacaaaagatagaggcccgaggcggcgggggggcagaagagataaagaacgaaacagccgacaaaaagatcgaacacacgaaaagagaagatcaaagacgaaaagaaaacacaagaaggagacaatagaacaaaagagacaaacgagtat

SEQ ID NO: 509308 - DNA, 1053 bp, Homo sapiens
  misc_feature (29)..(29): n is a, c, g, or t
  misc_feature (227)..(227): n is a, c, g, or t
  misc_feature (285)..(285): n is a, c, g, or t
  misc_feature (410)..(410): n is a, c, g, or t
  misc_feature (463)..(463): n is a, c, g, or t
  misc_feature (481)..(481): n is a, c, g, or t
  misc_feature (502)..(502): n is a, c, g, or t
  misc_feature (525)..(525): n is a, c, g, or t
  misc_feature (569)..(569): n is a, c, g, or t
  misc_feature (589)..(589): n is a, c, g, or t
  misc_feature (663)..(663): n is a, c, g, or t
  misc_feature (677)..(678): n is a, c, g, or t
  misc_feature (686)..(686): n is a, c, g, or t
  misc_feature (688)..(688): n is a, c, g, or t
  misc_feature (695)..(695): n is a, c, g, or t
  misc_feature (721)..(721): n is a, c, g, or t
  misc_feature (745)..(745): n is a, c, g, or t
  misc_feature (759)..(759): n is a, c, g, or t
  misc_feature (773)..(773): n is a, c, g, or t
  misc_feature (782)..(782): n is a, c, g, or t
  misc_feature (807)..(807): n is a, c, g, or t
  misc_feature (828)..(828): n is a, c, g, or t
  misc_feature (838)..(838): n is a, c, g, or t
  misc_feature (852)..(852): n is a, c, g, or t
  misc_feature (855)..(855): n is a, c, g, or t
  misc_feature (868)..(868): n is a, c, g, or t
  misc_feature (875)..(875): n is a, c, g, or t
  misc_feature (884)..(884): n is a, c, g, or t
  misc_feature (896)..(896): n is a, c, g, or t
  misc_feature (902)..(902): n is a, c, g, or t
  misc_feature (904)..(904): n is a, c, g, or t
  misc_feature (919)..(919): n is a, c, g, or t
  misc_feature (941)..(941): n is a, c, g, or t
  misc_feature (964)..(964): n is a, c, g, or t
  misc_feature (969)..(969): n is a, c, g, or t
  misc_feature (980)..(980): n is a, c, g, or t
  misc_feature (1019)..(1019): n is a, c, g, or t
actgggtcccgaggctaaggctccaaccntggctggggcggcagggagggatccagagagccctggccccagatgacccccagggcaggaggtccatgctctaagccctagggcaggggccgcagtagcaggacttggtcaaaagtgctggtgacagctgaggccggcccctcttccctgcacctcccctcctccctgcttcaccccagcaggcaattccctgaganaggctctggtcctcccaaccagctgggtacagtgttgggccccagttgggcaggtganttggggggacctacaggtttcagatgtgggggcgcaggtcccccttccagtgtgaaggcttcctgtgcagtgtagtgttcctgacccccaaagggggtggggtccctggggaaactgaggcagcngcagaggctgacccagctcctgtaccagtgtatgctgtgactcctcctaaggnagctggagctcggggggngtggcctggcccactcaaggncccgcttccggcacccacggggnctgggcacccatgtctttggtctgtgccctgcagttctgggggnccccctggaaggggtgtggnagggtggggagtcccagaagggggtctgaggtacgggaacaagggtccaggggtgctcggcgggggtgcaggcntgtggtgatggcanngtgagaangnccgtggnccagcgtgacacaaagcctccagggngtcaatgcggcgtgcgaagggggngagggtccgagggncggctgagagaggnccagggggnggtgaacgtgggggggcctgggggngcaggaggcagagcgtgtaangtccccgggnggggggtgagaaanatncctccgcgggggntcctccntcacgctcngggggggcatangcgtancngcgtggccacacggnagacccacgggtcagccaacanggggtcagagaggtggcgggggngggtngggcgctcttnagcgagaaacagaaaaaacggggaaggggggcggcgcgngtcgggcagggcgcgggctgtcgccgtggggggg

SEQ ID NO: 509309 - DNA, 623 bp, Homo sapiens
  misc_feature (475)..(475): n is a, c, g, or t
ggtaatatttattatattattcaggtttcaactctgtagcaaaaatgggctctcatttccctaccctatgttatctcaagttagggaaatgagagcccatttccctaacttgagataacatagggtaggtccatatattttcattcttacagtggtcttttcatgggagtgaatgagttactctccactggtgattaggtaatactgtagaatgaagagttgtataatatattcatttacagctgtggattgtggtaaggactatgtccacagtgatattccaaagaattgggtttatatttgtgcttcatctgttaatcccaggtgtcctcatgttgctgaaatatttagatagctaaaatatcccttaatttcacagatgaccaggaagaaattaaccaaggttttattgactgccatgtatgtcccatgatgcagtttctgaagccaacatggcttatttcctagagaatanactctgtatgacataaaattgcttaattgcagtctcttactaaataagtaactagtgccatgcttttgtgagctcttggtatggcccatattactttgtttgagtaatggttatcgttgtttggtgatagtcttgctctgtcgcccag

SEQ ID NO: 509310 - DNA, 837 bp, Homo sapiens
tcctcaggtgcttgcaaggtgatcagaaggcaaaaatgtcggagcgaaaagttttaaacaaatatctacccgccggatttgtgacccattcaaagatccccaaattcaagctccccaaagaccggcagtacgttggtgcggcttgatgtggccccctttcaacattgagggtgtaagacgttgcggagaaatacttctacagggggacagaaatttcaagtgctcggaaggagacgggtgcaaaaggaggtcataccgtgggccgtgcccattctttccgcttttacattcaagtgtgcacgcgcgtgcctgtggcagagattcacctttcaagacagacccttgaaaaccacagattacaccatgtggagcattggagcccacgcggaattcccaggctgaaaagctccgggaggaggaggacaaagagggtcgcaaaaggagcgggaggacgcaggaagtgacagaacccatgaaggtgctaggagaaccggaccagggactccaagctggaacatggaggtgctggaaaaacctcacagggagctgaaagacctgaaccaggggaaggcgcacgtggaccttcgagggctaatgcctgaggacggcaaccggcgtgtcggaggaaggaccgagggaggcaagcaagcgcggaaggaaggaagacgcaggaacacgcgggggacgcctgatagagagagaaaggccaggaaaacggagcaggacgggggggacaggagaccccgaactcaaaaggactggagggtggacaccctcggccctggggccagacgccttcgggcacaaccccaaggagaactcgggatgaggggccct

SEQ ID NO: 509311 - DNA, 327 bp, Homo sapiens
gatggcgtctgtgccgcgttcctcccagagttcctgaccagctgtgatggtgtggatgccaaccagaaaagtgtgctggggcggaatttcaagatggatcgggacctgcgcctcattcacccagaatgtgcacaggctggtcgacgacctgcgctactacagagtctgcaacgacagcctgccccctggcactgtgagctctagcctgctatgcctggggacacggacttcgctgctgcaccgtcgcaggctacctgccacggcagatgtctcccagatgggccttggtcacactcgttgggttctcccaccgcaagcaacgctgcc

SEQ ID NO: 509312 - DNA, 191 bp, Homo sapiens
acttttcacaggggggaaactgcacgtttaaagagaaaatatcacgggccgctttccacaatgcagctgctgtagtcatctacaataataaatccaaagaggagccagttaccatgactcatccaggcactggagatattattgctgtcatgataacagaattgaggggtaaggatattttgagttatctg

SEQ ID NO: 509313 - DNA, 193 bp, Homo sapiens
gaaggtggttggatatcccctgaggcattttattactgacatcatattttacggatataaaagtcatccattcacttgatatttgtggcgcccttacccacataaatatatggcaaataacaatgcagcctcttatttcaaggggttgataagatgcaagaagctaaaattggggacagggattgcatgatag

SEQ ID NO: 509314 - DNA, 306 bp, Homo sapiens
caagctgctcacatatatagaaacagaatccaagtcgtatacccctttatctttattatcctacgaccaacaatacaacttgcaaagcactatcacaataaatttatcaagcagaaatcactatcttctaatttacagaggaaaaagctgaggcactaagaagttgattgatctgcccaattcacatgggtctctaaaagcagggccgggactcacaaccagggcccctgacctcacatgccctgtttgttcatattttttttcttcacttgcttatgccccctctgaatttgtgagcagcgttgg

SEQ ID NO: 509315 - DNA, 261 bp, Homo sapiens
acctcctgcggactcgcattaattgacagctgacccaggtgctacacagaagtggattcagtgaatctaggaagacagcagcagaccggattccaggaaccagtgtttgctgaagctacggacctgacggacgcaacgcgacgcaagcagacagttcgtggtgaacgactacgacaacgacgtccacggcgccacgtgcgactttggtgccggaacgctaggactgtcggaggggacgggggactcctctacgacgtcgac

SEQ ID NO: 509316 - DNA, 217 bp, Homo sapiens
tgtgcgaggtcgatctagaggtcccagcggggaacaatcactgggaattcactctattttaataggttggtaaattccaaggtgatgcttacttaaatttcttttggctttaattggccagatgtatatacaaatgaaaactttggagagaagagccttcagggaagagacggttttatgagctctcttaactatgacttaagtgatggttcccgct

SEQ ID NO: 509317 - DNA, 887 bp, Homo sapiens
  misc_feature (198)..(198): n is a, c, g, or t
ggcggcccggaaaggtcagcgtgtgaagtaggcgctggcaaacgcggggttacccgctgtatcgaggagtaacggcccagcgaccaccccaggcttgaggagcgggggaaaccaactcggttggctgggatacccatggaaggagcgcgggcgaagcggcaaacaaaaagaccacaggggggaatgggcgacttatcnggagccgtggaccaggtttactcgcacggcggattgtggtgggcgtcccgatataactgttatgaaacccttcgtgttctccctatatctaaaaattgtggatccacggaataccttcgtgccggactacacggatggcagttaatttaacccataccgggagcttaaataaaacccggggcagaatttcgagccgtgcccttcttttacgatttgacgcatgtcgtgcatgaacagcggcgctggcgttggggtgcactggacttggctctccgcctagggattgaacgggacaacccagaacatggcttgtctcaaaccagtgaccttgtccagcatttgggaatatgggtgcttaggcaagggcacttttggctatactctaggggtctcgggtaagcatccatagtgcctgggtgtcctcattgacacaacacgaggtggcaaagatgacctttacaacagtagcagttgaaccatacagcatgtggactcattggaccgcggctccaggacaagcgaggtggctggacggacaaacactaccagcttttaggcatataatacgggacactgtaaggttcctgccaacgcctctacatgcgccctatgggacctcgggccacagcctaaaaaaggggtctccttccacaagtggacggcgtttcgggaccgtgcccggtccctgg

SEQ ID NO: 509318 - DNA, 377 bp, Homo sapiens
gtgagacctcgtccccaggtgcgggatccaataaagctcgacgggcaccgcctgtactccacgactccaggcctccacgatctgtgagactgtgaatgtgcacacacctctgggcacccacgtgtaatactttattttggcagcctgagctgacacatactctggatagcatccttcatctttctcactagcgtctccatacgcaagtcacatatgaccaagggacacgctgacaatggcttcttctcgatgagactattccgtctagaggcatttgccctaagaagccatgatgtcaaagcacacagactcaaatggtcactcggaggccgcaattctacttctgggatccctggcttgtcttggctgagcctttc

SEQ ID NO: 509319 - DNA, 156 bp, Homo sapiens
ggtgctggagctgttatcatagctagtgaagatgctgttaagaaaacataaacttcacaccacttggcaagaatttgttgggctaacttttgtattcttggattgttatcccctctatcattgggtatttgttccgtgttccttctattcaagttg

SEQ ID NO: 509320 - DNA, 404 bp, Homo sapiens
  misc_feature (92)..(92): n is a, c, g, or t
attaacataatgttctccaggttcctccatgttattgcaaatgataggatttctttccttgtaaaaaataacatgccgacattttcttaccnaatccgtccaccaatagacacttaggtcgttttcatagtttggcagttgtggaaatgctgcagtaaacatgggagtatagctatcttttgaagataatgatttcatctcttttttatatgtatacccagaagtgggattgctgcatcaaatggtggttctatttttaattttttgaggaaccgccatactgttttccataaaggctgtactaatttccattctcaccaacagttcactagggttcccttttctccacattgttgccaacattctttatcttgtgttttttaataacagctatcctaacaggt

SEQ ID NO: 509321 - DNA, 130 bp, Homo sapiens
atcgccaaccccggagagtctcaagcttgaagccggagatcagaagcctgatgccaagtagctccaggtgacgtccgctgggaaatatgatttctgtctctatcacaatatattttaacgtgactttccg

SEQ ID NO: 509322 - DNA, 355 bp, Homo sapiens
aaccgtatctcgtcatcatacaaatctagtaatcggcatgagagtcaggaaacgaactcttttaccgatgcgagagaagcgtatactaagctctatagctgtgctcgaatacggtgtctcgcgcctgtcttcccactgcttggggaggccgaggagggtggatcacctgaggtcaggagttcgagaccagcctggccaacgtggtgaaacactgtctctactaaaaatgtaaaaattgaaccggatagcttgcccgtctccactaaaaatacaaaacttagccaggtgtggtggcagacgcgtgtaatcccagctgcttggaaggctgaggcacaagaatcgatggaaccggata

SEQ ID NO: 509323 - DNA, 317 bp, Homo sapiens
gtgtatgcacaactagggtcagttttgcaggtggtaagccatttaccaagatagttgtaggtaaagaagggcagatttatttgagaaattgtgaaaatatgttgcagagggcagctcagcagagaaggggctacctgcaaagaggcaagggctggaggaaagttttatagggtcctgctgaagggtgctacgtgtggaatgaggtcattgtgcccgcaggttgtttgtgattagctgtctctaacaattgttcatacaataattgttcattattgttctcaacttggggctctccccaacctggggacccttcctta

SEQ ID NO: 509324 - DNA, 935 bp, Homo sapiens
tttcccctcgctgcgcgccggcccctttcgcgtccgcaaccagaagcccagtgcggcgccaggagccggaccgcgcccgcaccgttcccgggaccgcgacccggcgcccagagatgaccgcgaccgaagtccctcctgcgcgtctcttgctcctgtctggcgtttcagtggccacgagctacctatggggtctgaatgcttcccgtgcctgcgaacccccaagaatgtgattctgcgaggatgacaatgtttgcaggtgccagcctggctggctgggtcccctttgtgaccagtgcgtgacctctcccggctgccttcacggactctgtggagaacccgggcagtgcatttgcacccgaccggctgggactggggagctctgtgatagagatgttcggtgcctgctcctcgtggccccctgtgccaacaacgggactgcgtgagcctggacgatggctctatgaatgctcctgtgcccccggggtactcgggagaggactgccagaaaaaggagggggcccttgtgtgatcgacggttcccccttgccaagcacggaggcccctgcgtggatgattgagggcccgggcctcccattgcttcctgctggtggcccccccctgggcttgctcaaggcaaattttcggggagatcgtggccaacaggtggaaccccaaacccatggcgagaaacgaagggggtctgcagtgggactcggagcgattccgctggcggttgcccagcagggttcaatcgaacaagaactggaggcgcccgggaacccatggcagaagccgtggcaaacggggcacctgctggcacacaccagggagctacgagtgttgggccgccgattcaggtctcaccggtcagaacccgctgaccccaaaggacccgctggccgggtaaggtgacacagaccggggacaagcggaaa

SEQ ID NO: 509325 - DNA, 789 bp, Homo sapiens
  misc_feature (595)..(595): n is a, c, g, or t
acccaaagcaatctatagattctatacaatctttatcaaaataccaatgacatccatcacagaaatagaaaaagaaatcctaaaatgtatatagaaccacaaaagacccaaactagccaaagccatcctaagcaaaaaacaatactggaggaatcacattacctgacttcaaattatactatagagctatagtaaccaaaagaacattctactggtataaaaacagacacgtagaccaatggaacacaacagagaacccagaaacaaatccacactcctacaatgaactcattttgacaaaggtgctaagaacatacactggggaaaagatagtaacttcaataaatggtgctgggaaaactggacacccacatacagaagaatgaaactatacctttatgtcttgccatatacaaaaatccaatccaaatggattaaagacttaaatctaagccctgaaattatgaaactactacaagaaagcatcagagaaactatctagggcattggtctgggcaaaagtttcttgagcaataccccacaagtacaggcaaccaaaggaaacaaaaggaccaaatgggatcacatcaagttnaaaaacctccttcacaccaacggaaaaaaatcaacaaagtgaggagacaacccacagatcaggagaaatatttgccacgtatccctctggacaaggattataccaggattttatggacccaacatctatgggaaagaatctaatttggttcaatggcaaagatctcatgacttctcaagatgtcatggcacggc

SEQ ID NO: 509326 - DNA, 1361 bp, Homo sapiens
tcagggggcataaacacaaactttatggaggccctcagcactagttctctataacaaaaaaaaaaaaaaaaaaaaaaaaaaaaaaaaaaaaaaaaaaaaaaaaaaaaaaaaaaaaaaaaaaaaaaaaaaaaaaaaaaaaaaaaaaaaaaaaaaagacgaggggcggggccacaagataccctccaagggcgcgcccaaaagaaaagacaaacaaccaagtagtaaggaaaaaaagagggggcccaccaaagaggagggaaatttataaataaaacaaagagagcgaggggggacaaacaaaaaaagagagaagaagagaaaaacaaagcaaaaaagaaggaggctacaaaggaagaagagcacaacccctacaggggagggggggaagacaaaaaggcgggaaccacaacgccacccaaaaaaaacaacagcgcgcgaggagagaaaacaaacaacaacacacacggggagcgagaaaaagaggaagaaacaaacaaagaagaaacaacagagcaggcaacaagagaacaaaaacaaaacacgacagaaaaggagacagtagagagagaggaaaaaaaagaaaaaacagaggggaggcagaccccccaaaccaccgacagagaagaagagaaggaagagaaggagaagaggagaaaggagaaagagaagaggggaagagaagagagggagagaagagggaagaaagaaaggaagagagagaagaggaacacaaaaagagagaagagagaagagcaaagaggaaaagaggggggagagaaaaaagaaggagagaaaaaagaaaacaagacaaggacagagaacgggagaaaagaacaaccaggaggaagcgagagaaaagagacgaaacaaaggcagagagagaggaagcaagaaacgaagagaagacgagaagggcagaagacagcgagcacgaaacgacaagaacaaccagaacagagacagaaagagagcaaaaggagaagaagagacgaagaaggaagaacagagaagaggaaagccgagggacgcacaagcgagagagcggggacacgcaggagggaggcggaggaaaggagagacgacaaggacgagggacgggagagaagagcaaggaaggaggggagaagaggaaagaagaagagaagagagcaagagcaagacacgaaagagaaagagacagagaacgcacaaagccagaccagaaaagaagagacgaacaaagagacagaagagcaagaaaagaaagaggaggacaacaggagaagcgaggacgagcacggagagaagacgagaaggaagaggagtgaagcgcaagcgcggagggagagaggaagaagaaaggagagagaggggaagagagc

SEQ ID NO: 509327 - DNA, 146 bp, Homo sapiens
atccaccatcagatcataggccagttctgcaatgacaactgatgataagcacctttcacaacctcgggaacgttcattccccgcgtgaagcttctcaccagcatggccatctctggtggtgtgcttcttcttccgtggtgcactgg

SEQ ID NO: 509328 - DNA, 249 bp, Homo sapiens
cccgatagcccgacagttgccacgtcttgtaagcaagagtgagcgggattactgcctggctgccccttctttccagctctagctcatggcccatcgtccccagcttgatgtcgccctgtcgggctagtcgtggactgtcgggctagtcggggactgtcgggctagtcggggactgtcgggctacgtcggggactgtcgggctagtcggggactgtcgggctagtcggggactgtcgggctagtcgtggt

SEQ ID NO: 509329 - DNA, 290 bp, Homo sapiens
ggtggaggacatgatggtgttttgtttcctctagcttaggacttagatccatttggaagtgttgatcctctgacatgtttgaaaataatgctaaaatgggacttacattgatgcagtctagggtttcgtcggaggttggatgtgtttccatagctttaataatcctataattaatagtcaaatagtaaatgtctgtagggtgtccttctaggcccattagccctccaccaactgtacaaaacgctttagactccaaccacttgttcaaaccggtcctcccaccacaaacg

SEQ ID NO: 509330 - DNA, 340 bp, Homo sapiens
tgactctacaggatctgatctcccacttggttgcatggcggcgtctatggggcaggtgttgactctggtgctggatggcgctctgtggggtggcacgcagccgtgctgaagcgggctccgccggctgcagcgggttcatgagccgaccggggcccagcagttgctacaggagatgaagaccctccttcttgaatacctgagtaccctgatgccgctttctcgctcaaccaagtgtggatcccattctcgtatttacctcacctttggcatcgaccaggatctgacccctggcttgtgccccaatctgtaaactcttctgggctaatcaatcttcaacact

SEQ ID NO: 509331 - DNA, 852 bp, Homo sapiens
ttgggtcgggcggctgggaggaggccccgcgcgcagctgcttcgctctgcaccctgtagcacgaggccggactgcggctgcgccgcctgcaggacctgctctgctgcccgggacgccctcttcgatcgcctccgcgcgcgtctggccgcgctggagggggacgcctcgccgtccctagtggacgcgctgctggatcaggattgctgcgcttcctgtggatgcgagctgcgaagtgcatggatgggctggcgcctgtcgatggcccacgatgcgcacattgaaattgaggagtgcatgatcttgagcgaccgtagaacgaaaacagatgagggacgatgcatcatctgctgagccagtcccaaacacgaggcgagtacgaaggaacgtctgcctctctgcctacggggaagtgaggcatggcctgaagggtggtgcagtcgcgcccggtgccgaccagtgaccgtcctgtgccgctccttggccaacgagacccatcagctgcggagtgactgcttgactcggccaccgtaccacattgtgtcagccgtctggtcgcaagtgtcgtggactgaagcgacgagcagtgcactaaagggacatgtgaggaggagatgaagtcctgaccatttcggagagcacacaggactgggcacaacctctgttccatcagctgctagagtaggcgagacgttgcaggaggagaaatcggacatgttcaaaacatcaaggctgactccacggtttgaaggagctcaagtggcaaaggtggcagacgctaacaagcgcgccagcaggggacgaggtacgtgagggggctccatgccgcagtcaggggggctgaaggatccccca

SEQ ID NO: 509332 - DNA, 703 bp, Homo sapiens
cccgccaaggtgcaaactcttcctgcaccgctgtgggccgtgtggctcgggctggcctgaagtggcacatgcctactccttgtgtggcccctgatgaaatcccctacctgctggatcttgcacctgttcctgggccgctccctcaccctcgccctgacccctcaatggagccctcagtgtgtgtgcctggtgtggatgtgcatgcttggtgtctgtgtgtgccagcatgatgtgtgtgttggactgatggagtgacatgtgtgtcttgcatgagcaccctggatgtgcatcgctggatgctactgtgtggcctgtgcccgcgttgctgataactgcccatgcagcagtatgtgcgctcacgccctgtgcgccctcgcctgagtccatcaagagtgtgccaaggagatggaccttgttggggctgggcctgcaccccctcttcagctcgcgtttatgagtgatggagtgagctagcatgctgtgctgagtgcttggtaggacagcataaagaactaccgctcccgggcggacattttctcagagcgtcgttgggcctggaaagcggcagcggtcaggacccaacaggggatgccaagaaggctggagtggacggaggcccggcagcgggaacaggaattctacatcccctaccggccaaggacttagaaagcgaagcggggctgagcatccagcggggacaggg

SEQ ID NO: 509333 - DNA, 286 bp, Homo sapiens
gaaaatgggactattgagatcataaagaaatacacacctacatggcaaatgtatcaacgtgcgcaagcgatagcaggcgagaggagcaagaggactactacatatgcaagaatcacccctatctgcgatagagcctctttgcaaccggtgcacattacaatttggtattacctgagagtgaacagaaatataacagccatgcctaactgacttcttgaggtcagaatggcggcagtggagcatcgtcattcttcaggattgccctactggccctacctcacagctg

SEQ ID NO: 509334 - DNA, 974 bp, Homo sapiens
tcctggccccctcccctgggaaggttgggccttggcccccgccacagggtacccccacatcagtgtggcccacatcgggaggaaacgcccacatggggggccaccaccagtggcgtgtccacaaatgcggcgcccaatttctacccacgcacggggacacaacaacttgtgggtcaacacacacgtggtccgccaaggagcatgtgcaccccaaatgggtgggggccacaaaaagaagagacgctcttggggggtcatcaaaacagaaacacggggtgggcccccgtctctcgggtgcgcccctatgggagagtcgcaacacagcaacaggtgggtgccacaaaagataggttcacactctctttgaaaaagtgtgggtggggagacggacccacccccgagaggccctcgtttgagggccgccctggtggtcacagccacgtgcttccctgtgaatttattgagagccgctaatatgttctcgggtgggagagcacctgcccctcttggggacacacccctctatagacacagcccacattctaactctacgggcctctctcttttcggagagggcttccacagcgtccgaaaggggcttgtcctgcgcccctctgtcccctggagacttgaacatgttgtgggtaaatttcgttgttgttggaaggccactcacaacacttcacaccacgcccgcagagaagtctttgacacaggcttgttgaaaaacccacacctgggccacggtttgaaggggtctccacatcctggcccccaagagcccctgaagaaggcccacatggacacatcctgttgttttgtgaatgaaggaggaactcacagtgctggcacagaatggcacatggaaactgccctgggcaactgtgctggctgcctcctgaaggaaaccctcctggactgctttttttggctttcccgacaaatccggcccaataaacacttttctgaattga

SEQ ID NO: 509335 - DNA, 337 bp, Homo sapiens
tcactgcaacctccacctcccaggttcaagcaattctcctgcctcagcctctcgagtagctgggattataggcatgtgccaccaccccagctaattttgtatttttaatacagacaagttttctactagaaaaaataaaaataaaaaaattactgggtgtggtggcacccagtaatctcagtctgtaatcccagctactagggaggctgaggcatgagagtcactggagccagaagggcaaggctgcaatgagcctgggcaacagaacaagactctgtctcaaaaaaacaaggtattaatatccaggatatccaaagaactcaaacaactcaacagc

SEQ ID NO: 509336 - DNA, 341 bp, Homo sapiens
gcctcgtgagaattcaaagcgattcgtagagggtcaaaatgcccgtggacaaggctatgtgaacgagacagtcaagccagagccccgtaagaatcggccccccattgctatcgtgtcacctcagttccaggagatctctttgcaaaccacttctacagtcattgatggcatgccactgatgatgataaaatcgttcagtaccattgggaagatcttaaggagcctctaagagaagagatgatttctgaagatacagccatatcaaaactaagtaaactcgtccctgagaactacactttcagcgtgactgcagtagactctgatggagctaccaactctac

SEQ ID NO: 509337 - DNA, 495 bp, Homo sapiens
gtcgatctctagaggtatcccccacatctgcggggctttaaatcgcttgaaccccggaggcggaggttgcagtcagctgagattgtgccactgcactccagcctgggtgacagagcaagactgtctaaaaaaaaaaatttacctggggcaagaaaagtatgaagacatgctgcagagcaaagtggaggcagcgtgtggcccagtgcttagtactgtaatccccaaccttgttttcactaaccctgtttttagactctccctctttcctttaatcacctagccttggttccacctgaattgactctcccttagctaagagccagacagactccatctcggctctttcactggcagccccttcctcaaggatttaacttgtgcaagctgactcccagcacatccaagaatgcaattcattgataagatactgtggcgagcaatatccgcagttcccaagaatttgtcccattgataacgcccaacgacccgcgtcta

SEQ ID NO: 509338 - DNA, 757 bp, Homo sapiens
ggctaacaaactgaaaggggctaccaaggctgggaaaaaaagcaattgttgctgtgagttgactttgaaagactctggtcccttgtgggccccttctgagattccaaccgtgatgcacaagtgtctggccttagaatttacggggtcctaaaattcagagtttttaaaagagcttgcctcacagatgggttcacacaccgtgaaattggtgccctgcgagttgccatagctggaagttccatgctccagtcctaccttggctccccattaaacctttggtgctctgtggattgagttgaacgtgttgaggctttgccaatttcacttgtgttaaaggctctggccatttttccccattctatagccagaatttctttgaaaggccagaattgcttgcatatttcttctctgccgtcaccagaaagccgagtttctttccaaacttcactgaggcatcagttgctctttggccatgtcccttaacccatgattattaactaagtttgtggcttgagtttcaccaaattctacttgttgccattgatgttccccatgtagtaagtcccatttttagtttggttgtgaaaaaaccctgggctgaagttggccatttcagttaaaaggaaaaaaggaactagtccccgatttgaaacttgtaataaattgaaactcactggttttctatgtctttttgaactcttgtaatcgagttttgatcatattttctattaaagtggctaacccctggctactctta

SEQ ID NO: 509339 - DNA, 183 bp, Homo sapiens
ttctggctccttccttcctcagaacatctctattctgcaagagccctctgccatgccagggcacgcccacttccagctggagtcgtggggcttgggcacaggggaatttttccagcagcctgcagcctgacggtctgctctgcaagaatgcttagaaggttcccagcacacccagcagcccag

SEQ ID NO: 509340 - DNA, 198 bp, Homo sapiens
tcgcttatgttattcccccagatgccgcatgagtacaggccacctttccttactggagaatattcgtgaatttgatttagaaagtcagtgaccatgcgtgaagcagtttgagacccagagaggctggcgttacaggcttcttgtattacaaggaaacactgacttgagatagatgcaacaagagacaaacgggaaacg

SEQ ID NO: 509341 - DNA, 168 bp, Homo sapiens
ctccattattttcctcgttagtcttggctttatcattggcataatcgaccaaagacgaatattttcgtcctttttgattcgctgattttgccgttacaaattgggctggtaagttaaccatagctgtttgctttcattgagtccaaaggctgcttttttacccagttt

SEQ ID NO: 509342 - DNA, 125 bp, Homo sapiens
atatcatgggctaggtgagggaggtaggtggtagttgtgtttaatatttttagttgggtgatgaggaatagggtaaggagtatgggggtaagttatggtgggccatccctgaagattgttggtgg

SEQ ID NO: 509343 - DNA, 199 bp, Homo sapiens
  misc_feature (137)..(139): n is a, c, g, or t
ttgagtgagtcttggaaggtgtgtgttatattagtaggaacttctgtatgattgtatgctggatgagtctgactgatcgtgatggtcatatctctgatagagcttttgaatgtaggaagatatactcataagctatnnntaggacaacagagcttgtagtcgagtgtcatgaagatcgtagcaatctgcttctgttcat

SEQ ID NO: 509344 - DNA, 282 bp, Homo sapiens
cagatgtctttctccaaaacatacacaattgttattttagtaaataccttttttttttttggggggggagtctggtgctgtctccccggtgggagcgcagggcacgatcggggtcagtgagcctccatcctcggggttcaagcaatttcctgtctcaggctctgagtagtgggattacggcgtgacaccaggccagtgattggtatcggccatggcttggtttggacacggagcctgggcgaagagcaagattccgtctcaaaaaaaacacagggttgggcc

SEQ ID NO: 509345 - DNA, 168 bp, Homo sapiens
  misc_feature (158)..(158): n is a, c, g, or t
gtcagggtgtgagagtcagcagtattaactacattcatgttaatgatgcgaccatcaccaacattcatttccagaacactctgtccccagtaaacaacatgtccccgttcctcccagccactggtacctaccattctactttctgtttgtataaactngacattctta

SEQ ID NO: 509346 - DNA, 238 bp, Homo sapiens
  misc_feature (185)..(186): n is a, c, g, or t
gctatggaccaggcaggacagctgagcaggccagctgtggggagaggaggatgggggtcgagcggaccagcatgggtcaccattacctgcttactggacagatggacaagtggaaaaatagacacatggacaagcagactgcaaggagaaatggagcagtgacgcagtgggtccctttcttttanncttcacaacatggaaattgtcacatgacacccatcaacaatggcgagggggt

SEQ ID NO: 509347 - DNA, 176 bp, Homo sapiens
actgtctactgctggagggcttgcaggctggtctcaagaaccagcccgagggaggctggcaggtggccagggatagaggcagggatgggctgagcagggacgcagcccccacctgcctgcaggcttccagacacaacagcccaggccccatctgagccctgtcgggctagtcgggg

SEQ ID NO: 509348 - DNA, 202 bp, Homo sapiens
cggcttgagaatactggagaacttgctttgtacagatcagctgctgaaggactcagacatacagagaatgaagaggacaagtcagctcctcagctttcgccagcgaatgttggggaacctgcttcgggctccatatgaaagggcagagctccccacatgtctctatttaattggacttggtgtgatcattggactctgagaa

SEQ ID NO: 509349 - DNA, 395 bp, Homo sapiens
catcagcaattttaaactatgcatgtagcctttcagtagagtcatataggatcattggaaattcgatgtcactgagctatcactggagatagctataacttactggtgaatttacctttttaatctttcttttcttctgaatgcagtgttaggcactggattttcccttatgtgctttacagaatcatttttcaaaatacccacataggctgcttttttggttgtttaatttcttaagattcagttggattacctacagaagaagaaaaaagttggaatctgggtgatataaaatttaacaccttatcatataaagattttcacacgtgctaaattttattttatttatttttttaactttctttttcttttattatactttaagttttagggta

SEQ ID NO: 509350 - DNA, 1324 bp, Homo sapiens
ggggggctcgtgggctgtggggcgctggactgtgccggactgacccaccctccttgcataaaacgcctggagcccgcggtggccgagcagctctcagcccgtcggttcccgagctgccttcccggtgacccctgcagtggcgtgttgtgatgtgggagtgactggacagagccagacgccgaccggaccagtgaggactgctgcacgagtgcaccatgcgtgagatcgtgcacatccagtgcggggccacgtgctggcaaccagatcggctgccaagtttttgggcaggtcatcagtgatgagcatgggattgacccccacatggcagttaccactggcagacagtgacttatgcacgcgtggaagagaatccaactcgtttacataccacatgcaagccacttggtatcaacgcacactatgattccggtcggggccgatccatcgctgggagtcttggcacgccacgtgtcagcggacgtggacttcgagcataagcgatccttggaccccactatctggacccaggagtcatatcagacacgcaggaccacacttatcgacatgttacgtgggcgccacaaaggctgggactgccgtgggacactaaccatagggggccaaagagagcccagcataagcaacacgcgacggggcgaaggaccccgcgaggccttggggcttaggcaccgtccgttgactacgcttgtaaattgctagggatgcaggggccaagcgacgcgcatcacgcacatatgccgtgctgtcacctctgacaatcacacggacgcaccaataccacagagcaaccgaggctctgaatacgtacatacgtgcgagagggacagcacaacctcgcagaggggacccagagcgcgcaaactgggccgggcacacccgaagagcggcaggacaagcagccggaacggcaagcaggaacggacccagggaggaggagccacacgcgcccctcgcgagagacaccatcgacctcgaccagtccatgacacgcgtaggtcgcacgacgaggccgagcccaaaaacaagccccgaaaccgagacggacaaacgggggaagagggtcacccagcgaacgagacaacaggaccgggaacgtcggagaccagcgagaccacaacgcagaacacgcgcgccagacccacactaaacacgcccgcggggacaccggccacacagagatgagcacgaggagacacacacccagaggggaaggtccagaacccactagccactggcagccgatgacggacagggcaacctgaagcagcgcggacccacgaagcaaactcacacacacaccgag

SEQ ID NO: 509351 - DNA, 149 bp, Homo sapiens
  misc_feature (65)..(65): n is a, c, g, or t
gccgtggataccggcgtccacaattaccggcgttgccgcgttcttctaacgcttctttacaagantgcaaagaggccaaggcagggtaagcaccaacctagaacccttcttcacccacccagcagagcagtgtctttgtatcaccaggc

SEQ ID NO: 509352 - DNA, 408 bp, Homo sapiens
  misc_feature (5)..(5): n is a, c, g, or t
  misc_feature (27)..(27): n is a, c, g, or t
  misc_feature (69)..(69): n is a, c, g, or t
  misc_feature (97)..(97): n is a, c, g, or t
  misc_feature (116)..(116): n is a, c, g, or t
  misc_feature (170)..(170): n is a, c, g, or t
  misc_feature (179)..(179): n is a, c, g, or t
  misc_feature (224)..(224): n is a, c, g, or t
  misc_feature (388)..(388): n is a, c, g, or t
  misc_feature (402)..(402): n is a, c, g, or t
ttcgnccttacactcaaaactaatttnacctgtgagacctagttcgggagcaaatatccccatttatantccttataatttgcctgttttaattttntcttttgaaaataatctgnccccataaataagtataaagtaaaattagttaaggcccaggcacggcgtctcanacctgtaanccctggcactttcggaggccgaggcaggcagatcatgagtcaggnaattgagaccatcctcgccaacatggtgaaaccccgtctctactaaaaatataaaaattagccaggcatgctggcacacgcctgtagtcccagctactcgggaggctgaggcaggagaatcgcttgaacccggaaggcagaggttgcagtgagctgagattgcnccactgcactccancctggt

SEQ ID NO: 509353 - DNA, 636 bp, Homo sapiens
ggccattctcctactcaggaggctgaggcaagagaatcgcttgaacctgggaggtagaagttgcagtgagccaaaatcacgccactgcactccagcctgggcaacagagtgagactccgtctcaaaaaaaaaaaaaaaacacgggttgtctaggccaaggataattattttgggaggcaggggggataagttctttgggtaaaccccaagtggtctgggggaatggataccaagctggggaaatcggagttttgggactggaaacatgggagccttcacgggcgttttttccggggtccctatgaagattggggaactatagaaaacacaaaattcacctttaaactttggaggcagggtcgttggatgggcacaaattaattttcacgggaacaaggggaatatcctaagtgggtaggtaattcctaaaaggttacaagggagcgtggttcgcccattaatatgggctaaagtttcctaagcggcggtcaaacgctacgttaccttggtctccacaggtacggtcgggagggcgtgtgtgccctagttgctacacagccatcgtgacatttcggatgcctaacacgcacgtggccccgggccattggtcatcccaactggcctggccctttatgg

SEQ ID NO: 509354 - DNA, 356 bp, Homo sapiens
agctatctcagcagcttagggtgcaggctcggaagcagtcctggacaggacatccactgcagaaagcaatcacacttacacacacagcttcacacagaagtaaagatcacgtacactgctgcgggatgtgggaggaaatcaagagtacccagagaacacccatgcaggtatagggagaacgtgtaaattccacagacagttcttcttctcaacattatcttgacacaacattattcaaggacctgctgtaatctgtatatacatggactttctggctgaaacataaaagagagcaacttattctcaagaaactatatctatggtaacaattctcaatgcttaaaagttttacgtta

SEQ ID NO: 509355 - DNA, 162 bp, Homo sapiens
caacaccttatataggcgagtcccaacattccctaaacaaacaatgaccaatgagggtacaaatataaacaatacgaggtctactcagtgctcacaaatcccaattgcattcttgatcatatttttcgcacgtgtgtgtgtgtgtgtgtgacggagaactct

SEQ ID NO: 509356 - DNA, 578 bp, Homo sapiens
acccacgcgtcgggaaaagtcatatggactggcaaagcaagctgtttaaaccctttgtaaccggggccttgcccccacctcctgtcttttctccttgccttccccagctcctgtgtcctcccatctatcctgtctttcctttcctcctctcagtgtcctcagcacccacaaggaattttcctatcactgtgaactttgctggtacagaggaataatatctgccattcaccttttctttttttgggaccatagctagccgagttccatttctttgcgttctaaaaaccgcttctcccttgtcacttataaaaatcgttggggaggctccgggtgggaacagacaaacaaaagagccttagagtggccgtggtttgttcaaaggataagaatagcttatatcctgcatctcagtacccgaactcacttcagtatgcttactgaggccatgagaacctgaggggcatctgcccaggacaggagccatggctttgtgacaaagaccattgagggaccggaaaaaaagtgatgtcccctttccctgccacctccagcctctgcccagcaattgagctgtcccc

SEQ ID NO: 509357 - DNA, 112 bp, Homo sapiens
tctactgaagaatgctccagatgatggatacaagctgagtgacttaggggagaagagaggctgaacaaaagagctggggccttccaagaggtgtatgagagggaggccaccg

SEQ ID NO: 509358 - DNA, 112 bp, Homo sapiens
tattctcaggctaacctagaccagacctacgccgcaatctcattcactatcatattcatcggcgtaaatctaaccttcttcccacaacactttctcggacctatccgtgcga

SEQ ID NO: 509359 - DNA, 973 bp, Homo sapiens
ggccgcccatcatcctctggctatggacagtaggcagggggagcagaatgggtggaggcctaacgattgtgaatgagcaggtgacctcctgccaggcgtgaaccccacagggttgataactgccaggctctctttgacccgtttggagactgtctggccccccctggttgccctccttcctgagtgagtctctcggggtctatagcgaagatgcgcattactccaaacacaggggcagcgcccatgaccaaaggggacctggaaagggaggtgggccgtggcccttgagtccccattgaggcttggttccttcccaatccagtggacttcgcagtccattctgacagcctcagtgaccctggctccttgtgccagagaaccccagcaaccggagagaaagatcatcccgtttgggggcccccagcacaatataatcatccacatggcagaaccggcgcacatgcgaggcatgactcaaaccgagaccaacacggggagcccatgcaaaccggacacaagcatacaccacggaacgcaggcagacagctgccccggggcagagatgcacacccctgaccactacaaacaaacaggacacatccccatgaggacaccgaccccgtaaccacaccgcaacaaaccacaacaacaacgacgacggaaccaagcccaatgcgtcgcaagcacaacgagtacgacgcaccatagaaacagacgagcgggagcaacagaaggccaggagcagaagtagaaagaggacacagaaacaggaaggccagaacatcaccaacccgaagcacaacaccgacgagagaacaacaaataacggtgcaaagcgcgctagcagcacccagaggcaccggcacgcgaccacccaccgaagagcgaatccaccaaacgacagcgagaagaagcagaccccaagcaacggcaaaacgacaacaaacgacaacaaagacgagccaatagaccc

SEQ ID NO: 509360 - DNA, 282 bp, Homo sapiens
ctaatttagttgcgagtgaatttacacaaagcagaacaatttacagaaggaatcgagggcacaggcccgcacttaactgtctttgtgacgcatcatcctgtgatgttgaaatgtcaattgcaggatgataatgttgtgcacgtcaatcaccgggcaattgcatactcctaagcaacagttcgagttcggttactgccttctcccattgaaatccttgctgcgtgcccacacagggattactctgtgagggaccgggaatgagcaaggaatggactgccacca

SEQ ID NO: 509361 - DNA, 226 bp, Homo sapiens
  misc_feature (36)..(36): n is a, c, g, or t
accctggggcatccacaatgaggtcctgggaagagntagggagctagcatttatttatggggacacattattccactgcctcctggtaagaaatctctttttttctacactcccctccacttggcacctccgttagtgatcaacttgtattcctccttgaatcagctatttctatgcatccttctgtctccccaggcagcacacatcactatggcacagggcccag

SEQ ID NO: 509362 - DNA, 106 bp, Homo sapiens
tgataatgtctagctgtcagtacaggacgcttgcttaatgtcaaatcttctatttaaaactgaattggcggccaggcacagcgggctcacacctgtcatcctacca

SEQ ID NO: 509363 - DNA, 743 bp, Homo sapiens
  misc_feature (513)..(513): n is a, c, g, or t
  misc_feature (526)..(526): n is a, c, g, or t
tcaaattttaacattatctttgagttgtaagattacagatcttacaaaggaactttctttttcagattctaaatttctacagtgtttcacttttatacaatgagtacctattacttctgaaagtagaattaaaaagattatttttatctttgaaagatattcatcagaacaaagcactgttacaatactgaaaaactggaagcaacttaagtgtccactgataagtgattgtttcaagaagttatgcatggacttttttttttttttttgagacggagtctcactgtgacacccaggctggagtgcaatagcgcaatctcggatcaccgcaacctccgctttgcttcctgggttcaagcgattctcctgcctcagcctcccaagtagcctacaggcacgcaacactacacctggctaatttcttatatttttagtagagatggggtttcaccatattggccaggctggtctcgaacttctgaccgcaagtgatccaaccacctgggccttccnagtgcttggattnccagggggtgaagcaaccggccctggccggatgggctattaaaaaagctattaaaattgggcttgggtgcaaaagctcaatgcctcaattccagcactttgggaggtgaaaggcaggtttcccggctgagccccagaagttgagggttgaatgagcttagagttcacccctggacttcaggcttggtgaaagtgggacccatttttaaaatccaaaa

SEQ ID NO: 509364 - DNA, 125 bp, Homo sapiens
agctagctggacagtagattttcatgtcaaatgtctttggagggatgacagctaatttaaattttgagaaaactagagaacaaacaagaggctaccagtcatgtagctccgggtcacagatccct

SEQ ID NO: 509365 - DNA, 1501 bp, Homo sapiens
gatatccatgaaaactggagggccttcaaggactctcatcgctgctcagatacagcggggctcaggtccgcgtgctctccgcaccagccccacttccattttggccaaaccaagccgcaccccatgaatttctccgacaaatttcctgccggcaaggtcccagacatttgcgggtgatgactggacttcttgtgctgttatgacgacgcaaccgccatatgcctacctactgtgactgcacactgacggacgcttgcggggacacgtacctccacgacggacagacacgcccacggtggttgcacgtgggtgacgctatgtgcattgacttcctgactatagttgccacccagaccacatacctgtggtagttacccacacacttgtggcaatcattgcacacacaaccaaacatggccacttgagaatgcaaaggcaggaagttgcagggctgcacaattcttgtgggcttgcttgtgcattgctatcacattttggcaagcacgcagggcactatattccttggatggtgctgcacaccgcaagttgcacattatgttcgcttgaacatccaccaagtagtgtctagccaccccatgtaagatggacatcatatacaacgcacgtgatatactacaggatgcacattacatttatcctgacccaagggccatatatcacacaatattagcgaacaaaacctggaatgggattccgtccacaacatgccattaacagcctaggaccacccaaggtatacactgtgggcctggttcatttgggagggacacaggtgcaacacaccagctggatgatcgcagacacagcaattgaggccccaacggaataaggcattggaccataacacgacaacggataaggcaaagacgacaaccccaacagacccttaagcacaaaagggtgcacaaccaaacgacccggaggccacaaggacgcaccggggcgcctaccacccgggagaacagcacgaagatgccacggcaacagcacacacatgagacatgcagcgagaaccacgcagcggaacgaccaaaaccgaggggacgagggatggcgccccccatgggcaccacatcagagagcaaacgacagacacaggagaattaacaacggtgcgcagcccaaggagaagcactagtacatggatggaggagccccacatgaggcacacaggggaacacccgagagcgggctcaaactggccacacaaccacacaacacgcatagagaggaagggacagaccatatacagaaagagaagaatcaccacaaaaataggagacaacaacaaccaagcgtagcaaccatgcgacccaacacctgggaggagacccacagcaaagaccgagctgagagcacgacaggaagaacagacaagacgagacaaacgactagacagacacaagaacatcatgaaagcaacgcacagcggacaacgaccaaaggcggaaagaagaggggcacacagagccagtgcacc

SEQ ID NO: 509366 - DNA, 131 bp, Homo sapiens
gagatcttctatactccagaaacagagagagattatcttggagcagcaattcgaaaagttatccagagtcatatgtgtgaagaggaagagggagatcttcttcttttcttaactggtcaagaggaaattga

SEQ ID NO: 509367 - DNA, 158 bp, Homo sapiens
cccgaaaatccaaattttagctgggcgtgggggggtgtgcctgtagtcccacctgctcgggaggttaacccaaaggaatcccttgaccccaggaggcagaggtggcagtgtcccaaaattgtccccctgcctggcgccagagggtgactttgtctcca

SEQ ID NO: 509368 - DNA, 863 bp, Homo sapiens
ggagaggaggctgcaacgccgagcggaggaggcaggaaccggagcgcgagcagtagctgggtgggcaccatggctgggatcaccaccatcgaggcggtgaagcgcaagatccaggttctgcagcagcaggcagatgatgcagaggagcgagctgagcgcctccagcgagaagttgagggagaaaggcgggcccgggaacaggctgaggctgaggtggcctccttgaaccgtaggatccagctggttgaagaagagctggaccgtgctcaggagcgcctggccactgccctgcaaaagctggaagaagctgaaaaagctgctgatgagagtgagagaggtatgaaggttattgaaaaccgggccttacaaagatgacgagaaagatggaactccaggaaatccaactcaaaagaagctaagccaccattgcacgaagaggcagataggaagtatgaagaggtggctcgtacagttggtgatcattgacaggagacttgggaacgcacaggaggaacgagctgagctggcagagtcccgtttgccgagagaatgggatgagcagattagactgattggaccagaacctgaagtgtctgagtgctgctgaacgacagagtactctcaccaagaagatacattgaggaagaaatcaagattcttactgataactcaggggcagagacccggctgagttgctgagaaatcggtagccaaggctgggagagacagttggatgacctgggagggataacttgaattgcaccaaagagggtgcacctcgtgtaccaaacggatgctggaccaaaccctgttgaccttgatgaatgttgaacgcccagtgccacctggtgatggtcatcctt

SEQ ID NO: 509369 - DNA, 612 bp, Homo sapiens
gggggccctggtggccctgggatggggaaccgcggtggcttcctgcgagaggtttcggcagtggcatcctggggccggtggtcgcaggaccgatggcacggggccgggggccggaggccggcggagctacgcaggagggcaaaggccgacaggatacaggcagtggatgccctgtcacccaagtatgggcgcgctatgcgtcaaggcacatgcaagatcacagtcccttggaggagaatctatactcattactcccttgcccgattacaggcaatcagagcatcattgcatttctatccatgaggaggcccttctcatcaagggactgaggtattgggaagatatattgcccagatgcaggaaagccaagaccccgatgccgtacacagcggcacccgaggttcagagggccactcagggttgtggcttactctgagacgaacttaccaaatggtgcccagcgttcggggcaccttgagagtttgtatcacagggttggcgtcccaagtgggacgggattgggcacaacgcgtggccagttccctgatggaggggacccattcaattccctttgtgcgcagaaggcttcattccaaatcgggtcaccacgtg

SEQ ID NO: 509370 - DNA, 843 bp, Homo sapiens
taagaaaaaaataaaacaaatctttactgggggtgtgcttcggggcttggagtgtgagggcccaaatcttaatttctcaaacaatctacacaaatcaaaccaaaaaactacaagtggtttcccaggcaccggacgacgaggccagtgggcagggcgtggttgactccttaagaagaagagggaagcagggggcgcagagttactccgaggccacaccccaaatggggaggccaagaagaggacacagcagaggatacaggaggggagggttcccgagggggccaagtacgcaatccccgaggggaaccccttctcgcggggagaagcgtggagtctccgtgggggtggcctatctcgaagttctccccgagacagtgtctgttgcagccgaggaaacactccgaaggctgtggagtgtgagtccacgcggagggagagaaagaaacacgcccgagctccacgggggggcgggggaaagagttactaagcgtcgcaagacaagccccgtgtgggaggaacccccgggacacatattgggtgggcgtcggagttaaaagcccccggaaaaggctctgcccaagagagcgtttgaacagacacccgcccgcgtttgaagccccttgaaaagaggaaaacggctatggccctcaaattatcccccccgcgtttgtttttacccaccggcgggttcaggcacccctatggaggcggaaaagggcccggtgggcgccgcgagggctcaccggggctgtcctcaaagacaaggggtcggtgcccgaaaggggaaacacacccgaggaaaacgtggccccgaagggccggatctagaaaacccagaatagc

SEQ ID NO: 509371 - DNA, 377 bp, Homo sapiens
  misc_feature (10)..(10): n is a, c, g, or t
  misc_feature (58)..(58): n is a, c, g, or t
  misc_feature (60)..(60): n is a, c, g, or t
  misc_feature (87)..(87): n is a, c, g, or t
  misc_feature (93)..(93): n is a, c, g, or t
  misc_feature (100)..(100): n is a, c, g, or t
  misc_feature (114)..(114): n is a, c, g, or t
  misc_feature (117)..(118): n is a, c, g, or t
  misc_feature (139)..(139): n is a, c, g, or t
  misc_feature (142)..(142): n is a, c, g, or t
  misc_feature (160)..(162): n is a, c, g, or t
  misc_feature (177)..(177): n is a, c, g, or t
  misc_feature (190)..(190): n is a, c, g, or t
  misc_feature (205)..(206): n is a, c, g, or t
  misc_feature (213)..(213): n is a, c, g, or t
  misc_feature (236)..(236): n is a, c, g, or t
  misc_feature (259)..(259): n is a, c, g, or t
  misc_feature (276)..(276): n is a, c, g, or t
  misc_feature (288)..(288): n is a, c, g, or t
  misc_feature (314)..(314): n is a, c, g, or t
  misc_feature (325)..(326): n is a, c, g, or t
attgaatgtnacttcataactgtactacgattgtattaaaatatttctggaataaaananaaaaaaaaaaaaaaaaaaaaaaaaaancattanactctgnaattgaatattatnccnnaaaaaattgcacatagtagancgntatctgggaagctatttnnnccagttttgatattnctagcttatctanttccaaactaatttnngtttttnctgagactaatcttattcatttnctctaatatggcaaccattatanccttaatttattattancatacctaagangtacattgttacctctatataccaangcacattttannggtgccattaacaaatgtatcactagccctcctttttccaacaaggagggg

SEQ ID NO: 509372 - DNA, 351 bp, Homo sapiens
agatctacgagcgcggcagaagagagcatagcaccttgcaggcaagatagatgtagggcagtcaaagaggtcctgatggagagcccgccggactactccgcagctttccggggccgactttggcattccctgctgtcccagtgcacctgaaacgccttcttactcgtggctggtggtggtggtcctcatcgtcgtgatgattgtgagagctcctgctcatgggtctccacatgagccagaaacacacggagatggttctggagatgagcattggggcgccggaagcccagcaacgcctggccctgagtgagcacctggttaccactgccaccttctccgcgatcgaagtgt

SEQ ID NO: 509373 - DNA, 225 bp, Homo sapiens
cgatccctcttcgaggtgtctgtgtctgttactgtgaagacacagcaacagccggtagtaaacacctaaaaccccagagctggccgggcacagtggctcacgcctgtaatcccagctactcgaggctgaggcaggagaatcacttgacttgggaggcggagggtgcagtgagccaagattgcaccaatgcactccagcctgggcgacagagggagactccatctt

SEQ ID NO: 509374 - DNA, 223 bp, Homo sapiens
gcggccgcctactactactactgctcgaattcaagcttctaacgatgtacggggacatggttgggacatcagatacttacaaagatggtttaagtatggatactagagaaaattaagttttctttctctttggtttattgatttggtttaatttccattatgctattttgcataatcaaggcactgtaaatcttataattttaaaataaattacttaagaaca

SEQ ID NO: 509375 - DNA, 1196 bp, Homo sapiens
aggtctcacatcaggaattttcaaaaatgaaacaatctaataatgaagctaacttaagagaagaagtttgaagaatttagctactgcatatgacaacttgttgaactgtagctaattgaaggaaggcacaaagttttacaatgagttgactgaaatcctggtcaggttccagaacaaatgcagtgatatagtttttgcacggaagacagaaagagatgaactcttaaaggacttgcaacaaagcattgccagagaacctagtgctccttcaattcctacacctgcgtatcagtcctcaccagcaggaggacatgcaccaactcctccaactccagcgccaagaaccatgccgcctactaagccccagcccccagccaggcctccaccacctgtgcttccagcaaatcgagctccttctgctactgctccatctccagtgggggctgggactgctgcgccagctccatcacaaacgcctggctcagctcctcctccacaggcgcagggaccaccctatcccacctatccaggatatcctgggtattgccaaatgcccatgcccatgggctataatccttatgcgtatggccagtataatatgccatatccaccagtgtatcaccagagtcctggacaggctccatacccgggaccccagcagccttcataccccttccctcagcccccacagcagtcttactatccacagcagtaatatgtctgctcagcagctcagctgattcagatcagagggaaagaaataccaaccctgcaataagtgtactaaactctacgctctggttaatgtaatgtactctcctggactgaatgcagtgtataatttctgtctacagctagaagctgtgccccagttccacatttgattacacatgtgagatttgctgctgttgcagtataaacactaggtataataggatttgaaattgcattacagttcataaaaattgaaaatgagaaattaaacctgcaagtgaaacatttgaaacgattatactttctacataagacatggttgggacatcagatacttacaaagatggtttaagtatggatactagagaaaattaagttttctttctctttggtttattgatttggtttaatttccattatgctattttgcataatcaaggcactgtaaatcttataattttaaaataaattacttaagaaca

SEQ ID NO: 509376 - DNA, 453 bp, Homo sapiens
ggcgggggagaaaaaaaagcatagtagctcattcctgtaatcccagcatttggaaggccgaggcaggaggatcactggagtccaggagttcaaggccagcctgggcaagataagacactgcctttacaaaaaaaaaaaaaaaaaaaaaaaaatgggtgggcggccttgggccctggaaaaagttttcaaaacccatcgcgttgtgggggcggggccccagggggtacggtacaaccctggggccaaaggagtggttcccaaggagagaacccggggccatggagacataggggctgggcttcctcaccaaataaaaaacgcgcccggggggaacccgaacgggtctggaaaaaatcccaggatgggaggtccaggagagcaaatcacggggcgctctataaaccggggaggtcacaggagggcgctcgatcatcaaattaaggcccggcctgg

SEQ ID NO: 509377 - DNA, 1047 bp, Homo sapiens
gaagaaaagaaaagctgatattttatgtgtgttaatttttttctatcatgttaatttttaacactctgtctttgataaaggacttgcaacaaagcattgccagagaacctagtgctccttcaattcctacacctgcgtatcagtcctcaccagcaggaggacatgcaccaactcctccaactccagcgccaagaaccatgccgcctactaagccccagcccccagccaggcctccaccacctgtgcttccagcaaatcgagctccttctgctactgctccatctccagtgggggctgggactgctgcgccagctccatcacaaacgcctggctcagctcctcctccacaggcgcagggaccaccctatcccacctatccaggatatcctgggtattgccaaatgcccatgcccatgggctataatccttatgcgtatggccagtataatatgccatatccaccagtgtatcaccagagtcctggacaggctccatacccgggaccccagcagccttcataccccttccctcagcccccacagcagtcttactatccacagcagtaatatgtctgctcagcagctcagctgattcagatcagagggaaagaaataccaaccctgcaataagtgtactaaactctacgctctggttaatgtaatgtactctcctggactgaatgcagtgtataatttctgtctacagctagaagctgtgccccagttccacatttgattacacatgtgagatttgctgctgttgcagtataaacactaggtataataggatttgaaattgcattacagttcataaaaattgaaaatgagaaattaaacctgcaagtgaaacatttgaaacgattatactttctacataagacatggttgggacatcagatacttacaaagatggtttaagtatggatactagagaaaattaagttttctttctctttggtttattgatttggtttaatttccattatgctattttgcataatcaaggcactgtaaatcttataattttaaaataaattacttaagaaca

SEQ ID NO: 509378 - DNA, 221 bp, Homo sapiens
ggtgcgagctgccctttcttaatacattctcatcagtctaaccaataaataaaacgaggatgcgcaacgcattgcttggagttagtctatagcctagcgggaattatccagccattagccctggcccagatacttctagaagccctggagggaactgagaactttccaaggttgtaggccgctgaggctaggccctggaggtgggagcacacggccgctcg

SEQ ID NO: 509379 - DNA, 920 bp, Homo sapiens
  misc_feature (17)..(17): n is a, c, g, or t
  misc_feature (37)..(37): n is a, c, g, or t
aatactcgaatatttantcttattttcttcagtattnatttttggatagtattaaacacttggtactcttttgttttaattaataacaggataggaatgcttttctctgacaagtgccttgaaacagtttttttcactccactgttctttaatagactaaaaaatagaaatgactttcatgaaaaacgtagttctagaatgattattgttttattttttagtatttgatttaccaatcaagatttttctgttttcttctatcaggtattgccaaatgcccatgcccatgggctataatccttatgcgtatggccagtataatatgccatatccaccagtgtatcaccagagtcctggacaggctccatacccgggaccccagcagccttcataccccttccctcagcccccacagcagtcttactatccacagcagtaatatgtctgctcagcagctcagctgattcagatcagagggaaagaaataccaaccctgcaataagtgtactaaactctacgctctggttaatgtaatgtactctcctggactgaatgcagtgtataatttctgtctacagctagaagctgtgccccagttccacatttgattacacatgtgagatttgctgctgttgcagtataaacactaggtataataggatttgaaattgcattacagttcataaaaattgaaaatgagaaattaaacctgcaagtgaaacatttgaaacgattatactttctacataagacatggttgggacatcagatacttacaaagatggtttaagtatggatactagagaaaattaagttttctttctctttggtttattgatttggtttaatttccattatgctattttgcataatcaaggcactgtaaatcttataattttaaaataaattacttaagaaca

SEQ ID NO: 509380 - DNA, 1126 bp, Homo sapiens
agagagaggctatgagagaaaatgatgcccaggatgggctctgccgcccgccggctgcggagaggcccacactgcacacgcgcagacccagcgcccgcgtcaaaacatcagtcgacagcgcgttccccatgtcctgcgcctccggctggcaggagttcctctcagtcgtgacccccgccgccaggccggggcggacgagctaggtctgatcggcgatgccccgggagatcatcaccctgcagctgggccagtgcggcaaccagattgggttcgagttctggaaacagctgtgtgctgaacatggaatcagccccgagggcatcgtagaggagttcgccaccgagggcactgaccgaaaggatgtctttttctaccaggcagatgatgagcactacatcccccgggctgtgctgctggacctggagccccgggtgatccattccatcctcaactcctcctatgctaagctctacaacccggagaacatctacctgtcggagcatggcggaggagctggcaacaactggggcagaggattctcccagggtgagaaaattcacgaggacatctttgacattatagaccgagaagcagatggaagtgacagtctagagggattcgtgctatgtcactccattgctggggggacaggttctggtctggggctcctaactcttagagcgactgaacgaacaggttccccagaaactggggcgagacatactcaaggtgttcccaaccagggacgcgatgagtgatggtactggtgccagcgccaagaatcgctcctcaacataaaagagggggagccaatggcgatgcgctgtggttgcggcacacaaggccggaacagggtcagcaagagcgtaaaatacggaacagcacgtctctccagaacaccaccgcgggcaccgcagatgagcggacacacccccggggaccggagaagaagagagacgacgagcaggccgaatagcaaccgtgacgcccatagggggacacccacgcacaagagaggggacacaacacgacgagcacgacgcaacgacaagaaggaaagcacagagctacgcaaccagcaaaacacagcagcgcagagagggtacagcgacaacaacgggcacag

SEQ ID NO: 509381 - DNA, 1598 bp, Homo sapiens
aggtctcacatcaggaattttcaaaaatgaaacaatctaataatgaagctaacttaagagaagaagtttgaagaatttagctactgcatatgacaacttgttgaactgtagctaattgaaggaaggcacaaagttttacaatgagttgactgaaatcctggtcaggttccagaacaaatgcagtgatatagtttttgcacggaagacagaaagagatgaactcttaaaggacttgcaacaaagcattgccagagaacctagtgctccttcaattcctacacctgcgtatcagtcctcaccagcaggaggacatgcaccaactcctccaactccagcgccaagaaccatgccgcctactaagccccagcccccagccaggcctccaccacctgtgcttccagcaaatcgagctccttctgctactgctccatctccagtgggggctgggactgctgcgccagctccatcacaaacgcctggctcagctcctcctccacaggcgcagggaccaccctatcccacctatccaggatatcctgggtattgccaaatgcccatgcccatgggctataatccttatgcgtatggccagtataatatgccatatccaccagtgtatcaccagagtcctggacaggctccatacccgggaccccagcagccttcataccccttccctcagcccccacagcagtcttactatccacagcagtaatatgtctgctcagcagctcagctgattcagatcagagggaaagaaataccaaccctgcaataagtgtactaaactctacgctctggttaatgtaatgtactctcctggactgaatgcagtgtataatttctgtctacagctagaagctgtgccccagttccacatttgattacacatgtgagatttgctgctgttgcagtataaacactaggtataataggatttgaaattgcattacagttcataaaaattgaaaatgagaaattaaacctgcaagtgaaacatttgaaacgattatactttctacataagacatggttgggacatcagatacttacaaagatggtttaagtatggatactagagaaaattaagttttctttctctttggtttattgatttggtttaatttccattatgctattttgcataatcaaggcactgtaaatcttataattttaaaataaattacttaagaacagttgtcattgttatgttttgttattgattctcattactgtctaattttttttctggtattagtctcattttgtatgtatataagttaaacagatactgtttttaagtgcatgaatagtacaagttattatcaaggatgttttacagggaaatcaaaagaatattatcatactttatctttcgtatgctgattagtaaacgatttttgacatttattttagaaagtcctataatgtggaagaaacaaacagttgctaccaaagattcttcaaataaacatacaaataaatgtgtatatttaatgttttattgttagcttctccagaaaattgatgcaaattctggtaataattcttgcattttttccccataacctggttaaaataaatacgccattggcaat

SEQ ID NO: 509382 - DNA, 411 bp, Homo sapiens
gtaggcgccggcgtgctcagcgggggtgttgttgatgagttcgcccgcgcggaccgcgtaccgcgtggtcaggaacggcaggaccgcgacgttgacctgctcgccggtggatctcgcgtgaaaggtgacgacgccgccgtcgccggcgggtcgcgcctggccgacgaggtgaatgcccgccgccgccatcagcggtcggtaagcatcgaaggtgcctgcgtgatcgtgattgcctgccatcgcaatcacttccgcgccagtgtttttcaactcgatcaatgtgtgtacgacgagacgttgtgcctgcgctgacggtgccgacgtctcgtacaggtcgcccgggatgagcactgcatcgacgtgctcgcgggcggcgatgtcgacgatctccttgagcaccagagcttgttc

SEQ ID NO: 509383 - DNA, 1282 bp, Homo sapiens
aggtctcacatcaggaattttcaaaaatgaaacaatctaataatgaagctaacttaagagaagaagtttgaagaatttagctactgcatatgacaacttgttgaactgtagctaattgaaggaaggcacaaagttttacaatgagttgactgaaatcctggtcaggttccagaacaaatgcagtgatatagtttttgcacggaagacagaaagagatgaactcttaaaggacttgcaacaaagcattgccagagaacctagtgctccttcaattcctacacctgcgtatcagtcctcaccagcaggaggacatgcaccaactcctccaactccagcgccaagaaccatgccgcctactaagccccagcccccagccaggcctccaccacctgtgcttccagcaaatcgagctccttctgctactgctccatctccagtgggggctgggactgctgcgccagctccatcacaaacgcctggctcagctcctcctccacaggcgcagggaccaccctatcccacctatccaggatatcctgggtattgccaaatgcccatgcccatgggctataatccttatgcgtatggccagtataatatgccatatccaccagtgtatcaccagagtcctggacaggctccatacccgggaccccagcagccttcataccccttccctcagcccccacagcagtcttactatccacagcagtaatatgtctgctcagcagctcagctgattcagatcagagggaaagaaataccaaccctgcaataagtgtactaaactctacgctctggttaatgtaatgtactctcctggactgaatgcagtgtataatttctgtctacagctagaagctgtgccccagttccacatttgattacacatgtgagatttgctgctgttgcagtataaacactaggtataataggatttgaaattgcattacagttcataaaaattgaaaatgagaaattaaacctgcaagtgaaacatttgaaacgattatactttctacataagacatggttgggacatcagatacttacaaagatggtttaagtatggatactagagaaaattaagttttctttctctttggtttattgatttggtttaatttccattatgctattttgcataatcaaggcactgtaaatcttataattttaaaataaattacttaagaacaaaaaaaaataaaaaagacaataaaatgtaaaacaaaaaacatgttggccgcctgggcccagccgactttagattggagcgctttcg

SEQ ID NO: 509384 - DNA, 1437 bp, Homo sapiens
  misc_feature (1312)..(1312): n is a, c, g, or t
aggtctcacatcaggaattttcaaaaatgaaacaatctaataatgaagctaacttaagagaagaagtttgaagaatttagctactgcatatgacaacttgttgaactgtagctaattgaaggaaggcacaaagttttacaatgagttgactgaaatcctggtcaggttccagaacaaatgcagtgatatagtttttgcacggaagacagaaagagatgaactcttaaaggacttgcaacaaagcattgccagagaacctagtgctccttcaattcctacacctgcgtatcagtcctcaccagcaggaggacatgcaccaactcctccaactccagcgccaagaaccatgccgcctactaagccccagcccccagccaggcctccaccacctgtgcttccagcaaatcgagctccttctgctactgctccatctccagtgggggctgggactgctgcgccagctccatcacaaacgcctggctcagctcctcctccacaggcgcagggaccaccctatcccacctatccaggatatcctgggtattgccaaatgcccatgcccatgggctataatccttatgcgtatggccagtataatatgccatatccaccagtgtatcaccagagtcctggacaggctccatacccgggaccccagcagccttcataccccttccctcagcccccacagcagtcttactatccacagcagtaatatgtctgctcagcagctcagctgattcagatcagagggaaagaaataccaaccctgcaataagtgtactaaactctacgctctggttaatgtaatgtactctcctggactgaatgcagtgtataatttctgtctacagctagaagctgtgccccagttccacatttgattacacatgtgagatttgctgctgttgcagtataaacactaggtataataggatttgaaattgcattacagttcataaaaattgaaaatgagaaattaaacctgcaagtgaaacatttgaaacgattatactttctacataagacatggttgggacatcagatacttacaaagatggtttaagtatggatactagagaaaattaagttttctttctctttggtttattgatttggtttaatttccattatgctattttgcataatcaaggcactgtttggactctgggcactatttggactctgggcactgtttggactctgtgcactgtttggactttgggcactgtttggactctgtgcactgtttggactttgggcactgtttggactctgggcactgtttggactttgggcactgtttggactntgggcactgtttggacttgggcactgtttggactctggcactgtttggactctggcactgtttggactctgagcactgtttggaatctgagccctgtttggactctgagcactgtttggactctg

SEQ ID NO: 509385 - DNA, 243 bp, Homo sapiens
ctccctcggcctcccaaaatgctgggattacaggtgtgagctaccatactcagctgaatttattagttttaacaggattttgttttaatatttaagggggtattataattattttttttaactttaaaacattaaaagaaatttttttagagacaggatcttgctctgttgcccaggcttgaatgtcgtggtatgttcatagctcactggagactcaaactcctggggctcaagtgacactcc

SEQ ID NO: 509386 - DNA, 501 bp, Homo sapiens
acaccgtatatcctgacccgccaggaaaaatacggtaccaacgcttcaaggattacggctgcattgcctgtcaccaggacgtgaacattggcggcaatatgttccagaaattcggcgtgatgggcgattacttcaaggcccgcggcaaaccgctggaatcggacctggggcgctaccttttgacccaggatgaagaagaccgccatgtgttcaaggtgcccagcctgcgcactgtggcacgtcactggcgccgtacttccacgacgcctcggccaagacccttgaagaggcggttgacgtgatgttcccgtacccagttggggcgcaaaccgtcccaggaagacaaggagctgataatccagtttctcaagaccctgaccggcgaatgggcggggacagcgttatgagagccttgtcacgccgaggcaccagccaaatcctgctaggcctatcaccctgtgcctgtgctccaacctggtgaatgagtacctcacgtcttcc

SEQ ID NO: 509387 - DNA, 105 bp, Homo sapiens
ccgtaagtgtatgaaaagtgaatctttggtaaggatcaccgacagattgaccggtattgcgcagggaggcttgacgcttttcgccgattgccgcgacgaaattgg

SEQ ID NO: 509388 - DNA, 279 bp, Homo sapiens
tggccaggctctctactccaaacagaccaagaccaccaagtaaaatatcagggtcggcacggaaacgtatagcttgtagggaggggggcagaataaccccagcctcctccaggagttacaaaccggttgaccagactataatcttcttaagaataacccttcatgagggctggagtctcctccttggtgctggccttaccaacaggatcaagggccctcactacccgatctcatgcagcttggcacattgtaggtggtctggatacctgggcagctatg

SEQ ID NO: 509389 - DNA, 107 bp, Homo sapiens
gcgacacggcaggttcccgcccggaagaagcgaccaaagcgcctgaggaccggcaacatggtgcggtcggggaataaggcagctgttgtgctgtgtatggacgtggg

SEQ ID NO: 509390 - DNA, 291 bp, Homo sapiens
actaaaaaagttagccgggcgtggtggcgggtgcctgcaatcccagccactcgggaggccgaggtaggagaatcgctcgaacccaggaggcggaggttgcactgagccgagatcgcgccactgcactccagcctgggtgacagagtaagactctgtctcaaaacaaaacaaacaacaaaaaaaccaaaaacaaaaaacaaaaacaacaacaaaaatccccacaagctctaggagtttgggatagagatacaactgaagtctctaatacagctcctactcgtttctgtcgac

SEQ ID NO: 509391 - DNA, 692 bp, Homo sapiens
  misc_feature (10)..(10): n is a, c, g, or t
  misc_feature (73)..(73): n is a, c, g, or t
  misc_feature (594)..(594): n is a, c, g, or t
  misc_feature (634)..(634): n is a, c, g, or t
gtggtgctangagtccaatgtaaaattcagagcactcaggtcaagcagtcaggtgcaggttgctgctacaatntgcctccatccttttctcacagcaatgaatttgcaatctgaacccagtgaaaaaaacaaaattgcctgaattgtactgtatgtagctgcactcaacagattcttaccgtctccacaaaggtcagagatgtaaatggtcaataccgactttttttttattcccttgactcaagacagctaacttcattttcagaactgttttaaacctttgtgtgctggtttataaaataatgtgtgtaatccttgttgctttcctgataccagactgtttcccgtggttggttagaatatattttgttttgatgtgttatattggcatgtttagatgtcaggtttagtcttctgaagatgaagttcagccatttgtgtatcaaacagcacaagcagtgtctgtcactttccatgcataaagtttagtgagatgttatatgtaagatctgatttgctagttcttccttgtagagttataaatggaaagattacactatctgattaatagtttcttcatactctgcatataanttgtggctgcagaatattgtaatttgttgcacactatgtnacaaaacaactgaagatatgtttaataaatattgtacttattggaagtaaaaaaaaaa

SEQ ID NO: 509392 - DNA, 723 bp, Homo sapiens
  misc_feature (10)..(10): n is a, c, g, or t
  misc_feature (73)..(73): n is a, c, g, or t
  misc_feature (434)..(434): n is a, c, g, or t
  misc_feature (439)..(439): n is a, c, g, or t
  misc_feature (448)..(448): n is a, c, g, or t
  misc_feature (450)..(450): n is a, c, g, or t
  misc_feature (625)..(625): n is a, c, g, or t
  misc_feature (665)..(665): n is a, c, g, or t
gtggtgctangagtccaatgtaaaattcagagcactcaggtcaagcagtcaggtgcaggttgctgctacaatntgcctccatccttttctcacagcaatgaatttgcaatctgaacccagtgaaaaaaacaaaattgcctgaattgtactgtatgtagctgcactcaacagattcttaccgtctccacaaaggtcagagatgtaaatggtcaataccgactttttttttattcccttgactcaagacagctaacttcattttcagaactgttttaaacctttgtgtgctggtttataaaataatgtgtgtaatccttgttgctttcctgataccagactgtttcccgtggttggttagaatatattttgttttgatgtgttatattggcatgtttagatgtcaggtttagtcttctgaagatgaggggggtttntttcncccccaaangnccactagttcagccatttgtgtatcaaacagcacaagcagtgtctgtcactttccatgcataaagtttagtgagatgttatatgtaagatctgatttgctagttcttccttgtagagttataaatggaaagattacactatctgattaatagtttcttcatactctgcatataanttgtggctgcagaatattgtaatttgttgcacactatgtnacaaaacaactgaagatatgtttaataaatattgtacttattggaagtaaaaaaaaaa

SEQ ID NO: 509393 - DNA, 149 bp, Homo sapiens
  misc_feature (28)..(28): n is a, c, g, or t
tcgaatcgttttagacgaaggaaattanaaaaatgttgtaactcgcaacagcactgttgaatattgggtatcggctttctttttcactttgactcttaacattatcagtgcaacttccacattaatgaaagttgacctagttgatttgc

SEQ ID NO: 509394 - DNA, 209 bp, Homo sapiens
gtcggagtagactactataagatagcagataaaaatatcaaatagtgataaagtatcagttaaagtttataactgatgagtatattttttaattattaaatgtagttaaccatacatttattaaaaaagttttattttagttttaaccaaatagtaatttgtaataatttgtatttatttttggagaacactgtgatgttttgttacat

SEQ ID NO: 509395 - DNA, 247 bp, Homo sapiens
agaacacgcattatagcatagtactctatttcagattccgtcaaagctgggcgttgtagcgagaatgaccaatttcgcttggccttgtctgatcatcttcagagtctgcttgtaccccaggacgtacttcccacttttcataacgagttggagcctagagttgatcgactccagcgactttttcgtcttcttggcggccaccatcttcctgccttaggagcgggacggcccccaaccaacagcagcc

SEQ ID NO: 509396 - DNA, 463 bp, Homo sapiens
  misc_feature (422)..(422): n is a, c, g, or t
  misc_feature (443)..(443): n is a, c, g, or t
gtagatgaccgcctgtgcctggctgacgttgctcggctggccaaaagtacaaatggggattgaatctctgcaagcgttcttgcgtgcggcgtttgcacttggggtctgggtttacaccttcctcgaacgtattctgatcccaaccggtttacaccacttcatctacggacagtttatctttggtccggcagctgttgaaggcggcattcagatgtactgggcgcagcatctgcaagagttcagtttgagcgccgagccgctgaaatcgttgttcccggaaggcggttttgccctgcacggtaactcagaaatctttggtgccgtgggcatttctttagcgatgtacttcactgccgcaccggaaaatcgggtacaagtggcgggcttgctgattcccgcaaccttaaccgccatgctggtgngaattaccgaaccgctggaanttaccttcctggggatcctc

SEQ ID NO: 509397 - DNA, 369 bp, Homo sapiens
accggatggcctttactgcacttgcagagggggagcagtagctcatctgacagaatgctgcctgactgagggggggctgcctgaaggcaaagcgctccctgcctgataccccagttccacagccccacagcactggggctcctgcctaataaactcttacattgcacacccccttcacctcccagcgagcctgccagccgactacctcaattttcagtctgaatgattgattgcttcaacgggctacaacacaacagaattaagataacacatgctgtaactttaaggactgcaacatgaccctcgctgcattccagcagaaggccactgccaggacgtggtctttattttgtgagtcgagcccagact

SEQ ID NO: 509398 - DNA, 1095 bp, Homo sapiens
gaaaggctggaagacgagcctgcaggatgtttcctcaatgaggggaaggctgctgcacaatggcagtttttgatactcctgaggaggcctttggtgtcttacgtccagtctgtgttcagctcacaaagacccagacagtggagaatgtggagcatctgccagacacgacatacaagactgtgagatgacacgtgcccgttctaggaacgttcagacagatacaatccatcttccctctgcgattaaccctgaagaccccaggtcccaaaagagagcgatttgatccaaagtgtggatggaatgcctcacatttgtcactattcttcaacatgatgtgaaagaacaggagcttctccaggaactctatttcagaacatctctgcattgatctgtattcacccagactcccaaaaacctgaaggaatgatgatccgaggagttgaaattggctgtgatccagagacttagcacattaatgcactcagcttatggggacatcattctgactttattatgagccctccattctgccacgtttaggatttgcatgtatctattacatgataggccttgacagaaacaggagaaatcaaagcaattaaaattgatgccttaaaatgtatacaggttctactcttgcagatgtgattgtccaggtcacatccaaaggtcatttggatgaacttgaacaaagcagttgggggatatgaaagcatctataatacttggaatttcaaatgaaatgacaagataataacagaaacttcaaacaagtaaaaactatgatgaaatattccgtcaagaatcttatacacgaaacgtgaagcatcaaacatgacggtgaacaatcacaaaaaatccaaaggtccaggaaaacagtaaaagtagaaaaatataactaaaattgtcaggttataagaggaacacaataggtgtaactacttgtgagagattgaatagtgtctataaacgaaacaaagggagagcgaaacacttacgatgaacgcatctgataaaaaagaaagagatagactgcaatagcaataagagaagaatacagtataatatagataataaataaacatgacgcctagc

SEQ ID NO: 509399 - DNA, 339 bp, Homo sapiens
cacctccccaatcccagctacggggaggcggtcctgcatggtggttaagatcaaggcttttgagtgaaacagaccaggaattgaatcctgcctctgcagcttacaaactgcacaccatctatctgtttacgaaaccactgaaagcttccttgtttcatctgttcatgaggatagtatttttttactcaccgcagtatgaggatccattaagatgtatatccagagtttttagaacagttccccgcacattttgattctctcgtcttggcttgacagcaacacaaattccaattccagtaggactcaactcaaatatatctcttatacaacttcaagaaa

SEQ ID NO: 509400 - DNA, 1012 bp, Homo sapiens
cggacgcgtgggtcgagccacgcgtccgccacgcgtccgtaaatattatactagcattttaccatctcacttctagagaatactagtatatcgcctcacagcctcatatcctccctactatgcctagaaggaataatactatcgctgtctcattatagctacatctcataaccctcgaagcacccacgtccctcttagccgaatattgtgcctattgccatactagatcttttgccgcctgcgaagcagccggtgggcctagccctacatagttctcgaatcgtccaacacatatggcctagactacgtacgataacctaaacctacctccaatgcttaaaacataatcgtcccaacaattatattacgtaccactgacatgacgtttccaaaaaaacactatacatttgaatcaacacaagccatgctcacaggctaggttattagtcatcatcccccctactatttttggaaagcaaatcaacaaatcgaactattttagctgtaccccaagcgtttttcttcctacccccctaaacaaccccctcctaatattgatatacctgatttgctacctctcacaaattcatgcgcagcctgacgtccacttctccagtgaagccaactatctactgaattgagacgtcctagcttcgtcctaatacttaggttcgtcctctacaagatctcgtttagattatgcggcatttcccagcaccgctgaacctaatccgcatttattatcatctttcgaaaacaaaagttattccacaacggtggtaatcatccacccgaagaggcaaccacgccagaacggcttgaggcggggacatagttcaatcaaacgccttgtaaggcccttccctatacattgcagaatattacttcataactaggctttataaacttaaatccctacggcagaaattcatctgagacaagttattacattcaccacgttagagcacactaggaccatactaaacctgaccgctgaacaaccggctacgcg

SEQ ID NO: 509401 - DNA, 766 bp, Homo sapiens
gtgtaagctagtaccaggtgtccacccaggcggtcttaccgagctctggtcaaccgagcacaggatcctgctgaagagtctgtcacacaagcctgtgaccgacgagcaccggacattgcaccgcatgatgactgaagatgcactgaattctgaccctacgcgacacaggtcgacgacagacacgaggacaagtccagagcgaagactctctagtgacacctcgagaggaaggctcgtctgtgtacgagcctgtcctattcctcctatgcgtgcctccttgagctatgcgcctgagatgatacaaacgtgggaccatcttcgggaagggtatacactggcgtatgaacgaccatctagatcctgagaagagtatgactcggtgccataggtctagctggggtagtcaagacttgacccacgcaacacctttgacccagcattggacattggcttgggcccagaagattggcatcggagggactcatcgacgaagcgagctcagctagacaatggtcgtaggactagacagcagacaaatacccgtggattgggcaggtggcccgaccgagaggtcgtggggtcagaagttctttcaatcatgattagaccaagacaaagaggagccagtagagaagccccaagagaaacgcagtatggtgggcagaccaggaattggactttgggacaggtgtggtcacaggccactcacatgggcgcttcactccgcaggtaaagcttcagggtgggttttaactaacaggcactg

SEQ ID NO: 509402 - DNA, 671 bp, Homo sapiens
  misc_feature (415)..(415): n is a, c, g, or t
atctccgacccttactctcctcccacctccattcatccatttattcatctatgtatccatccattcatccatccacccaactatctatccatccaatcatccagtcatctttccatccatccacccatttattcattcatccagccatctatctctttatccatccttccagcaagtgatccatccattcacgcatccagatggctgtctgtccattcattcatccatccaccacttcctacccccagacccatctatccacccatcatccactgacttcaaaagcttcatttgatcgtctgtgcagcagacatggtgtgtgatgctctgacacctcttaagtgctttggttgcccacaagaacctcacgggaggtctctaagttgggctcagaccttggtaatgaaaaccaganataaaagtgatttaaagaaagctgatagaaacctaactttagcaaatggtaagataaaaatgtactcctttgtcctgtaaaagaagttgggaatgtgagtcgggctggcacagccgtcctgctgtatcatcagccaccctgatacctttgctcaacgtgttctgccatgcttagaatacaacttctggccgggcgcggtggctcatgcctgtaatcccagtactttgggaggccgaggtgggtggatcacctgagg

SEQ ID NO: 509403 - DNA, 651 bp, Homo sapiens
  misc_feature (484)..(484): n is a, c, g, or t
  misc_feature (630)..(630): n is a, c, g, or t
ttgtgatgactcatgcctgaaatcacagcactttgggaggccaaggtgagtggatcacttgaggccaggagttcgacaccagcctggccaacacggcgaaaccccatctctactaaaaaatacaaaaaattgccagaagtggtggtgcacgcctgtagtcccagccactctgagactgaggcaggagaatcgcttgaacctgggaggcagaggttgcagtgagccaagatggcgccactgcactccagcctgggtgacagagagaggctccatctcaaaaaacaaacaaacaaacaaaagtgtgcctcttgggctcggcgcagtggctcacacctgtaatcccagcactttgagaggctaaggcaggcagatcacctgaggccaggagttcgagaccagcctggccaacatggtgaaaccgtgtctctacttaaaatacattagctgggtgtgctggtgtgtgcctctagtcccagctacttgntaggctgaggcacgagaatcagttgaactcaggaggcggaggttgcagtgagccaagatcacaccaccggacttcagcctgagtgacagagtgagatcctgccttgcacgtttatgcaatgccggcgcaatccgagctcactcggncttcgccctatagtgagtggc

SEQ ID NO: 509404 - DNA, 251 bp, Homo sapiens
tttttgtagaaatggggtcgtactttgttgccagagcttgtctcgaactggactcaagcaattctcctgcctcagcctcccaaagtgctgggattacaggcatgagccaccacatctggctttttttttttcttttttttaaatatagagacagggtcttgctatgttgtccaggttggtcttaaacttctggcctaaagtgattctcccaccttaccctcccaaagtgctaggattacaggtatggtgag

SEQ ID NO: 509405 - DNA, 300 bp, Homo sapiens
gaacgctgcaaaagggtgcagcagggcactcagtgagagaggactgagcgcactgaggtggattttccttaggagcatttatggaccttaaggcagaagcttaagggcaatttggaccatactggccacataggtcatgatacatgattacatctgtagatgttttggtgccttaacgtcagcaagggttgcacagtgagtttcagcatgccattccagagatgtgtagaaattctagttacttataaatttggagggaagaatctgggaccagatgcctgctttaaatgatagggaggt

SEQ ID NO: 509406 - DNA, 979 bp, Homo sapiens
cgctcacgcggcgatcatggcgtatcagtgtctcactgtgcctctcattagtgatgagcgtgttctggggcttcgatcggcttcttggtgccttggatcatccctaagggtcctaaggcggaggaagttatcatgtaccatgttggtgacctgttcagtttgctgctatctctttcggctgattgcaatatctggtccatctcaagcctctcttggcgacccgcagatgcgaaaaatgaagagccatctggtatctgaagtatcgattggccttgaggaagaggacatgctctacagagctcagtcttggaggtcagcgagaatgagaatgccttctagatgcaagatcacgctccaaagcagatcactttatctggacttgcctgtgaggccattatgtgcccttaaacgttaacagcacgatttgaatgccgtatattctaccaatgcagccgtgtttaccatttgcctttagtgcactttggtgaattacgtggcctccataacctgaacgggtgccgactccgacaaaacgattatgtaactcttctgagatagaagaagctgttcttcatgacgagatacgttagctctctcctggaatctgtggatttgcagatggttcctgcctgctcaacgtggggacatcaggtggacgtgtttcagaaaaccggctgtacgacgaacactagaactcccagtgggggggggtcagttacgacgagccacgttcggcagggaagaagccctcttaataggagtcgcccgaaatgatactctgaagatgaattctcttctggcgacttggttaaattttccccgttttgtggagcacacagaaacacaaggggggggctaaagagcccggggccccgatgcgcccgttttgtgaaggccctagagggtaataaagacggcgttaaacgctacacaacctcgtttggacacctgtggagtgtcccaaaacggaaaatgattg

SEQ ID NO: 509407 - DNA, 1172 bp, Homo sapiens
  misc_feature (1172)..(1172): n is a, c, g, or t
aagatatacacatacagtcaagtggctgaacacccaccagcaagattgctggaaaccaagccgcaccacacctgccggagcatccaggaccatctactcagtgcaggctcagcagccatgcctacctttgtccatcccaggtatggctcccccaggtgccagaatcatcaacacacactgactgatgatgctgctcttacctgctggcacgcagtcggctgcctcccagctctaagcctgtggggcagccaggagagtcttgcctctggcctccgttggtcccatacttcctggcgagtggctttgcacggcagcccagccctggggaactatttcaatggagatgaggaagctgtctaaacccacggctaatgctaccccattgcttgatctgaatggtctagtccgaatgaagttcgtggaccaatcgccagtttattttggccggtggccagggattactggtattgatccaccctaatctggggctattgggcctcgaatatccgcaggaagcaaattacacatcgatgtctgcatgggaacaggtggatcgcgaagaaggttcattttgggcagacctgttcaatcgactgaaagatgatggctggctttaaacaatgcatcctgcagtagatagtacatgggcagcgatcaaatggcacaactcaggggaatgctgtcccagttctgaagaaattagcgaaagcaagtcattacattttaaggcaggtaacccttctggggcgatgcgagaaaagggttcattatctgatcgcattggggaacaaattggactcttgttcatgttaatcggggaacaggataagaaaaaatgtcgggcaaaacagattaatgcgcccaaggggtagggcgattctaagcggcgatgaaggaatggttgcgggcggaacggggtttcgctgctgaaacgctggttcctttccaggtccgatgcgagtcgtgccatagttacttgtcgctgcgctgccccgctagggcaatgtccccttgggactacctcgcgaattgatacccatgttttttagttgttcctttggtcgcgcagtggtctctcctgtaaaagtggtgtgtgcgtaatatctcggctcttctttggcgctcggcgctatacaaacctcttgcttttcttatccgtgtgtccgttgtgn

SEQ ID NO: 509408 - DNA, 106 bp, Homo sapiens
  misc_feature (53)..(53): n is a, c, g, or t
gtagttagaggatcccatccggctctgggtagagtatttgaaacttcatcaantggaaaagtggttggggttcctgggtttgaccacgtgaaaggatggtgggaga

SEQ ID NO: 509409 - DNA, 358 bp, Homo sapiens
aagaatgatatatatatgatagatatatatttccataggacaacaacatcagatgtctacccctagatgaacgatgcagagtcaaactgcaggttcttaaaacaaaaacaaaaacacaaacaccatgatactaacaacggtggcagggtgagggtgaggaatcaccgatggagagatccaaatcagaaggaaacgtagacatagagtcccaggctcgtgcccaccgccagaaatccagccccgcctgtgctgagatagttcgtctaaggtgctccaagagatcccccttggactgcaagagaaggtgtccctgccatatctgggtcgcttccttttccactctcctcagcccgccatc

SEQ ID NO: 509410 - DNA, 624 bp, Homo sapiens
  misc_feature (613)..(613): n is a, c, g, or t
  misc_feature (621)..(621): n is a, c, g, or t
cctcggggctgtaacataagcggctgcggacttgtacaaacagcctcagcacccctgggagctcgagacatctaaggagttgactgaggcccctccctgacatactgaagtggaatctgcattttagcaagatctgcaggcatgtgtgggccattgcagcctgaattaatcaggagggaagaagaagtgcgacgataactggccagtgatacacagtgggaggtctggaagaatgcacacccaatgctcacagaggttccatctgggaaatcggattggacagggccagaatagatccggggaaacattcactgaatatatatacttatgtattgtggaagctttgatggtggtcatgtacccaagaagggaaaaaacagactgcggaactgcccatgaggccaagcacctattagtagaccaagaagcatcacccatccatggcctaagtcggcagccagctattgttctcatctgagtctgggagttcaggatttccatcctgacccggctactttctttcaacagttacccactgtaaatttccgaatactttcagctactaatcccagtgtacccaattaaaaatggctttcctaataaaggcatttcngatcgaantta

SEQ ID NO: 509411 - DNA, 402 bp, Homo sapiens
  misc_feature (92)..(92): n is a, c, g, or t
  misc_feature (228)..(228): n is a, c, g, or t
  misc_feature (241)..(241): n is a, c, g, or t
  misc_feature (263)..(263): n is a, c, g, or t
aggaagttaaatatcttgctcagaggagaaccaaaggttatattcaggtctgtcgtccagagcccatgctaggcctgcatgccgtctttccntcgagtgtttgagtctagttagcagaggccttcgtcagggcttttgttgtgggtacctgatctcatgaaccgtgggcccgtctgttcctttctaccctcccttgatcccgtggattccaaaccgccttccctttanccccttgggtggnttcgacacaatggctttggccnaggccccaggaccccttccccatgtggccctgtgggatataaatttttccgccgttgggttccgttttgtggggcccccaaggcgggttttgggcgctgttccacatttgggccccctttgggcgccaaaacctttccc

SEQ ID NO: 509412 - DNA, 112 bp, Homo sapiens
gggttttatttcaaagggaaaagtttgaacccccccccccttaaatatttttttttttgggggattttggggccagttaaaaaaaaaaagggaacccttgtgttttccccta

SEQ ID NO: 509413 - DNA, 470 bp, Homo sapiens
  misc_feature (459)..(459): n is a, c, g, or t
  misc_feature (467)..(467): n is a, c, g, or t
cctcggggctgtaacataagcggctgcggacttgtacaaacagcctcagcacccctgggagctcgagacatctaaggagttgactgaggcccctccctgacatactgaagtggaatctgcattttagcaagatctgcaggcatgtgtgggccattgcagcctgaattaatcaggagggaagaagaagtgcgacgataactggccagtgatacacagtgggagacagactgcggaactgcccatgaggccaagcacctattagtagaccaagaagcatcacccatccatggcctaagtcggcagccagctattgttctcatctgagtctgggagttcaggatttccatcctgacccggctactttctttcaacagttacccactgtaaatttccgaatactttcagctactaatcccagtgtacccaattaaaaatggctttcctaataaaggcatttcngatcgaantta

SEQ ID NO: 509414 - DNA, 466 bp, Homo sapiens
aatggctcaggcatgttaaccccagcctttgagaggctgaggtgggcggaccatctgaggctcaagagttggcgaccagcctgagcaacatagtgagacccgatctctactaaaaataccaaaaataagccgggcgtgatagctgcacgtctgtagatcccagcatagtagggatgctgaggtgggaagatcgcttgaacacaggaggtgacggcttcaggttagcagtgatggtgccactgtactcatccaggcaacaaagtgagactttgtctcataaaaccccaaaaccaaatgtagtagtgtgctgtagggtatataccagcacggagtcagatcattaatgcagaagtacagacaaaaagaaaattaatggaattagttataggcttatatggaggaagcatggatcagaacagacaggacacggataaatctaatacctgaaatggatctccaacaggaa

SEQ ID NO: 509415 - DNA, 293 bp, Homo sapiens
tgccacatctgagttctagaatggggacataggagaagaaagcctctcatggactccgggagatggtcccagaagggagtctagctggtgcagtttccggctgtaggtaaggctggacgggatgagctcctgccttcttcctcctcctccatagccaagtcctgagagcttgaagcctgggccccgcctggggcctcctcgcagccctctccctcaccacggccgccaccgctgctgcccggctcgcctccaccctcttccaggggctccagcgggggcatcgataaacaccg

SEQ ID NO: 509416 - DNA, 405 bp, Homo sapiens
tctgcatcgctaatccttttagatatgaagtccacacacatattgttagggatggattggggatgaagcagcctctttgcttaattacattgtgaaccctttccctatgttgagtttcaaccaagaatgcaataactagcatcaaacgattcttctgccgttcttcctttctttctcttttattctctcttcaccttccccttgctgttccacggcgtctttcactttgcgaggctggaaccttggtggatatttctgcatgtggatttgccactgggtgaagtggccgttgatcctgttccttattgactggttccttatcattgagcaaaagcgagaaacacatattcattttaaatgtgtacctagagttctcacgttattgcctgggcctactacattaac

SEQ ID NO: 509417 - DNA, 107 bp, Homo sapiens
cgtacgaggtctctgtatcgctcccccgtgactgcaccgcacggcctgctccagcttcccgagtaccccacctgtctctttactactgatcgctccccccgccccac

SEQ ID NO: 509418 - DNA, 1011 bp, Homo sapiens
gaaggtggaagaaggtgggagaggccgatttgctaagtcttccagccttcatctttctcccgtgctgcatgcttcctgcccacgaacatcagactccaagttcttcagctttggggctcttggactttacaccaggggtttgccaggggctctcaggccttcagccacagactgaaagctgcactggtcggcttccctgctttcgaggtttgggactcagactgggcttccttgttccttaccttgtagatggcatatttggagagttcaccttgtggatcgtggttcttgtcaggaatggctggtccccctaaatcttaacaatgacatttctgtacctatctacatgatcgcctgcagataaatgccttctgattggttggcacaaagaattatgcaggattaaaaacttcaatgaacaatatctcccttctgttagggctttagaaatcacggtagtatcggtggaactgtacccctcccagaccccaattcacatggtgatgttctaacccgcagtacctcacaatgtgaccttatttggagataggcattctttacgaggtaatcaaggtcacacaatgagggtcatagggcaaggcctaacccaagatgacaggtggtcctctattgagacaggcgggaattggacttagaacacaaccaagggacaatctgttgaagattgaaccagagaccggatgctgctcacactggcccaggacacagagaatgccaaacaacactaggaatccgggaacgcgggaacagtgggcccccacaggccccaaggagctacactggcaaaggggatacgaactaaccaccccaagtgggggcgaaaggggtacgaccgcatgggcatgacgaccgcgaaagaaaacgcagagcgagggggccccaaactcgggcagacgggggaagatatatgagagcagaggggaacaggcgccgtgctcctctctaactgacctatttgtttccatcgagcagcgataaacgcaagcacaa

SEQ ID NO: 509419 - DNA, 270 bp, Homo sapiens
taccccttttatttttttccccgcttccccagtttttaaacattgggcgctatttactcagctcccccgtagggcttgaagctgccctttttgaaaagttggtatggggtacccctaaagtagggggtttgggggggttttccttacctggttatgataaaaatgcccatcaaaccctttccccgttttttcctgtattccggatcagattgcaaaaacggaatgtttcttttttttccgccagggatttaaatgcctttttaaattcca

SEQ ID NO: 509420 - DNA, 1089 bp, Homo sapiens
gtagcgactgtgcctgtagtggagcgcttcctcctccccgccgcgccctcgccatggcctgcgcctggccccgggcctcatctcgtgtgttctcgagttcccagtgagctgggtgctggcgcgtagctgcagctgtgttgtgcccatgctgctgcatgcatgcttgcctggcagtggtgccctgctgccctgtttctgctgctctgtgcttgtctgtggcgtggatgcctcagtctcgattgctatgccctgcgacgctaccctgcctgcctgtcgccacctgcacctggtgccaggctaggcttaagcgctgctggcacgcttgtggcttcttgcagacgatgcgcactcgtgcccgttcggagtcacgccgaagagcacagtacgtgctctacccgggacgcatctttcctctccaggactgccggagtcccaggaaagccaagggtgaatcacgcattaagcccctggagcttgccttgttggacggaggcgtgcttgaagtgactaacgccaagaaagcttgagcaccacggcagttccaagtgggacctccagtcccggttattacgacctgctgaatcctggtgggtgggccccgactggtcacacgcgtgctcacttcgttcccagaacagcccgctccttacagggacgctgggacgaaccgatatggggggttcccagtcgagttgactcccccgaggaccaccgggcaccagagggtgttgaaccgctcgacggctagcatgtccgtgagagttgcgggcacggacaactgtcgatctatggtgggcagagctggagaacagggcgacggcaagggatgttgtcttcgacaggccgcgattatttgtgacgggaccgaaggaagtgacaacaaccccgggttggcgccggcacggacacgttgggtccagtggccccccacacgagccgggggcaacacggttggtgactagcgatatactatggcactcaagcggcgtgggccgcacgccggcctaccttcacgcggttgcccgttttgaggagtgccgtacgcacgagtataggtaaggattgcggcagcgatggtgactcctgcag

SEQ ID NO: 509421 - DNA, 620 bp, Homo sapiens
gcgccagagacgcagccgcgctcccaccaccacaccaccggccctcgttcgcctcttctccgggagccagtccgcgccaccgccgccggccaggccatcgccgccctccgcagaccatgtacagccaggtccgtgtcctcgatcctcctaccggcaggatgttcggcggcccgggcaccgtgagccggccgagctccagccggagctacgttgactacgtacacccggaactacagcctgggcagcgcgctggcgcacccagtagccaggcgcagacctctacgcctcgtaccccgggcggcgtgtaatgccacgcgctccatctggcgtgcgcctgagagagccagcgtgcccgggggtgccggctccctgcaaggactcgagaggactatctcgctggccgagcccatcaacaccgagtgccaaggaacagcccggcaccaaaacggaggacgggtggaagcttgcagggagctggcactgcaccgcgatcgcaagtacgtcgcccaaggatgcgcataccctgggacgcagcaagctacgaatcctgctgggccgagcccgaagcagctcacgggcccaggcaagtcgcgcctgggggaacatcaacaggagggaga

SEQ ID NO: 509422 - DNA, 755 bp, Homo sapiens
ccagaggtttcgccaaggtcacccctctgacatccggcctgcttcttctcacatgacaaaaactagcccccatctcaatcatataccaaatctctccctcactaaacgtaagccttctcctcactctctcaatcttatccatcatagcaggcagttgaggtggattcaaatccaatacccatactacacaaaatcttagcatactcctcaattgacccacataggcatgaataatagacagttctatcgtacaaccctaacataaccattcttaatttaactattttatagttatcctaactactaccgcattcctacatactcaatcttaaactccagcactcacgacctctactactatctcgcacctgaaacaagctaacatgactaacacccttaattccatccaccctcctctccctaggagggcttggccccactaaacgggtcttttggcccaatagtgggccattatcgaagaattcataaaaaataatagcctcatcatcccccatcatcatagccaccatcaccctccttaactctacttctatctacgcctgaatctactccacctcaatcacagtatccccatatctaacaacgtcactattacaattgacagtttgaaattaaaaaaccagccattcgttcccagactcatgccttacagcgtatctactgattccttttatatgataatctttaaaaaaaaatggggggcggctaatatcccggggcccagtgggccgttg

SEQ ID NO: 509423 - DNA, 915 bp, Homo sapiens
gatgagaagttgcaagagaaggcatggggtgcagttgtcccactagtaggcaaattaaagaaatatacgaattttctcagaggttagaagcagcattaagaggtcttctcggagccttaacaagtaccccatatctcccacccagcatctagagcgagagcaggctcttgtgctaaacagtttgcagaaattcttcatttcacactcgggtttgatgacctcaaggatgacaaatcctgccataacagaatgatccagctataatagaagaacatggagtcgtatgaggataaccaatgtaccggcagaaggagaaaagtgagtaaattaatgattggcgcaaatcgaagtgtcttggtataatgctgaggcaatccaatgttgaaaaccttgagttgatgccaaacaaaaattttgtatcagagaataaaaatgtttaccaagtagaaaataccacagaatggttttacgcacaatggctagttgtatgcagagtcatgtggaaacaaccggaatacaggaagcagatttaccacacttgaaagagacacgtgtcatctgctatgagggataatggggggggtcataaatactcaatgaccacgtacatccaggggaggcattttgttaaaaatttccaaagatggtatgaaaggttggaatcaaagttcttaaggaccaacctcataattagtggggaaggtcttctaaaatgtctaggtaccacaaacattgatgtggaatacttcaggaataatctggtgatacaatttgtatagagctgtgtggacaaaaaggtttgaaggggaaagcgtagggtggaaaaaactaatatgggaaatagtgggactacatataaatgttaattttgggaaagacgacggagtatcatcaggcagagggatgtgggcgaaa

SEQ ID NO: 509424 - DNA, 141 bp, Homo sapiens
acctctttactcaacctgaacaggcacaggcaaaggcagtcctcccacctcagcctccagggtagcttgagtctacaggcacaatgccaccacatacctggattaaattagtatatgccagaggtttcaccaattttagtc

SEQ ID NO: 509425 - DNA, 112 bp, Homo sapiens
  misc_feature (17)..(17): n is a, c, g, or t
  misc_feature (89)..(89): n is a, c, g, or t
  misc_feature (91)..(91): n is a, c, g, or t
aaggaagatgaaaatanaagtaaaatttacaattttagaaggagacaattcaattttgtttaaggatatctataatgacacaggataananaccatagttgacttactgacg

SEQ ID NO: 509426 - DNA, 214 bp, Homo sapiens
tctcttccaaatagtgttctgtttctctctgtttgtcccctcttgcctgtgttcttctggggccattgtgctttcggctgtgtgcattaataaatgatgtgtatttaatatagacctgcttgcatgggctgatgctcctctaatacccggaagttggattcaaccacccataggggtggtcataggcgaatggccatatagccgttggacaaat

SEQ ID NO: 509427 - DNA, 394 bp, Homo sapiens
cccagaactttgtcctcagagcacagtttaatcaggccaggcatttccgtttcctcccattgggcctgactttgcactcgggtttctcacagtccctcttccgacagcttgtctgctgcagcttatattccagcctcacaaatattccagctggaaagggcgtgtccacggcgctctccacactggtctcctggaaggccctctgcacgggcgggtgcttgtaaatctcctccagggccacttgcaggcccgcggctctgggcttccgtgagctcggcaacgcaagcccaggcaccacccaggcacagagggatcagcagctgtcgcatgcttccgtgtcactctgggcgtccttccgtgcgcctagaggtctcccctgagcgtcccacatctg

SEQ ID NO: 509428 - DNA, 188 bp, Homo sapiens
ggacagtgcgtaggacgcacgcaggtaccgcgtccataaagtgcgcatgcttgagtaccgagtgggaaggctcgtcaatcaagggtagttcacattgtggacgctgtcgagctttggccaggctcagaaatacgccacatccgacacttctgcatccagcacatcctgggccaacgcccaggcgcgat

SEQ ID NO: 509429 - DNA, 1830 bp, Homo sapiens
  misc_feature (943)..(943): n is a, c, g, or t
  misc_feature (1147)..(1147): n is a, c, g, or t
cagcaggcatggcggctgggtgctgctcagacggcttctcctcctcctcttgctcctccagctcctgctccttcgccggtgatgtgcctgccctgcctgatgtcctgcgccatgctgccgatgtgcatgcctcgctgcgccccatccctgtcccgccgtggcactcgtgatgtggcagctgcgcctgtgagtgccaaggttgcccctgcactggccctggctggtgctgagcagagctctgtggcttgcagacagcccctgccgtgctgtgcagctgcacaggcaaacttttgagaggacgtgcagatgcatgcatgcacccagtgcaagctggccggcaagcaggctggcaaatatgacccccattgagcatcagaggcgtacatacagtaggcatccattgtgtgccatgcgttgtgaggcccatgggtgtgggacccttgtgggggctgcctgattggctggttgcagcaattagctactgctcacaagggacaacaacacacacaggggaactagcactttacattggcacaaacttcacagaaccactccagattgcactccactgggagacccaacagggctggcgcatgcgcgccgaacacgaaaaggccttgggctcacacaccgtcgacgcggtggcccccctaaacggcggcaacacagcctgtggggatccttaaccaacccgcaatccagaaagaccacgcaatcggcaacaggaatttggtacaccacggacagcgcccttacacaacgcaaacagcgaacgtcgacccaccacccagatcggtttcgccaaaagataaacccaaattaccccaaaagcgaaccagtggaacacacagcctttttcacccatgaaggaatcagctccaattccttcgacttggtgaccccacttctcacaacggcacttgaggggactgctgcgtttccnacacccagaacaggttaaccacccagagatataaccctatcggcatttggaagcacacggtggtatccgagccaggattcattaatttggacagtggtggccagcacacgcaattgggtacaccacacagagggagcagccatataggatgagcccaaaagcagccttactcccgcgtggcggcaaagaatcgcgtctgggagngaccccccaagacgtccaacaccactatccatacacaccagcgacgtggccaaagcggcagaggactcaggacaagcgtaactcagcggagctcattccgacgccattggcgaggatatgagaaacccatggacacagagagtacacagcacacacggagcagacacctaaccccatggcaccttcgagcatatatggggtagagcccatttcccaagcgaaagcacacacataggtcctacactagggacccagacaaatgccgaccgccacaacactacacggcgagaaccccaccggcgcatgaccccgaagcccaaacaacagctgaacagcccatgcgaatcgcggcgacaacgggatgggggataacggcgcaacggcgtaccccaacgtccaggtgtgacgccccctctgacaataccacgaccccgacgggacggacagagaaacacagatagaaccagacgacacgccgaccgacccgaacgaaccccgacacagacgcgaacaccaccactgccagacgaaccacgctgaagaacgcgagagcagactgcacgagcagcagacgacgccacaccgccgcacgacgacacaagctgcgacgctgacgacagaccacacaccacacatcatacgatagatacacagaaccagacagaaacacgctgaaaagacaa

SEQ ID NO: 509430 - DNA, 152 bp, Homo sapiens
tgacgtagaaggccaatatctagaaccaacagcagtctgatgagatcactcaggccagccagtgacaacctattgctaactatgtctggagtgacatactcattgatagttgatgtcaatgacagctgtattcctctatgactgctgctgat

SEQ ID NO: 509431 - DNA, 212 bp, Homo sapiens
  misc_feature (149)..(149): n is a, c, g, or t
tgagacaagatctcgctgtgtggcccaggatggagtataatggcgggatcatgactcactgcagcctcaacctcctgggctcaagtgatcctcctacctaagactccaaagtagctgggactacaggtgcacaccactgcacccagctnttttgtttgtttgtttgtttttttaatagagatgaggttgttgaaggaatgattttgccaggg

SEQ ID NO: 509432 - DNA, 206 bp, Homo sapiens
gcacggacatgccaaagctaaaacacatagaggttcctgcacagactgacaacattagtaacggattaatcttcacagtttgtcacactcacctcctgctttaaggagcagacaaaaaaaacatatccaataagaacaagcattgaagatgacctgcacgatgatgcacaatcagatagaaactctggagaaagcccacaagcgca

SEQ ID NO: 509433 - DNA, 345 bp, Homo sapiens
cgaacatggtgaaacccagtgtctactaaaaatacaaaaattagccaggcgttgtaatctgagctactcaggaggctgaggcaggacaattgcttgaaccccggaagcggaggttgcagtgagccgagatcttgccactgcactccagcctgggcgacagagtgagactctgtctaacaaaccccgttttgtctgttggagacaagagtgcagcggggccatctcggctcactgcaacgtccagctcctgggcccaagcgatcctgccacctcagcctctccagtaactgggataacaggtacgcaccaccaggcccgactaatcttttttggttttttgtagag

SEQ ID NO: 509434 - DNA, 110 bp, Homo sapiens
ctagagaatccccgctctacactcgctcattactatcgtatactagggatcactctcgccacaatatctcagcatcaccacaatatacccagtgcaatcaaacactatca

SEQ ID NO: 509435 - DNA, 228 bp, Homo sapiens
tttttagttgtattgatcatttttattatcactgtgatcaaaatgactggagaaacatcttgtggaaagaaggattgattttggctcacagctccagagggatcagtctgctgtattgggaaagtcatggccgacacagcagcccatatcattatgaaccaggaaacaggaagctggcatggagtggtgaggggatgtgaacacgaacatggaagacaatgacttagg

SEQ ID NO: 509436 - DNA, 292 bp, Homo sapiens
ggggaatactcctcaacacctccaactctgtcctgaagggagcagctcccgggcaggacacaggtattcgacggactatgaggaagtgagacgagcacatttctatagtctgcacttggatcaaaagcaaaacagtctctccgccccgcaccagatcaagtagtaaggacatcaccctcactgaaaacttgcgcattcttcttaagttttctgccatacttttcatcacgcatgcgaggaaacgatttcgagtcaagcaagacttttcatttatgcaacctcttgaacagga

SEQ ID NO: 509437 - DNA, 562 bp, Homo sapiens
agatcgagtctgtacccggtcccatgaacagttcggtcccctatgcacaggtttgagagagtagtggttctcccagcacgcagttggagatctgagaacggacagactgcctcctcaagtgggtccctgacccctgagtagcctaaatgggaggcaccccccagtaggggcagactgacacctcacacggccgggtactcctctgagacaaaacttgcagaggaacgatcagacagcagcatttgcggttcatgaaaatccgctgttgtgcagccactgttgctggttatccaggtagacggtctggagtggacctctagcaaactccaacagacctgcagctgagggtcctgtctgttagaaggaaaactaacaaacacaaaggacatccacaccaaaaacccatctgtatgtcaccatcatcaaagaccaaaagtagataaaaccacaaagatggggaaaaaacagagcagaaaaactggaaactctaaaaagcagagcacctctcctcctccaaaggaacgcagttcctcaccagcaatgtaagacagctggttggaga

SEQ ID NO: 509438 - DNA, 82 bp, Homo sapiens
gacagcagcttctacatctgcagtgctacccgggacggctcccacgagcagtacttcgggccgggcaccaggctcacggtca

SEQ ID NO: 509439 - DNA, 335 bp, Homo sapiens
  misc_feature (54)..(54): n is a, c, g, or t
gcccatattacagaggttaattgtaagaaagcaaagaataaggccggacacagntgactcagtgactcacacctgtaatcccagcactttgggagcctgaggcaggcagatcacgaggtcaggagatcgatatcatcctggccaacattgtgaaaccccatatctactaaaatacaaaaaattagcctggcgtggtggtgtgtgactatagtcccagctactcgggaggctgaggcaggggaatgcttgaacccgggaggcgtaggtggcagtgagccgagatcatgtcactgcactccagcctggcgacatagcgagactctgtctcaaaaaaa

SEQ ID NO: 509440 - DNA, 143 bp, Homo sapiens
  misc_feature (99)..(99): n is a, c, g, or t
  misc_feature (123)..(123): n is a, c, g, or t
ccggtttcgagtcgctgacctgcagcttccctgtggtttcccgaggcctccttgcttcccgctctccgaggagcctttcatccgaagcgggacgatgcnggataatcggcagccgaggaaccngcagccgaggatccgctccg

SEQ ID NO: 509441 - DNA, 154 bp, Homo sapiens
gcttactggtaaatgaatcgaggcacggagttgatacgggtgtacgggaattggacagctacacctggttgaatgtacacttgtttggggccaacaccgtgtacggtggcctcgcagtgcgggcctggatgtcggagcgcggaccttcgcccct

SEQ ID NO: 509442 - DNA, 371 bp, Homo sapiens
acgtgcttgatggtatcgtttcgtgttagatatagatgaagtccaattatttattttttctttggttcttcatgcttttgatgtcacttctacgaaatacttggccaatccagggtcatgaagatttagctatgtatcaattcttttttttttctttttttgagacagggtctcactctgttgcccaggctagaatgcagtggcatgatcatggctcattgcagcctcaactcacgggctcaggtgattctcccacctcagcctcccgagtacctgggactacaagcacacgccaccaagcctaattttttgtatttttggtagaggtggggtttcgccatgttacccaggttgatcctgaactcctgggc

SEQ ID NO: 509443 - DNA, 117 bp, Homo sapiens
cttagaggatccctgagctgaggaggagcagagcaacatggatgctgctcaacgaccgcttccgcaagaccactctacaggtggacacactgaactgccgagctagcagccgagcgc

SEQ ID NO: 509444 - DNA, 276 bp, Homo sapiens
aaaggggggcccccccccccggggggggtccccggggcccccccccatttttttttttaaagggggggggggggggggccccccccgggggggccccccccccgtttttgggtttcccccctgggggggtgggtgggggaatttaaaacccccccccccccaaatttttttttccgggggggcccccccgtttttgggcccccccctttcccgggccttggggggggtgggggtttcttttttttttttttttttaggggggggccccccttttta

SEQ ID NO: 509445 - DNA, 162 bp, Homo sapiens
gctggggggctcatgctctgtgcgggtggtgcggtagtggattatggtttcggcggtggcgctggtggtggctttgtggctcggtggcggcagttggcttctggcaggtggcttcgtgtggccctgtgctttccgtgtcttgccctacctgcaaggtatcca

SEQ ID NO: 509446 - DNA, 115 bp, Homo sapiens
cacccgagaattctctgccctgtacaaagactccctttggccgtaaattaagagtcgcttgcgttgtgacagaacgttcaaagcggggctcgggatctcggattttaccagccct

SEQ ID NO: 509447 - DNA, 296 bp, Homo sapiens
tttttactagtatcaacatcacaagataaaacactctggtatcacctgcccatatctaccttagtcgtcacccaagacatttgactactgatgtggttaattagataacttttacttgctccactttacaatagttttgtattacctacatcttattaccttgggacacaaaagtggcagcgattgttgagagctgatgacaataaaaaggagaacactagaggaaatgagactagaaagaaagccaaagctgattttccaactctatgctgactccaacctacagtacaaagccg

SEQ ID NO: 509448 - DNA, 387 bp, Homo sapiens
caatggcatagttctaaatgctgaagctgcagataaaggactttgacttacagaatccacagtgtccttcatagtctttatcaactcctttaaatttagcatgtttcctggccaggtgcggtggctcacgcctgtaatcccagcactttgggaggccgagacgggcggatccgaggtcgggagattgagaccatcctggctagcacggtgagaccccgtctctactaaaaatacagaaaatcagctgggtgtggtgccacacgcctgtagtcccagctactcgggaggctgaggcgggagaatcgcttgaacccaggaggcggaggttgcagtgagctgagatggtgcccctgcactccagcctggcaacagagcaagactgtctca

SEQ ID NO: 509449 - DNA, 150 bp, Homo sapiens
cagatccctaccaggacatcaatttccttcaattgaatcccaaataccttctccaaggaatagcctgctcgttcaatgattctaggggtacacctacagtgtattctattgattgatgtaccttcagacagtgtcctgagctgcattgat

SEQ ID NO: 509450 - DNA, 373 bp, Homo sapiens
atacattgttggaagtgcctgtttctggcttctggctggaggctcacttcccagcctggcatttatttatgagaaataaagctctcctttccaaataaaaaaattttccatcctggctaacacagtgaaaccccatctctaccaaaaatactgaaaaattagccaggcatggtggaacacgcctgtagtgccagctactcaggaggctgaggcagggagaatcacttgaatctgggaggcagaggttgtggtgagctgagattgcaccattgcactccagcctaggcaacaagagcgaaactccatctcaaaaacaaaaaagtaccattgagaggcaatgcctttccccagatgtctacttttttatttcttc

SEQ ID NO: 509451 - DNA, 404 bp, Homo sapiens
  misc_feature (273)..(273): n is a, c, g, or t
  misc_feature (325)..(325): n is a, c, g, or t
  misc_feature (397)..(397): n is a, c, g, or t
tttcttacggtgaccttagggacgaactgggcaggtggaacctcttcttcctcgtcctcatggtcaggagcaccaagagccaattccagatcgggatcgatggtgatggctaggtggatggctttgtgaaaatggtcagagaggagttcttctagttcgtaacgcatctttgattcaagacggtcacgggcaaattcgttgtgaacggcaaccatcgccgtagaagagtgcatccgcaccggcgtagtgttggataaccacgcgcgattaggnttcgaaaccttcgcaaggatgttggcccagcttcattgaaggccttagaggngagcatcagcgccctcaagggccccagctcggatttttaaacaatggcatactgtttccttggtgaaaatcnctctttg

SEQ ID NO: 509452 - DNA, 185 bp, Homo sapiens
acagctgatgaagtaggacagagggaaatcctgaagcaatagacgatagctctgctagccgacattctgacccggttgcaaagaggctttcttgcagaaggggtagattcttgcatactgtagtagatcctctgacccagccgccgacaacgctatgcgcacgtatgaaacatttaccatgctag

SEQ ID NO: 509453 - DNA, 987 bp, Homo sapiens
agagcccgcagcacatcctctgagcagaagatggctgtgccccccacgtatgccgatcttggaaatctgccaggatgtctcaccaagggctatggatttggcttaataaagcttgaatttgaaaacaaaaatctgagaatgggatggaatttacaagctcaggctcaggccaaacacttgagaccaccaaaagtgacggccagcctggaaaccaagtacacgatggactgagttacgccctgcacgtttatcacagagaaactggaataccgaccaattacactaacgcccccggagatacctgtggaaagatcagcttgcccgtgcaccctgaacgctgacccttacgattcatccttcttcacctaaacacaggtgggaaacacaaaatattgctaaaaatctatggaccaggtaacaaggcgggagccaacataaacgccgtgggctgcgaaacattgtgatttacggacaatttgcttggtgccttccataccggggatgcctctggatgcataggatcaccaaggcactgggatggccgggcttcaccaaaattgaatttggagaccggcaaaacccagagttgaccccagaagcaaatttgacagttggctacaagactgattgaatccaagttccacattatgttcatttgccgggaccagcacgttggggggtcccattttaccaagaaaggttgaacacaaacaggtgagaccggttgcaatctgcctggaacggccgacaacttaacacgcgctcgaatacggcgccaagtttacagttgcctggcccgtttctcggtaagggaacatcccggctgaaggtaggataaacaaaattaagccggttaaatactggtcttttgtgcagagcgcatgctggccagctgtcttgggctacgcaaaactgacaggatacaatgggaaccgcaacggatcaggtgtgacatattaccgcatgtcgatcgcaaaaccagtgaga

SEQ ID NO: 509454 - DNA, 1508 bp, Homo sapiens
  misc_feature (1436)..(1436): n is a, c, g, or t
tattttttttttggaaggaacaaaagcacagatttattgaagcaaaagtacattccaaaaagcggaataaggctcaagcaagtgtgcccgtgggttaaaaaactcgtggggtttaagttaccctttataaaggtttccatatatgggtataccacccttttgttaaaataaaacattgtgccgtgccaccagttcaaaggcagtgaaggtaaagtgctcctttgtgtcctccagaacaccatattactcgtggccctacaggggaattccttactcacttaaccaaaaaatttatttatttatatttttctctatattttttatatatttaaacaaacaaatccccgtgattctataaaaaatattttataaaatgagaagccgcggggcgcgcgggtgcatctcaagcgcccgtgttaactccacaagacatcattgggggagaggccaaaagaacgagggcggaaactcaggcgaggttaccgaggaaacctcaaaaaacccacatcctgtgggtgttagtacaagcggggtgaaaaagcgccccacaagggctacttcacctataaacacaaagcacaagatattagaacaacaacaaaatatttggggctatggtgagaaagagatgtgtagtgggcttgggcgacccaccgtggattagacgcccacatggatataactctagagagaacgggctcatgcaaaccgacaggagaacaaaaagatgggcacaacagaaaacccccgggacgacaggggagtgcagcccttctgaccagcggagacgagcgaagaaacactcgcgcgacccaactcatgtacgcaccgccacgcacccacagggggagacaaccaggggtgtcgacaaaacctccacaaaacgtacacacaacaacaaaaacgaaaggaagctaatcgagccactagaaggcccaaaaaattttgcaccccccgaggaaaaagagagttacacggcgagagaacggtgcaacagatgtcacagagattgatacaatgagtacggagaaggagaacgaggagaaaaaagaaagaagaggccattgccagaaaaagaaccaacaacacagaggcgcgaccacccgagggggacaaagcgagcacccgaggcaagtaatgaaatgatgacgaaaaaacggggaaataacactactgcaggatgatgaacacgcaaggtgacgcgaacgccactagcgagcaccaaggaacgcggcagccccacatacgtgggcggcaaagcagaagggcgcagacaagacgaacgggaagagcaagcccagaaaccacaaacatcgaacgagaaagcagcagagaggtagagccaacaagccaggagccgggagcagcaacgacacgacacacacggcgagggaaacaccgggaagcaaacccaccgaccttcgtaaagtaacganagaactacaccacgcgagggcaggaggcgaaagaggaagaggagcagtagcagcaagcgcgacacggaaagg

SEQ ID NO: 509455 - DNA, 387 bp, Homo sapiens
cattctaagaaacaaacgagtacccatgttactttcctgcattagctaattgcttatacagataatgaagacatgaaagaaaacggagaccaggagcggcagctcacgcctgtaatccctgcattttgggaggccgaggtgtgtggatcacctgaagtcaggagttcgagatcagcctggccaacatggcgaaaccccgtttctactaaaaatagaagaaattagtcagttgtggtggcgagggcctgtaatcccagctactggagaggctgaggcaggagaattgcttgaaatcgggaggtggaggttgcagtgggccgtgggctgagatcgcaccattgcactccagcctgggcaacaagagcaaaactccgtctcaaaagaaaa

SEQ ID NO: 509456 - DNA, 213 bp, Homo sapiens
acacggtggatgtataaagaaaagaagtttaactgactcacagttccacatggctggtgaatcctgaggaagcttacggggcatggtctaaggcgtaagataacacacggcacgtcctacatggcagcaggataagcagcgagagcagacccaccaaacactcttgtccgtgaatgacagaggcatgtttatccgaaaccagccgtccgtccg

SEQ ID NO: 509457 - DNA, 254 bp, Homo sapiens
gaggctaaagtgaatctcttttaactagcatatagttgcatctttaaaaaaatcatgcctgggctcgttggctcacgcctgtaatcccagtactttgggaggccaagtcaggcggatcacctgaggtcaggggttcgagactagcctggccaacatggtgaatactgtctctactaaaaatacaaaaagtagccaggcgtcgtggtgcactcctgtagtcgcagctacttgggaggctgaggcaggagaatcgc

SEQ ID NO: 509458 - DNA, 271 bp, Homo sapiens
atgtatgtgagttgggttggggggatggcccgatgtagacgttcttagttgagtgtatcaaaagggagctgctcgtgtggtagtctcgtgtggattggcatgcgtcgatatttggattgtgtttgtgtagtataaaggggggacccctcgccaaaactcaaccagtgggctacctttcattagtctcattaccccgccaccctcctcctccactccatctccgaatccataactacgatctacccgctggccactcctgtaccacaatccc

SEQ ID NO: 509459 - DNA, 831 bp, Homo sapiens
ggcagggccgcgcacgcactgacggctgaccgccatcttccctcccgaggcggcagttccaggtgcaagcgccgggtttgctgcccgctgggcgcccctgcagcggcccgagctgtggccggcgtggatgaggggcaggcgaggcagggccggccctccagtattgccgcccctcccgccccagggcagggctgggagggtacagcccgggggcgggctcgggtcgcctcccggaccgccgcgtcctcgcttgcgcctgtgccccgacagaccggcatgcttccgcggtgcggcagcttgcaccggaacatgggactaggctgccaaggatcgttccagcttccgaaggcgacttcagagacagcggaccaaggtgtcccttgggcggcagcgagcaggaagtattgccatccaaagaagtgcatggatcgatgtgctaccttgtcacagtccgggggcgcttttcgccgattgctaactgggccaaagcttaccccttaaggtaaggcaggttctggtagtgtaacaaagcaaagatgaagactcaaaacgtttgatatggctgtatccagaagttaattagacacagctctctgttggtcaagcagatggatggatctgagagacttacatgcttatttcagataagaagatcgatgagcgtatgtggaagttggtggcaaaatggtaatgatgccagttgaaatgttggcattcaaatgagaatgcttgaagtatagaagactgagaataattatggctggtgaaaagatgctagctatgtgatgtaggaatgaaaaattggaacactgcttcaaaagggtatatagg

SEQ ID NO: 509460 - DNA, 359 bp, Homo sapiens
cacgcgtcgcacgcccgtgggctgcagttggaacgatggcggcggcagatgccgtagggcctagcccggggtctggacctggggactcccagaagggcccgagggggaggctccggagcgtcggcggaaggcgcacgggatgctgaagctttactactgggctctcggacaggggaggcggcgggagccccgctagtgtgccgacacccctgtggcagccgactgatctgaacggggcgcacttcgcaccggaagtttactagaaagctggtagagagtgcctctggccagttgatggacagtgagaccggacattggtgcggcagatcctgggctctagaaagcgacatgccagaccc

SEQ ID NO: 509461 - DNA, 329 bp, Homo sapiens
gggggccccgggttccccgccgccgcccgccgtcccgcagtccgcagggcccttgcctgcagacccgttgttgtccttccacctggatttggggccctccatgctggacgcggtgttgggggtcatggacgcggggcgcccggaggcggttgccgccaagcccgacggggaaccccgccccgggaagcagcccccccaggcccgctgccgccccaacggggacctcgagttgaacgaggtcatcggcctttaggttccctcattccccgggcccttcccgcccggcaccccatttttgtaaacataaacggccaaggtgtgtgcccgga

SEQ ID NO: 509462 - DNA, 104 bp, Homo sapiens
caagaacaaatcatgtctttgcagcacatggattgagctggaggcccattatcctaaacagtactcaggacggaaacaatatgctgttgtcctatagtaggagc

SEQ ID NO: 509463 - DNA, 801 bp, Homo sapiens
tctccgctcccagacatatgtgtccctacgcgcttcctagcctcggaagcgcagcagcaggcatatgtaggtgaaggtgaagagcttccctaaaggatagacccataccaagccggtccacctacacagcctatacctagggataacaaggctaggcatagactacacatacgtagcggtgaagtacgacatggccgcggataccaaggctagaacaagcaaggcaggtaggtaggaggctagtagaccatatagtaacgagcacaccatcccataggtaggttagtagggcatatcgtagggctaacgtaggaaacccctacgaggcctaccggcacctatacaagactagtactatatagctagaagcacatacagctagatagaatagccatacgcacggccgtatctacgtaataaaagcaaactatagggcccactaacacactacctaacacgccacatgcatatgcggccctttatacacctaaaagctaacccttagccacacgtcacaccactcgcggcaggcggcactagcagcgaatcgcggccacagcaacgcaaggccttaggcaggcacagcgaacctctacaagcccagcgccactagacacgcaaaggtaactatgcgcaagtacataccgtagtacatatagccgcacacccgagatagcggcctagctatacctactagcgtccagacagaaggcccacctagataggagatccaggtagaacggaggcactgtaggccgagaagctaggactagggcccgcgagaggcttgagcagcaggta

SEQ ID NO: 509464 - DNA, 156 bp, Homo sapiens
ttgcagttaatacatacagggctagtgaagggcttaattctaagttgtagggggaggcaagctggggaggagtcagatcagatattttcctgcaaaaaaaatgaccctcttggcagcatcaaaatgtgggtgtccttgttaaggaattgatcgtgg

SEQ ID NO: 509465 - DNA, 449 bp, Homo sapiens
accatctgcagtggagaggaatatagacaaaggtaaagatgcagcgttcaatcattcctgcccatggttaactggagcacatagtgtgacatgggtttctgagtaaaatgtcttaatcatccctgtggaagcaatttctctctccagtaaattgcagagcatggtaacgagtgatctctcagagttcttgtgtaccttccctccttcgtgttgagtccagtaacgtaaaccttgaataacaccccgggacccacacgaagtgccacaagggatgttgcaagtgccccaagaagcgggaatatcacagcattgccaaaaagctgaattgtttgctgtgcaccacagattgaggtctgcagcgtggttgccaccatttcagaccattcatctcataaacagatgatgtaaacttatggtgtcaataaatacagtgcagtgctctaagtaaa

SEQ ID NO: 509466 - DNA, 931 bp, Homo sapiens
actacttctagatcgcagagttcctgattccaagtcacctgtgctttctgggagccaaagaatggtgcacctgcatggagtccgggcagagtcgttcctacagttgtattgctactaccaggagctcaccataggcttgctgagtcccagtaggaaggctcgagggtctgtgccaggccatgttcaggatggctgctcagtaaccgttcatagacctctcttgtcaatgtctgttgtgtgcccctattgtactgtcaaccatgcaaccagcgttatggcttggggaccaggccctcctctgggaggagccagaaggtagtgagagaggaggaaggggagtaggcagtctttgatagggctgcgtgaattgtcactttcgcatcatgcaagtcacatcccgcccttttatttccccaaattgtaaatgaaagagttctggcaactgtggaaacttcagtccctcaggctggcgagccatgccagtacctgtctgtggggtagggagggtagcctgagcagacatgaatgcaggctgaaaggcatgagtgggctccatggtactgtttccagatcccctcactgcagaatggttaagttcgctcccttacacattcgacccgtttacgcgaaattcaatcctaaagctaataaaaagcagttggttcattactttgagaccaaaaggcaggaacagcatcttaagacaacgagagagaggaaggttacaccagtgtcacgagaccaccgggtagcacgatcatgagaaccagggagaaggggggcctggaaataccacaccggagataacgcaaaggaacgaccaaccaggaaacaaaaagcggtcatagcaagccaacaacccgggaagaaaaattacaagacgcgggcagaggaacgcaacccgaacgacggcagacagaacgacaacata

SEQ ID NO: 509467 - DNA, 538 bp, Homo sapiens
aaaccaagatatgcttagaggcttctgtcacggttctctgccttgtgaaccccagacaatgagaatggttgtttcccaagtataaacatgaccagctcactaattggttgtttggcacagcattaaagtttatcctctttgcgcttactctggaaatttgtttctactaaataattcaacttttcgatttatgtaataatgtaagctagcttttcatgttcaagaaggtatggtgtccccatgagttattattcaacctcctggtatagcagttagtgttacacagaagactgtctagattctaaaaattttttcattgccctcatggtgaaaacatatgtgctgcgtcccctttgtgacatcaactaatcactgaggcagctgtttttgaatctttgttttgtgttatgaagtgtatcgtctctccagacttgatatatctgcaattttgggggttcgagagaactataagtttcgtttataccggttgtaacatgaacgcttattaaacaacgtactcctgaaaaatggtttaaga

SEQ ID NO: 509468 - DNA, 192 bp, Homo sapiens
cgctgtggcttgcgctgtagtcccggcctacttgggaggctgaggcaggagaattgcttgaacccgggaggtggaggttgcagtgagctgagatggtgccattgtactacagcctgggcaacagactgtgactccgtctccaaaaaaaaagattccagtttgttattttctatgcagaagtgcgcctgggtg

SEQ ID NO: 509469 - DNA, 537 bp, Homo sapiens
cagaggatcccgtaacggagattgtacatggttatatgtgtgatgctaaggttagggtatggatcccatcacccaagtactgactagagtacccaacagatagtttacaactcttgcactcccctttccttcctccctctggtagttcccagtgtctattgttcccatctttatgtccataagtacccaatgtttagctcccatttataagtgagaacatgcagtatttggttttctgtttccgtgttaattcgtttagaataatggcccccagctgcatccatgttgctgcaaaggacatggtttcgtttttatggctgcatactattccatggtatatatgtgccacattttctttatccattccaccattgataggcatctagttgattccatggcttttgctattgtgaatactgctgccatgaacatgtaagtgcatgtgtcttttttgtagaatgatttattttcctttgggtatatacccagtaatgggattactgagttgaatggtaattctggtttaagttctttgag

SEQ ID NO: 509470 - DNA, 891 bp, Homo sapiens
atcggtgttgcaggaggggcagctttgaagcccacgtattgttctgtcgcggatgtattagcgcccgtgatctatgctggcgatgataagcggcgactttcggcatctctatagaagaccttggagtgactgggcgtagcacttctaatactcctgtgtaactcatagagaaaagtgagcctctgcttgcggacaaattggaggaaacggtccacattatgatcagtcctgcgcatttacagtgtaataattcgataatttcgagatcgctgcggagctgaaattgggaatggtggttaacgccgctagttgttcgatgtcaccgagcccacgctctccacggcgtaagctagcaatcaggatcgtgcttgatttggcattagcgctgaactgatccctttgcatattcccccattaaattcaagaagtacccggcatttgtaggacagaccgccccgagatgtgcctgctttaaccttaaatcgccttgtgaggaattggtgcttccccagcgtcaataatagagggggactattagtccttggggtagaatcctaagttgtgattgcccttgggcgcccatttctaacgcaaccgtcttgagagtaaaagcaggtctctaaaaaggggtcgcaactatatgggaagttaggaaaggaggtaacctttgggccgtaggttgagagtttggtgtagaccaattgttgagtttccctcttttccggaagggaatggtttgtgagagaggttctaggtgaacatcctaaaggagttatgtggttcgcgaaagagagagcgggtcgagaaaatgagattggaggaaggggttgaagatgaaatctttaagtcgagaggtgatggtgtgcttattgaattttagagttagacgtg

SEQ ID NO: 509471 - DNA, 355 bp, Homo sapiens
tgcttggaatcccagcccagaccctcaaccagcatggcccaggacgggccacgtgctgtttcctcaggaagcctcaattttttcatttggagacagggacaatgaatcccttccaggatcactgtaaaagacaggttgagcatttttaatttgcaaatttgaaatccgaaatgctcccaaatttgaaactttttgagtggggacctgatgccgtaagtgaaagcccgcggttttttgttgtcgctgttgtttcacgggtgagccccctatttgctgaaatcgctgttttggttggtcgccctgaactccttattttccccctgtattaatggtatgtcaaactttttaccatgga

SEQ ID NO: 509472 - DNA, 973 bp, Homo sapiens
  misc_feature (37)..(37): n is a, c, g, or t
  misc_feature (65)..(65): n is a, c, g, or t
  misc_feature (82)..(83): n is a, c, g, or t
  misc_feature (87)..(87): n is a, c, g, or t
  misc_feature (91)..(91): n is a, c, g, or t
  misc_feature (110)..(110): n is a, c, g, or t
  misc_feature (121)..(121): n is a, c, g, or t
  misc_feature (138)..(138): n is a, c, g, or t
  misc_feature (141)..(142): n is a, c, g, or t
  misc_feature (164)..(164): n is a, c, g, or t
  misc_feature (197)..(197): n is a, c, g, or t
  misc_feature (205)..(206): n is a, c, g, or t
  misc_feature (208)..(208): n is a, c, g, or t
  misc_feature (211)..(211): n is a, c, g, or t
  misc_feature (214)..(214): n is a, c, g, or t
  misc_feature (220)..(220): n is a, c, g, or t
  misc_feature (315)..(315): n is a, c, g, or t
  misc_feature (350)..(350): n is a, c, g, or t
  misc_feature (391)..(391): n is a, c, g, or t
  misc_feature (400)..(400): n is a, c, g, or t
  misc_feature (447)..(447): n is a, c, g, or t
  misc_feature (589)..(589): n is a, c, g, or t
  misc_feature (597)..(597): n is a, c, g, or t
  misc_feature (644)..(644): n is a, c, g, or t
  misc_feature (685)..(685): n is a, c, g, or t
  misc_feature (747)..(747): n is a, c, g, or t
  misc_feature (819)..(819): n is a, c, g, or t
  misc_feature (821)..(821): n is a, c, g, or t
  misc_feature (940)..(940): n is a, c, g, or t
acacaccttcttcgtcagagtcagcggacgccctcanctcccaatgactatgtccacgggtgaancggaccgagtgtcaggnngctntgtnttacaggggtacaagtatnactgaagctgnacgagcccggaaaaacntannggaacccacaccacatcagccnggcccgtgcgctctaacgccttgcccagaagancccttcanncngtncantaactnttccatcgaccgcgtattccggaatgagaccctggacgccacgcacctggctgagttccaccagatcgagggcgtggtgcgggatcatggtctcnccttggcccacctcatgggcgttctgcgggagttnttcaccaagctggtatcacgcaactccgcttaagccagccnacaacccanacacagagcccagcatggaggtgttcagctaccaccaaggcctgaanaagtgggtggaggtcggaaactcgggggtcttccgtccagagatgctgctgcccatggggcttcccgagaacgtgtcggtcattgcctggggcctctccctggaagcgcccaacgatgatcaaatatggcatcaacaatatnccgggagntgggtggggccaacaaaggtgaacctgcagatggtgtatgaacagtnccccttgttgccgcctggatgccgagccgaggccccctccnacacaggaggctgcgtgacatgggccactctaggacaggtcatcctccccgagtccctgctntgcgctctctttgcatccctggccagtgaccttgtatttatgaggcctctgtgaggccagcccccaccttcntntttcccacctgtcccaggaccagaatcccagggacagaggactgggtagcaggttccttctgttgtcctgtgtggtgtgtctactgtgagggtgggccctgaggagacctgtggcgccncctattgtttaataaagtgggcagttgccccca

SEQ ID NO: 509473 - DNA, 794 bp, Homo sapiens
  misc_feature (423)..(423): n is a, c, g, or t
ccccccgcgcgttggttcggagcaaggcaacataatgcgacgacttggcgcgcgtcttgagtggagtcacaaaaccccgcggatagttcgcacgacccgccctctagtggcgaggtgcctcactcgagagcgagtgagataagagtgtcgcggccagggcccccccccaggtgtgcacacgacacccaccccctcgtcgggggagacaccacagggccaggagagagacaccacacgctgcgcttctcactaaagaggcaggaaacacacgcagacattaaggtcgtcgtagcgggacacactggagggcccagacaataccccttgacgaacatgcacgctgcactacacaccacgcgtaggggagagaagttcgcacacaatagaaagacacgcgcgtgctacacacacgccagtgcacgngtgcgagcgtggaccactccgcgcgtgaccaggggatgaacgaaaacacccctggcgctccctcccaaaccgcagggtgggcagacccagaggcgtgaagtatagagtagttggtaccaccaaaacagagacagaaaaaacacaagagaagaaaacaagatagcaaaaatattcaaaacaagaaggggataacaagacacggccaccaaaggggatccatgtcagaagcggacagcgaggacgccccccgagggtcctcgagcggggcactccgggtgtgcacgtccgccagcgcccggcggctgctccctctagatcaatgacaacgccagggagggcgacgtaccaacgcccaaacaaatgaccgcaaa

SEQ ID NO: 509474 - DNA, 755 bp, Homo sapiens
gcgctcattcttcctctcggtctacttcataattacattgtctgatttagtaatgtgattacacttaactgctagtatcatgttgctcaaaattaaacaagtgggtaattccataagttgattggccataccattgtcactgtattacgtgctcgatgtcattgcactcggttcatcgttccttctcaagcttagccttgtttgccatcttggaatatattattattcgatatcattatgttgccgaatgtgttacatgggagctgttgtgatccaacaagaaagtacaacaactcgtaagtgcgtcagctcgcaagatcacagcatgagagagtaagccattgatcaagcttaggtttccaacttgctctgcttccttcatgtatctttatcgtatgatcttagctttgattaaatgactgaatgctggagaatgccgtggcttagaatgtcgagcctagctactacagttgcatcagttgaggagcctgagactttcttaaatcatccttagaaccgtgaccatatgcgagtatatcttttcctcttgcgaacaaatagactattctttgctgtatttgtaccatattaagtcttgatgactcactaggtagtcgacatgggtccggcaaaaccgtgcgtgcaccctccagggtgcgggccaaagagcgtacccatggtggaatcgcacagtcctgcctgcccttgtttgttccggggtaatcctgcgctccctattgggggggatcgtccgc

SEQ ID NO: 509475 - DNA, 102 bp, Homo sapiens
  misc_feature (10)..(10): n is a, c, g, or t
  misc_feature (43)..(43): n is a, c, g, or t
cggcggtttngtaacaccccaggccgtgtaaggtttggtgttnccgtttcaagatccactttcagactttattctggctctgaaggcaatcctactttgggg

SEQ ID NO: 509476 - DNA, 184 bp, Homo sapiens
  misc_feature (80)..(83): n is a, c, g, or t
  misc_feature (85)..(88): n is a, c, g, or t
  misc_feature (92)..(93): n is a, c, g, or t
  misc_feature (181)..(181): n is a, c, g, or t
cagcacagcagtggctatcagcctttggctgcaagcatgttatactgataagtcaccttaaggtgtgaaaagaaggccannnnannnnctannagctgatccttcctccacaaccactgggaggaccaactgataactgtttctaaggagagcgtggacatataaccaggatgctaccacnaaa

SEQ ID NO: 509477 - DNA, 1025 bp, Homo sapiens
  misc_feature (1025)..(1025): n is a, c, g, or t
gggagatatatatataactagatatatatacacattatcttaagtgcatgtaggatgtaatatctaatgcactactatactgtataacatgttattcaaaaagggattgccatgttcgtgagacagcagtaacaaaaaaatgaggaaattatttgcttctatttatagcctctgtcaaaagtcaaaagactataaatgctttgcataacactggttgcacgttgcttaaatgcttcatcacagtcacattcaaaaatagtgactctaaagcaaagaagaaagcagcactgtcatcagatgcatgataaagccaaaatatgaaaatgggaaactgtttaattaacctagtaattgggtgggttaagtacatgggtgaattattatatgtgattataagttagtaagtaagtacagattaactgcttatatagccttacggaaagccttttacaaattaaagaacaaatagatgtgaatatcagttttaaaagcaatggaatcaatccaaaggaaataccgttataaagagagtttggatgtagcagctaagtacaggatatatggctcatgtttcaagcaagttcctcacaacattgctgaagtaaggggccaggtcaactggtagcttatagctaaggcaatgggagcaagtgaagagtacagataatcagaccttacaaaattccacgtttaactgacagtataatgctgagagacatgctttctaaatatcagaacgacgggcgaaaacggatgaactggcaactataaaagagaaattatacaaaaggaatagaaacacacacaggaaagagcggaagaaaacgaagaacgacgaaacgacgaaacaaaaaaaaccacaccgaaaaggaatcacagacaccgaaagaccgatgcgaaaagacacagacagaacaaaactagcaaagacatcacaacagacaccaaaacaaagaacaaacaaacaaaaaagccagagacacagcaccaacaaacacgagagagcaacaaacaacatagaagan

SEQ ID NO: 509478 - DNA, 553 bp, Homo sapiens
  misc_feature (306)..(306): n is a, c, g, or t
  misc_feature (507)..(507): n is a, c, g, or t
  misc_feature (515)..(515): n is a, c, g, or t
agcctgggtgacagcaagatcctttctcaagaaaaaaagtgaaaaggaggagggtttttaaagaattagtactacccagttgatacggtggaagaaaacttgaaaatgctaatgagaaacatgagatgtaatcacttgaaggcatatcatgttcttgaataagaagactcaacattattttaacaggtgttaattttccctgttaaactacatatttgtcataattacaataaaatacaaagagctattttggaactgggcaagctgtttctaaatgtatatggaaaaataaaaatgtctccaaanaatccctgcagagggaaactagcccttccagatataaaatatattatagaactgtgtaattaaagcaatatggtactggtccataaaagaacataaaaccaaatagttcagtagactcaaaatgcaagcgttggtgagggtatggagaaaagggaacccttttacacttggtgtgaatgtaaattagtacagacattgtgnaaaacccnctgtagagcttcctcaataaaaacacatatgatccagc

SEQ ID NO: 509479 - DNA, 173 bp, Homo sapiens
ccccaaaagttttttttggtggccctgggttttcatttttctggatgtataagtctgtgtgtcaggtacagctgggccccccccgcttgggtcccttttgtacaagcttgtttttttttgtcttgtggatgcccttggtaatttaaaaataaaaatatttgtttttttgccca

SEQ ID NO: 509480 - DNA, 127 bp, Homo sapiens
tgtgggactggagtgggcacttcagggcaggagaggactggggaggggcacaggatgtactcgggcactagaagcacaggtgcctccaaaagaaggggactgaccaagcggggtacggagctcgaat

SEQ ID NO: 509481 - DNA, 700 bp, Homo sapiens
cgacagccgagaagcagaaacacgacgggcgggtgaagatcggtcactacattctgggtgacacgctggtggtcggcaccttcgtcaaagtgaaggtgggcaaacgatgaaattgacctggcgtaaagtagctgtgaggatactcaatcgacggaagattcgggagccttgagtgtggtaggaaaaatccgcggagaatattcagaagctcaagcgttttcaggcatcctcgatataattaacactgtagccaggtcatcagtacaccatcgtgatattttcatggtgatggaatatgtctcaggaggagagctattggattatatctgtaagaatggaaggggtaagctgttcggctttaatgtctgtatgtattttgtaaactccactctttagtcctttacatagcatcaaaatgtcaggaacagattttgaagaggtctatttaataaccagttccctgagtgcatatatgggttagaatcataaagtatgtagaactagaaaggatctgaaagattatctcctatagccctgttgatacagatgtgggatgctggaggctcggagattatatgattgctcacagtaacgtgatttattaatgacggagttggttgagccccagaaatcttaatctcagagttatgttccagggtatacaatcttgaatatgttcttaaggataacgtacaaattt

SEQ ID NO: 509482 - DNA, 856 bp, Homo sapiens
gccacagcgatcctgggagggggcgacgcggaagcacgagatgcacccgacggcatgcgacggcagaagatggaggacacgaggcaggaacatcatggaccgagtgcaggagtgagcgaaggcacgtcagtcagcactgccagagcctcgcgtaattcgtaggctccaggacacggcccatcacgagaagcacccctgaggaacactcaacctccggagtgccgacatgacaacactcgacgtcttgccacctcctctcaaatcatcactagatcgaaagtacgtcccctcgtgccttgagcttcttcgtctcttccttcctactacgcgatatgacatgatcgactgtcacatcagcgtgatctcatcgaacgcattaccgctgcctgaggacgggaccacgagaagaattgtaatacgccttagaccccaaacgcacgcataatgagataggatccccttgcccctctacaatacaaagggctgcgaagtgagtagtttccatgagttcggaccgtataacatggatgtacgtcccgtggtcccgattgccacgtgaattgaaagcctaagagagcgcggttgacatggcacgcactagtttattctaataccatatctccttcatatccttagacattctaactcgccccaatcccatcaaaactagtggaatcgcaaaagacacaagacaccaaaggggaattaacttgttataccgggagcgccaagaataagagcccagagtcaaaaatgggtactagggaggctcccttagccgcgggcggggaagcatcccgtgcaatgtcttagactcgcctgcacaaatcgggagggggaccagaacccgagaaaa

SEQ ID NO: 509483 - DNA, 105 bp, Homo sapiens
gagatcccaccactacactccagcctgggtgacagagcgagaccctatttcaaaaaataaaaaacaactactatgagtgtggcgcattggctcatgcctgtaatc

SEQ ID NO: 509484 - DNA, 774 bp, Homo sapiens
ctcctgtctagcactgcactcgtctgatgtgactgtgtcagcctcattaggttctcactctgacatgctcgaatctccaagtacaatctcattctgaggtaccatccgtttctcaacggaagaatttagggggacagaattcagtccgtatgcatgtctgtgcagtcagtagtgcatgggtaccagtttctgcaggcccgcaagtgatctctagagcggcagaagcatacgtgacacaagacaggccgctgaactggacaccagactttctgttgggattgctaaataggagaatgtgtgactctcactgggcgcagacgggtaagcagctcttgtctctatgctaccctgtgatctcatggtaaccttggggccagcactgtgtctcccttcgcctaaacgtgactctgttccgtttttccagtcttccagacctggtccttggagcggggagacctgtcaccgttcgctattgtgtggctgtctcggtcgaaatccacccgtcgtccttcacggccatgacgtgataagtcatgcatctggctgactggtttcctgaaatgagatatgcttcttggggtcttcagatgaagaggaatagcaagtgaaaggaggatggtggcagggacaagaacccctaccaggcttactaggcatcccctgcatggcagccagcgctctaagttggcccccaaccatgcctgccttcttctagttcacacccttgtgtggttccttcccacagtgaaaatgcctgagcttgtgtaaccagcg

SEQ ID NO: 509485 - DNA, 516 bp, Homo sapiens
  misc_feature (83)..(83): n is a, c, g, or t
attcccataggtgtggcgaactgacaggagattggcatagtttttccatgaataatgcctttttgcaacaataaaacttggtnttaatacagattacacattaagtagtatgactagtcttgattttgaaaaatagaacacacttgctgtaaagctgtggtaatgcaagcatttgtgtatagttaggccgtttgctcactagttcttagttgttttcaatccctggcttctaaacctgaaaggacaccttttgcatccctcgcaagtcttttatttcagagccagagcctcctgctttgagacaaagccccatcacttcccttctccttccaagcctagaaacctggtgccacttcgtgttgctccaggactccaccagggctcacttggtatggctgttcttgccttttcttggagtttgccaacccatgactaaaattggaagtgagagaaatgagggcaggcatgagggtgtgtgttccaggtctgcagccctcctggccttcagggcggccg

SEQ ID NO: 509486 - DNA, 229 bp, Homo sapiens
tagaggctccccgcaccaggcgcacttctgaggtactggaaattagggctccaatatatgaattttggagggcatcatttagcccataacaactgggtcgataaactgagggacagcctacagaatagccggttagtgatctcacttgagagactaagtgccatttgagcagttcaactacaattgtgaatgcaatcgtggtgattgtgaggccagtactggcgaacaa

SEQ ID NO: 509487 - DNA, 748 bp, Homo sapiens
ccacagtattgccaggacgaccagcctgccagccccgatcaggatgatcagcacggcactgcctgcagcaattgcaggtcgcgcaaaaagggcacgcgtcgggaatagcacagcttccggattggagagaccgtcaacaaagtacttgaggatgtaacccagcatcggttgggtcgacgcgaaaatcagaaatccaaggatactcaacgcgaacaagcccatatagggcttaacgtaactgagcaggcggaagtatattttcaagctcgaagggcttgcgctcggactggagtcggtcatatcacgcggcgttttgaaaaaggaggctgactttagcacagcttctctgttgtacttgcacccggcgtaagccgcggcccggttggatcctaccggcgacattacttagccactagcttaagatggtcggctttctatttctggaatggctttactgtatgcactccaagcgccttacctatggctcaaatcgcgttttcgacttcctggtcctatggattttgcctgttggcttgctgctgctcctgagtgcactgttctttgtcggcaatcgcaatgtactgcaccgcattgtctacatcctgttcagcgtaccgaccttgtttctgttgtgcatgcgccctcgggaattcaaggacctgctgcgcgagccctggcatcgcgttcctggcgttctccgcctgggcgttgaccagtctgctccggagcccgcgcccagagattacgg

SEQ ID NO: 509488 - DNA, 352 bp, Homo sapiens
gcccgtcagggtggtagccaggttgccggggactattcatttcatcatgagccaaaccatgattgctgaatgtactgagggaaatgtctatgctcctgtgtatctcggggcttgtcttgttttgggctgcctcctgctcagttcctctctttaggtattcagtatagcgtacatgtaatgtcattcctgaggacccaaagtgatgctctttaacatggtgaacaatggtcactatatgttgggcaagacagttctgaggggctacgctgagactgagctgattgtatgtgctggaaaatggaacgaagtccggtacctttttgttgctgctattgaaagttctaaaactagg

SEQ ID NO: 509489 - DNA, 433 bp, Homo sapiens
gatgagctacgaggtacaccccagactcatacaatgcagaatgacgacggtaagttcgatgaatctgtaatctgcatgcggaactatgctctcgcttacccatatctgcattcatcgagtgccaaaggatcacgcgtccatccagatagaacgatggaccgatgtgattgagaatggtctctagcgcatgtgtttagtaggcgcagacttaaaacttatgctatcgtgcagagtgagctcatacggcagagatgggtagagatcgatgatgattccacttacttaccagaatgtgggcatagggcggatgtgcctcgatcgcaaaacaactgtcgacttgggatgaagacatctagggaagatgtggacttgattggtcgattaatatagattgatatgacaagacctgaaggacagaaaataatggtccaaa

SEQ ID NO: 509490 - DNA, 190 bp, Homo sapiens
gaggcgatctggactcactgcagcctgtacttggcaggcttttgcgattgtcgtgcctgagcctactgtggagctgttattacaggcgcgtgccaccacgcccgcctaatttttttgtatttttagtaaagacgggttttcactatgttggtcaggctgttcttgaactcctgacctcgttagccgtcca

SEQ ID NO: 509491 - DNA, 1242 bp, Homo sapiens
  misc_feature (432)..(432): n is a, c, g, or t
gataacacatgtgatcggtccgaaggtgaaggagaaaacaacagtaataacaagtggtcgtgcatccgggaaggcatgtttcgtccatatggtagatggatctctccgaagaagcctcttcatgtcagtaggagtgaccatcaggtcgatgtatgcttattgtgcttgagaattctgttcaatatcttactatctcactttcaatactggctgagtgccattgcacagtctgatggagactcaagctcactttggtatatatgactgtaaagggacttctaccactaccttctaaatctgtctccttttctatttagcctgtttggaaggggaattctcgcggagagacacctttctgctgccaaaacaaatgttaactggcgtacgggttgcttggtcaacaatacatgttctgatgagcacttaatggtntgaggacgatgtgcatgtgagcgcgtacgattctatgggtctcatatgaggattctcgaatggaagtaagcgcccacggggagacgaagaatcggtccaatgacttgcctgtgtcgtgggctttggtatcagaatgtttccctagaatccaggttgggtcatccattaacgatggaccacaactcgcaaacgtggaagcacaccttgaatattcaaaggagacccatcgacaagcccatcgtggaatcgtacaagctcccacgagccacaaaggttcgtgaataacgggtctatgttgtccataacttttgccaaagagggttattaatctgatattccttgtcaagttagtgctacactaataacgcatttaaggcaaatcgacattctctcaccccatgtacctcaataattgtacccaaagttgtggggccacattcactcaccatgggtgcgggacatcaaggttaggaagttttccccattactagggtactaacccattcatacatgggagaattttccccgttaacaccagatgactgaactatataatggagcccacctaagggctttaacctcctaatgaaaaacccggttgttccgccatgtgaaccattggattcacaagggattaacatttagagagttaacgcgaaggatttggtaaacccgtcacttttcctttgaacgtcaacgttacgtggaatctctgcattcaattttcaacaggctttactttaacaacgtaacatcggaagaggaagttactacagggaggtcttggtggatccgttgacatcgttattg

SEQ ID NO: 509492 - DNA, 311 bp, Homo sapiens
agggaccggaaaatggttggcaacgtgaccggggcccaggcctatgcctccccccccaagggcctgaacatttgggccctgattttgggcatcctcatgcccattttggtcattgtcatcccaggggtgtttttccaggcctatggatagatcagggggcatccctgaggccaggggctttgcccatgccctgtatcccccggactccaacttccattcctccccccgcccccggagccgagtcctgtatcagccctttatcctcccccgctttttccaatggcattcaataaagggcacgggtttttgga

SEQ ID NO: 509493 - DNA, 315 bp, Homo sapiens
ggagccggagctggaacggccgggggcggcggcagggcgggcgcttagggatctaaaatgtccactgaggcacaaagagtttatgacagtccaagcactagtggaggaaggttccgatggagatcaacgtgaaagtgttcagcaggaccagaagagacagttcagccagaaaaggaggaaaatttcagcaaaccgcttctaattgtaacatgtctaaagatttagaggacttcagaatacattgccccccccacgtagttgaccaagagaacattttttggggcactttttgccccggcctttttaggggggttt

SEQ ID NO: 509494 - DNA, 160 bp, Homo sapiens
gtacggaactctttcacatcacatcccctcatctgcccaaagggatccctcacgctctcagctgtgtcactgcactctatgtacagctcccttttaccacttaccaagttggactaagtagcttttcccacccctcactctccggtttcggtccagcgag

SEQ ID NO: 509495 - DNA, 121 bp, Homo sapiens
tgatcctcagaaaatttcggagtgtaggcgtggtactaacgccacgcggtggtcagcgccaggatctgacccagccgcagccatatcaataccatgctgtatgaagcgcaaatttccgctg

SEQ ID NO: 509496 - DNA, 237 bp, Homo sapiens
gtagctgggactacaggcgtgtgccagtatgcccagctaatttttggaattttaaggaaaaacggtgcttcattatgttgacctggctgttgtcaaactgatgacatgagacactctggccttgttgtcctgacaagctatttaccattatgaacaaccatgcaccatagataacagccatttaccattattaacaaccattgaccactgtcctgcccaaagtgccatgcaaagcac

SEQ ID NO: 509497 - DNA, 410 bp, Homo sapiens
aaggccatagctttaagagatcctctcaccacagatttccaaagtgctgggattgcaggtgtgattcatggcacccagactttgatgcctttattacatgatacaggcccagaagccaaactcaggcactgtatagatgaccactttcgtaaactactgacctagcttgttgccaattgttgattgaacttcccataactccacttcgtgtctgttcctctgtatacagccacgttctgttaccgtcatgagcctttaggtctccacttgccaccgcaaatactatgttccatgtaggtagctcattcagcccctcgcccttcatttcacacacaggttcaattcaggcctggctgccaatttgtgccatcgctgttggttgttgatgaaaataataaaatgattgattc

SEQ ID NO: 509498 - DNA, 315 bp, Homo sapiens
tgatctagcgggtgattcacagactgcgccggtgcccagcgtatcctgcgcaagcgagaggcgtcagcaaccagatgccaggcaggccggtggggtccttgtgggacacgggtctccccttctccgggctcgcgggggactggtccaggagggggagccgtgcctggcagtgggcaggcgcgactgggcgcggccctacatagcaccttggcagcagtatgatgcagccgttctagggagccagtagctgcttctcgcacgcgcggctgcgctgtggcctgtctctgaagacctctgcgcactgccttccttgtg

SEQ ID NO: 509499 - DNA, 1468 bp, Homo sapiens
  misc_feature (569)..(569): n is a, c, g, or t
  misc_feature (1256)..(1256): n is a, c, g, or t
gtctttgtttgatgcgagaagaactccctctgttgtgtgcacccaccaggaggagggtcgttcggggggtgggacctgtttgtgtgtcgccaagagtagggtgtgttcgcaccgagagcgcctacgtgtggcgtgtgcgggggatatatccctccacgagtgtgtagaatgggcggggcggatgaagtgactattggtcttccctctcactaggtgtggtcgtcctaacacgcttccctctagagagagggggtgttttctcgtcctccacagaagtcctgtctgtggtgtgagcgctgtggagtaaggtgtccgcttgtgctcatagtatggtcgcgctcttcgatttggcggctcttcatagaaatgtttctggaaccccccaagagagattggtggggtctctcactgttggggcccccggaagatgtgctctttcttttcttaagagcgctggtccttcacaagactgtggtgggcaccccgactgggcgcccgaaataaggggtgttaggaggggggcgcagtcatctactagaggtggttgctctcctctaagtcttcggttntcctcgcggggggaaggacaactttgttgaagagataatctcctctctctctaatctcgccgttggaccacccttcgtggttttgtttgggggcgcgcatgttgggcgacaccatctagtggggcgctatgactgagcctcctcagaagaccgcttggggggggcgcccctcctggtgcgccgcggcgatactttggtgagccgcgcgctttggtggcgcccaaaatgatgtctccaaacccctagacggtctctccgaacgagaaatgtgaaaagagagagagagtctcttggggcgtcgcacacacaggcttatatagatttgtgccccgcgcacaggagatactcttcaccagatatacctcctctgggggcgcacacatggataagactttgtgtgtggcacacggcacacaccctcttctttccgtgtcacacactcgtgtgggggtgaacacacacagagactcccctccaccctctcggtggtgtcacagctctcacaggcacagtttcgagagagcgcctcctgagcgcacacacacacttttgacacaggggtgtcccctcggtgatagtgtatagcggcgcccacctcctccctgggagagtgtttgtgatcccgcttccctatagaaacttttatacacagaaagcccaaggtgtccctcggagagccctcgtgtnggcacagctttatagctgttgcacagttgccgggtataattggagcccaagtcacatgtgtgtttttttgcctcacacttttcacccacaagggtttatgaatcacatgtgaggcctcgtgttaatttccgggggggccaccacgggtagagttcccccggggttttgttggtccaaaattaaaacctccgtgagaccccatgagaaaaaaa

SEQ ID NO: 509500 - DNA, 872 bp, Homo sapiens
agtttacgtggaggtgtgtggtatgccccacatgcttggtgcaaccccctggcgaaatctgtggctgcacctggtgtgggtgagtcccctaggggatgatgagtattaatacagatacgatggctccgtggcgacctacgcgccgtgagttctgctccctggcgatgatgtttgctaccggtccgttcatctcatacgcgccctgtggctaggtcacacgccagctatggttcacgcccaaaatgcctcttttaagtgtgttacctcggagccacgtgcactttcttttgattgatgtgcgctcccgggatgttacactccttcgctgtcgttcgttccggccctgagcttaagccgctcgtacagtcagtaggcattgactggcagggtcgcgcttcctaagccggcttatcgaaggagtgctctgaccagatcgtttgccgccctcatagagactctttttgtattgaggtattgtacgacagaccttctcggatgagacccttttgcttggttattccccccccgttgtttttacccatctcgggggagactatgtctctgtttagtagtacacatgtttgccgggtcataataactctattgtccctcactatgggcggagctcccaacaaagttattttcgccgacccctatatactccctggtatacactatgatgtacccgcaccacaacaacatcgggggttctgctcaactaacccccccacccagtgaccaaacacgtaaaacgccgttcaatgtacacacacgaggacaacaacacccctcacatggtttacaaccctagtcccccctttttcccctttcccccccccccgaattctttccggggtttcctttttaataaa

SEQ ID NO: 509501 - DNA, 1041 bp, Homo sapiens
  misc_feature (971)..(971): n is a, c, g, or t
ggctcttcaatcgattttctagaggcatttatacaactcagaccattgtgcacatgctgcgtgtcacgccgatgagctgaaggtgaaatacttggctacctatggaaactttgacaaagacattactggtgctgaactatatgatagttccatgtaactgatttcatcagaaacacttgagatgaaattggtttcatgcgaatgacgcgcaggagaagacagttctctacgtacgacaccggtgagtgtggtgactggcggcaattcttgcgaagtccatgtggagtgcataaatccaggatgtcgtttctggtgggatcgaggaataaccgtaaacctgaagtcggaaaaatactggaataggtaacccaccatcgaatggattgatggcatgaacaaagcagaagaatccggggacatgagtgctgcaatctttccttacttccctgaatgtcactcacattgtatgataaaggagtcttgtggcacaggcaattaggcatggacagtgactacacgaaagccacatatgggaacctgaaggctctcttcccagcagaggcaggccatctggtccattatgtagtgcccgtggctataatcgctaagttccgggttcatagcaagagtgcccaatcattagctctgccatcggaggtggcccccccgcggagtcgtgctctacataatagaaacgggctggcagggggccaggtcttgtaccgaaaatacgcccatcaactaaattgccgggcaggaaggaaaccgacgagggggatgtaccgtgctgacgctggacctgacccgccggtagaaagaatccctaagtgacggtaacctggctgagaaaggctgtgcccattgagggtgcccaaaaaccgttaggacctttcaattgaggtgaaagggggctagttgacggctgaaccagttccagtgaacattaggacgcccagcatatctgtacgtantatataaacttctcgcctcctggatccatggggcaaaacaggaggacgaaccaggaaaatagccaaaagg

SEQ ID NO: 509502 - DNA, 331 bp, Homo sapiens
aaaaaaagacccaaattgggttaggggcccctaggggggagcccatgggaggtccccctttaaaaagggggggggggaagggtttttttttttccccccggggaaatggtaaaccaaaccccttttttttgggggggtttttaaacccaaggccggaccgaggtttggggggtcttttttaaagcccaagcccaataaggcttttggggaaaccagtttttaccccccgggggggggaagggccggtttatttgtttttaaaaggggggggttttgggcattttaaacccctttttttgggaaggggaaaaaaattttttttttccccgga

SEQ ID NO: 509503 - DNA, 212 bp, Homo sapiens
tagtcccctttatataatataatcaagttcctccatctgggcattcagttaaattctacaacattgccaaaatctgatttgactctacagaatatgtatagtttatttaaccagatagtaatttaaaattttacaacatgcgtatttcatgtaatattaataacagtaatttaaattaatattcaatacataccgtttgaatttttataagg

SEQ ID NO: 509504 - DNA, 927 bp, Homo sapiens
ggtgctggcctgcagagagcaccgtctggacctccgggccctctctgctcctgcctgctggagaggatctggctggtcagaaacaaggtgacggggccaccccagtggctcatgcaccctggcagaccacggtaaccgccagtggtgtttccacaccgtgcccgtgaggaggccacgccagtgcccctgcgtcctgagctgggggtggggaagctgtgtctcaacaagcctctctatgggattctggcgcctgctcagcttgagaaccgcgctcatcgtggacgccctgtgcatgacatggctgtgcctgaccctggagaaaatggcatgtgactgtgcgtgtgttgtgccttgccagtggatgatgcctgccgcggctgcgtctacatggagtgcagaagacgtaaacattggctgggcagtggattgtgcagctcacgtcagagaattggtgtttctggcgaggagggaccaagcctcaccacggagaaggacgccgtcaccggcgtgcaggctgccaacctgccactctgggaggccccacgcggccctgcacctctcaggagggcgctggcgctgggatggtggccggcaggcaggggtggcaggagaaaacccatccgagtctgcaggtcagcgccctgggcatcagtggggccgggaggggtgtctgagcgcagacaccttctatccccggctcattgtggcccatcagcccaactggagcggcttggaaatgaccatcaccaggcttgccaagggtgttggcctggaacccaagacacagttgacttcccgggcatgactcccgggagagtggcggaactggcgtgctcagaagagttgcgggacgattccgggcttagtgggcgcttcagctaattgggctagatttgctgagggcagtggcagtgccataagtacctc

SEQ ID NO: 509505 - DNA, 876 bp, Homo sapiens
gggacgtgcggcacacttccgtagaggtggacatggcgtgcggttcgcggcgctattgttgcacggttcccagagtgtgaatctcccaccagaaaaattgatcacatcaatatctgcagtcccaattccccaaaaagaagatgtagctgattttaaagctttctgtggattctttaatgggaaaaagagacattgacccatttcaaaggaccagaatattcaatgtccaagggccaaagaagattagcaagaagaaaaggtttaagggatgtggatacagtggttgaagtggaaaatacaggtactggttccaaaggaccttgtaaatttttcaaaattttaaaacaggagaagctcttaaaaaaaagaacggggtggcttacaaaccagggtaaattgtgaggtatggtcaaaaatttatgtgcgtcttaacaagggtgaaacctttttcttcttggatttccccaagaaagaaagatgtgtgggttggaaattccacgttcacctaatattgttgtgccaaaacaaattttcattgtggggccatttgtgggggttttaccatcaataggaaaattttataggcaaaatcttcaaaagaaggtttaagggacatcaaggttattaagcaataaaattaccttgggggatatggggcatgcaagttgtggtcttctgggaacttggcttccaggtgtgggctatgaaggacacaattgcagtccaatctctaaaggatcttctttgagttctggtccagttactaaagaagcgcagatgtaacagtgttgcaaagcggcagggttttcacgatgggaatggggatgtggggcttacggtgaaattggctcgctgaaacttggtaaacgagggatt

SEQ ID NO: 509506 - DNA, 351 bp, Homo sapiens
  misc_feature (2)..(2): n is a, c, g, or t
  misc_feature (109)..(109): n is a, c, g, or t
  misc_feature (134)..(134): n is a, c, g, or t
  misc_feature (143)..(143): n is a, c, g, or t
  misc_feature (152)..(152): n is a, c, g, or t
  misc_feature (334)..(334): n is a, c, g, or t
gntgaatgaaggtgaggattgctggccccgaggtgtacaggaagggggaaaatgtgcgagggcctttaacggggggcaagatgccagcaatggccccccagcagacaanaaggcacagtggggcttggggactnggggaggcnaaccctgtncgcgctgtccttgaaatcaggagggttgtgagtggagtgctgcaatcgcccacccaacccctgtacaacgggggttccatttctgagacccccaaagtatggggcatcttagaggcccgccccacatgctgagcatcaactcaaggaccttcccccatgacgggatcctcagaaagagccanggccagccgatgcataa

SEQ ID NO: 509507 - DNA, 316 bp, Homo sapiens
tatagtctagtagtatcgttcgcaggaatcactttctctcagttttgaagctagtgtcattgcttgtaagcgactgaatcagatcctggctgatgttgtggtcctatccgttccagctctaactgttctgccacctcctgtaatccatctttgagatttttgcagctcttcatgaggtacttcacatcataaatgtcaggaaaaatcaatcgaaggatctcaaagaagtcaagttcttcttcaggccagttagagttggttaggattttgattaagttgccaaagtcgtaactgctatgaactgactgccatttga

SEQ ID NO: 509508 - DNA, 377 bp, Homo sapiens
tggggaggacgccgaatacgcggcggtagacctttgagaagtattcgactgaggtgaaacctgtcagggcggagacttcggttacgctgagtgtggtttgctgaaggtattggtgcgatttttctactcgcaccagcatgtattcgctgtgcagcgtttgccctgattgttgtttgaaacggcgctctaattggcgcagtgacaaacccagctgttgtgcgatggtgtcgcatgagagtgggtcgtcgatgtgtgcttgcatgatggcacgcgctcgcgcgactaccgcgtcctgggctgctgccgggtcgccgtgacgtgagtcgcggcgggggctcaggagcaggtggcgggcgacttcggttgaggtcttgggc

SEQ ID NO: 509509 - DNA, 226 bp, Homo sapiens
  misc_feature (10)..(10): n is a, c, g, or t
  misc_feature (62)..(62): n is a, c, g, or t
  misc_feature (72)..(72): n is a, c, g, or t
  misc_feature (87)..(87): n is a, c, g, or t
  misc_feature (122)..(122): n is a, c, g, or t
  misc_feature (124)..(124): n is a, c, g, or t
  misc_feature (131)..(131): n is a, c, g, or t
  misc_feature (136)..(136): n is a, c, g, or t
  misc_feature (138)..(138): n is a, c, g, or t
  misc_feature (179)..(179): n is a, c, g, or t
  misc_feature (187)..(187): n is a, c, g, or t
  misc_feature (197)..(197): n is a, c, g, or t
  misc_feature (222)..(222): n is a, c, g, or t
tggaaaaggntggaaaagagaatagtttggaaaataaaagataaatttaggagaataaaaanataaattganataaagaatggatanaggttttgtcaattcagaatagtagcctcaaaacntntggactnacctntnatagatggtgacgataggggagtaaagtttaataagttganaaaggagnttaagggggntggaaaaaagtattttgatggaganaagg

SEQ ID NO: 509510 - DNA, 193 bp, Homo sapiens
  misc_feature (1)..(1): n is a, c, g, or t
  misc_feature (28)..(28): n is a, c, g, or t
ntgctaggggaccgctgcatattgatgnatttcatctcaggcagactacaatggaaaaataaaatcacctgaaatgatgaacagttgagttataaatgaatgctgacaattgaaaacagcacaatgtcttgtgtagcttaaatatatgtagaagtcccatgaatttcacactgacacccactctgcactggac

SEQ ID NO: 509511 - DNA, 359 bp, Homo sapiens
  misc_feature (12)..(12): n is a, c, g, or t
  misc_feature (40)..(40): n is a, c, g, or t
  misc_feature (45)..(45): n is a, c, g, or t
  misc_feature (60)..(60): n is a, c, g, or t
  misc_feature (68)..(68): n is a, c, g, or t
  misc_feature (174)..(175): n is a, c, g, or t
  misc_feature (304)..(304): n is a, c, g, or t
  misc_feature (339)..(339): n is a, c, g, or t
ttcccagtgganttgtatatgtacttgctttatccctttnccccnaaaatgatgataccntgtattcnccattgtgttttttaatgccctgaaataatatgtattatggcaacattatttaaacattcaaacatttctcaagaatgagcaacatttgtaactttacaatgtaannttatataatccaaaggtattttagaattcaggccatttgatgttttgtttgcttatagtgatgtgttcccaggcaaatgctgcttttttttttttgggactatgtacatacgttactgagattgtgtanaaagtagatcctgaacagttatcacatttaatatntcttaaactgtaaaagtgta

SEQ ID NO: 509512 - DNA, 173 bp, Homo sapiens
  misc_feature (95)..(95): n is a, c, g, or t
  misc_feature (151)..(151): n is a, c, g, or t
agtctagagatccctgagagaccgtgttgcaatggttcatgcctgtaatcccagcattttagaatgccaaggtgggaggatcgtgtgagcccagnccgagccaacacaatgaaaccctatttctacaaaaactttaaaaaattagccaggncatgtgcggtggctcacaatct

SEQ ID NO: 509513 - DNA, 747 bp, Homo sapiens
cttgcctgccggcaccagccaccatgtgggagctcgtggactctcttgctgcttaccgcgaggcttatgtgtttcggcccaagagaaggtgccctgagttgccaatgtacgcccagagagcctccgtgtcgcacgtgcccccatggtgggcgagccttgccattccttccctcagacatggccatatgcagtaacaacttcttcaagcatgcagataaaaatagtggccccgatctattctgttcgtatgggcaccaagacgtacagtgattagtcggtcaccatgcagctggccaaggaggtgcttattaagaagggcaaggaccttctactggagcggcctcaacatggcaactctagacagtcgcgtccaacaaccgtaagggtatcgccttcgctgactctggtgcacactgggcagctgcatcgaaggctggagatggccacctttgccctgttcaaggatggcgatcagaagctggagaagatcatttgtcaggaaagtcagtacattgtgtgatatgctggaccaaccagaatggacagtccatagacatctcctttcctgtcttcgtggcggtaaccacatgtcatctccttgatctgcttcaatacgctcctacaagaatggggaccctgagttgactgtcatacagaatgacaatgaaggcctccatagacaagctgagcacagacagcctggtggacctagtcccctggttgacgatttgccccaacaaaatcctg

SEQ ID NO: 509514 - DNA, 387 bp, Homo sapiens
agaacagtctaggcaacataaatagaccactatctctacaaaaatataaaaaagtagccgggtgtggtggtgtctgcctgtaatctcagctacttaggagggtaaggtgagaggatcccatgagtgcaggagttcaaagctactgttgagctgtgatcctgccactacactccatcctgggccacagagtgaggaaaaaaactggcatgtaatgaatattaaaatagcatccaccgggtgcagtagctcacgcctgtaatctcagcattgtgggaggctgaggagggcagatcatgtgaggtcaggagttcgagaccagcctgcccaacatggtgaaacccaatctctaataaaaatacaaattccgggcatggtgtgtgtgcctgt

SEQ ID NO: 509515 - DNA, 266 bp, Homo sapiens
  misc_feature (32)..(32): n is a, c, g, or t
  misc_feature (108)..(108): n is a, c, g, or t
  misc_feature (186)..(186): n is a, c, g, or t
  misc_feature (262)..(262): n is a, c, g, or t
cttcaaaattattattcccccccctcttactncttcctccccatcctaccctacaccctcctccctcctacccagagttgctacattgttctttatagtcgctataancctaccacttgagtttatattttatctgttcctttagctcttctctcccttactttctcttttctatctccatccgtntagcctcctctacatttatatttgtctctttccttgttgccccttatctccacgtcatacataacagttcaatttnactg

SEQ ID NO: 509516 - DNA, 149 bp, Homo sapiens
cagcattgtatacataaacaccaataactcccgcctgaccgtcatcgatttggccccttgtgacgttgtgtgccccacaccaggaattcggcttcgactttagccctgtctgcttcctgtaaactccctccatccctacatggctcaca

SEQ ID NO: 509517 - DNA, 541 bp, Homo sapiens
atggggatgacatgtaacgggataagcgttgacggggacgatgggcggtgccacaatttagtgggaggtctttgttcgagacagtttactggtacttatcagctcttgggtccctaagttctcctaacctacagtgtttctctgagtacatatggtttcattgttcgatctactttctatctatctgaatatgaacttctaggatcatgtctattctagtagatgatgacttacagcctgcagtataggagggacaacgtcaactactgcatgtgcaataacaagcttgaagggaagctaaatgttggttacaaatttcagacagtattttaatgccgttggcatttttctaagaattttctataaagctaattctgttattttttgtctctcacttagggaactgtccaggtttatcgctgccgggagactacactgcaaaatagataaagtgaatgaaatagtagaaaccaacaggtactctcatttctcagaataaggggcattcctaaactttacaagtaggtcacctattgtcatc

SEQ ID NO: 509518 - DNA, 398 bp, Homo sapiens
atatattgtgaaatagggatagtggggactaatgtgcacagctatattttttaaactttatttgctgtgaaattctgtgaaggttcaggtatctaaaataaatatacaccaatatgaaatataatgtgttcagaatgcaagggaatatgtgatagtagtgtgttggaagatactcttggctaatattaactagaagtattttgatttgtacaggcataatttgtgtaaaatgacttcatttaacattcactgatggagaataataatggaaggtctgatttaaagaatggtggcatggtgcatgtgatacttttgcaagtgttggggagaacggtatgttttggagagatttcttttgggtgccagggacacagcatttatcatacacctctttatcg

SEQ ID NO: 509519 - DNA, 947 bp, Homo sapiens
  misc_feature (19)..(19): n is a, c, g, or t
  misc_feature (71)..(71): n is a, c, g, or t
  misc_feature (75)..(75): n is a, c, g, or t
  misc_feature (130)..(130): n is a, c, g, or t
  misc_feature (153)..(153): n is a, c, g, or t
  misc_feature (157)..(157): n is a, c, g, or t
  misc_feature (159)..(160): n is a, c, g, or t
  misc_feature (167)..(167): n is a, c, g, or t
  misc_feature (170)..(170): n is a, c, g, or t
  misc_feature (173)..(173): n is a, c, g, or t
  misc_feature (227)..(227): n is a, c, g, or t
  misc_feature (245)..(245): n is a, c, g, or t
  misc_feature (252)..(253): n is a, c, g, or t
  misc_feature (260)..(261): n is a, c, g, or t
  misc_feature (263)..(263): n is a, c, g, or t
  misc_feature (297)..(297): n is a, c, g, or t
  misc_feature (332)..(332): n is a, c, g, or t
  misc_feature (381)..(381): n is a, c, g, or t
  misc_feature (383)..(383): n is a, c, g, or t
  misc_feature (391)..(391): n is a, c, g, or t
  misc_feature (446)..(446): n is a, c, g, or t
  misc_feature (448)..(448): n is a, c, g, or t
  misc_feature (451)..(451): n is a, c, g, or t
  misc_feature (456)..(456): n is a, c, g, or t
  misc_feature (523)..(523): n is a, c, g, or t
  misc_feature (546)..(546): n is a, c, g, or t
  misc_feature (561)..(561): n is a, c, g, or t
  misc_feature (692)..(692): n is a, c, g, or t
  misc_feature (695)..(695): n is a, c, g, or t
  misc_feature (752)..(752): n is a, c, g, or t
  misc_feature (767)..(767): n is a, c, g, or t
  misc_feature (770)..(770): n is a, c, g, or t
tttattgatggtacatganaaggtgcggcacctaggcccctcccctcttcaaggggtctacatggcaactntttnttggggagactcagtgtggtgggggactgagtgtggcagggactccccagcagtnagggtctctctcttcctcttgtncacnannaggggcnggnggnccaggggtctaactccttggaggccatgtgggccatgaggtccaccaccctgtngctgtagccaaatccgtngtaaaannaggaaannancataaaaaagtggtcgttgagggcaatgccagcnccagcgtcaaaggtggaggagtgggtgtcgctgtngaagtcagaggagaccacctggtgctcagtgtagcccaggatgcccttnanggggcccnccgacgcctgcatcaccaccttcttgatgtcatcatatttggcaggtttttctananggnagganaggaccaccactaaaacgttggcagtggggacacggaaggccatgccagtaagcatcccgtacagcncagggatgaccttgcccacagcnttggcagcgccagtngaggcaggaataaagtactggagaacaccgcgaccataacgccacaatatcccggaggggccatccacagtcttctgggtggcagttatggcatggactgtggtcatgagtgcttccacgataccaaagtngtnatggatgaccttggccaggggtgctaagcagttggtggtgcaggaggcattgctgangatcttgaggctgtngtnatacttctcatggttcacacccatgacgaacatggggggcatcagccgagggggcagacatgatgaccctttttggctcccccctgcaaatgagccccagccttctccatggtggtgaagacgccagttgacttcacgacgtactcagcgccacctcgccccaattgattttggagg

SEQ ID NO: 509520 - DNA, 114 bp, Homo sapiens
ttcccaagcccccaaaaaattaaatccccctcctgtatcacccatgggtttttttcagcctgggtcccgcccattgcaacccattacaatttccagctttccccctcaacccta

SEQ ID NO: 509521 - DNA, 230 bp, Homo sapiens
ccgcgtcgggcgagttcggccaacagcgccggatacttgtccacgccgtcgaggccttgcggcgcctcggggatgccgtcgaaatccgacccgatccccacgtgatcgatccccgccaccttgcgcacgtgatcgaagtggtcggcgacatcggccaaggtcaccaccggcttggcgtgagcgtcgtcccaggccttcacccccaccttggccttgtctggctggcccac

SEQ ID NO: 509522 - DNA, 158 bp, Homo sapiens
gtgcggccacttcctgtgtccgtggcagacttccccctctcgtgtgcgcgcgacattgatgataatatacgtgggactgtgtgaatacaccagaaggtctggtactcgtacagcacagatgacaccctccctccagctccagggtgtgagggggggat

SEQ ID NO: 509523 - DNA, 830 bp, Homo sapiens
  misc_feature (592)..(592): n is a, c, g, or t
  misc_feature (669)..(669): n is a, c, g, or t
tggtcatcatcaggcatgctcacccgactacgcccgcacgcagttcctgagccccacccatgaacgaatccctactagaggagaacgcggaaaaagccttctacgtgctcagaggagtgacgaggccaaggtgctgctgtgggtcttgatggatgatcggcctgcctgctgttctgccccactccctgaaatgtccctattgtcattggacccctgaccagcctggctgcctgctgcgcatacacgcatatagccctcgtgactgctatgagtccagcatggcgccgtctgggttggttgattggcgcgtgtgcgtcaggctcatagacttcgcagccatgtgctgcctcaaaggatagagataagtgtggctagtctatctgcgcaaagtgctatgctgagttgcgtgccttagctttgcggcaggaccaccaagtggaagtggtagcatgctaccagtttgtagcgtccaatgaatctgtagtgcgcaacgcattgtaccagtctaattgcagcacgaggtgtagtgtatattgaggtcctcataactcgttgagatgaagcgtatctatacaatacatgtgatcccacnctgtactcacacatcacgcatgactatacatgaatcccatgtagatgcgtcgtgcagcatgtgcttagatcacaagncgctaggcacacagatgaagacgcagacgatttccctatcttgtcgctagcgtgggtaattcgcacgcacgctactacttcgtgcacgccagtggcacgacatggtaccatttggttcggctcgaccaacgatagtcccaagggccaattgtgaccgcgtc

SEQ ID NO: 509524 - DNA, 874 bp, Homo sapiens
tcccgtggtgggcggggtgcgagtggataagtaggggtaggggatgcgagtggtgccctgtgctcttttgtggtacgtcgtccttgggagtccccgtcccggctgacgtttccccgtggggttgttttaggcggggaccctttttttagggaagccgccccgggtgatgccccggtgttctctcggtaggagtggaaattacctccttgggtgcctccgtgtggagccccccggcgctgctttcctcccaggggggttgccccggccgcccctctgtgcaggagaggtcatgttgagaaaactcatatcgggcgcgccgtcggtttgtcggccatatatcctcgtgcgctcgccgaggttctttgcccccccccggaccggcgcggcgtatcctccccctcccgggatttcctcttcggcgtccccgctccgcttctttcaggggaccaaagccccttcttctcagacacccgggggaataccccttcccgctggacccccccccgggggttcatcttgggcccccctacccccctggggggtgccccgagtcccctgaggtgtattacctcctgagcacgtctcgtgaggagggttccgacagacaccggatggcaatcccgcgcggagcccctctccactgttttacacgtgcgcgcacattaacgacttattggccccagccaaacgtttgataaaccgggtgagaagtaggcgtgggggatattaaagtatcagaacgtatgcagcaaaacttttggtcggaaacggaagcccccgggtttcatcggaagtaatggtagaccacccggcgattacatacctatgtccagtttccagccaaattattaggaaaaaacaaaaacccccacag

SEQ ID NO: 509525 - DNA, 248 bp, Homo sapiens
ccccctctgtctcatgctttccagccacctttgctaccttatcttattcctgtcttatgctataagcgagctttttggatttactgtctcgcgaacggcttcttgtcaatgtatactatacaacattcttaattgtgtctttatttttgtggcctcaggtatctttcaaattctttccatttctcactttctctagagcccaattatagctatttatgcaaaacagcatgctccacatagcccatatt

SEQ ID NO: 509526 - DNA, 293 bp, Homo sapiens
caatacacggttgaactggtaccttgcccggtcgaagtgcgtggtcatcatgtaccactggcgtgctacccagaataaatactgatgtcgaaaccagttaccagcacggagagacgggtggaagtgttcgatgtccggtgtttcttccggccaggccatggtctagaacggtaccagtgcagaagaaaaccaggtgtctgagcacctcgtcatcgcgcttcattgcaccggctataaccggcggaatctcgcgttgggttttggcatcaggggactccctctaaagtcgacct

SEQ ID NO: 509527 - DNA, 112 bp, Homo sapiens
cagtgtccgagacggtgacgaccgtgttactactggtatatggacacctaatgcctcttttctaacagcttggtacatttttttcgtgaaatagattaaatattttctctct

SEQ ID NO: 509528 - DNA, 773 bp, Homo sapiens
ggacccggggccacggcgggatgcgggacaacaccagcgaccatcagcgtgagtctggtgagctcggggagcaggggcaataagctgcagttcaggtaccccttccagagaagccaggagcacccggcgtgcagacaagtaagccgcgtagcaggatacgctgccagcaagaggggcgaccatgctgatgagcaggacggtgattccaggttttcagatgttattctggcaacaatgtcggcaaccaagtctgaaatgtgtggtcgaagaaatttggaactgacagattgataatgtgcgaatcgatgggcacccaacactgcgtgacagctatgcttcgtgggcgcagtgctcaacgcaagtactccgatcagttgataaagcatgtctgcatatacctgttctccgtcgtatcagccaccgtgctgcagcacgaggagcgccgctgccagtacctcacccgggaggccaagctgatcctggcgctccaggatgaggtgtccgccatggctgcatggaaatgaaggtcctcagtccccattccatcacatcctgcccaagtgcaagctggccagggacctcaaggaagcttatgacagcctgtgcacgtcgggcgtagttcggcttcacatcaaacagctggcttggaggtgagcttctgccgtgacccacaagaatccactatgcgtgctccagtctgatcgccccagaaggcatcgaacggagcctgaaagcatcgggccctacaatgcctgctgtgctcagtgatgagg

SEQ ID NO: 509529 - DNA, 385 bp, Homo sapiens
gacgtagtgggactgtatgattgtcctcctcagtactagacacttcatccagagaggactctgagccaaccctaagggattcaggctgtagctctggttcgccgcacggaggtggcgcaggaatgcatcggcctcccctgtcctgacttgtcagcgctcctgcgctcatgcctgggagcctggaccccagctctgtcccgacttgttagtgctcccgcgctcatgcctgggagcctggaccccagctctgtcccgacttgtcattgctcccgcgctcatgcctgggagcctggaccccagctctgtcccgacttgtcagtgctcccgcgctcatgcctgggagcctggagcccagctctgtcccgacttgtcagtgctcccgtgc

SEQ ID NO: 509530 - DNA, 1028 bp, Homo sapiens
  misc_feature (274)..(274): n is a, c, g, or t
  misc_feature (350)..(350): n is a, c, g, or t
cgctcgtgtgtcatcctggatgtgtggctacccctcctcttgtgtgattttctccgtatggcgcttcgtttgtgacacaccgagaggactttttccccacatatccctgcctcggtttttcactgctggctcgtcattgtcgcgcgccagttgcgcctgtctccgcccgggctgttttttccccctcgtgtcgaaccccgacacgggcatctcatataaggaacggtttaaacaaatttaagggatctcgcaatttttccccccctgtttcccngagcttcacctttggcattccccgtattagaggccccgcctgcccagtgacacagggttgaacggcccggttaccntaccgtgccaaggtagcataatcacttgttcctacaatagggacctgtatgaatggctccacacgagggttcaactgtctcttacttttaacccagtgaaattgacctgcccgtgaagaggcgggcatgaccccgccagacgagaagaccctatggagctttaatttattaatgccaaccagtacctcacctaaccccccaggtccttaacttcccaacctgccattgtaaaatttcggttggggcgacctcggacccagaaccccacctccgagccgtacatgctaagacttcacccagtccaagcgaactactatactccattgatcccataaacttgacccacgggaccagttaccctagggataaccagccgccaatccctattcttagagtcccataatcccaccaatagggtttacgacctctgatgttggatccaggaccatccccgatggtgccagccgcgtattaaaggttctcgtttgttcaacgatttaagtcctacgtgatctgagttcagaccggagtaatcccggtcggtttcttatttacttcaaattcctccctgtacgaaaggaccagagaaataaggcctacttcaccaagcgccttcccccgtaaatgatatcatctccacttagtattatacccacacccaccccagaaccgggttta

SEQ ID NO: 509531 - DNA, 430 bp, Homo sapiens
  misc_feature (165)..(165): n is a, c, g, or t
  misc_feature (219)..(220): n is a, c, g, or t
  misc_feature (248)..(249): n is a, c, g, or t
attgaccaggcgctgtacctgccagctgtttgcgcaggctggctacgtcggtttcggtagtcaccatcgccatatgctcgcgcttttgcgtcacgctaatcttctcaacgccttgcggcaggttattcaccagaatccggttggcacgatcgaccgcttcacganagtcacggtatttgtattgctgaccagacatatacagtgtcttatcgcgtactnnatttcggcgcgtcaaagcccgcgtatanntcagggcggtaagttggtttgctaccgtggtgtactgcaatccttcagattcaggcgcaggttgatatgccggttttggcgtatcgcgcaaggcagggcgcagatcgttgaaattggtccgtaacgtgaagcccaacattcacgtgttaccggggtcatagctcaggttgagatctgtcca

SEQ ID NO: 509532 - DNA, 180 bp, Homo sapiens
tcagcatcaactattactgcatagactataacagtatacactattacatgcataaactattacatgcatatactattcccccgagcattctcaattacaatatatacaccaccaaacaatgttcaaccatgtaactactactactcgaacgcccattatcatacaaatgcccccgttggt

SEQ ID NO: 509533 - DNA, 259 bp, Homo sapiens
actatattaggaataaatgaaccctgatgaaggcttgcacctacctctgatttcctctttggagctatggacaaacagttatccaactgcacctcgttggcatcttgtacttacaatccatgcacacccacacactgctgtggggtccaatgttaaatgtgccacatgcacccccaacatcctcaagatgtggcccctcaaggggtgtgatgcctataccactggcacagcgttagatcacagcacacttgggatctaa

SEQ ID NO: 509534 - DNA, 973 bp, Homo sapiens
tatgctttagactactccttcagaatcgatggcagtccacacatactgactgctagtctctcctatccttacacatctcatagttctagcttctcctgtctaggcactgagactcgaactccgtagacagctccaagccaagtagtccagcgctagcatcaggctcttactcatggacaaacaatacgagcaactactgagaacaagagctttcggccacttgtcgaacaaagctggaatgattcataatagacaactggtctgttaatctttttcatcattgtcgtgtataatttacctctcattagcaacggctaacacacattttcaagtgccacaggttttacacggattctgcagaaacaacaaagtaaaatcagtccttcagctctcagaacctacaaccagctcgtgctatccttgacttaatgtactctcctcatcgcatggcgtgcacctacagcttattgcctgccctaacctcggtaactctattcctgttcgctattctctttcccaagtggtatactgctcgcgtgtgcgagcttctcccatgcaccgccctatccacgctccccgctcacctcgtgccccttcttttcacacttatgaagtggcccttactgctcgcacttcctttagtctttcctctagccctgggtccacagccccttagcgctcccccatcatctggacttatcacctggtaacctgctggctcttcccctagccttaccctaccagctgcccccaagcccttttgtcccctcgtatctgcccctgacgttgctgtaccagccgggcctttccgactcccccgtcgtaacctcttccatccacctcgcctgcgaccccgttattcctgtttccacaggaatagtccttgctctcgcctcctccggccatctgttccgccccctcggcctgttagcttagcacgtttattctctccctctctttctctgccgtgccc

SEQ ID NO: 509535 - DNA, 118 bp, Homo sapiens
agtagacaagccaagaaacagaagactaggcggacgtaggaggaaggggacagttagcagtctcacttagggacaaggccacagccaggggtccaggccactaacccagcccgtaggg

SEQ ID NO: 509536 - DNA, 172 bp, Homo sapiens
gttttaaaatccccctttttcccctaagggttcttttttttccttttttggggaaaaaaatacccggtttttgaatttccctttttagcccctttgttttttctggccccaattttttttttaaaaaaaaattaagggttattttttgcccggttggtttttttaaaattta

SEQ ID NO: 509537 - DNA, 595 bp, Homo sapiens
aatggggcacagatttcctcgcggccgtcctccttcgccccgcttgtgtggtcaccccccccggctatgcctcgctccacccacccgccgcttcgcccgtctgttgcaatagtgttgtccacattagtggccgtctttgctagcacagaggcgctgtggtgggggccccccctcttgttttcgtctcgtgttcttctctctctcttggtgggcacagcaccttgtgcgtgccccgccgcgcggatatatctattatcgccacacgctctcccccggcatatatttctgggccaatatacgcactctctctccgcgagtctctctcactcgtcccccggcggtgtgtcatagcgcacgcgggcgagagacacttctatcgcgcggcgccatcctcggcggtgcctccccacgaggcccccccccttgtttttcctccacacaggggccgcgagggcggcaacacacccggtagccatgggcgcgtgatcagtggttcgaatgaccacggtgggcgccggccacctcgtgcccacgccgcccctgggctctgctctaggttaaatcgctcctaccttcccgacaaatgacaaaacag

SEQ ID NO: 509538 - DNA, 500 bp, Homo sapiens
  misc_feature (35)..(35): n is a, c, g, or t
  misc_feature (37)..(37): n is a, c, g, or t
  misc_feature (132)..(132): n is a, c, g, or t
  misc_feature (202)..(202): n is a, c, g, or t
  misc_feature (387)..(387): n is a, c, g, or t
caggagtcaaaccagctcgcagtgaaccttgcccntnctaaaaaatataaaaattcaaaaattagccggccgtggtgttgtccaccttgtagtcccagctactcggaggctgaggtgggagaatcacttgancccgggatgtagaggttgcagttgagctgagattgtgccactgcactccagcctgggcagcagactgagnccctgtctgaaaaaaaaacaaaaaacaaaaaacaaaacagctgggtgcagtggctcacacctgtaatcccagcactttgggaggccgaggcgggcggatcgcgaggtcgggagttcgagaccagcctgaccaatatggtgaagccctgtctctactaaaaatacaaaaattaggccgagtgcagntgctcacgcctgtaatcccagcactctgggaggccgaggcgggtggatcacgaggtcgggagattgagaccatcctggctaacatggtggaaccccgtttctactaaaaatac

SEQ ID NO: 509539 - DNA, 1807 bp, Homo sapiens
attcattactacagggcaggaagggcacgttctcatcagcatgagggagtgcctttccatccacatcggtcaagctggcatccagattggggacgcctgctgggaactctattgcctggaacatggaatccagccaaatggcgttgttcttgacactcaacaggatcagctggaaaatgcaaaaatggagcacacaaatgcatctttcgataccttcttctgtgagacaagagctgggaagcatgtgcctagagcactcttcgtggacttggagccaactgttatagatgggatccggacgggccagcaccgttcactcttccaccccgagcagctccttagcggaaaggaggatgctgccaacaattacgcgcgaggccgttactctgtggggtcggaggtcatcgaccttgtgctggagaggacccggaagctggcagaacagtgtggtggacttcagggatttttgattttccgaagctttggaggaggcactggttcagggtttacgtctctcttaatggagaggctcacaggagaatatagcagaaagactaagctggagttctcggtctacccagcccccaggatctccactgccgtggtagagccttataactctgtcctcaccacccactccaccacagagcacacggactgtaccttcatggtggacaacgaggccgtctatgatatatgccatcgtaaactcggtgttgaatgcccctctcatgccagcatcaatagattggtggttcaggtggtatcttccatcactgcctccctccggtttgaagggcccttgaatgtagacctaattgaattccagaccaacctggtaccttatccgagaatacatttccccatgacagccttcgcccccatcgtctctgctgacaaagcctaccatgagcagttctctgtgtcagacatcaccactgcttgctttgagtcctccaaccagctggtcaagtgtgatcctcggcttgggaagtacatggcctgctgcctactctatagaggggatgtggtccccaaggaagtgaatgcagcaatcgcagccacgaagtcgaggcactctgttcagtttgtagattggtgtccaactggtttcaaggtgggcatcaacaatcggccgcccacggtgatgccgggtggggacctggccaaagtccaccggtccatctgcatgctgagcaacaccacggcgattgtggaggcctgggcccgcctggaccacaagtttgacctcatgtacgccaagagagcatttctgcactggtacctcagagaaggcatggaagaagcagagttcttggaggccagggaagatctggcagccctggagagggactatgaggaagtggcgcaaagtttctgaggcatgtatgatgggtgcaaatgaatgtcaagttaaaatggcatgttttcttttcaagccgttatatgcctagtgggtagttcccctgatgagcagaaaaatgaactcaaatcaggcaagactctaggttccacactaaattaagtgggtcagtaccaacaatgaacacattatttcctggtctactggtacaagtcagctctgctacctgggagcctttggaagcttagagtcctttgaactgctgagtcacttctaggtgggatttttttgttttaccaagagacaatgaaatcctaaagtttatgcttttcctttctggtaccggaagtagaaaacagcacatgttgattacgaatgttttttcccccatgtctacattttttacactgattaaatcataaatattttcagtatttattaaaa

SEQ ID NO: 509540 - DNA, 126 bp, Homo sapiens
tcacgggaggtcaccatattgatgcgaacttagtgcggataccgatcggcataggcactacagccagaactcctggactcaagcgatctccagctcagctcccgagtagctaggatacaggaacgc

SEQ ID NO: 509541 - DNA, 810 bp, Homo sapiens
  misc_feature (380)..(380): n is a, c, g, or t
  misc_feature (504)..(504): n is a, c, g, or t
  misc_feature (734)..(734): n is a, c, g, or t
  misc_feature (753)..(753): n is a, c, g, or t
ttacccccattttatagatgaggcagttgggtacagaaaggtttttttgctcagggtcacacatctggggtaaaggcgggaaaccatcttgggaacaatgggacttttcttattttgtaatttttgagactgggccccattctgtcgcccagcctggagtgcagtggctcgatcacagctcgctgcagcctcaacttcctgggctcaggtgatcctcccacctcagcctcctagcggagaccacaggcgtgtgccaccacacccggctaaaattttttggtagagacagcgttgtccaacatgggctcaagcgatcctcccacctgggcctcccaaagtgctgggattacaggcgtgactaccgcgcccggccccaactnttttttttctttttttttgaggactcccactgttccccaggttggagtgcactggtgagatcttggctcactgcaacctctgcgctcctgggttcaagcgattctcctgcctcagtctcctgantagctgggattacaggcacccactaccatgcccggctaatttttgtatttttagtacaggcggggtttcaccatgttggccaggctggtctcaaactcctgacttcaagtgatcttcccacttccgcctcccaaagtgctgggattacaggcacgagccactgtgcccagccccatctcactttttttttattatcccaaacaaactctgtacctattaaagtccctatnccctgctcccccacccttnataaacacattctactttctcttcctatgattttgacaactgtagcaccccgtaaga

SEQ ID NO: 509542 - DNA, 880 bp, Homo sapiens
ggagaggacagggtcgcggcgggcggaactggtgtctccttcacttcgccctccagctgctgcagttgctgcccgaacgcgagcgtgccacaatggcgggtttcagccaggtcgttagacgcgcagcggagtggtccgtgcgagtccccctacaggagcagcaccagacttccctctcttcccgcagggctgcgtccagttagttgcagaggcgcaggctggaagcagacttggcgccgcggtccaaatgttgtattctcatccgaatcgatattggctggacgctgtaggataggaaagctcgccacagatgatgactctttcagcaaaatagggaatatgaggtaaccgtggtcagggtagaaaatcttggactgctgaagaacgaatacgtcggttgccagtgggcggtgggaattttatcaaacctgggtacctggtattcattgcttagatttacaggtacgaactggtatataagattaatctgggggacgcattgtgacggactcacaactagcgaatgttggatggtgtagttatggggtcatggtatctatttccacaaggataaatgtgggaaccaagcgtgagtagacgagcatcatgagggagacgagtaagatcgggcaaatttgaaaggaaccgcagagttgtggttcaaagtgctttttagaatagagcgtagaagcaagtcttgggagtaagctaaactcgtttacttcgatctcaaaaatccacatggggataaagaagataaagtggggttaaaaatcgcaagtcgtttctttaacaaagaagggtgaggttggttatcaatagccatttgcgttgtaggtagaatggtttggacctttttggattttttgcggccttggta

SEQ ID NO: 509543 - DNA, 539 bp, Homo sapiens
cgggtggctcgggcacggtggtcctgcagtgttgctggtctctacctggggcctgtgctgctggtgcgcagcctgtgcccttgtggcctgggtgctctgtgtcaccctgctgcagctgcgcgtcttcccagttgctgcccctgtgctctgtgtgcctgtgccctgatggtggtgtgctgcctgactgtgcatgctgtgtgtgtctgtgtggcctgatgtgcctgatgctccaggccaacccttatctactgacctgctacctgctgacaatgatccatgcttgcttgctgcatgtgtcatgacccatgcttgctttttgatgtccctgccttggatgaaactgcatgttgaatttctgtgaatgcatgccaagttgtgtgtgcatttccatgtgcaatgtgtgactttatactcaaaagttgttgttgggaaccagaactgaccaggacttgcccgttgtggtgcaaacactgtccttgttgaaccatggatgtgactttccactaagcgtgcacaatgaccttctcacggtttccaat

SEQ ID NO: 509544 - DNA, 107 bp, Homo sapiens
tcgctctcccacccagcttggccccctgcccgaccacctccctgggaaccgggcctgtacatagcgcacaaatgtttgttttaaataaataatcaaaatgtcaaaac

SEQ ID NO: 509545 - DNA, 867 bp, Homo sapiens
tgggaaaccatctttattaatctcatataaaaataaggtccatggacggccctcggggctggggctgttgcgggggcgaggtgccctttatgaagttacagggccaggcctccgtgcatgaggctaagatatggctattgggagggggctcttagggggggtgcgtgcaaggcagcattggggggaaggggcgggcgatgctgcccgtcgtgtggccaagaggaggatgcaccagcccgttagaggcgggccacagcggaggagggggctgcccggccagccgagcgtgaggaccacctgtcctggagagcctacagcgcggtccagggccccagcacccctgcgagaaatccaccgggcaaaaataggcggctacagcgggagaggtccggaggtgacctgccaggaggggggccccgggggaacgccgaacgggccatgtggcgcgggcccgtgagtctgcgcggatgtagggctggtatccgccgacatctgtgaagatgctcctcccaagggcccccaatacacgagtccgttcctcaataaaagtgaagtggcccctatcgtgatgccacaggatagcagcttcaagaagattaagggtccatcattgaggacgcaggggccatatgggagcgaacatgggcggtgcagggcgggctcctcctttggcacggggtatctaaccagcatgccatccgaggagcaggcgggatccatttatcccaatggtccacctcctgaggccaagctactagagcgcctaaagaaacggcgtaaacagaggaaaaacacgcctgggagatatcacacggagccacacagactccacccaaaataaagggctcgtcagctggtttcgcacat

SEQ ID NO: 509546 - DNA, 744 bp, Homo sapiens
agcggggcgtgtgcttgtggcggctaggcccgcgtgcgctggagacctccgtgctggcccccgcgagcctcctggccctggccctggcgctgcggactctgccgcagcggcgagcatgggtgagcccccgggtgcgcagtggctgagtgtgcgagcgggcctgcatgcttcggtcggcgggctgcctgctacgtgcatttacatggcgtgacccggggtcggcggcggggcgacctgcgagctcagggatacgcatccgttcgaaggtccagcagaaagacgtataaccatgattggtacgatatgactgaatgtactacaatgctgaacagacttacagaagacgtccgtttaccttgctggagctcgaaccgtgagtgcatcctgtaacttacttgaaagagctatgattacttagggtaacaatgcaggccttatacaagattaaccaagctattattcgatgacaagtgggtgagtatcccaacttgaatgatgacacgaaaagtcaaccattccaaccagaagttattgagagcacgaaacgctttaacattgcactaaaactgacctgacgtgtagaatgttgacatgagtcaaagtcacagataaccgggatgcgaggttttgaaaagcagcttctagaaagtgtgtcttgagagatccacgccagtgacatgaaggggactacatcacgtgcccaagtggatacatccaatccttataccctttatgacagccacg

SEQ ID NO: 509547 - DNA, 612 bp, Homo sapiens
agcggacttcccctgtccaggtttcagcttccacatgtgtcaagcggctggctcagcccagagtccctgtctcccgcccgccggcccgagccgccgcccctcccccgcctcccgtgcgcccgggacaatcctcgccttgtctgtggcgccggcatctggagcgtttctgtagcctccggatacgccgtttctttttcaggggcgtagctccctagccaagctgctccccgcggcggcctgacacgcagcccgagtcgccccctttccggagctccctctccggagctgtggagtccaggcgcgtagcggagatcccatggatccgtgggtgctagtctgggcccgttccgccaacatgacctctcgtcggggcctggaccccggttcctgtgtgctgccgctgtctgcatgtcgcggcgtgtggggcttcagcctccgtaccggccccggtggccgtagagccggtcaatccatgagaagcttgcttggtgatcacgtgtggcatacagctgacacccgacggggtacctgcgtgttcctgcgctctgcggacgttcttcaattagaactgtgcgggacccttgggcctgggagaaggagtggcgatggaga

SEQ ID NO: 509548 - DNA, 380 bp, Homo sapiens
gtcggttcgtcgagaaacagaatgtccggttcatgcatcagcgaacaggccacgccagccgctgtttaaaacctaatggcagttcatcggtggcgtgggagcgatacttttcagccgaacgcctcgctcatgcgggagattttttcgttctgcgcccgaccgcgtaagccatacacaccagagaaaaagcgtaaattctgttcgaccgtcaggttaccgtagagcgaaaatttttgcgccatatagccgagatgggcgcgcttaccggaactctctttcagatccatccccagcaccagcgcctggccggaagtcggcaccagcaaaccgcacatcatcttaaaggtggtcgatttacccgcccgtttgccccagcaaac

SEQ ID NO: 509549 - DNA, 521 bp, Homo sapiens
  misc_feature (1)..(1): n is a, c, g, or t
natatgctgtctcagcgaatcctcaaaataacatggtgagtcaccctgccccaacacccagaccctagcgcccagaacatgaggccccgcgcgcctccctggccttttgcgttggcacagatttggggaatgtggttggcccagcgtgacagccaggaactggggttgagattctggttaaggacttttgggggttttgtacagcttgtcctccattacggcaacaggaagaatctttttgcagttcctaagaattacaaaaataccgcagctggaggagaagaggaaagcctcccgggaagaataggcccaaataatgtctgtagatgccctgccctcaaggacccagagcgcgactttgcactcctttagtgtgtgctgcgcacagcgaggtccttccagagagcactgtatggaagggggcaggagtagccttgcagtggagaaaccagacacactcagcctcagccaggtgatcaaggtcaacatcgacaacaacaagccagttagacagcatatca

SEQ ID NO: 509550 - DNA, 681 bp, Homo sapiens
atacccaccagacatgtgagtctcaggatctagctcatactagccttagattattctctttcctttggcttcccatttacctcttctttccacaggtaaatcagtggcacagtatactgcctccttgtgcctctggatcctgccacttcacatggccacggtattgagtggccatgtgagaaatgcgaatcaaaaccacaatgagataccatctcacaccagttagaatggcaatcattaaaaagtcaggaaacaacaggtgctggagagaatgtggagaaataggaacacttttacactgttggtgggactgtaaactagttcaaccattgtggaagtcagtgtggcgattcctcagggatctagaactagaaataccatttgacccagccatcccattactgggtatatacccaaaggactataaatcatgttgctataaagacacatgcacacgtatgtttattgcggcattattcacaatagcaaagacttggaaccaacccaaatgtccaacaatgatagattggattacgacaatgtggcacatatacaccatggaatactatgcagccataaaaaatgatgagttcatgtcctttgtagggacatggatgaaattcggaatcatcattctcagtaaactattgcaagaacaaaaaacaaacacaactattctcc

SEQ ID NO: 509551 - DNA, 308 bp, Homo sapiens
gagattcgtatctaggcaacgatatagccacatattccctggtaaaattcaggagacatagggcaccatgacctcagcacactgaactatatggcgatatagccataatatctgcagctccatccagtctagaatcgtagagcttaggaccaatcagaaaatataaatccaccattttgtcatcttcgcggacgagggtacgcagtcaaaaccagattacagtgggcctgcacaacagtagcctagagtcgtctagacctagggcttctagcgtcctggtatctgcaatgctatatactaccggtaga

SEQ ID NO: 509552 - DNA, 342 bp, Homo sapiens
attcctcagaagtgttatgttagtgagttaatcagtaaatgtttctttttaaaaaaaaattggggccgggcctggtggctcacacctgtaatcccagcactttgggaggccaaggcgggcagaacacctgaggtcaggaccagcctgaccgacatggtgaaacgtcgtttctactaaaaatagaaaatcagccgggaatggtggcgggcgcctataatcccagctagttgggaggctgaggtaggaaaattgcttgaacccaggaggccaaggttgcagtgagctgagattgcaccattgcactccagcctgggcaacaagtgggaaactccgtctcggggg

SEQ ID NO: 509553 - DNA, 492 bp, Homo sapiens
  misc_feature (451)..(451): n is a, c, g, or t
atagaaagaaaaaagggtagactgataatgcagtttgtgtagagtcttcagatatctgtacattctttgaattttggattttcttcaagattctggcagcatgttactccactgccagaatcttgtagtcaaatagtagtagtatcctagaagccaaaagagaatttagagaaagagagaatcactagtggctactgttaaatggaagtccaaacagataagtggaaaatgggcatttgtatgaattttgggaagcgttagtgcccttaacagtaagaatttggttagaattgtggtggattcaaaggctgacagtaaacatctggggagtaagtggagaccagcaaatagagactgatgttttaagatgcttaactccaaaggaaggatgagagtaggctccagctccagggatgtgccagctgaaagctgtagaattacctacttttgntagaaatctttgaaaatcctgaaaaatataagaaaaaaaaa

SEQ ID NO: 509554 - DNA, 596 bp, Homo sapiens
  misc_feature (3)..(3): n is a, c, g, or t
  misc_feature (61)..(62): n is a, c, g, or t
  misc_feature (97)..(98): n is a, c, g, or t
  misc_feature (132)..(132): n is a, c, g, or t
  misc_feature (139)..(139): n is a, c, g, or t
  misc_feature (145)..(145): n is a, c, g, or t
  misc_feature (237)..(237): n is a, c, g, or t
  misc_feature (281)..(281): n is a, c, g, or t
  misc_feature (283)..(283): n is a, c, g, or t
  misc_feature (356)..(356): n is a, c, g, or t
  misc_feature (362)..(362): n is a, c, g, or t
  misc_feature (373)..(373): n is a, c, g, or t
  misc_feature (380)..(380): n is a, c, g, or t
  misc_feature (401)..(401): n is a, c, g, or t
  misc_feature (412)..(412): n is a, c, g, or t
  misc_feature (443)..(443): n is a, c, g, or t
  misc_feature (526)..(526): n is a, c, g, or t
  misc_feature (586)..(586): n is a, c, g, or t
ggnaggacggggcctctgtactcttactacctggcccaacagcagaaaactgactccatanntcattggggggcactgcttgcaaggcacgaaaaannacagggaggcaccagtaggtggagaaggcagggncagtccnccagtnttataagcaccaataagactgacagtaacggcaaggccctcccctggctcccgaaccatggacttcactgtcgcagtcaccacaaggctgcnggcacagaagtcgccctgcaaggggcctgtacggcggcactgcntngggcaggggggtgcatcaggggctgaaggagattcctctgttttctccggaggttgggactaggggggcagcntgactntaggctcagtnccccgtntggggccgggcccctgccccnctttggcagtnccccgcggcagggtcttgtaggagggctganaagccatcagcggtgacacttagatctgagacgaactggacgaggagttcattcccttcggaggagatggagcccgggactgngttgccgcagaacttccccagcctccgggagttgtcgctcacggctccgttgaacacgcngaccgagtga

SEQ ID NO: 509555 - DNA, 176 bp, Homo sapiens
ccgtactcacagcatctgtattcttttggacttttataacagccattggtcaggatattttaaaatcttctacggcctaattttatctgctggattatcagtttgggacacaccggtattaaaatatctcactataatggtagacttctaattcttaataatggggtagtcacaga

SEQ ID NO: 509556 - DNA, 209 bp, Homo sapiens
ccatacaacacccagtaccagatacaaagcctcagtcttcaagtataggagtacaatgcccgcctccgcttgcgcaccgaaccctgctagtgttcccaagcctctcgccgctttagcgaaggtagtcaaggccacatttcgagccacataggtggccgaaagggtctcttatcagctcctggtatctgctccccaagctacagccagca

SEQ ID NO: 509557 - DNA, 81 bp, Homo sapiens
agcgggacggcagatccctcgctgtcctagtcgctgctccttggagtcatgttcccagccgccccttctccgcggaccccg

SEQ ID NO: 509558 - DNA, 855 bp, Homo sapiens
aactagtctcgagtaattttatatcatttgggaccgggtaaacttaattggagcctccgagcaggccaggtgttaagggcaccagtagtgctgcaggcacgggggcctgtgttgtggccagctgcaggtgatctcgggtggtggactccgaagtgtactccaaaaaggtcccggaatggcaggggaccagctcgggcactgaggcgctgcatggcaggctgttctcagacaatcccttctggcgctgtccgctggtctggggggctagcgtcctccggcttgccagaggacttgctggggggctgcgtgggagatgtgctgctgctgagagactggaccattgggtagaaaccggtctgaggtcgactttgggtgcctgcagtgggccccgaggaacggaagggctgactgggaggggctgaggaattaccaggcggtctgggtgtgttggcgaggaccagttgggagcgtgccctgtgccgacgcttggccctgggccctgccggacaggcgggagccaagtaagatgccagatggcagctggcttgggatccagagttgggggtgaccgaggactgggacgggagacatggccggacggggggcatagagggagaccccccaggagcacagtgcttagaacccgaaggaacatggaaggcgcgctagtgaagcggagatgcgctagaaaacctggtgagcgcctggagagccctgggagcggcccctactacacaagccaggacgccctgcgcagcccaagaggacggacacaagtaccaacagggaggagggacagggagaggtaagcatccaggaataccgacggcggaaaagcgtccgccgagggggcaa

SEQ ID NO: 509559 - DNA, 1331 bp, Homo sapiens
tcggaaggaaacgccgccggcgagcccagtcacgccgggagggccccgaccgtctcctgactggggccgggggctcatcgaggcgggtgcggcgcgtccgcctcaccccgggccgtcttccctccatccgttccagggacctcagcatcggagggagtcaagaagaaaagcttcagcccaaatatcatcagtcggaagatcacggacgagcccaaggaagaagtaactggtcaagaaaggagaagcgtgaacggggacagagaccgaagagagagggggcctggacgaggggcgaggccgtccaagaacagtggatccaagtctcactccaatctttggaggcagggcccagcccgaaatgcatgcaggcccacaccggggaaccgggggcattcacgaacacgggcattgtgtccagcaccagtggcacctttctcgagtatcgatcaagagtcaaaacaaggagacagaagagagacaagacaggacggaaacgttaacaccagatctgggcgtatgggtggagaaagggagcgattgtcatcgaatgaccccggggcttgggagggaacgagattcggaaaattattggccttgttgcagattggacggagtagggattcaagctccagggatgggcgtttaacaagggcatgcaaaaatgtggagaaaccagcatggttaaaccgttgggatggttgtgaccccagggaacaaggcacatgggaggtgcgaaataacctggtggggcaacgtgtgcacagagggaagccaccgagcattgacgggcggcagacgcccaccccatgaacgggcttccatcacaaaaggaaggccagggaaagactgcaggagcatccacgaaaggcaggtatctcggggagcagagacggtgaaggaagctgagactaacccaagggaggagacacccggctgtcgtgcacatctgcggaaagaaccccctccctggggggaagagaccacacgccagggaggtttaacggccccttcaaaacacacggggcggcggagacgagccccagtggtgctacacacagggacagacacgagcatagaatctgaaaaatatgtggcactgtgtggatagaacgagacgacggtaagaaaaacctcacacgttggagacagacaccttagaggagaagaatgagaatagatgaatacggtcaaataagtgcagtcgagatgcatgaaagaaaggccagagagaacgattgtgcatgctaataacatgccgatggtctgttctttcttcttctgtttgctcttctcgttctctcgtgatacaggcagctcagaaaaacaaaggc

SEQ ID NO: 509560 - DNA, 822 bp, Homo sapiens
  misc_feature (130)..(130): n is a, c, g, or t
  misc_feature (185)..(185): n is a, c, g, or t
  misc_feature (195)..(195): n is a, c, g, or t
  misc_feature (198)..(198): n is a, c, g, or t
  misc_feature (203)..(203): n is a, c, g, or t
  misc_feature (208)..(208): n is a, c, g, or t
  misc_feature (247)..(247): n is a, c, g, or t
  misc_feature (257)..(257): n is a, c, g, or t
  misc_feature (286)..(286): n is a, c, g, or t
  misc_feature (319)..(319): n is a, c, g, or t
  misc_feature (331)..(331): n is a, c, g, or t
  misc_feature (334)..(334): n is a, c, g, or t
  misc_feature (352)..(352): n is a, c, g, or t
  misc_feature (371)..(371): n is a, c, g, or t
  misc_feature (385)..(385): n is a, c, g, or t
  misc_feature (394)..(394): n is a, c, g, or t
  misc_feature (402)..(402): n is a, c, g, or t
  misc_feature (418)..(418): n is a, c, g, or t
  misc_feature (422)..(422): n is a, c, g, or t
  misc_feature (424)..(424): n is a, c, g, or t
  misc_feature (433)..(433): n is a, c, g, or t
tttgtaatatattcatatagcagaacattattcggccagaggaacagtaacagggcacatcaggggaaactcgaaacctacggccataaaactccctattagagagtctacagataaatctacagagacnattcctcaagtggacttggccatgatggttgtaagtttatcatctgaattctccntatgtagacnacngaacnaaacnaaatatggtttttaaaaaatgaacaatgtgcggtatgcnaatgtagccnataatatactcaactggaaaatgaaatgnaaagataatactggctgggtatggtggttcacnccttttatcccngcncttcgggaggctgaggcnggaggatcgcttgagaccnggagtttgagaccngcctgggcnacatagcnagacctcatttctacnaacnanaaaaaaatnggcccggctggtgtacttgcctatagtcccgccttagcctcccaaagtactgggattataggtgtgagccacagtgcctggcctaattattttctgtgtgatcaaattcaggtttaatgttttcggttaagaatttcctacgtgaattcgtgtacttatttcgtcatttagagttcataaatattagggtttatttgtctaaatagaatagtttaaactaaatataacttcaaaacggtctagttggagtagctaccggtgtctggatggaaattttcgtgatactgaaaaggaacaaaaagcctgggttttctgccagaaccttttgctcccccagtcagtctgtggagcagactagttaggggcccagagtcggcttctgtgtggtg

SEQ ID NO: 509561 - DNA, 496 bp, Homo sapiens
  misc_feature (21)..(21): n is a, c, g, or t
gtcttttgaggagaagttggntcaaagcacgtcagaagcaaaaaaagctgcagaagatgaattaacaaggccccatggccgctctctgggtcctcggtctaaacaaagatgggcacttcttttgatatcaaggcttgaggccaggcacagaacagacattcaacaactgttggtgcaatcggctatgctaggagccatatccaccaaaactgccgtaagaatgactctttaatgcactttcctccttgtcatgattcaccccaactttttgaaaatttgtgttccgaggccaagcacgatggctcatgcctgtaatcccagcactttggcaggctgaggcgggcagatcacgaggtcaggtgttcaagaccagcctggccaacatagtgaaattccgtctctactaaaaatacaaaaatttagccaagtgtggtggtgcatgcctgtaatcccagctacttgggaggctgaggcaggagaatcgcttgaaccgaga

SEQ ID NO: 509562 - DNA, 208 bp, Homo sapiens
ggatccccattaacaggctgagataggagtgattgcttgagtccaggagtacaagaccagcctgggcacacagcaagatcccatgtctaaaaaaaaaaaaaacccattctagtgtggccccttatttatgtaaaacacaataaggctagggcgcagtgcctcacacctgaactccgagcactgtggaaggccgaggcagaacgatcac

SEQ ID NO: 509563 - DNA, 502 bp, Homo sapiens
  misc_feature (428)..(428): n is a, c, g, or t
  misc_feature (453)..(453): n is a, c, g, or t
atgaattaaagtatatgatgccagcctggacaaagggcgaaaccctgtctctacaaaaaatacagaaattggctgggcatggtggtgtgtgcctgtggtcctggctactccggagcctgaggtgggaggatcgcttgagtctgggaggcagaggctgcattgagctatgatcatggcactgcattccagcctgggtgacagtgcaagaccttgtctcagaataaataaagtatgtgatgaagatgtgcatacattgtatgcaaatactgttttttttttttttaatttaaacagtctcactgtgttgcccagggatggagtgcggtggcacagttcttggctcatgggcaaactctgcctcgcaagcagctggggactgcaggcatgctccacggtgccccagttaattttttttgtattcttagttnggagacagggtttcgccattttggnccaggttggtcttgaaatttctggaccccaggtgattcaatctcccaaa

SEQ ID NO: 509564 - DNA, 114 bp, Homo sapiens
  misc_feature (76)..(76): n is a, c, g, or t
  misc_feature (96)..(96): n is a, c, g, or t
cgcgtttaagttttttactctccaaatgtaatacaattcttcagctaaatcaggaataatgagacaaaacgctccngtaaagtacagttttaaaanattgttcactggtttatt

SEQ ID NO: 509565 - DNA, 335 bp, Homo sapiens
ggaatttgtggccagcctgggcaacaaaagaagaccccatctggccaacatggccaacctggccaccacggtgaaactctgactctacaaaaatgatctgggcatgggtgacatgcatgtgtagtcctaactacttggggggttgagatgggaggattgcttgatctcagaaggccaaagctatagtgagctatgatcacatcactgcactccagcctggatggcacagggagattctgtctcaaaaaaaaagaaatatatatttaatctctgtccctggttcctggcacagagcttctaaagctcttacaaagacctcagtgatagatgtgact

SEQ ID NO: 509566 - DNA, 269 bp, Homo sapiens
gatcttctagtctccaggcatcaaccacaaatgactcaggttacagagcaagaatttcccagttggaaaaagggaattgatagaagatttgaagtctttgcggcacaagcaggtgatacatcctggtcttcaagaagtgggcttaaaattgaattcagtgggtccacaatgagcattgatcttaaatactttggagtacagttacccttggctccagctactagctttcctttttggaaccctacaggacccaaccctgcctcttctta

SEQ ID NO: 509567 - DNA, 448 bp, Homo sapiens
tcgataaatatatacacaaactgtgatctacctaatggataatcaaaaacacctcaagtggcataactactcactgtgctatatgcaatagagacccctctctatattgggaaaaccctgtcgatgattttctatctgaccaaacacactagatactgaatggagaacttccgatacagcatcaagccgggcattgatttcccttaattaaggagtggctgggtcacccactactttaacttccgtctcccaaatgaagtaaaagtgtggtctaaaaacccacagcaaacttcctttggttatcatatcagtctgattctgtaggatttccagataccttacagtagttccattaatcgtcatacataccatatagacttgatagctagtataaaatactcaggtatggagagcaatcgtatccaagttgaattctaggaggaattta

SEQ ID NO: 509568 - DNA, 937 bp, Homo sapiens
  misc_feature (666)..(666): n is a, c, g, or t
ggggagaaaaaactatcatagttctgaggcaagacttcgacttgatagtgctatcagttccccgatacaggggctcagagttaacccatacatgtatttgtggtgcaggtagagagaaagtggccatttacactgaatgagtggcattctgatcaatgtcttgatctcttatagcgattagcatagtaaattgtgtgaaagcatctagttgtgatcttaaatagcgcataagtgaatattctaggaagtgaggtgacagttagtttacatatggacattatacgatgtctagaatatctcactgttgttttaacaaagacatcatgggggcaataattggtcttaagagggttgactacttggttgacatacaataggttggagatttttattttctggtaggttaccatatagtttctttgaaagcaaaatgcaacgtgagtttgagaggttgagtctttatataggttgtcgtgggtattactctgtttaaatatataagtcttctaattctggttgatcaggtactttgtcttcgtagggggtatttatttgggaggttgaaggcaggagtgagtcggtttgagggcccagtattttaaaggcctgccaaatcctgttgttgaactcgctagggtgaaccagtggcttagtcactgggtcaancattgttgtgtatcttcattttcaaggaaatgttacccagaagtgtcggcatggacctgctgtctgcatggattggctccacttcaccttgatgaggtacttcccttttcggtgcagcctatctcggtgggttcacctgctggtccaagcatttcttttcctccctctgtgggcccaggtgcccttcgatgcctcgcggcgttctgtcccgttgggccttgcttaacccgttggagtgtcactcaccggccctcgtgcgccgcgcgctcag

SEQ ID NO: 509569 - DNA, 365 bp, Homo sapiens
ggttttccccttggaaaaggggggggggggccccccccattttttttgggttgttcccccctttggggccccccgggtttccccttttgtctcccggccgtttttttggggggaatggggggggggtacccttttcccccggggacccctttttcctggtttggggtttttttcggcccccccttgggggttttggcccccggggcccaaatttgggcccggggggtggtccccctggttgccaacccctttgcccctttttccccccggccaaaaaccgttttttgggggggggggggggtttttttaattggtttttaacttttgtttaaagcccaattaattttagggtttttttcccggga

SEQ ID NO: 509570 - DNA, 174 bp, Homo sapiens
gcgctattagaggatcccgggctacgtgatcctaatgagagaagatcgtagagcttctcagcgtaattccagtttacattagaaatgacttgactgagccacacaaacctttaactcagcggcttccaggaataagtcgagaagcacgggatttccgggaacaaatttggacat

SEQ ID NO: 509571 - DNA, 403 bp, Homo sapiens
ttgggccccttggaaaacccggtggtattccatgaaaaaaacccctatgaaaataatccccttcaacaggctcccaattggagaagggcagcaaccccccctggggggagccaaacaggtcagaccagagccccctgcggaaacaaaaaatgaccccctttaccctgaggatgatttgtagaaaattaactgctaatttttattgacccccaaagtttcagaaattctctgaaagtttcttccctttttcccctacaaaatttattgatttcaagttttctattaagggcatttagccttcaatgggaattaaaacccctttagggctggatttcccaatttctgatatcaaagttatttaaaaattgtttatttgaggagataacatttcaactttgttccc

SEQ ID NO: 509572 - DNA, 588 bp, Homo sapiens
  misc_feature (434)..(434): n is a, c, g, or t
  misc_feature (549)..(549): n is a, c, g, or t
acgggggctctcatcacgagaacttagagcccttcccagagagcccttttggtccctcttggcaaggcacacgggggcagggtaaggatgataatgacatttcccagggacaaaccccagagcacaggtgagggcctcggtcatgggctggggccgcaaagctaactaataatggtgacggctcttatgtctcaaattaattaaaaacgaaaaccctagtgtaaaaagaggacaaagggtaacgagttcggaaccaacaccaagaacttcgaggtgcgggtggtttcctaaagcaacatctggactacccctgtgggctgagggcagcggcgatgaagacatgtgtgagggcggtttcccaaattccaggcgcttccccaaccttcagacagagcaaaccaaattaagctgacataacagcggtgacaaacggnctagcaccggggcccagagagttctacgggtgaccatcaagagtcgggagcagggtctcacagggtctcaattttctctccggtgaaatgacgaagaggacactggctacctggntctcagattccagggtcacacaaaatgcccagtctcaga

SEQ ID NO: 509573 - DNA, 260 bp, Homo sapiens
ttgctgaggctggagtgcagtggcgcgatcttggctcactgtactccagcctgggtgacagagtgaaactccatctcaaaaaacaaacaacaacaacaaaaaacaaaaacaaaaaacaaaactacaaaacttagccaggtgtgatgcatgcgcctgtaatcccagggtggctgaggcaggataatcgtttgaacccgggaggcggaggttgcagttagccactgtgctccagcctgggtgacagagtgagactaggcctc

SEQ ID NO: 509574 - DNA, 969 bp, Homo sapiens
ggttcgtcaagccctcaggctccgagtcttgccatgagggacaggagccatggtctcagaaaatgaactgtggatgcggtgcctcctctggattccagggctgatggacctccgctacgaagacatgcgcctatgcttatgacatgaccattgaagttggacggccatcgtaggatcgtcagaggctccaccatacataaccctagggctcaccggtagctagtctaagtcacccatatgttcacaggccccaaggttgaccagatgaagattgtgctagatcaattcaggtctcaagcacgtctggccgttatggctatgtcacgatctttaaagtccagaatgccagtcaaacataggccacaatatgcgtgtactatggattgtcgtcgtcgagtgcgtcataaatgccagatggaatcgttgcctcgagactacgcgagcccacatggcagcctttaagtccctatatgctagcccgagatagggtccaaatgctgccttatgactttttcccaggcagcaacacactggtgagttagctgctaactaaagtctgacgatcggcgcttcaaggtgcccagaagtgccatcatacgtaaagtgggcccaaaatgccacatacaatttctctcagtcgtctcaatgccaatgacctggccaaacagcaggcctaagaccccgtttcaaggcttggaattgataccactaaggccccaacgagctgatacccagacccagaatgtcaatcaggccaaaatggcacttcccaggctgacatagaagaccgaggccaagggtatctcttgaaccttgaccggttgcaaaactgacaagaacattcagcagaattggtttcccagggctcagaaatcttgtagttccccggaaccaataattccgggggcaagagggaccccgcacgcattactaactttcaactgttcgcagacgaccggacgtggggac

SEQ ID NO: 509575 - DNA, 255 bp, Homo sapiens
ctcacacgccgagcgaacatacacttcttaaggtcaggtcacaagtggacgaagttgttgcagatccgtgtggacgatagtggttgctgcacacgccgaagaaccaaacctcaggtgatccacccacctcagcctcccgaagtgctgggattacaggtgtgagccaccacacccggtctctctttttatttaatcgcaacaacttcgtccaccaggacctgatttcaagaagcgtctggaccttcggcgtgtgca

SEQ ID NO: 509576 - DNA, 1593 bp, Homo sapiens
  misc_feature (86)..(86): n is a, c, g, or t
ataagcatcaccaggatccatctcgtgtgactactggaaacggcctgatgcaccgttgacttcgtggccgattccgatcagatgcntagcgatgagtcgaatgagaactaactgggacataagtggtggccgcccttatctattgacttccttgcacatccgtcgactgggagcttctacaatgtcacgcgcatggccatgtggaatcctatgacaagctaatcgtacaacggaatcagggtagtgtctcttgcagatggcgatccgccaacgctatccgtcttccgcttgggtcaccatagatagctctcgtatgagcttacacaggagtccatcgttaccgcaaccgctaactggaaggctatgctagctcctgctcgccatgcgcaagtcctgaggtagattccagaacatctgtctcactcacgctgcggaggatactcaggattggcgcgcgcttggtatctcttctacactcgttcgcttcagcctttcctactaactgtgcccgctcctcgggtgctctggagcatgagatgccgtgtagactttggcctgagccactctcgtgatccgatgatgagctagacacatccagatgttgtctcccctagggatcaattctcatctctcgagggctccacgaggttagattctcgcacaccttaaatcgtcgcatcttggtgtgagagagctttgcaaaggcgttgaggcactgcgtagctccttgaaagattcgttgatccgtcaatgcgcaatttggtagcaaaaaccgtcggcgtcagaggaacttggaaggcacttggtttggctcctccttgtccccgtcatggtccgtcctggatttgtagaccatgagaaaagcgtgcggccctactagggaacgagtgcggatggaacttcccttttccatctacaatttccctgacctagttcgaagagctgtgttcgttttggatttgtctcccacaagcgatgaaaaattgcgctaaattctaaaggtgttgtgcccagttaatgtcatggtcaacaacaagggtgcgttacaaaacccgaaatctacagggagagggcccaatttgaatagtgcccctattattgtttgaatagtcgccctagtaatggtaacgtttagaactctcccccacaggggcccccggtatgcatcgccgaggagaaaagcaccacgggtgtgggagggcaccctgtaagcacaacgacctgtgtataagcccacacaccgagatctattgtacgaagtgactgtataccagagacctactacaccaaagaattaatatcataggtggcctcccccaaaattttgtagggaggaatgttatacaaacaagaataaaccaggccgtagactcagcataagtaagagagagaccaacaaatactatatatttgagtagtgaatcttagtagctaaaccacagacgcacgagaagaataataatattgcgatatagcaagaaaggaacacacaaagatagttcagctgtatactacacaagctgatagtattactaacacactagaaacagagatacagattacgtttacacatgcagcacgtgactgacacaa

SEQ ID NO: 509577 - DNA, 535 bp, Homo sapiens
atcacctgaggttaggagttcgagaccagcctggccaacatggtgaaaccgtgtctctactaagaacacaaatattggccaggcatggtggcgcacacctgtggtctcagctactcgggaggctgaggcatgagaatcacttgagcctgggagacggaggttgcagtgagccaagatcacaccactgcactccagcctcgtgacagagcaagactccgtctcaaaaaaaaaaaaaaaagaaaaagaaatttcacaccaaaagaactaccttcttgcagaaacagctaactgtaggtctgggacatcctgacatgccagaaagcaagtaaaatatcaactattgctggggtaatgtcaaaaggacacaaaccaattaaaatagttccttgctagtcaaagatggaaaaatatgagcaccaaaggaaaataagatgggattctgcttctagtcaaggtatagaactggcactggatttatcctcccatcataaataagaacaagaaaactgacataatatatgaaataacacttttc

SEQ ID NO: 509578 - DNA, 1387 bp, Homo sapiens
  misc_feature (9)..(9): n is a, c, g, or t
  misc_feature (67)..(67): n is a, c, g, or t
  misc_feature (92)..(92): n is a, c, g, or t
  misc_feature (94)..(94): n is a, c, g, or t
  misc_feature (103)..(103): n is a, c, g, or t
  misc_feature (287)..(287): n is a, c, g, or t
  misc_feature (318)..(318): n is a, c, g, or t
  misc_feature (352)..(352): n is a, c, g, or t
  misc_feature (366)..(366): n is a, c, g, or t
  misc_feature (375)..(375): n is a, c, g, or t
  misc_feature (387)..(387): n is a, c, g, or t
  misc_feature (491)..(491): n is a, c, g, or t
  misc_feature (494)..(494): n is a, c, g, or t
  misc_feature (498)..(498): n is a, c, g, or t
  misc_feature (500)..(501): n is a, c, g, or t
  misc_feature (536)..(536): n is a, c, g, or t
  misc_feature (591)..(591): n is a, c, g, or t
  misc_feature (602)..(602): n is a, c, g, or t
  misc_feature (961)..(961): n is a, c, g, or t
  misc_feature (963)..(963): n is a, c, g, or t
gtgataaangctttcaaaaccgtaagcccaggaagggaaagtgtccaggaacctctgttttatgagncccccagatctgtggattggagagngnaaggctacntaactcctgtgaagaatcagggtcagtgtggttcttgttgggcttttagtgctactggtgctcttgaagaacagatgttccggaaaactgggaggcttatctcactgagtgagcagaatctggtaaactgctctgggcctcaaggcaatgaaggctgcaatggtggcctaatggattatgcttnccagtatgttcaggataatggaggcctgaantctgaggaatcctatccatatgaggcaacagaanaatcctgtaagtanaatcccaantattctgttgcnaataacaccggctttgtgaacatccctaagcaggagaaggccctgatgaaggcagttgcaactgtgggcgcccatttctgttgctattgatgcaggtcatgagnccntccngnnctataaagaaggcatttattttgagccagactgtngcagtgaagacatggatcatggtgtgctggtggttggctacggatttgaaagcanagaatcagatnacaataaatattggctggtgaagaacagctggggtgaagaatggggcatgggtggctacgtaaagatggccaaagaccggagaaaccattgtggaattgcctcagcagccagctaccccactgtgtgagctggtggacggtgatgaggaaggacttgactggggatggcgcatgcatgggaggaattcatcttcagtctaccagcccccgctgtgtcggatacacactcgaatcattgaagatccgagtgtgatttgaattctgtgatattttcacactggtaaatgttacctctattttaattactgctataaataggtttatattattgattcacttactgactttgcattttcgtntntaaaaggatgtataaatttttacctgtgtaaataaaatttaatttcaaatgtagtggtggggcttctttctattgttgatgcactgaatgttgtgtaagtaacatgaacatagattgggctctaagccatacactggacaaggaaaagctccaaaatccatgaactgttggagggctctgagtcgcacagaaaccttgtattcaactagtgtcggggggcgggggcccctcgcggtggggtcactagggagcaagagcgcactccagagccaacaccggcgcgtataaagcagcgggcggggacaacccacaagtaaaaaacccgggaagggcaccgcgaacgttcgagaaagagccccaagggagtccagaaggcaaacagagagcaataccacaggaggcccaggaggcccagacaaagcga

SEQ ID NO: 509579 - DNA, 518 bp, Homo sapiens
  misc_feature (34)..(34): n is a, c, g, or t
gacctcggggatcacgtggtcagagagacgacanccacaagggacagacttctctgtatcttccaagggatggggacgactcgcttttaccttctcggattactctacttttgcgtgtgctccctggctacttcttagtacgcgccttccagctggttggacggacacaatggcaggaacgttcttagcaacagctctattatgtccaaccctttgttggggctggtgatcggggtgctggttgaccgtcttggtgcaagagatccagcacctcaatgtccatcgttgtcagaatggtgtcctcttcattgctcactgtgcgggctgccatccccattatcattgggggccaccattggaccgtcaatcaccaacactatggttgcgctcatgcaggtgggagctcggcgtgagtaccgaagagctttttgcagtgagccacctgtccatgacttcttcacctggctgtccgtgtaggtgctcttgcccgtggaggtggccacccattacctcgagat

SEQ ID NO: 509580 - DNA, 127 bp, Homo sapiens
tgtgcgtggtcgtctagaggtcccgagagggggacacgggtgccgcacgtgccggctattttttgtatttttagtagagacagggtttcaccatgttagccgggatggtcttgatctcccgacctct

SEQ ID NO: 509581 - DNA, 988 bp, Homo sapiens
ggaaagatgtcgtcgtggcacagtagctggtgacagcagaaatgacccaccaatggaagcagatggcttcattatgttcaggtgataattgtgaagcatccatgacagatacgcgccggatatgccctgtacttggattcgccaacgggtcaattggatgcaacgataggtgcgctgaaagaaaagattgatcgccgtctctggtcgacagtcgtggtgacatggacctaaagttccttggaatgtctgtgttgatgctgccgattgttgtagtatggtatcctgcgtgagacccatgtgtgtagagtagcttcttcagactatccaccgtttgggtcgcttttgctggtctgtgcatgatgagacatgacagatgccggcagggtgtcagtcacaagcacgcttgagaatagaggctgctcggagctgggaaggtcaaccaaatctgcccagaagagctcaagaaggctcaggtcgagtattatcccgtacatatcgtgccgaccccagtcttcaatcgagtggtggacaaaagggtcctccagaaatgttagttctcacagagccaccattctaggtttgagggaccttagaagatcgctgtacctgatcaacccatgccttcgaacagagcttcacaagggaaagggagaagaggtttggggggcactcccggatcgactaggaggccgtggtgggactgacaagttgatataggatgttgaaagaacaggattccgaatggggagaacttgaatcgaagcacttggtgtcaggactgtgtacaagcctttaacccgttatttggccccaaataaacaccatcagccctaggtctgggggcgaacagataccattgcgagtgccacgtgttgttacccccttttgaaagggccacagcgggccatgggtgtgtaaacccaacgcgtcgtgcattcatatccttggccccacgttactaaacagaaacacaactcctccagatttg

SEQ ID NO: 509582 - DNA, 642 bp, Homo sapiens
  misc_feature (562)..(562): n is a, c, g, or t
  misc_feature (596)..(596): n is a, c, g, or t
  misc_feature (635)..(635): n is a, c, g, or t
taaggtttttgaataattttcctgaattcatcttctgtagcacatcattcacgtttaatgactactttatacatggtagtccttgtgcccaccagttctcctgactttctttgcataagatggcaacaaaatcatatgctgttctctgtgagccacaggaagccagcttttcaaaaatcatcacacagagtcttgtaataacatttcctgaatagaatctagggagctttcagggaccacatgaagtcatagaggcagagtctcctataaaaagtgagaaatattaataaatatgtttctcctcatcaaataaaagttcaccaccaaggaccatcttatgacccagagagaaaatatttaatgtctgaaagtccgacaatgaaaatgtggaaagttatgctattttatacctcagatgatgttcagtctgggaaaactcaagataactcgttgtttaaaataaaatgcatgtctaatacacatcaattgctggccatttatcttatgcttttaaaagattatacattaaaatgccatccttcttccctaaaagtttgtgccnggagccagccattccattatcgctccacagagangaccgctggcagggatctcttaaatgacggcgctaaagngatgact

SEQ ID NO: 509583 - DNA, 1032 bp, Homo sapiens
gcccagattattttttgtatttgtagtagagacggggtttcaccatgtcagtcaggctggtcttgaactcctgacctcaggtgatccacccgcctcagcctcccacactgctgggattacaggcatgagccaccggtcctggcctctctttcttttttaaacaaagaactttgcacttggccagagcaggaggcagacaagcccattttctcccttcctaagctagatccaaataacagaaagttcagttttcccccataactattcttggggtcatgaactttgatctggagttagtacagttctcaggaactgtgtgcacccagcttgctgatccaacaaagtctatggcttaccagtctagcttgatgaagcctttggccagaagtcacgccggtcgcatcagcagaaatttcctgacacggtatcatcggggacactagtgacagaaacggccacaggaacaagtcctaagtcgctgcagccggcccgcgacatacctacaatttacagactatcgtcagcttgctttccacattgagcccttgcggcccgactgtcatcgcttgacacattggcaacctcgcaagcctttccagacggaacacattccgaccgtacctccgccttggtccacctgccccttccacacgcaacaccactcgcacgctgcatcccggccctgcaccaaaacaaaaaactccacaacacactcccaacacaaaggcagagagaacacaaaaagaacagagacactggaagacacacataaaaaacgcgggctacacaaagaaggagagaccccccgggttgaaaacaaggtaagaaggaagatcgcacaaaaagcgaaaacacgccccacaactcaaattacacaagaacaaacacgaagcgagacaaaacaaagaccatcaaactacacaccagctaaacgggcgatgagcacggcggcacaccgcagcgcggcagagacacaggtgggccagagaacggaggaaaaccaacacaagacccacaaccaacaaacaacga

SEQ ID NO: 509584 - DNA, 418 bp, Homo sapiens
  misc_feature (32)..(32): n is a, c, g, or t
  misc_feature (56)..(56): n is a, c, g, or t
  misc_feature (65)..(65): n is a, c, g, or t
  misc_feature (90)..(90): n is a, c, g, or t
caagggttacctgctggccagcatgaaacccnggactcccttccccggcaagaggncttggtttncccaggttctgcccttagggagagncctcgaccaggaaggccagatgtaatactgactgcatcgtgttaagatgtgtgatcttattctaggaaacataaattatgttttgtattatatgcctaagagcccacattaagtcttctgattaatttgccaggtttttaatgtgttttcagaaagctgtgtgaaatttcatctacaaataaaaatgatgtaaataagactttgctgtctaaattatggctgttaaagatatgaaatgttttgtactttgattatttttatttcttacacttttcttttatattgataacttgctcacagttaaataaatgtacttttgaacttaaaa

SEQ ID NO: 509585 - DNA, 109 bp, Homo sapiens
aaggctgaagacatacaaaagttagaattcttgaaaaaaagcatgttattgaattatcaacatcactggatggtggataatatgcctgtaacgtggtgtagaaatggaa

SEQ ID NO: 509586 - DNA, 389 bp, Homo sapiens
ccgatgaactgagatcatataggaaaatgaactcaactgtggatcaagagatacacttgatgagactggtgtctatacgaggtcctaggagataaaacagtagtgggaaaatcttcatgaggctgcatctggcacgggggaaagtatgacatcgaaagcaaggacaacaaaagaaaaagataaactagagtgtcatcaaatttaaaaacgttagtacatccagcaacagtatcaagaaagtaaaaaggctgactgtggttgcccacgcctgtaatcccagctactctggaggctggcaggacaatcactggaacccaggaggtggaggttgcagcgagcccagattgtgccattgcattccagcctgggcaacaggagtgaaactctgt

SEQ ID NO: 509587 - DNA, 199 bp, Homo sapiens
tctgttaaggatccctctgacttaggcctggatctgagtgaagtgtactatcccatacaagcccacaggaacaagtcctacaattttaaaaaggttctatggaaaagaattctctttctctacttcccttgcggggcggttggggatgagggtccggtatatgactattgggagagactaccactcatctacattcttt

SEQ ID NO: 509588 - DNA, 340 bp, Homo sapiens
gctcggtcctcagcacatggaggatgaggtggggtgtaatgaactgtctgtcatagggctgtgatgggggcaatggatggatgctggtgcagtggggcaaagaagaacttcaaggtgttattctggaagaatgtgttgaagtcaagctttgaacttttgtgagagccaagaggactgggaagtttggttgtctattaagcaaagagaggagtgacaccacaatgacagtaatccacaacagtcttttactgaaaacctgccatggtcatgccctctaggccctggggatatagcagtacaaaccctgccctttcagttatttattgctatgtaattcacc

SEQ ID NO: 509589 - DNA, 329 bp, Homo sapiens
  misc_feature (52)..(52): n is a, c, g, or t
gcgggggtggacgcggcgatttgcaaatccaaaacgacacagtgctgccgcnacgagctattgagagggaggggggccaggtgaagttgtgttcccgtcatagggagagctgagactcccctcccgacctcctctttcccctcccccggagacagaaagacaggcagacgggacaggtgcccgggccacgcagagacccggagcaccacagcgtcggtggagggggagccccagcctcccccagttctgtgactgccctgcctccggttggacggttgggcagtccacccctcccctcccccgggtgtagcccctgcttagcgattcag

SEQ ID NO: 509590 - DNA, 109 bp, Homo sapiens
  misc_feature (67)..(67): n is a, c, g, or t
ccgttcctcagcccacaggacagtctgagtcctcccctggcccattgaaatatcccttccgtgcccnaacttacctctgatctagacttactcacctccttcctcttct

SEQ ID NO: 509591 - DNA, 100 bp, Homo sapiens
ctcggtaccagggtgcacaaacccaaagcaagtttcaaaatatataaaatttaaaaagtttgtacattagctattcaagatttctccagcactgactgat

SEQ ID NO: 509592 - DNA, 273 bp, Homo sapiens
ggtttttcccctttgggggttttaaggggggggttttgttttcccccccccccccggggggggggggggtttacgcccttttgtttccttttgggggcaaagcccttcccccccttgggggggggttccccagggaccaaaggtttttttccccaggggggggggcccccccctgggggggcttgggtccccgggggtttttttttcaaggggggggggggggggggccccgcctttggggggggttttggaatttaataattggaaatttca

SEQ ID NO: 509593 - DNA, 433 bp, Homo sapiens
cacgtatgagactggctcaagtaatccaataaaaatcagtattactttttaattttttaatttttattttttaagacagagtctcattctgttgccaaggcaggaatgcagtgtcacgatctacagctcactgcaacctccacctcgtgggctcaaatgatcctccaaactcagctgggactataggcatgcaccatcatgcctggctaatttttatattttttttttttatagagatgggctttgccatgttgcccaggctgttctcaaactcctggcctcaagggatctgcccacctcagcctcctaaagtcctcctaaagtgttggaattacaggcgttagccattgcacccagccaaaaatcagcattccattttaaactattattattaataacaaggcattatttttatctatgatgtccggtgtcg

SEQ ID NO: 509594 - DNA, 109 bp, Homo sapiens
  misc_feature (14)..(14): n is a, c, g, or t
  misc_feature (31)..(31): n is a, c, g, or t
  misc_feature (39)..(39): n is a, c, g, or t
tgttattagattantttataaaagaaataanattttaanattgaaaggagaaaagatttaatattataataaatgatagttttaaatattattattaaaaatttgggga

SEQ ID NO: 509595 - DNA, 621 bp, Homo sapiens
agcggctggggagccgagcgcgcggcgcgagcgtcacgccagacagcggcccgcgcgccttctcggcgtcggccgccgacgcctcccagaacctcctcgtgccctcgcgtgccaggcccgctggcggccgaaatccgcggttcacagcatgtccgcctcggaccctgctgctggagggggagggaacccccaaccagcccgcgtccgagaaagaacccgcaaatgcccggtcccagagaggagagcgaggaggcacagaggacgaggacgacgaggcaggcaggcaggcggcaggcagcacaagaaacagagtctcatccgtggcacaggcaagagggacacagcacacaccacgtcacacgaggtcgacaatgcaagtctcttccttacagagagagccatttacaattgcacacggacacaggggcagcacaaccttgtgaacttgagaggatacattctgtctctaaagtaagacgaaaaccgatgaacttagaaatctacagcaagactgctttacaacaggccaggcgactgtgtcctcattaaagaagaatgtgggtcagttcagtggctttccatttgaaaaaggaagtgtccaatataaaaagaaggaagaaa

SEQ ID NO: 509596 - DNA, 796 bp, Homo sapiens
  misc_feature (2)..(2): n is a, c, g, or t
  misc_feature (11)..(11): n is a, c, g, or t
  misc_feature (15)..(15): n is a, c, g, or t
  misc_feature (23)..(23): n is a, c, g, or t
  misc_feature (40)..(40): n is a, c, g, or t
  misc_feature (46)..(46): n is a, c, g, or t
  misc_feature (49)..(49): n is a, c, g, or t
  misc_feature (60)..(60): n is a, c, g, or t
  misc_feature (80)..(81): n is a, c, g, or t
  misc_feature (85)..(85): n is a, c, g, or t
  misc_feature (96)..(96): n is a, c, g, or t
  misc_feature (108)..(108): n is a, c, g, or t
  misc_feature (119)..(119): n is a, c, g, or t
  misc_feature (122)..(122): n is a, c, g, or t
  misc_feature (139)..(139): n is a, c, g, or t
  misc_feature (159)..(159): n is a, c, g, or t
  misc_feature (212)..(212): n is a, c, g, or t
  misc_feature (257)..(257): n is a, c, g, or t
  misc_feature (502)..(502): n is a, c, g, or t
ancccgggatngcanacagctcnggtataagcaacatttnattttnaantgtgtagaccntccccccatattttcaaganntaanttacatttctncatttttaaaanagtttggccanaancctagatgcacgcttcnaaatcatgtacctgcacatntgacctttgtgaacagaaatttgcatgtataatttgtgtttacttgtaacttnctggttatatactgcttatatctgtggattcaagttactgaagtnaataccaataaaaagaaaaccctaggccatgttaattggttatacatgtttggaatgttaaccaaaaaaaaaaaaaaaaaaaaaaaaaaaaaaaaaaaaaaaaaaaaggaaaaaaaaaaaaaaaaaaaaaaaaaaaaaaaaaaattaaaaaaaattaaaaaaaaaaaaaaaaaaaaataaaaaaaaattaaaaaatcctaaaaaaataagggggaaaatgaaaaataaaaaaaaaaaaaaaaacntttttggggccctttggccccattttattaaaaaatttaaaaaatttaatttttgggggcaaaaaaagagaaatattggaaaaacccctttaaagaaggggggtaaaaaaaaaaatgggggaggtttaaaaaaaggcggaattgggaaaaaacttggggttaaaaaaaaaaataagcattttgaaaaaaaacccttttttgaaaaaaggggaaataaaaaaaaaggccacataaaagttattttttaaaaaaaaagtgcgaaaacttgaaagggaaattgaaaaagtcaaggta

SEQ ID NO: 509597 - DNA, 392 bp, Homo sapiens
atacacattcagtagaaagcatactttgtatacccatacaaccattttgtttttcacttttagtgtagtgtttaataaattacatcagatattcaacacttcattataaaataggtgttgtgttagatgactttgcccaactgcaggctaatataaatgttctgagcatgtttaaggtaggctaggctaagctttgatgttcaataggttaggtatattaaatgcattatcaacttaagatattttcaatttgcacatgcctgtaatcccaccacttcgggaggctgtattcgtctgttctcacactgtgtcctcattaaagaagaatgtgggtcagttcagtggctttccatttgaaaaaggaagtgtccaatataaaaagaaggaagaaa

SEQ ID NO: 509598 - DNA, 677 bp, Homo sapiens
ggacgaacgctgagatcgccccggtcagtcgccgtcaacatcgtctcggccgaccggcccaacgtgcaggagccgggccgcgctcgggaggcgtctgcagcagccctacgtcggaggccgcgtgactgtcgctacacgcgcatcaagaggccagcaggaccagctgcgcattctccgcgcatgcatcaatgaagctggtgagcctgcgcacagctgagctctagtgcactcggagcaggtcttcgccttgcggctccaggacaagaagcgtgccgcctcctgtctgtcggagatctgggacgtccacagatttgagggagctggccaacccagcccgcacagccttgccatgaccacctctctcagcagatacgacttgctcggcacccccgtcctcttctctagggatggaatgggggcgctgggcacgatgcactgtagacctatcggctctgatcgcattgggactaagcacccagtgccaggtaccaggaggctcccatctcccgcgcacagcgagtcatccagaaggggtgaaaggcttgcaggtcccgaccactgacacattgcaccggatgccctccactcctcagctacacgatcaagctacagcacgcagtgcacattgtacagagggaggggaggacccatggctctcccccttaccgcgggagaca

SEQ ID NO: 509599 - DNA, 295 bp, Homo sapiens
ctccgctaattgaatctgtcatgtataagtcttttatcgttagctgaggtggaacaagtgggtcagcaagaagctgctgggtcactagcttttggagctcgtatgctatccggaaataattaaccccttcaatagcatcatatgcaacaagagtaggagagactccttccaatctgctccttactcgatccagagtatcttatggaagagtcattccagcaatctcagagagtgctcttataattctccagtcttctcttgccaagccaggaggtgtcactgctaccttagtctg

SEQ ID NO: 509600 - DNA, 568 bp, Homo sapiens
gctgagctcatttcagttcttatttcatttcatatcatatttcatggagtttgctcttctgccaggctggagtgcaatggcgtgatctcggctcactgcaacctccgcctcctgggttcaagcaattctcctgcctcagcctcccaagtagctggtattacaggcatgtgcaccatgcccagctaattttgtattttagtagagatggagtttctccatgttggtcaggctggtcttgaactcctgaccttaggtcatctgcccacctcggcctcccaaagtgctgggattaccggcctgagccaccaggcccgggtgagcaccatcttattaagaaaagacacagaagagcagggaaggggagaagtgttccaggaaacacagtccaggctctgacattgctccaggtgggatggagggactcaccccttactttgaataggatgcttttgaaggccacaggggtgccagttgtcctcttgacttgaatcccatgcagagactttgttggcagtttgcacacatccatcctctgctggttgagtcctctgagccaaactgaaatgag

SEQ ID NO: 509601 - DNA, 412 bp, Homo sapiens
ttgacatgattacaatcgagtctcggtaccagtctgtctgaatcccccctcgaagtgtactcacggggagaaccaggcacaagggaggagaacggccgaaacattagcctgtccggatgtctctgttatctgtctgtcacagcgtcttcttactgatgtatcatgcaccgctggagaactcgttagctgaagtcattctgaatggtgatctgtctgagatgtacgctaagactgaacaggatattcagagaagttctgccaagcccagcattcggtgcttcattaaacccaccgagacactcgagcggtcccttgagatgaacaagcacaagggcaagaggcgggtgcaaaagagacccaactacaaaaacgttggggaagaagaagatgaggagaaagggcccaccgagga

SEQ ID NO: 509602 - DNA, 939 bp, Homo sapiens
ctttaagatataagactgatatgttgaaaacttaaggaagcaaatgctacatatatgcaatataacaatagtaatgtgatgctgatgctgttaaccagaacgggcagaactaagataagcaaatatgccgaaaggggtcttaattgaaatgaaaatttaagtttggtttctaacaatattgtttatctttatttattcttgtggtaagtatagtcaagtgttgttcagaagacagattttcataactgtgataagattgatagttgtggtttcgtctagaaaagtggctcttaacaagatgtacaagtagatgacaaacgatgtaaactaattttgtaagaggcttcaaaaggtttatacgtggaaagcacagcctacatgaaagagcagaaatcggttgctgtttggctatcttgtattccctcttatctgggtatcgtggtcatttcctatgcaaactaatggagcaaacagctgtatagtggtagaagttttaagagagaatgagatgtttatactattaacgacaactttacgattcggaaacactaaacacgtgcctaaagaaacctggcccacaatacgcactacagaaatgccaagaagcaacagacaggaggcggcggaagcgatcaaaagagaaaagatacacgcctgacgaaggaggagccaagagcaagcacgcaaatcccacacaggaagccgggtgaacaaacagagagggaccgcagaaaaatcgcgcacagcaggcgaaacatgccaaggggagaagcaacaacaacccgggaccaggcaggataaaacaacaccatctcgcacaacgagtgcgaagaccacccagcaaacggcgcggagacacctggcgacaaaagacaagacccaccaaccaacctaagagggagagacaacaagacagggggccagaaaacaacaacaaga

SEQ ID NO: 509603 - DNA, 154 bp, Homo sapiens
atctagaggatctgcggagtgcaatggtggaatggcaccaccttcccttggcactagttctctctgggcagcgacgcagctttaccagtgcactggtggctgctgaatggacttggcagcttctagtatctgcttcctcaaaagttcaaggact

SEQ ID NO: 509604 - DNA, 139 bp, Homo sapiens
ctctcagcaagtaccacagaacacaaagacaagatacataacagcaaatcaacctccaacggggccatgccaaagccttccccactccccaaggctgggcgagggctggtaggggctggggcagcattaactacgtcag

SEQ ID NO: 509605 - DNA, 438 bp, Homo sapiens
  misc_feature (55)..(55): n is a, c, g, or t
accttctctgatcgctcaggtggaggtgaatgcccagaacagtgtgctaacgagnaggcaatgacaaccaccacaaacactcaagtggaaggggatgatgaggccggattcctggagcgcctggtcgggtgaggaaagacgccaaaaacgccttcagggggctctggagcggcagatggagtacgacccaacaataacagatgcaagtctgtcgctcccaagcagaagaatgcaaaatgacacagcagaaaatgaaactaccgagaaggaagaaaaaagtgaaagtcgccaagaaagatacgagatagaggaaacagaaacagtcaccaagtcctaccagaagaatgattggagggatgctgaagaaaacaagaaagaagacaaggaaaaggaggaggaggaagaggagaagccaaagcgagggagcgatcagagaaa

SEQ ID NO: 509606 - DNA, 263 bp, Homo sapiens
aaaaaaccccctttttaaattatttttggtttttttgggaatttttttaaaatgggcccccaggccggggccaatgggcccccccaaaagccccctttgggtctttccggggggggtttatggggaattaatggggattttttttcaaatttttcttaccccaattttttttttgggcccccccccccccgccttggggaaacgggcccccccccttttttggggccctttttatcccccggtttaattttggttttttttta

SEQ ID NO: 509607 - DNA, 203 bp, Homo sapiens
taacaaaggcctgtcgaagaaaccaccgattgtatactgtcgcatggcattattattatgtatgatggctacagacaatgtgggctctcacacctagactagcttatctggtggaggggcttgggcacagacagacagacaggctttctggatcatgcctttttttgccttgttacctttggctgtgcttttataatataact

SEQ ID NO: 509608 - DNA, 328 bp, Homo sapiens
  misc_feature (158)..(158): n is a, c, g, or t
gcttgacatattttactgagacagaagctagacggaagcacaaggcacctttcgtgtgtgaaagatcatgtatcttgagataagtgtggaagatcacgactccggttgccaagcatctgagcttccctataaggcctgggtcatagaatctgtaaacnatgttaatgattccacccttacctatcatttacgaatatatcaccaccctactaaaccccagttaaacgcctggcagccggaatcctattcgccggatttctcattaataactatatttcccccgcattcctcttccaaaccataatcgccctctacctgaaactcacta

SEQ ID NO: 509609 - DNA, 344 bp, Homo sapiens
aattatagcagtgagaaaattatgacagtgaaagaaatctgacctaattgactccatcttgcttctaacctcccagctgcccttgttcattcctgggcatagggagcactaactttgggaggatttagtttatagtttaactttgaaacaaagatgataacagcccctccctgagaccaacccactccttgcctggggaccagaaagcctttgtaaaactaacacattggccacaagattagatatgacggctcaggagtcatgcagccaaaggctcgagatcatgaacctccccaattgctcctgtagataatattttttttttaaatccaacatgggtgttt

SEQ ID NO: 509610 - DNA, 368 bp, Homo sapiens
  misc_feature (331)..(331): n is a, c, g, or t
tcgatccacatctctctctctgtccctttctctctcagggtcctggtcattctcctccggatcttgattatctctgtccctttctttttctctggtcccattcacgttcttctggatgggccttgattctcggaggtgggacccacagctctcctctctgggctttttctttctctctccatccacctggggtggagtaatgggtctccagggaccaggtctggagtcatcacccggtcggggaaaccgatcatcatcagcacgtctggaaaggcgatcatcatccaggtttctccaagggcccctgtgtcatcctctgcaccaggcctgngaattctgtcatcatcggcgttcctccagggtcctcg

SEQ ID NO: 509611 - DNA, 150 bp, Homo sapiens
ggtcacaaccagtctactctcccttcatgagatctgccttatctagctcccacgttctaggtacaacgaaacgtgatatggtcgaggtcgctgtcgccttgcttatttcacttaagtataaaggcctctagattccatccaacatcgctt

SEQ ID NO: 509612 - DNA, 334 bp, Homo sapiens
ctctgtacatcttactacaatttaccaaactgtgactcacagatcaatgtgatacactgctgttacaaaaatggtgtcacagatgtgccttagtgctgccagaaacctttgatttgtctaaaaacataccatttggtacgccgaaataacagggtcctgcctgtctattactctaggagctgatcaagagatgcctgggctacaaatgtaactctatgaatcatcatctctatcagatcataggacactaaaaataaactaatctgatttttggtgacattataccacttgatgcatttcaaaccttttgatgtggcctggggttccgagctcg

SEQ ID NO: 509613 - DNA, 1524 bp, Homo sapiens
gacccacgacgtcgcatacatattatactagcatttaccatctcacttctaggaatactagtatatcgctcacacctcatatcctccctactatgcctagaaggacataatagctatcgctggtgcatgtatagactagctctcataaccctcaatgatcacatctccgcgtcttgagccgaactattgttgcctatgagccactactaggtctattggccgtccctggcgaacgcagcggctgggccatcagccgctgactgagtgctcgaatcctgccaacgagattattggcccgagactaaacggtgacatgtaaccctaaagcctaatccccatggcgtgaaaccttagtcgtcccgacccattgatctgtactaacgccaacagtcgagcagttgacgcttttcccacaaacatacacagtacacatccgagagtcaccgcaacaaagacattcccaagcaagactaaatatgatctctaggacttccaatcgcccctagggaatatcattaaacccgcaaatccaaaggccaaacggacggcccctaaatagtactaggcctgtgtcccccccccaagtctctggtgttcaccattccggagaccccccgtgtttatacaaaaggtggctcactttcccgtaaggataactttaccggtcacaccagtgagcgttcccttaaggccccttccacaaagggcataaggggaaggcgcaaacgggacctacccctattaccaagatagataacaccaccgccaagtagaacggaaacgcaaggaacttcgctgaaccccctgcacaagaacatagactccttccccctcgagcagggcgcaccccctcggccgccagttaacacctcccggcggccgcacgccgcaagactaccttggcccaaaggtcagtatgacaaacccatcccggaaaaaacaccccacgtagttcaccacaccccgctgccgcccaacagaaacaacgcgccgaacaaaagggccagcccacgcgcccacaaaaccaccgcgaaccaccacaacgggcgcaccaaccaaccaccccagacgacatacgaagccgccaaacagagggcatcgccgtgaccaccagaacaccacacacgacgcacacgtagaacccaacccagagcaccagctgagtagatcacccaaaaccaacggatacaccccaaccccacccccctcaaagtccgacgcacaaaaacacatactagcacggcggggcgccaccccgccccctagtatgagcgtccagccagcaccacaagggaacgcagcacagcaaaaaggcccttcacgggaggcgcccccacataatagcccaccacagcgacacgaaactgacaccccaacgacgaagcagaataacgaatagccgcggacccacccacaacaggccgggcgagaaacgactcccaccctcaccaccgccagccaagacacacagacgacagacgagcgaacacgacggcacaaacgaccgcaggcacacgcgagacc

SEQ ID NO: 509614 - DNA, 320 bp, Homo sapiens
gacagcatcctaaccaggaaacttaaaattggtcttaacaaatccaatctaggcgggatatgtaaaaaaacagaaagatagcatcacaaaccacacgacacattatcagagtttaagaatcaggaaaaaacagggtcagctaccactcagaaaaattggtcatcaattctgaaagggggcctggtgacatcgtcaggatggataaagacagagattggactttcccggggttctcacgtcactaagctggctgcagttttttttggccaaacgggtcatcaaggcgggtatagggatggctggtcgggtaccggagctca

SEQ ID NO: 509615 - DNA, 910 bp, Homo sapiens
gcacccgagccaggtgagtcctccaggtgggggtccactaagttggcgttccgctctcggtgcgcgtgctagtacgcggcgcgcacgcaggtagtgactctgttcctggctgtgcgtgtgtgcggctcctggggggagtctggcgctgctcgggttggcgttgaagtttccgactcccgctccgcgccgggcctggccggggccccgggagtgctccttctagcctcgcatcgccgggcgtagcacgacggttcgttcaatgcacgcccgttgccgacctccttttcgtgcctgtgttgttctcacctgttggccatcaccgtggctctggcgatatgatctacatgctgactggtacccggctcgccggtggggaaggtgtgttgcttgctaaccctactaaggcactttgggctggaggcagtcaatgacaaggagggaacccttgcggtgcttgtgttgtttgtgagcccgccgctgcaagtcatcgcctggggctgtctcccgtgtccaccctttcgttgccgtcttatctgggagatctccactctgaaacaaggtctcgggagcgttgtctgagccctgggtgtctccccggcctgctccctgtacgttggggacaccgacttcggcgcgtgttctattgtaggcatgcaggtgcaggtgtgcgtggatctttcggtggaaggtcggtcgaatgcgctcttgtgaggccccctttcttggacccgcttgctgggagcgatcaggggagcctccagcacctggcccttgaggccgttgcatgggctgcccctttcctggccatactcgagccggtgtgtgttggggatgccagcctggggaggggcatgccttttgtccgcaccttgcgaagcccctgtcggcggcaaggttttgtttgtgccca

SEQ ID NO: 509616 - DNA, 159 bp, Homo sapiens
gccgggcgggtgctcacgccttgtaatcccagctctcaggaaggcaaagagggggaggatagctggagcccaggatgtcgagacttgcgtggcaataataggcgagcacccgggttttctccaaaacaaaacacacatcagagaacaacaacaaaacaa

SEQ ID NO: 509617 - DNA, 142 bp, Homo sapiens
attccctttcatgttcccctgtgattaattcttttcttttttaaaaaatcattttaaagttttttgtttaattataaagtagtacatgccccttataaaaaaaagttccactagtatgaaagggttataaagtaccagagga

SEQ ID NO: 509618 - DNA, 421 bp, Homo sapiens
  misc_feature (15)..(15): n is a, c, g, or t
  misc_feature (115)..(115): n is a, c, g, or t
  misc_feature (142)..(142): n is a, c, g, or t
  misc_feature (145)..(145): n is a, c, g, or t
  misc_feature (153)..(153): n is a, c, g, or t
  misc_feature (157)..(157): n is a, c, g, or t
  misc_feature (221)..(221): n is a, c, g, or t
  misc_feature (225)..(225): n is a, c, g, or t
  misc_feature (238)..(238): n is a, c, g, or t
  misc_feature (248)..(248): n is a, c, g, or t
  misc_feature (253)..(253): n is a, c, g, or t
  misc_feature (262)..(262): n is a, c, g, or t
  misc_feature (269)..(270): n is a, c, g, or t
  misc_feature (272)..(273): n is a, c, g, or t
  misc_feature (281)..(281): n is a, c, g, or t
  misc_feature (285)..(285): n is a, c, g, or t
  misc_feature (292)..(292): n is a, c, g, or t
  misc_feature (319)..(319): n is a, c, g, or t
  misc_feature (327)..(327): n is a, c, g, or t
  misc_feature (330)..(331): n is a, c, g, or t
  misc_feature (344)..(344): n is a, c, g, or t
  misc_feature (348)..(348): n is a, c, g, or t
  misc_feature (352)..(352): n is a, c, g, or t
  misc_feature (420)..(420): n is a, c, g, or t
acatagagatcaacnctgatctgacattatttctatatttttagaaacacttttcactcataaatccaaggtgacaatggcattaaatggcattaaaaatatctacaggaaaggnctaccacgaaatacaatattatgatancantcattgcnttanagtggttacttttctgtattcttcacatgtcccattgtatcactatacatttttataataaaanatcntaaatcaagacanacttcaagcnaagtnttgtcgacnttataanncnnttcttaanacanatgttcngacagacggcattcaactaagacaganaagatgcnggnnggggaggcttgcnaggncccngggggggctccagggtgaagcccatcactagcctttccagcagcactgtccctggagaccagatgctnt

SEQ ID NO: 509619 - DNA, 231 bp, Homo sapiens
taaatcggggggaggcaggaatatgatcagataagggatttaatacctaagaagcaaaatctataagctctctctcagttaatcaattaaattgggcttaagcgctaataggggggtggtaaacttaaagaaatataatcctcccataccaagttaacagcaaacattctagccacctttcaaaaccaaagaaagatacagacccattcatttatagcaatatactaatta

SEQ ID NO: 509620 - DNA, 142 bp, Homo sapiens
cagatatacatggtaaatatagtaggtatcatggggtatagattctaccacagcttgtaagtagctccaaaccttaaagtacccacaattactacacctagtgactaggaaccacatgatccctatttatatccccgccagg

SEQ ID NO: 509621 - DNA, 276 bp, Homo sapiens
aggagggggggaatttccgcgggtttaaaaagtggggggggagaaggggaggcctgtgttttataaaaaaaaggggggccgcccccaaaaaagaagggccccaatttggcctctggtgggggggggagggggaaaatccctggggtttacgccccgggggggggggtgaggtcctggggggggccccccaaaaaaggggggggggggggggtttggaatttttttggggggggggaagggggggaccccccaaaaggggggggggggggggggggg

SEQ ID NO: 509622 - DNA, 1180 bp, Homo sapiens
gatgttctgtgttctccccgccctgtgtccctgcccgacccgctgccctgcgatgctggctgctgctgctgcgtgctcccgcgtggctctgtgccgtgctctcctgttccctgctgctcctgtgcctgatgctgcctcccctgctgtgcctgctgccttgcatgcaatggtgctcctgtgcgaccctgtcctcttcctcctcctcctgtggaaccctgctctgtgtacctgtgactgtggactgccaactgggaatgcctgctcgtgcctgctgtggttgctaggacgctagaatggcagatgtcgtcccaaatgacacgctgagaacttcagagccctgtgcacttggtgacgaatgggcttcggctacaaaggctccaccttccacagggtgatcccgttccttcatgtgccatggctgggctgacttacaccaaaccagcaagtggcacatggcgggaatgtccatctactggaatgcctgcttacctgacgagaactttacacttgaatgcacagtggggccagtgtgtcctgtccatggcctaatgctggtcctaacaccaacggctcccagttcttcatctgcaccataaagaccagactggtcgccatggcacagcctgtcgtgtccggtcacgtcaaacgagggcatggaccgctcgtgaccgacccatacaactctcacggcttctaagcagctgcggacgtgacataccaagaagcacttgtcatcaacagactggtggcccagcttgaagcctaatcttgtggccagtggttagctggcaatggtggcaagctgccacatgttcattccacccagggttgacgcgaaccgcctgctcagaccaatggtgcacttgaacatagtaccgtgttgcacacacccactgttcccacaatagtcctgatcgacacgccctgataaaggcgcgattctacacaccctcggcggcaatggtaaccaaaccacacattgtgtctcccaagaaagacccacccctacctgtaaccgaagccacacaatgcaatgggaacactatgtatggcatgataatgtttaacaccaacacaagtttaatacacaattgatcctgactatcttcgccacccccaaaaaaacattgcctacccgtgaaaaaaaactagattagcaacagcgtgcacgctcacaaca

SEQ ID NO: 509623 - DNA, 204 bp, Homo sapiens
atgtatgtctagaagttcccgtcatggcgcagtggttaatgaacccgactagtaccatgaggttgcaggttcagtccctgaccttgctcagtgggttaaggatctggcgttgccatgagctgtggtgtacgtcactgacgcaggctcggatcccgcattgctgtggctctggcgtaggctggtggctacagctccaatccgacc

SEQ ID NO: 509624 - DNA, 102 bp, Homo sapiens
agttcattaataaaagtagaaaatggaaatacctagtttaacataggggccaaatcaacaaataattgaaggtattatgaaatatgagacagcactttaaaa

SEQ ID NO: 509625 - DNA, 163 bp, Homo sapiens
tgccgtcaaagtcctggtcgagacattcgccaagattgttcggccaaacatcgatgttatctccacacccatctgcatcggaatccaaccattctgtgctgtcgtttggaaatacgtcggcattatcacctacaccgtcgaggtcggtgtcgttccattcgct

SEQ ID NO: 509626 - DNA, 588 bp, Homo sapiens
agcgggggctgggacgggcggcggccgggtggcctcgagccacccgctaattgcatcttttcccggcgtctcgatcagcagagggagcgactatgtctgcggaacgatccccgaggcagccatccgcggatgagcatgaaggaaactggaagatacacagtgacgtagtccagagaacagcatgaagaatgcgacacgttacaagcaagatatcctcatctgtggacaaatagcctggtaggttcaggatcttcgttagaggacaagcggtgtgcagagaagggcgaaaatgatatttgtgatgtcatggcggatgtactagacatggtgtaagagcaagataagtgaagaacataggcaaaggttctctacatgtcgagggtccggtataagactggagggtcactggtgtagccaacatatcccgcacggtcacgacaaaggaagacattacccatcagaacttgaaatgctcggtcccctctgataaggctacgccaatgcctgggcttgggttggaatttcagaacggttggacactggcggtgaattctggctgaaagactgcattatagcttccgttaatat

SEQ ID NO: 509627 - DNA, 112 bp, Homo sapiens
cgtgacttgaagaaatacaggatgcaatgtggaaaaccttccgcgatcgcgatgaagccaggctctcctacttgttaactgtgcctggagtcagactgtacacaagaggagc

SEQ ID NO: 509628 - DNA, 1280 bp, Homo sapiens
gcgctcaccatccaggttcatccagtcctatttcgtaacggcacttatgaatccaaccaattgaagattcttacacaaagcagctgctgtgactacactgacagagcacgcccggcctagatacttcttggactacagcaggacaagcaacgacgcttcggcagccatgagcagcaacagcctactactgacgcgacctggccgacacgcctctcctgctacgcgcctcttctccagcctcaccacgactagcagcgcagctatccggacagcacaactcgtatacagctattcaacacgcaccagcactctcctccacgacgctacacaaggcatcagctgcaatggaagttcacccacatgcatccctctacactctcggctaacctaaaacgccacgactcctgagatccactcacaaacgcaccacgcgctacacaaccacgcggacacgcacacgcgaccacaaccagctcttacgccaaccgcgccccagcccctcaaacgccgctacaccccaactaccactagcgcaaccgccacctcaccgccctaaaacgcaatttaacacagcaatggcacagtaggctacacgtacctccgacaccgacctattccccacctggcaccacctatggctcacacgggcgcctttagtacaacgcggaacaagacctactctccacaagaagtccaccggcgcacaacttggctccccatcccgtttgccacacgcacgaacagctcccacacctaccggcgcacaccagggacccccgcgaccgcacccaacgcaccctccgcgcccctggcccccactataggcatcggctcccacgctctccacccataacggcacacatcgcaccctatccacagccgtagagcaagcgcgttagccccaacacacagcggcacgactgacggaacaagcaaaaggccaccacgcctccaagatccagtgattacctccctcattcgatacatacccgcctcacgaagaccgcactcctaacgcacagcttcccatcacggcaatactaggcgccgtacgcaccataggcagcgacagtaacagcacccccattctaaggccacccacaacaacttggaacacacccaccaccaactcggcaaacaccgcccacgtccacgcaccccccacaaagcaaacaagcgccagtggtcggcctataagccctacccccccttccgacagccacgcgcaccggacacgcgccgtgaacgaccgatacaccagacacacgggccgaccacac

SEQ ID NO: 509629 - DNA, 297 bp, Homo sapiens
cgtatcgtgataaaagacgacgacgtatacatgttcaacagttaacctccaagcaggctaaacaaagagatccacagtcaagacacattacagtcgaattgttgaaagccaccgacaaagggatattttatattttttttttcaaagacaggtctcaccataatatggcccaggtgggtctaaaacggttggcctcactggattctcccacctcgacctcccagagggctgagactatggcgtgtgcaccattagcaggtggaaataccactcaagaaaaaaacccgttaccatctc

SEQ ID NO: 509630 - DNA, 116 bp, Homo sapiens
acgccatccactatgcgttgcactgctgtggtttggctggggtgcgtggacacagtttatctcagagcatctgccccaatgaaggacgtactcgaaaaccttcaccggtgaagtcc

SEQ ID NO: 509631 - DNA, 128 bp, Homo sapiens
  misc_feature (17)..(18): n is a, c, g, or t
ttcaggctggtaccccnncgaggtatgggatatcgtcgaccccggccgtcggctttggcctgtgcggcggggaaacccgctctcgcctcctggtggtcgccgactcgctagtccgcagtgatgactca

SEQ ID NO: 509632 - DNA, 197 bp, Homo sapiens
tgccctatatatcagataaggaaacaattaagccattcactttaatatatgcagcagtggcatctcagcctctgcactttatctacagcccagcacttcttgttggggctgagataggaagtctcgagaaggtgctctagaggaggtgtagactctaccctggactgacaggtggaaggcttagccagagcattgtc

SEQ ID NO: 509633 - DNA, 219 bp, Homo sapiens
gctaagggaaaggcccctttttcccttcccttctcactttggcaggttttaacggaccattcaaaaggctacccgtttccagccttaacccttgaaaagaagggcggtaacccctccagccagtttttgggaataaaccttttaaagccttggaaaattttcccaataggtcccctttccaaaggggtcaaaagaccaataaaattcttttcctttgaa

SEQ ID NO: 509634 - DNA, 212 bp, Homo sapiens
gttactttgactcttctactgtctcagtaccttaggtaacatacctcgcagctgcatttctaacaaactgttgatcagccaaaataaaggggctacagaaacactcatttttatgctgttccctacttgggcttccttccaagacaattctgtgtaaatgttccgttgactctgatttggaaatatgaaccaatcagtccatcctggttata

SEQ ID NO: 509635 - DNA, 109 bp, Homo sapiens
tcacgttgacacttcagaagaacaacaaaaaaaatacaaccccaaggcaacacaaaaactttggtggggatctgtcgccaccccatttggacgttgcattgacatgtgg

SEQ ID NO: 509636 - DNA, 384 bp, Homo sapiens
ggaaaaaaaaacccgaacctcccagttttaatgtgttgggggaaaagttccacatttattcccagagctcccgtattttttacactttgcggttacacagtttttttacactgggttaccttttaattaaggagtgtttatccccccctcttttttacattataaggctttcttaaaagggaggaaaatttcctctcccaatggttttggattttaataaccttttgggtacctcccaatttatatattaattgaggttccactacgcttttttttttttttttgtgagatggaatctctgtctcttgcacagtctagagtacagtggcacgatctcggctcactccatcttctaccttctgggttcaagcatttctcctgttc

SEQ ID NO: 509637 - DNA, 294 bp, Homo sapiens
  misc_feature (114)..(114): n is a, c, g, or t
  misc_feature (125)..(125): n is a, c, g, or t
  misc_feature (191)..(191): n is a, c, g, or t
  misc_feature (223)..(223): n is a, c, g, or t
aagcaatctgcccaggactaccatttacccagcaatctcattacttggtaaagacccaaaagaaaataaatcattctaccaaaaaggcaaaaaaaaaaaaaaaaaaaaaaaagncagatatttanggtgatggatatcccaagtaccctgacctgatttgtataaattctatgaatatattatcacatgtnccacaaaattgtgtacatctattatgcatcanttataaaaaagatattctatcagactttaatgtagttggattccatggtggtttagtgttaaataaccagg

SEQ ID NO: 509638 - DNA, 227 bp, Homo sapiens
  misc_feature (93)..(93): n is a, c, g, or t
atatcccccggcccgcggtcccctttctctcataaaattctttcttagtagctattaccttcttattatttgatctagaaattgcccctcctntttaccccctatccatgagccctacacaaactaacctgtccactaatagttatgtcataccctcttattaatcatcatcctaggccctaaggtctggactatgagtcactacaaaaggattagactgaccggat

SEQ ID NO: 509639 - DNA, 260 bp, Homo sapiens
ccttcctctttcctttcctccaaagcaaggaggcccttccctggtccaggcccagggtatgggtagatcccttcccctccctaccttttgaatgtggggtagatcagggggccccccggggtttcctgaaatccttgggagccggatctccccatctcccctactcactcttcccttttcttctctcagggttgtctgaataaagtgtgaaatcttttgggttttctaaattgccattttcaatgaaaaaaagaatccca

SEQ ID NO: 509640 - DNA, 932 bp, Homo sapiens
  misc_feature (1)..(1): n is a, c, g, or t
  misc_feature (70)..(70): n is a, c, g, or t
  misc_feature (114)..(114): n is a, c, g, or t
  misc_feature (568)..(568): n is a, c, g, or t
ntcctgcacatagctccaccgctgaggccgacgaggccaaacgtttattttaaaagtctacatttaaaantcaatgctgtgtggggggtcccataaggctgttgctgattccanctctaaaatgtaaagtatccaccttgagtgcttagctcaaaattgtattggcactgggaaaaaaataaatcattgcctttattttggagtaacacaaaaagactcactaacggggggtataaaaacttagtttgtgtacataacaatatgaattttgagaagtataagctgtcaactagctatttctaatacggaatagatattttacaatatgggtaaactttacacatgggctcaaaactgaaggagaattttaatttcgtcttcaatataccaacgttatgtatttaggaattaattcttggggtctgtcacagagaggaaattccattcttaagcattatggtgagtgggcatctaaaaaatggtaatttatatttaactgagtgtttgatgatggggggggtcaaggcagggaaacgatgatcataactgccttggtaaaaggacctanacatgtataagtctgcgcaaaaatcttgataatccctaggggggtaaggcgacttcttgcgaccaaatacacgagataaatcattaacttttaaaaagggtaaatggtgtttcccccggaacacacgggaggggttgatgatggcttacaactgggggctgcagtgacacaggctatgggtggggatttcaagcgaaatttagccaccagctgggccttctggggtgctctaagtgcggattcttgagggggtggggcctgctcggttctgagagggaattgggtcttggggtgcccgctcccccaagggcggggtccttttgagcgtggattacccgagattcgggcggaagtctgccctatg

SEQ ID NO: 509641 - DNA, 337 bp, Homo sapiens
  misc_feature (81)..(81): n is a, c, g, or t
  misc_feature (96)..(96): n is a, c, g, or t
  misc_feature (113)..(113): n is a, c, g, or t
  misc_feature (227)..(227): n is a, c, g, or t
  misc_feature (251)..(251): n is a, c, g, or t
  misc_feature (332)..(332): n is a, c, g, or t
caccctgagatgggagccgtcttcccagcccaccatccccatcgtgggcatcattgctggcctagttctctttggagctgngttcgctggagctgnggtcgctgctgtgaggnggaggaggaagagctcagatagggagggagctactctcaggctgcaagcagtgacagtgcccagggctctgatatgtctctcacagcttgtaaagtgtgagacagctgccttgngtgggactgagaggcaagatttgntcctgccttcctttgtgacttgaagtaccctgactttggttctgcggcacctgcatgtgtctgggttcttgtaggcattgngaggg

SEQ ID NO: 509642 - DNA, 207 bp, Homo sapiens
  misc_feature (5)..(5): n is a, c, g, or t
cttgntttcgtcgcggtaattttttgccccatgcatgccccataaagtcctacatcacccctccatatgctaccattactgcacacaccaccatcggagcagagcaatgggcagcatcaccctggtccggccgagcatatcttcattctcaacgaagaacgacagataccctgagccacagcaaaacagcccaccgatgttcgcaat

SEQ ID NO: 509643 - DNA, 375 bp, Homo sapiens
actagctgcatggtccaaggtcacgtaaacttttgggtttcagtttgctcatctataaattaataaacctcccttgcagagtctctataataattagatagcatttatgcatctgatatataataggtcttctcaatagatgacatcattaatagaaatataggccaggcgtagtggctgatgcttgtaatcccagcactttgggaggccgaggtaggcagatcacttcaggccgggagttcgagaccagcctaggcaacacggtgaaaccccgtctctaccaaaaatacaaaaaccagccaggcatggtggcaggtgcctgtaatcccagctacttgggaggctgaggtaggagaatcacttgaacccgggagg

SEQ ID NO: 509644 - DNA, 990 bp, Homo sapiens
ggtgttgaatcgtggccggaggtcgccatggctaccgagcccgaagccgcggagccggtggtgccttcgtctcgatggaatcgatacttcactcgctggtacagaccggatgtctagaggaaaattctagtgaggaccactgtatactacagtactctaaccgggggcaggagtttctaacagagtttgcacctctctgtaaccatttactgctcaggatggtgaagaatatactgtgtctagatctggtggttaggaaggacaggtatctgactaggagaagtgatatgaaacatctactcctctcgagtacacggccatcatattgcctttcaatggaatacaccgccgagtcttaccttgaaaggctagccagtgtgcggagtttggtggttaccctcagagaatctttgataggcaaagataaaataggtcataaaccaatgagagggggttgatgtagacctagccaaataatagctagatgatagcaaagcaaaggtccaattggctgcacacacggcaatttagatgcccaaccaacaagctttagcgtcatggatggcagttgggaccgatgggcagaccagggagagcagacagttggggaattcctatgttgcacctgggtccgtaacaccgatcgagggttcactaccatggcagagagaacgcagttatattgtagaacgcattacccttttaagcagccgcagcacagtgatttgccagggggggacgggcctaggtaggcgcttcggggtttgagtctgttccccttgcctcgggtttctttccagttggactgggagcccctctggggtatgcccactgttgttcttacagggcactggacccacgagtcgtgggggcttggcccgccatggtaatcttcatcatcgtggttcctctttggccagtcttccttcgtaagactaaaactgtggccattgctacaggccaattgcttttgtcctggattcaccctag

SEQ ID NO: 509645 - DNA, 114 bp, Homo sapiens
cgtcatgatgccgggatcctcactccctaatgagcacgaactctactagcgtctcatctggttccctatctgtgtctcctctaggggctgctctacgtagtcggacctgcgggc

SEQ ID NO: 509646 - DNA, 166 bp, Homo sapiens
cccggttctaccttcagcttctggttgttgaatttccagcatttgttccccttgtagaagtaagtgaagacttcatcgctgcccatgaatgaccctctgggagactcatggatcccttcccagactctgatgttcttgtggtactcgctatacactgccctgagct

SEQ ID NO: 509647 - DNA, 1336 bp, Homo sapiens
gctccaaacatgcctcctcccgcactgggcagaccgagtccagcgtgagaaacttatgctagattccatgtgcattgagcaatgcttgattgacagtctcggtgtcttctcactttcgtgcgaccaggtgagccacatgatactgcacagaacatgtcgatcgtcgtcttgctatctgtggttgctgtttctggcgagtacacaagtcttctgtgctgtgttattactgtaggttctttcggatgcgctgtgtgttttgccattgtcaaataccactggatgcggggaccccgcatcacgaacactgtgctatatttcaataccttccattatcgtcatcttactggagctaactgacttggcgacaacagcagaacggcactcaccctcatttcgcctagaactcgcgtcattgccaactgcggctccagtctcaccagtctcccaggtgactgcctgatctcgcagccaaagggccactacaactgtcaaccagggtaaatgcgacgtagcctatgctatccacccaaagctcactgtgacacacttgtgcaagagaattggaacgcgcttcacgtcacacgaacataatgacctccaaactgcgaactgatacacactaggtctactcgtccccagaggagactaccatcaattctacgcatcgcgacacttgcactgggaaatgaaatcaaaaccacggccgtaccaagattgacacctagcatgccttactctccacctcgtcccacacactccgttctccaacacccaccactccgggcaagaacagtgagccaactacacgacccaccagcatatacaagggaccaaagggcacctcgcgcacaactacgcaacaaactccacgaacaccagccggacaacagtcaccacacaccatacaggcccccagcgcaacacccaaccggcagaccacccacaggacacgcagccacatacacactaccctgcacaggacatgtgtcccccacggcccccgcatccgtacacagctccccaaccgcggctggcgcccaccacaaaagcgagcacaccacggggcccaccgactagtcccacacatattacacgacaccacacactatctggaaatccaacacacatataccaacaccaacacatcaaagataacaaaacagagcacacttacatacgcaaaaccactcccacctccaccaaaacacatcccctcaacaccacatccccaacagcatccccgaacagtatactcaaaaacaaaccacacaaataaccacacatatcccccgaattaaataatcaacatcaccacactaccaccattcacatctac

SEQ ID NO: 509648 - DNA, 697 bp, Homo sapiens
  misc_feature (197)..(197): n is a, c, g, or t
  misc_feature (245)..(245): n is a, c, g, or t
agcggtggctcttcttcaagggctccaggggtgggcccaagacgtcccgtcgacggcaccctggtgcccataggactcgcgggcctcatctccaatgattcagaactcaagttcgtcgttgatgcaacccactaagatgtcggagacacggtggaaacgcttatgattacatccggtaagatcaaaagcgttatccntgttgtggcttccgatcgagtgaggaccgtgctcttaccactccattnatacgcaatgcttcttgggatctcctttcaaaacacgctcgtgcgaaactcgcatccatgacctctctagaatctatgggtctaagacagtgttgggatgttaggcgtgtactcattaggaaggtggttccgctacgggaagagtcttgatgggcctatggaaagggatgtcacccttacatctgtcgagatgtcgtccctgacgattcggaatcatacttctgggtaagcatctcgtagctctttgaagcctcgatctcttgcgaggccattcgcccaacgcagattctggagtcagtcatcgctagggcgcgtagggctctacagctctagtctagcaggggtcatgtatagtacaccatatcaccctgttcttcaaagacgcgctatgacagtgggaaatattgggctagtgagacgtatctgacgcatgccctgaggagcatctataa

SEQ ID NO: 509649 - DNA, 171 bp, Homo sapiens
tgcccatattacactagaaagacaaataaagaacctcaggctagagggccatgatagtgagtgtctatataccagctggaccctcagtaaatactctacaaacctgagcaaatgaatgaacaaatgaataaatggaggaatccagacacttgaaaggactagtgtaaggct

SEQ ID NO: 509650 - DNA, 540 bp, Homo sapiens
ttctttgtttctttctttctttattttgagatggagtcttgctctgtcgcccatgctggagtgcagtggcgcgatctcggctcactgcaacctccacctcctgggttcaagcgattctcttgcctcaacctcccaagcagttgggactacaggcgtgagccaccatgcccggctaatttttgtatttttagtagagacagggtttcaccatgttagccaggctggtctcaaactcctgacctcaggcaatctgcccgcctgggtctcctaaagtactgggattacaggcgtgagccacctcgcccagcggcaccaggctttcttaaagtgagagcacgcctgtactagagcaacgcaggaatcagagaccttccaggaaatactacctgtgtaagggccagaaatatcttcaccttggtcatcgttcatcatactcatcattactttcgctgtaatgttcatatcgatctattaatatatattatctttcatacattttctacgaaacatttatattgataagatctttatttgccaagg

SEQ ID NO: 509651 - DNA, 412 bp, Homo sapiens
cgctcgtatctatggtttcgctttccacagtttggtacctgccgtcaactgcaagtcaaaaatattaaatggaaaattccagaaataaagaattttaagtctcaaatggtgtgcccttctgagtagcgtgatgaaatctctcgctgtccggctccagccggccggggatgtgagtcatcccttggtccagcacatccacgctgtatacgccacccaccctgctagtgacttagtagccgtcttggtgatcagatcaactatcccagcatcacagtgcctgtgcccaagcagtcctcactttgcttaacagtggccccagagagcaggagtagtgatgctggtgattcggatatgccaaagagaagccacaaagtgcttccttttaaatgaaaaggtgaaagttctcaactta

SEQ ID NO: 509652 - DNA, 564 bp, Homo sapiens
gcacgaggtgaacctgtgggcaagggagaactactgcacatcagagagaatgatttaattggacctagctatgtttgtgtacggaagacttttttgaacaactaagtggttggtgtgctatttgctaagactggaatcaatagagtaggaatgtggacatcagtttcacacatacttagttttaatttcaagagatttccacatagacaatttttgaggcttggttacagatacatttttggaagtctttgacgtagagttggtaactgagaacattataggaaagaatatggattgaaaagaaaatcatataggatcaagccccaaagaataccaacatattaagcactagtagaggagttagagaagaaagaaaggactaagacactttgggcagaagcatagaaggaatactagtagtattgagtgatcaagtaaaataaaggaaagcttaggtgtgcagatttgcctttgataggaggagatgactctcccaattgtatcagatgggtagaaagacagtagaatcctaagcgcagttccatttgtaggtgttttataaag

SEQ ID NO: 509653 - DNA, 137 bp, Homo sapiens
gtaccatatgtgcaggttcatggaggggaagacatgggaggcacgcaatggagtatggtgttgctttagtgaggtgatgtgaaatgtcatggaatacgtggataatggtgatagttgctacaacttgtctgatgagt

SEQ ID NO: 509654 - DNA, 705 bp, Homo sapiens
  misc_feature (436)..(436): n is a, c, g, or t
  misc_feature (513)..(513): n is a, c, g, or t
gtgtattagaccccctctctccccccctcctcgtctaaaaaaaatatattctgtatgtgcgctcgttggcgttttatcgcccacacacagagaggggatatatatatactctcgtggacaaaatagcacgcgcaccaactatactatagggagggccctccactctctctataatacaagagaatgagagattatatactcaaataacctccctctctctccaccctctgtccgtctgtacgccgcaacacttaggatattatgtacccgcctcctcctgtgtatatataaagaaatttttctctaccacagcggagcagttgtctctccccctctcaacaaaggcccacacatatacaatgtgtgtgagcgatgtggccttctgtttctctctctcttttaaaaaagataggtatgtgttatatatataaccacncggtgaagaacggtcgtgtcgtagtgtctgtgtgtatggagagacacacggtggagcgacgcacccctgtgtataanagaagaaaagagccatctgtggactttgttgataataagaggcggcagtatataattctctcccccggtagagcgttcgggggtgctaaaaaatattgtgaaccgcgagatgttttctataagagaaaacgattaacaccccttaaaattcaatgaagagaaaaacacaattttgcggcctaacaaaaacaa

SEQ ID NO: 509655 - DNA, 362 bp, Homo sapiens
  misc_feature (58)..(58): n is a, c, g, or t
ttctctctgtatatgctcatctaataaacctgtaagtatatgttatccatatatagancacacatgacaaaggaatgtgtatcatctcagtctcttcggtcaatttcgtatcacagagacttcatcatatgcttgaataaagcacaatgcttaccaaaatcctattgtcatgtctcactggacccagccagagggtacagagggcattaagcgtgtttgggattcactgaaagtaaagccaccacattcttctgtcaattgtaaatacttatattctcttttctatcttttttctcttttctcttttttttatagacagagccttgccgtgttgcacagtctagagtgcagtcgctcgtgcc

SEQ ID NO: 509656 - DNA, 1295 bp, Homo sapiens
tagacagctattaggtcccgggatgcagctacatctgagcctgctgcatggacggccattaggtcccagtcaccagagatggagttctggaacttctgagtcgcttgtatgatgatacgactgtggcgattccaggtcaccgagtcctgagagtatggaagctggcagtggtagcacttgcctatgtatgatggcatattaggatcccaggtacggcaggtggaatcctggagtctagctcgcataggatcggcgcatatagcgtcccgaggactggagcctgggattcagagcacctgctactgatatgatagagacatagttaagcgtcatcagggactgcgagcttagccactactgagcactagaatagcagtaggaccgcgcccgatctaggggtccatgcgtgactagaggcctgcgatcgcgaactctctgcgtggtgttcagtagcagcacactatacgcgctccacagcgacctgcgtacgcatgtcactccttgagctcttgccatcgcaagtaacaactgcgacgcacgtaaagaagataccaccaagatacccgaggcgaactgacgacgacctaggaacctcctgcacgtcacatatgccattgacgctaagacacaggcccgaatcacaggctccacacgtacaccccacagcgcactggcacacgcctagggccacgctacaagaaagctcacatagccactcagactggataccagacgcagatgccacgagaacaacgaggatagcccccaaaggggatacacccaccaacgcagcaacattgacagcaaagacgtagcgaaagcaaaccaaggacgagccacatagacacaacctcgccaacgcaagttgacaacccgacataacacgcagaatacacccggaggaacatagccacagcgctccttaacaacaatttcacctctgtcacccagccgccgtggacaacattaacaccaacactaaagaaaaacccgaccgtcacccaacaccatcataccaccgcggcacaaccccaccacgcgcagtgccacacctgccggaacgtccgcctttgcgaccccacatatatgcgagacaacacacacaacccacttgacacactccgggaccgacactaccagccaaacccacacccacctctacatcactcacagggcgcttccacacgcagcgcgggccacatctaccgctggcccacacgccatcattggaaatgaccccatgagacaccggccacatgtcaaacacggcgaccccacctctctaggtgacacac

SEQ ID NO: 509657 - DNA, 331 bp, Homo sapiens
ccgaaaaaaaccttagaagtaactaaaatttctgtacatctccggaatgccatgctgaaactcactgcaaccccacggtcccgctttaaggtccataaatatccctaaggaaaaatccaccgtggtacattcagtcctctcaccgaggtgccccatggcagtcttctgcagcattcttctaatacctttcctttttcaaacctatactgttgttggtgaattctttttaccaacccacgagttgaccacttcccaatgccggggatctgacacctcaccttggcaatgacctccacagccgtttccctctgttgggatctttccagcctta

SEQ ID NO: 509658 - DNA, 723 bp, Homo sapiens
gtaaggatatcgtcgacccagcgcttcgtggtatttgtgcgcctcaaccatttgggtaaaaagggggctgattagaaactgttttaaggaggggctgggctcggtggctcacgcctgtaatcccagactttgagaggccaaggcggtcacgaggtcaggagttcgagaccagcctagccaacatggtgaaaccccgtctctagggggggaaattagccgggtgggacacgcctgtaatcccagctactcaagaggctgaggcaggagaatagcttgaacccgggaggcagaggttgcagtgagccgagatcacaccactgcactccagcctgggtgacagagcgaggctccgtctcaaaaagaaaaaaaaaacaaaaatggtttatacgcgctgggttcccaaggtgggtagagacagacccaagcctggaagctggcccctggcctgtgtgctgacttcttggggacctcaaaccactgtattcttgctgtcggagcctgtactttgggggaagaggatcagggaaggattctgaggaacgtaagaggacaaacgaatccatggtacctcaagagttttccttacccttaaactcgctgtgcagccagtgactgtggcggaccctccatgttgtctaccagcactctactgggccgtggagcgtaacgaatcacccaaggccagtactcctcctgcctggggaatgcgcccctctgagaaga

SEQ ID NO: 509659 - DNA, 1256 bp, Homo sapiens
tatcataaagtttaattatgattcagaaaaaatcgagcgaataactttctctggaaaaaattattattggactctggttattcgacccacagtttattgggggcgagaagggctgggtaggttaaatttatcctattttttattctggaaaatgatcattaatagaaatgtcccgtttccagtctggatttataacagatcacatttggcccaaaatgggtctggaagaataaatcacaacaggaaatgcgaaaagctggtgaaagctaaggcgcatgcaagagaaatatctcagaatacccaaagtgggcaacacaggacacgttgggctgggaatttggaagttatttcagtcatacttgggactatggggctccatggttctcacggatcgcgtggtggaactccgatggtgaattggaaattccccttatttatcaataaggtggcgttctctggtcacagctcatccatattccagttggcgtgggtactccctgggtaagaaaacacattggtgactggggcttatatctgggaataacagttataatggggatcatatggcgctggtgttttcacaattctttggtgtacccggttcattctctaagggagaaacctactaaattcccagtctcaatcattcacattgggacaccacttcattaaacgaaattttctttcagaggggaacgggggaattacctcaaaatggctttactaacaaggatatcccacggtgcggaccacagtctgtttatacaatcccaacaataagagggagacaacggggggagccaacctcggagaaggacatatcatgtgggctaccacacaaagacattggtgcactcgtgtatcttaaaaacgggcgcatcgggcgaacaaaatcactggtggcgagccacaatcttctaaccaggagaaaggcgcgaaatataataaatctcgagagagagataaaaaaattataaccaaattatatatttacccaccaggaggggtatacgtacagagacaaacgacaatcatctatttagaagaagacaccaagcacgacaacaccaaacaagatcagctagagcatacactcacaccaacaacccgcggcacctctcatcgcaagccgacctcctagaacgctactagaactcaatcagctacaaagccgatggtgagtatcgaatcgttatactagtttttgttttttttgtttgtcttatatgctactctaatacgcgaggaagaagagg

SEQ ID NO: 509660 - DNA, 539 bp, Homo sapiens
ggggtcttatgaaaaccaagagaaagggctttctaaaaataatcagtagggtgagggtcactaatcccattgaggcaaatctcaaaacaccagtaccaggtggtacagaaggcaggcactaaatggcgtgtatcgtatgagtaaaggaataaaggcatattggccttacggtaaatcggtgaaaaccaagatataaattcaaaagcatctaatacccactctcaggctcagccaccagaccctacaatatccaaagaaataaccatatggaaaactagattggaatatataaacaggtgtgacaaaggcctagctggaaatcaatttaaaaaatatgtaagatatgaatcataggtaagtcaatttttaaaatattcacttctcggaaaccaccctcggcaagagcaacaagtaggattcttggtacccagtaggcactcaataaatatctaaataaaaggggtgctggatatcacttatctcggctccctcccaaagccttatcaaaaggatgatgagggaataaaaaatctatgacc

SEQ ID NO: 509661 - DNA, 514 bp, Homo sapiens
  misc_feature (13)..(13): n is a, c, g, or t
  misc_feature (365)..(366): n is a, c, g, or t
taaatctactttnacgcgtaatgcaagctacatattgctcactccgtattccctggttcaactagattcacatagcattttctaacttggaaaaggcagtttgcttccctgatactataaaaaaagagcaaaaaataaaaatccccatacaaaagtgaagtcccattgtacccctgccatcatctcctagtggctattctgtgtaactcgggctctttgggattgacttcaaaaactgtttctcattagctactaaaaaactgggagatcaggaggaaaagagaaacccttttgactttgatcagacagctggtctactgcattcggtctgtctgcagctgttgaggctggtactggccaaaggnncgccggcagcatgcagccgcagcagcagctgtcccgggccagcggcggtgatgggctgttggacagcatagctgtagcccccagtggttacatagcctgcagcagctggggatgctgcataggggtactggtcataggcagcggccgc

SEQ ID NO: 509662 - DNA, 362 bp, Homo sapiens
  misc_feature (11)..(11): n is a, c, g, or t
  misc_feature (34)..(34): n is a, c, g, or t
  misc_feature (50)..(50): n is a, c, g, or t
  misc_feature (56)..(57): n is a, c, g, or t
  misc_feature (63)..(63): n is a, c, g, or t
  misc_feature (68)..(68): n is a, c, g, or t
  misc_feature (72)..(72): n is a, c, g, or t
  misc_feature (90)..(90): n is a, c, g, or t
  misc_feature (123)..(123): n is a, c, g, or t
  misc_feature (134)..(134): n is a, c, g, or t
  misc_feature (136)..(137): n is a, c, g, or t
  misc_feature (140)..(142): n is a, c, g, or t
  misc_feature (155)..(155): n is a, c, g, or t
  misc_feature (157)..(157): n is a, c, g, or t
  misc_feature (159)..(159): n is a, c, g, or t
  misc_feature (168)..(169): n is a, c, g, or t
  misc_feature (172)..(172): n is a, c, g, or t
  misc_feature (175)..(175): n is a, c, g, or t
  misc_feature (191)..(191): n is a, c, g, or t
  misc_feature (213)..(213): n is a, c, g, or t
  misc_feature (218)..(218): n is a, c, g, or t
  misc_feature (222)..(222): n is a, c, g, or t
  misc_feature (229)..(229): n is a, c, g, or t
  misc_feature (237)..(237): n is a, c, g, or t
  misc_feature (246)..(246): n is a, c, g, or t
  misc_feature (248)..(248): n is a, c, g, or t
  misc_feature (253)..(253): n is a, c, g, or t
  misc_feature (277)..(277): n is a, c, g, or t
  misc_feature (291)..(291): n is a, c, g, or t
  misc_feature (307)..(307): n is a, c, g, or t
  misc_feature (311)..(311): n is a, c, g, or t
  misc_feature (314)..(314): n is a, c, g, or t
  misc_feature (340)..(341): n is a, c, g, or t
  misc_feature (357)..(357): n is a, c, g, or t
  misc_feature (361)..(361): n is a, c, g, or t
tgttggttttnggatgcattgttatcattaaccngtcttttactactaancttagnnggccanttggnacanacagttctgggaccgttnttccaccactgattaggagtggggtggcaggtnttgggggtggngnnggnnnggggttggggggntngnggggggggnnggnggngttgggagctccagcngccttcttgtccactgctttgntgggncccncggggantgtctgtntcatatcangnacagnaaagggacccaaaggtggatagtntgagatgctctcancacacatgggcttgcnaggnacnatatcaacaatgggagcttcaccagnnttcaagaatttagggncatnt

SEQ ID NO: 509663 - DNA, 985 bp, Homo sapiens
  misc_feature (1)..(1): n is a, c, g, or t
  misc_feature (391)..(391): n is a, c, g, or t
  misc_feature (394)..(394): n is a, c, g, or t
  misc_feature (399)..(399): n is a, c, g, or t
  misc_feature (403)..(403): n is a, c, g, or t
  misc_feature (413)..(413): n is a, c, g, or t
  misc_feature (421)..(421): n is a, c, g, or t
  misc_feature (459)..(459): n is a, c, g, or t
  misc_feature (492)..(492): n is a, c, g, or t
nggttcagtgcctgagattgatgttccgtcctacctgcctgacctgcccggcattgccaacgacctcatgtacagtgccgacctgggccccggcattgccccctctgcccctggcaccattccggaactgcccaccttccacactgaggtagccgagcctctcaaggcagacctacaagatggggtactaacagcaccaccactcacccccaccgcccccaccacctcccccagctcctgaggtgctggccagtgcatccccactcccaccctcaaccgcggcccctgtaggccaaggcgccaggcaggacgacagcagcagcagcgcgtctccttcagtccagggagctcccagggaagtggtcgacccctccggtgtccgggccactcngcnagagnccanccgccaagcngggggcancggcaaggccaactgcgcagcgtgaaggagcgaaagcnggagaagaagaagcagaaggagcaggagcaagngagagccacgagccaaggctgcgggacttcgatcgtgcggatgctcttgcacacaagtctgcgtcattgaggtcgacaacgggcatcctctgggaaaggacctggggcatggtagacggggcccacgagaaggagcactttgcaccgcgtagtcagactaccagtccctgcctctgccgccaccgcagcagccacaggacagaggaggacgaggaacgactgggaatgcgtagcggggcttccagtgacaccttcaccccgccagacccagacatgggccatgtgctctgacatggacacagccaggacaagactgctcagacactgcttgcctgggtgggggtgataggaaccagtcatctgtgacggagaccagcttcaaggagcggaaggactggcgctgaggcaacacagctggggtggggacttcagtctgcctgtgctccagtggggggactggctccacccagcatacgccacggttcttcttaaa

SEQ ID NO: 509664 - DNA, 609 bp, Homo sapiens
  misc_feature (1)..(1): n is a, c, g, or t
  misc_feature (391)..(391): n is a, c, g, or t
  misc_feature (394)..(394): n is a, c, g, or t
  misc_feature (399)..(399): n is a, c, g, or t
  misc_feature (403)..(403): n is a, c, g, or t
  misc_feature (413)..(413): n is a, c, g, or t
  misc_feature (421)..(421): n is a, c, g, or t
  misc_feature (459)..(459): n is a, c, g, or t
  misc_feature (492)..(492): n is a, c, g, or t
  misc_feature (509)..(510): n is a, c, g, or t
  misc_feature (515)..(515): n is a, c, g, or t
  misc_feature (519)..(520): n is a, c, g, or t
  misc_feature (600)..(600): n is a, c, g, or t
nggttcagtgcctgagattgatgttccgtcctacctgcctgacctgcccggcattgccaacgacctcatgtacagtgccgacctgggccccggcattgccccctctgcccctggcaccattccggaactgcccaccttccacactgaggtagccgagcctctcaaggcagacctacaagatggggtactaacagcaccaccactcacccccaccgcccccaccacctcccccagctcctgaggtgctggccagtgcatccccactcccaccctcaaccgcggcccctgtaggccaaggcgccaggcaggacgacagcagcagcagcgcgtctccttcagtccagggagctcccagggaagtggtcgacccctccggtgtccgggccactcngcnagagnccanccgccaagcngggggcancggcaaggccaactgcgcagcgtgaaggagcgaaagcnggagaagaagaagcagaaggagcaggagcaagngagagccacgagccaannagggnaccnnaagccggacccccccaacaagctggccatgaggcgcaagggcatccccgggaaaggacccggggctggtgaggggcccgnaggaaccca

SEQ ID NO: 509665 - DNA, 403 bp, Homo sapiens
gcacctcgtacagatacgctctcccgcgtcacgtccgccaggacttgaagtcctgagcgctcaagtgtgtccgatggtctagagaaggccatggaggtgccgccaccggctccgtggatctttctctgtagagcatagagcctatttccccgagtctttgctgtcgaagctgtgactgtcgattcggaagtccttgaggagcgtcagaaacggcttgcctacgtaacagagccctatgacccggaatctggatgggaccgacttcgggagctgataggcaaagatgaacagtatagaatttcctaggaccttgctaatatctgtgagacggcagctacagcaggcatcattggctgggtgtatgggggaataccagctattatgcatgctcaactacattggg

SEQ ID NO: 509666 - DNA, 144 bp, Homo sapiens
tcaaggtttatttcttaaaactgaatcaaggagaagctctcagcggcttgaaaatgacaagattctgcagatcattacggaatagataaaaacagagaataactgaaactgaaattcacggtcgaactgctttaaaaattaaga

SEQ ID NO: 509667 - DNA, 101 bp, Homo sapiens
atcaagaagattggacagcgtgggtatcgaggcggacgacgaccggctcaacaaggttacaaggaagctgtaaggaataaaatgactcccatgaagacgta

SEQ ID NO: 509668 - DNA, 375 bp, Homo sapiens
aacgccacataacggcttgactgcttgatgtggatctgcatgccagacatggcgaatccggacataaaatacatcaatcaagagagtaccactcacactgctacacctacaccgatggaagaactggggacagatttttacaaagttcagagaggctgagatgccctttcattctgtgtcatcagaagataatctgccaacgattgaatgccagaatgtttgtgctttaatttttcttcataagcactgcctagaaatgagtcaaaagcagatgctaggaatcaaagttgagctctctactcatttaaaattctaaagaatgctgaaaaattccagttcagaacagctgcatttttcttgagtgaactcatgaca

SEQ ID NO: 509669 - DNA, 298 bp, Homo sapiens
gggaggagggggtggggctaactatgttagtagctattttttttttaacagaacttcacagagaaatgcagtggtctggactccaggtctggtctgtcccgtgggcaagtaaatgcggtacggtcctgatcccgctgctataagaatgcttggtgaaaggatgggagtatgattaaaatgtggttgtcccccaaatgctgggagtagtgatgtgtggagggaaaaaatccagctgagtgataagggctgagtgtggagagaaatttctgcagtttaaagcagtcgtatttggtgatgg

SEQ ID NO: 509670 - DNA, 406 bp, Homo sapiens
  misc_feature (144)..(144): n is a, c, g, or t
ccattacaggagctccccagcgcaagcctgctcagtggctcggtagtcccagctgcaggcctgaggtgtacatagtcttcccggccatattaaccacacagcctgagcctgcccagcctcggctgccagaggtgccggttgcantcaggaccgttgcccgggccgtccttgcctttttcctttcttttttcacacatctgggtaccccagggtggctgggcttgggctatgtgggtggtggtggcggggggtcttgggggcctctacactcccgcccatgcctccctgatgggtggcccagggcggcctctctctgaggagacctcacccactcctcgctcagtttgaccactgtaagtgcctgcactctgtattctattaataaactaaaataaagggaaaaaaa

SEQ ID NO: 509671 - DNA, 342 bp, Homo sapiens
  misc_feature (7)..(7): n is a, c, g, or t
  misc_feature (154)..(154): n is a, c, g, or t
gtttaancctttaacatttggaagcccaaagtaatttcccaccctagaaatgatgcctatcagcccctggcatgggtggctcaccccctataatccccagcactttgggaggctaaggcaggagaattgcttgagcccagcagtttgagaccancctgggcaacatagagagctcctgtctttaaaaaaaatttttttaattagttggtcttgatagtgcatgcctgtagtcccaactacttgaaaggctgaggtggagagatcatttgagctcaggaggttgaggctgcagtgagctatgattgcgccactgcactcctgcctgagcgactgagcaagatc

SEQ ID NO: 509672 - DNA, 248 bp, Homo sapiens
  misc_feature (116)..(116): n is a, c, g, or t
gtcgaggtaccaacaggctggaaatatttgtggaagcactgtgggggttggggtgggcttggaacacaggtgtgtacagcgtggtggagggaagtttggatcatagtaatcctgtntcactctgttatactctagccaagattgactgtattagatgaaatgtgaggatcttgttcaatcggaaacccccgttacctcctctttttctttctctttctattttatttttttttaatttaaaccttttt

SEQ ID NO: 509673 - DNA, 170 bp, Homo sapiens
cgatcgtatagatagctagctagatagatagatagatagaggcagccagacagataaaagatagatgatagatatagataggcagacagatgcatagatagctagatagagatagattagatagctctagatcggcctgacagatgatagatggctagctatagataggc

SEQ ID NO: 509674 - DNA, 162 bp, Homo sapiens
ttatttctgtgcattcctgtgattgcattaaggaacaagcgttcgtgtgcaccaccatgcctggctaatttttttatttttagtagagatggggtttcgctatgttggccaggctggtgtcaaactcctgacctcaggtgatccaccctcctcggcttccct

SEQ ID NO: 509675 - DNA, 544 bp, Homo sapiens
aaggaggtcgatggcagatgcttacgtgcagacacagaccgcagctactttgtggaatggatcccacacaatgtcaaaacaaccgtctgtggacattccccctcgtggcctcaagatggcagtcaccttcattggccatagcacaaccattccggagcttttcaagcgcatctcggagcagttccctgccatgttccgccggaaggccttcctcccctggttcacaggcgagggcatggaccaaatggagttcccccaggcttagaaccacatgaacggcctcgtcttttagtatcaacaggtcccggatgccccccccaaaaaggaggaggatttcggttaggaggcccaaaaggaggcctaaggcaaagcccccctcccctcagggttttcagtttccttaaccgtttttctccactgcccccttcctctcccccagaaattgtgtttgctgcccctatcttgttttttgtttttttttttggggggggtttaaaaccgggcctggcccatagtaggcgccccattaaaacttgggtgttta

SEQ ID NO: 509676 - DNA, 129 bp, Homo sapiens
tgagacggagtcttgctctgtccccaaggctggaagagtgaaactatgtctccaaaaaacaagacaaaacaaaacaatccaaaacaaaacaacaacgacaacaagaaactcttcccttctcaggactaa

SEQ ID NO: 509677 - DNA, 201 bp, Homo sapiens
ccggaaggggcttcaaaatatcatcaaaagccccccccccatagaacaaaaaaaaccaaacaaataaagccccctaacccccccctctccccctctcggtagcctaaatccccccctaaatagaaggcggcaataaaataaaagttaaggacaaagcgcttcaccaatacctttgccctaaactggacaaaaaacaaagaa

SEQ ID NO: 509678 - DNA, 357 bp, Homo sapiens
aaggatatgtaatgacactatcctcagactgaccttcttgcttggcgcatacgaccttatctgctcaagagcttctactatcaccacatattcttatcaatgaccggttggaataattctcttggcaacaacagactgacatacagaataacatgtacttcatccgtaattctttattgaagaaggcctagaaaacaaagtgatatcaagctttgactcttgagatacgtaatttcagaaaacttttcctctgtacttaagttttagaatattcaaataatgtgagaacacattgtactaggaaaattattttcaaaggaaatccataatcccagcactttgggaggcagaagtatc

SEQ ID NO: 509679 - DNA, 833 bp, Homo sapiens
  misc_feature (57)..(57): n is a, c, g, or t
  misc_feature (114)..(114): n is a, c, g, or t
  misc_feature (151)..(151): n is a, c, g, or t
  misc_feature (180)..(180): n is a, c, g, or t
  misc_feature (185)..(185): n is a, c, g, or t
  misc_feature (191)..(191): n is a, c, g, or t
  misc_feature (194)..(194): n is a, c, g, or t
  misc_feature (217)..(217): n is a, c, g, or t
  misc_feature (228)..(228): n is a, c, g, or t
  misc_feature (236)..(236): n is a, c, g, or t
  misc_feature (240)..(240): n is a, c, g, or t
  misc_feature (242)..(243): n is a, c, g, or t
  misc_feature (260)..(260): n is a, c, g, or t
  misc_feature (279)..(279): n is a, c, g, or t
  misc_feature (297)..(298): n is a, c, g, or t
  misc_feature (312)..(312): n is a, c, g, or t
  misc_feature (330)..(330): n is a, c, g, or t
  misc_feature (338)..(339): n is a, c, g, or t
  misc_feature (341)..(341): n is a, c, g, or t
  misc_feature (347)..(350): n is a, c, g, or t
  misc_feature (352)..(353): n is a, c, g, or t
  misc_feature (372)..(372): n is a, c, g, or t
  misc_feature (376)..(376): n is a, c, g, or t
  misc_feature (379)..(380): n is a, c, g, or t
  misc_feature (387)..(387): n is a, c, g, or t
  misc_feature (406)..(406): n is a, c, g, or t
  misc_feature (451)..(451): n is a, c, g, or t
  misc_feature (455)..(455): n is a, c, g, or t
  misc_feature (462)..(462): n is a, c, g, or t
  misc_feature (808)..(808): n is a, c, g, or t
ttctcttgcaaaacttttatgcagaatgagtaaccatttcctattcaagttacagcnatcagaatcagaggttccttacacaacagtagatgcttgagacattttttgaatggngatgtgatttcattctgttcaagaacttatgcggganactgggagtgacttaatttttcaaaagtncaagngaatcngcnccccaactgcttagtgctcaggngggtttctcangggctctnttgngnntggcttgtggtgggttngcacccacctttggggggnttcccattctacttgtgnngccttgtttcggtncgcggggcttgttttagngcattagnngngggttnnnngnngtgttggtttttgacattngggnttnncagtggntctcattttctgtgattgngtgttctgttttgtgttttttgctgcagaatcacattcatatggnagtnatatttngggcacttttgagacatgttcatctgggatgaaaatctgcatgaaccacttctgcataattcaaaatgagtgttgagtgattctagttctcaaatagatagcaaatcaccacctggtgattcgctttcttcatcacaacatgacggtgactgctgagcttgagacatctttgaggtgcctttctggcttcagtaaaaagatgtgagccataaaaatccaaactactcagtttctacttaaaaaaatacaaaatggtgaaatatactaaatgtattatacagatggtttcagctactatcaaaataaataacataatctgactcagaagtctgactgagcttttggncgaaatctgatggaatgtcaaacgt

SEQ ID NO: 509680 - DNA, 118 bp, Homo sapiens
gatagtggagcggttaaagaaatatagaagctagcctataggaaaacagttcaccccatagccagctgctagtagaccatagctaacagccctaacaagaagttctaccagtagagca

SEQ ID NO: 509681 - DNA, 540 bp, Homo sapiens
ggacggcttggtcccaagaggtattccccacagcgcagcatactggctgtggcagatcatggccagactgcctctttaggctgaccctgacccatccctcctcactgggtggggcctccctgcaggaactccagcaactcaagccagggaattagggagagaactctgatctctctaggtctgagtccctagtgggaggggtggctggctgttgtctccacaaaccggaagacttgttctttccccctgctcactctgaggattccaggcagcccagatgagtgggattttccccggcacagcatacccccttcccaaagggacaatcaaagtgcttcattaagcaagtcctggatcctgtgcccctcaactgggtgaaacaccccagtgggtcaccagacaccttatacaggagcatttctactggcatcaggtgggtgccccttaaggacaaagatccccaaagaaagagtgggggccccatcttttgttgttcttcagcacccctttgtgaacatttttaggggtggggagggggcc

SEQ ID NO: 509682 - DNA, 301 bp, Homo sapiens
  misc_feature (11)..(11): n is a, c, g, or t
  misc_feature (15)..(15): n is a, c, g, or t
  misc_feature (17)..(18): n is a, c, g, or t
  misc_feature (20)..(20): n is a, c, g, or t
  misc_feature (23)..(23): n is a, c, g, or t
  misc_feature (25)..(28): n is a, c, g, or t
  misc_feature (35)..(35): n is a, c, g, or t
ataccacccangatncnnanctntnnnngcggtantattcctgcaccgtcgtatgatgcgatggggggacggatcgcggaaggttgtccgggtgttggatgtcccggtccctgcattggagatggcacttaggcaaatccgggtgcgtgattcaagggtgtggggcgagcgactttaggtcgcgaagcaattggaagtggttccaagaaaagcctctaagcttcagtcatacgagaccgtaccgcaaaccgacacaggtgggcgagatgagtattctaaggcgcaatgagagatttcgagc

SEQ ID NO: 509683 - DNA, 380 bp, Homo sapiens
gcggattcccctgtatgggatcatgtctacagattcagctgaccctattctagtggatgagcagtagattctagcctctaacagaggcacattgatggagctagggatctctcctatagtcacgtctggcctaataatgcaactctaggctggcgccaaaataattgaagtaggagacaccccaaaagaccgagctctcttacaacggagcccaaaagttatatggcatgatcattactatcggccagtctatcgtgtatgtaatgaccgggaatgtatggggacccttctgacatgggtgctgaaatttgcctgctactcaccattcagctctatgtatgctggcttaattgtcctacttaaggatgaactcctgcacg

SEQ ID NO: 509684 - DNA, 390 bp, Homo sapiens
actgatccaccttcctcagccagcgtgcactaccataccgggctatgttttaataaattgtttggtagagacaggttctcagttgttgcccagtctgatctcagactcccgcactcaatcctctcgcctcagcatcccaaagtgctaggattgcaaggcgtgagccactgagcctgatcaagacaaattctccaatcaggtgatatagggtggtatactataccaccccgggcacggaattcaagggtttgagacgagtgagcatgcctcacgaagcaattggaagtggttccaagaaaagcctctaagcttcagtcatacgagaccgtaccgcaaaccgacacaggtgggcgagatgagtattctaaggcgcaatgagagatttcgagc

SEQ ID NO: 509685 - DNA, 100 bp, Homo sapiens
ataaattttttccttcaaaagtatacacatgtatactttgatttcaactgccaccaaatgaaaaccatttgttttcctattttaacttggcccttatgag

SEQ ID NO: 509686 - DNA, 305 bp, Homo sapiens
gattcagttgtcaaaatccaagagtgcaatatcatgctgggtgcggtggcttatgcctgtaatcccagcactttgggaggcatggtgggtggatcacctgaggtcaggagttcgagtccagcctggacaacagggtgaaactctgactgtactaaaaacacaaaaattagccaggcatggtggtgtgcacctgtagtcctagctactcggggggccgagacaggagaatcgctcgaacctgggaggtggaggttgcagtgaaccgagatcatgccacctcactccagcatcagtaacagaatgga

SEQ ID NO: 509687 - DNA, 465 bp, Homo sapiens
  misc_feature (105)..(106): n is a, c, g, or t
  misc_feature (150)..(150): n is a, c, g, or t
  misc_feature (210)..(211): n is a, c, g, or t
  misc_feature (291)..(292): n is a, c, g, or t
ggggcgcttttttgggccagattttccttgtttcccgtggccaaggggttttggggggaaaaaattggcaaccccccccctttcccttcaaagggggagggcccnnggggttttttttgggggccccctttccctcccccccgggggggngggtttttttccccccctggccttaaaaaaagctttttttggggggggtttaaaaatttnnccccccccccccggggggggcttccccccctggggaatttttccagggcccccttttttgcctttttttaaaccccccannccctgcccccccccctttggggggggggggtttttccccggttccccctccgggggtttttttgccccccttttaaaacccccccccagttttccttccccggggcccgggccccccctgggggtccccccaggggtttttttcccaaaaaaaaaaattttttttggggggga

SEQ ID NO: 509688 - DNA, 692 bp, Homo sapiens
  misc_feature (7)..(7): n is a, c, g, or t
  misc_feature (61)..(61): n is a, c, g, or t
  misc_feature (77)..(77): n is a, c, g, or t
  misc_feature (87)..(87): n is a, c, g, or t
  misc_feature (92)..(92): n is a, c, g, or t
  misc_feature (95)..(96): n is a, c, g, or t
  misc_feature (99)..(100): n is a, c, g, or t
  misc_feature (102)..(102): n is a, c, g, or t
  misc_feature (119)..(119): n is a, c, g, or t
  misc_feature (123)..(124): n is a, c, g, or t
  misc_feature (132)..(132): n is a, c, g, or t
  misc_feature (182)..(182): n is a, c, g, or t
  misc_feature (185)..(185): n is a, c, g, or t
  misc_feature (208)..(208): n is a, c, g, or t
  misc_feature (230)..(230): n is a, c, g, or t
  misc_feature (238)..(238): n is a, c, g, or t
  misc_feature (240)..(240): n is a, c, g, or t
  misc_feature (245)..(245): n is a, c, g, or t
  misc_feature (248)..(248): n is a, c, g, or t
  misc_feature (271)..(271): n is a, c, g, or t
  misc_feature (285)..(285): n is a, c, g, or t
  misc_feature (297)..(297): n is a, c, g, or t
  misc_feature (301)..(301): n is a, c, g, or t
  misc_feature (315)..(315): n is a, c, g, or t
  misc_feature (319)..(319): n is a, c, g, or t
  misc_feature (337)..(339): n is a, c, g, or t
  misc_feature (343)..(343): n is a, c, g, or t
  misc_feature (348)..(348): n is a, c, g, or t
  misc_feature (350)..(350): n is a, c, g, or t
  misc_feature (361)..(361): n is a, c, g, or t
  misc_feature (363)..(363): n is a, c, g, or t
  misc_feature (371)..(371): n is a, c, g, or t
  misc_feature (374)..(374): n is a, c, g, or t
  misc_feature (389)..(389): n is a, c, g, or t
  misc_feature (394)..(394): n is a, c, g, or t
  misc_feature (397)..(397): n is a, c, g, or t
  misc_feature (403)..(403): n is a, c, g, or t
  misc_feature (405)..(406): n is a, c, g, or t
  misc_feature (413)..(413): n is a, c, g, or t
  misc_feature (415)..(415): n is a, c, g, or t
  misc_feature (418)..(418): n is a, c, g, or t
  misc_feature (424)..(424): n is a, c, g, or t
  misc_feature (462)..(462): n is a, c, g, or t
  misc_feature (496)..(496): n is a, c, g, or t
  misc_feature (520)..(520): n is a, c, g, or t
  misc_feature (522)..(522): n is a, c, g, or t
  misc_feature (533)..(533): n is a, c, g, or t
  misc_feature (536)..(536): n is a, c, g, or t
  misc_feature (558)..(558): n is a, c, g, or t
  misc_feature (560)..(560): n is a, c, g, or t
  misc_feature (563)..(563): n is a, c, g, or t
  misc_feature (576)..(576): n is a, c, g, or t
  misc_feature (591)..(591): n is a, c, g, or t
  misc_feature (615)..(615): n is a, c, g, or t
  misc_feature (692)..(692): n is a, c, g, or t
tacagancccaaatagttcttcctcttttgaaggttacacttgtaaatctacactcttggntcaatttatcactgtncaaataaggnggggnggnngtnnanactggtccacagaatgnggtnngcctgggnggggcaaaacaagtattttcaagacataacaggccattacatcttaatangcngccccaaattcaaatatattgtngacaataacaaatacagatgangacatttngngtaangcncaaacctttagcatctaacaagngcactctagttccngcatctatgggngggngggatcctccattnacanatacgacatgggtgggtnnncctnctctncngcttccataangntctctggnccngtgattacgtaatgngggtngtngggggngnngcttccncngtntcattngtccaaccggctccggctcaccttcactgggaattgtnatgatgcacattaccaacacagtgttcggggganatgggtgaacatacctttttttcncncttttcaaaanagnaccaataacaaaaccccataangngtnatgcgctggttcnacatcaataccagcnttctattatactgattataaactngatgtgtttggtgtcagcacaacttaaacaaaaagcaaaaaacaaaaccaaaacatcacaatgaaatcctagaaaan

SEQ ID NO: 509689 - DNA, 109 bp, Homo sapiens
tggtagtatataatgtgtgggacgatagttttagcattggagtaggtttaggttatgtacgtagtctaggccgtatgtgtggagatgaggctagtagggctaggctacg

SEQ ID NO: 509690 - DNA, 505 bp, Homo sapiens
tgcttctctcagatatcatcccatgtaaagaagattcccatccctttctcccgtctcacccccactatttaagagagtggtagtgtcactatggaaagcttcattgggtaaatcttcaacctttggaccaagggagtggtacattaactgagtaaatatgaataacagacttatctattttgatagttggtttaggaaaactgtcatgtgacaggatgtaatttttaaaaatattttggagtttttaggattataatttttagccataaatagctaattcattgattaaataaatcatctgaggtaaaatgttgtatcagcagataccgtgctctaaagacacgggcctgtcttcagaaaatatgttataatgaaaatattctattttcagtgactttctggctgatcaagctgcatgttatgttcaggcaatacagtggattttgcactattactatcatggagttcagtcctggagctggtgagagaataaaaacaaaaaaaa

SEQ ID NO: 509691 - DNA, 167 bp, Homo sapiens
gtaccttgggagaaaggaacatgacattttgtctcagcttcagaaaacttcaagtgtctccatcacagaaattatcagcccaggaaggacagagttagagattgaaggagcccgggctgacctcattgaggtggttatgaccattgaagatatgctttgtaaagtac

SEQ ID NO: 509692 - DNA, 173 bp, Homo sapiens
  misc_feature (29)..(29): n is a, c, g, or t
  misc_feature (130)..(130): n is a, c, g, or t
  misc_feature (162)..(162): n is a, c, g, or t
gaaataaagcatattcaaatagagaggangtcacagtatcttttgtttgcagatgacatgatcctatatctagaaaaccccatcatctcagcccaaaagctttttaagctgataagcaacttcagcaatntctcaggatacaaaatcaattgtgcaaaaccnctagcattcct

SEQ ID NO: 509693 - DNA, 541 bp, Homo sapiens
caaatttgttactaatttttatctgtatgaagaattaagtttgtttataatgatattcctgacaactacattgcaagctgctttcatagctttgttaacatgtaggccttcgttatactctttattattattataatttttaatcatttaaaatgtttatgattgtggataatacttctctaatagggaaatgtttacagcagaggagccattacagccaggaacttatgtgtgggctacataaaatttggtgttgagggagttttagatgatacttggtggctttctcaggatggtgtaacatgggctagatcagagtcttattaattcccaaatctgttcctaattaattcttcctccaccccacaaaaagccgataaggagataactttgtcaggaatctgtgtacttattgctgtgtcaatttaggctttcagtactgtactatataagggattccaagaggaaattttgtaatctctggattcagaattttcttttttttttttttcttcttttcttgagacagagtcttgctctg

SEQ ID NO: 509694 - DNA, 886 bp, Homo sapiens
agaagtgtgcctgcctctgatgctgtccccagtgccgcgcggctgctcctccatcctattgatacagtattgtgcatgctggtgttgtatttctatacggtagcttgacatttattaccttacactgtaggtgttatgtatcctatgacaaaaaaacttaagacttcaattttttttttaaacttcttttttttaatttaattttttcctttcaggggtaaagtttgctttaccaaatagtgattgtaacagattgatctgtttggatgttgctatagtgacatgcagttctatattttgtttttcaggggggaggggacaaaagaaacaccagtgttagcttactcttaataatgtctggtgttgtcatggtgaaactataactatcgcagtgcaggagaacgcgcggacgttctcagaacgcgcctctgtgctttcttgtcatgttatgcagtgaaaatatttttaaggtctaatcaagtgattttttcccccccaactccgtgtttcgctaaggaattatttcgcacacggaccattcttagcagtttcctcagtgatggaatattcatgaatgtgagtcattatgtagccgtcgtacattgagcaaaataaacttacaggatctgaaaacaaaaaacaactcaataaacatcacaaccacaaaaaaaaggggggggggcaaaaaattcccccggggggcccattagccttccccttttgggtaaaaaggggcccaagaggggggttaaagagagcacggggcggttaacaacgcggatgggaaacgcgactggctttgggaagaccctctctggggccatgtggaccaccacgagtgccgggaaaaaataggtttggtaaccgctttgggaatgtcgattaa

SEQ ID NO: 509695 - DNA, 150 bp, Homo sapiens
tggagggtcctcgtcgggggacagccggccccgggtagaaggggaggatgcgttaccacatgcgggcagaatgtccaggatggcccggcgactacctccgcgcaccgccaaggctgaacgctggctgaacactcacggaatgactgacac

SEQ ID NO: 509696 - DNA, 1031 bp, Homo sapiens
  misc_feature (366)..(366): n is a, c, g, or t
  misc_feature (462)..(462): n is a, c, g, or t
  misc_feature (472)..(472): n is a, c, g, or t
agcggattaccgccatatctccggatggggtatggcgtgtttgacgccaccgaggctgatccatattggagttctcgtctgctaccatacctctggatgcatgggtctagcgcattcccatatagtgtatccgatgaaccatctatctcacacagctggctgctgccacgcattcttcaccagtggtagtgtaccgagactgtgccacgtactgcggcgtgcttgtactgctcaaatgcaggcacagagtgtcaggactgtgaacaagccggccgcggccgaatccgcgtacatcgatgtcgtgtctcgcacatggagtccctatcatcgttctcattgatcccctcattgttacaggaaaagtcnacatcttccctgtcgaacatgcttattcaggaacaagtgtctactctttgtgtacttctccatggttctcgcgttcgctctctacaggccacaggnccgagaatgnaccacacggagtacctggatctgggtggcgcgattatccgcgcttgtggtaactcgctcggtttgtgctatagaaccgattgtgtttcactaccttgagagtaaaacctccgaagatgatactcgggaagagtaaatcccaccgcaacgcgattcgcactagaatcaccaattggcatgcgagcgtctttggtcgcgcatgtctattcctggagccgtgcgcctaagtacgttcacgcatggcacatgtctcaagtgcgttcattctatagattctcgtcccaaggtttgctgtgttggcgtaaaaaacctatacacgtgcgtacgccatggaataccctatctatgtgcagacacgcggacgtaaaccagggcgaccgtgtgcatgggcaccgaatctacctttgttgcaccgaatacttttacccaaccgtacaccgtttccctttatctaaacacagctcacagagccgtgtaaacctgtttacgccacctcccttgtgaggtttgttacttaaccaaaaattcccgtttgtctaggaatttccatctcaatggaa

SEQ ID NO: 509697 - DNA, 1010 bp, Homo sapiens
  misc_feature (865)..(865): n is a, c, g, or t
  misc_feature (867)..(867): n is a, c, g, or t
  misc_feature (917)..(917): n is a, c, g, or t
  misc_feature (946)..(949): n is a, c, g, or t
  misc_feature (962)..(962): n is a, c, g, or t
gccgccaggcacccggccggctgagagacgcaacatctgcccacaggcaaagctgccaaccctaagggggtcgacgaacacccatgcagcacccgcgtctgccctcaggcccaagccccgggggcggacccgggcgacaaggcggccggaacgaccagaccggagcccctgggcgagatggtgcggaacgagcactggcccagccggaccccctcgtggcctcccacccggactccatgcttttcccctgtggggatctaccgggtctgctcagaggaaaaatgtccacactgtgattatttcacttttagatgccgatgatttgtttttgtagttctaaatcgggggtagcagctggactacccacgttctcacacccacctgtccgccctgctccttccctggctgcccttggccctgaggtctgggggccatcgcagcatgttggcttgaggacgtgaggaatagttagagccctcaagtcctgaagaacgggctgggccagaccacggtccgggctcaaaggaaagggggtcccagtgggagggtgcaggctagacatctgtgtttcaagctggggctcgccatgccgcggggttcatacggtcactggctctccaagtgccagaggtgggcaggtggtggcactgagcccccccaacactgtgccctggtggagaaagcactgacctgtcatgcccccctcaaacctcctcttctgacgtgccttttgcacccctcccattaggacaatcagtcccctcccatctgggagtccccttttcttttctaccctagccattcctggtacccagccatctgcccaggggtgccccctcctctcccatccccctgccctcgtggncnagcccggctggttttgtaagatactgggttggtgcacagtgatttttttngttgtaatttaaacaggcccagcattgcnnnnttctatttaatgnacatgagataatgttacagggcctttgaagtgataagcacattgcagg

SEQ ID NO: 509698 - DNA, 179 bp, Homo sapiens
ccttcgcgttcttcgtcttcacaatatacccttatgaatgacgacgacgaaatgatttcacgagggtcgaactcatacgccataaattgcgtatcactgatggataggtcggtacccttgaatactttgatacgcttatagagccgttctttgctattagtgccattactgactggtat

SEQ ID NO: 509699 - DNA, 674 bp, Homo sapiens
tgatgcgggctggcctgctggagtgctgcacccggctggggcgctgatgcggcgcctggaccttcgctgcgcgacttcgggggcgtcggcctgagttgtggactcctgcgatgcagctcctgaatggcgctctgggcactggcagtgggcctgctgctcatgctgcttacctcgtcctaagtgatccacgctgcatgttcctacaaagaatggtcagctggtcctgacgtcaccatgtgagatttgtgaccttggacctgggacagcagccagcctcggaggacgatcgcccggcagaccgcctgctgtgcgtgtagaaagggtgcagatctgccgtgcaccacgagagcccgagccgcctgtgtggacgcaagaatcatcaagaccaagcagtggtgtgacatgcttccgtgtctaggagggggaaggctgcgacttgttaaatcaaccggtcaaggctgtgacagtgcactgcatgccggctgggaggataaagaccaccacggtctcctgacaaacacagcccctgaggggcccctgggagtggccttggctccctggagagcccacgtctcagcaccagttctccactcgcctcggacttcacccgttctctgacgaccgaccatccgtatcctgtggtccgtgaagacggctcaggcttggcatctgag

SEQ ID NO: 509700 - DNA, 176 bp, Homo sapiens
atagagatttattttttttaaaacattcccctcccccctcctttcccccagagtgttggattgttccaggccctccagtgggctgatgttgggccccttaggatggggctccccgctcctttttcctgtgaatggaggcaaagccccccaataaagtcccttttgggcttttttta

SEQ ID NO: 509701 - DNA, 192 bp, Homo sapiens
tatggcggccacacgcacggagaaggctctgggcagaatgagagcttcatcaggcagagctaggcatgtatgctgagctagcaaagtgcacaagccactgaaacatcctgagccacagtttcctcatatgtaaaatgtaaagattaggatatatacactaaaatatagtcaacccttctccggtggcgtggt

SEQ ID NO: 509702 - DNA, 346 bp, Homo sapiens
  misc_feature (7)..(7): n is a, c, g, or t
aggctanaaggatagagatatagcttacagctgaaagtatgtacatagagatgaaataaagtaggcaagggagagtctcaaacacagtgggtctcgtagttgtaatgggagtttagatcagtatcagctgggtacatgggacagagtatggccaaggactggagagagctggggtgtttggtgctggagtgtggacttcatttatggaaaacttcatctagaggaaaacaggaggaaaagcagaggaggacagagagtgggacctatgtaagaaggtcttaatttctacacccgggtgttgtgaaggtagtgcaaccaagagggaaagaagaaatgagtgacctgg

SEQ ID NO: 509703 - DNA, 414 bp, Homo sapiens
atgtgtccactctcttctgccccccgccatatttggcgaggacggacaactacaatcggtaagaaactgcacccggcagcctcactccccagcagagcctgtgtctcaccccctcacagcacagacctgcatctgcatagagctggcctcactgtggcgcaggctccggggcgagtccctgtcctgtcaggaagacggggtcctggtttgagggccaccactgcagtcctgctaggtccgcttcctgcccaggaaggtgcctgcacatcagaggagagaaatacacgtctgataagacttcatgaaataataattatagcacagaacagtctggtggtctcttctcttccactgatttttccgtcaatgacattatacctttattacctctttattctattacctctataataa

SEQ ID NO: 509704 - DNA, 681 bp, Homo sapiens
cagtggggcagtcatttcttaaagctctgaaatgatctcctttgactccatgtctcacatccaggtcatgcttatgcgagaggtgggctctagctatggccttgggcagctctgcccctgtggctttgcagggtacagcccccatcaaggggctttcacgggtttgtgtcgtgagtctgcggcttttccaggtgcacggtgcaagctgtccatggatctaccattctgcagtctggaggatggtggccctcttctcacagctccactaggcagtgtcccaatggggactgtatggggcctctggccccacatttgccttctgcactgccctagcagaggcctctccatgagagctccactgctgcagcaaacttctgcctggacacccaggcatttccatgcatcctctgaaatctaggtggaggttcccaatacttgattcttgactttagtccacaggctcaataccacatggaatctcctaaggctttgaggcttgcaccctctgatggcaccagcccgagcagcatttggcccctttaagccacagttgaagcaactgaacaaagtgtaccaactccctaggcagctacacagcaggagggccctgggcccggctatggaatcatttttcctcctagactctaggcctgtgatgggagcggctactgcacaggtctg

SEQ ID NO: 509705 - DNA, 739 bp, Homo sapiens
atggtgtaagaggagttcggtcttatgcccagacggagggcagggaggctatctcggtctcacggcaaccgttgcctcccaggttcgaagtgagttctcctggctcagcctcccaagtaggctgggattacaggcgtgcaccagcacgccgggctaaattttttggtatttttagttagagacggggatttctctatgtggtcaggctgatctcgaactcccgacctcaggtgatccgccagggctcagcctcccgaagtgctgggattacaggcgtgagccacttgtagccgggtctcagtggtctgacgccaccttctggacagtccctccttgagggcagaaaggagtcccaggcctggccctcagggacgagggcccagggaagagtgtatggggggagcaggggaggggagggtgtgagaaggctgaactggagtcaagcagccttcccatcaaatcagcaaaactgtggaagctctccagcgcaaaatgctgggagaaggagctggagggtgagtctttgcggacctctctctactctcaggcatgtctgttgtccttttggtccatctatggctgtctgtcgtcattctgcacggttctctgtctcaccttcatcagtctggggccggtccacgaatgcgtaatcttggaggtgggtaggcggggtgattccgtccccaggactgagagggggacagtggtaaggtcccaggaggtaaagcgggggtggcgg

SEQ ID NO: 509706 - DNA, 264 bp, Homo sapiens
  misc_feature (16)..(16): n is a, c, g, or t
  misc_feature (132)..(133): n is a, c, g, or t
  misc_feature (151)..(152): n is a, c, g, or t
tgtaggactatataanctactactgtagaactgccctttccattcttttaaatccggtgaaaaatggtaatatccacaatatatgatatataccccttaaatgaaaaaaatgcctctattgcagatatttgnngtagttttcttttttaanntaatcagaaaccccacttccattgtattgtctgacacatgctctcaatatataataaatgggaaatgtcgattttcaataatagacttatatggcaggttgtcgttccggtt

SEQ ID NO: 509707 - DNA, 142 bp, Homo sapiens
accgagcggtacagcgcttcgctctgctgcgcgtcggcggtggcggcgtcggcggtggaggcgacgcggccgaacaggtcggcctcgtaaggacaccgtgccttgcgcgcgccaggtggtcaccggctgcgtcgacgtgccg

SEQ ID NO: 509708 - DNA, 333 bp, Homo sapiens
cccccccccggggaaaaaagggggggggcgggggagcccctttttttgatggggggcccggtgttcccgtacccttttaaaactggggttagggcgttttggccccgcccggattaaggaacactttccgtaaacccccagggatttttttggggcccccccccttttccagggttggggtgggaatttttttcccccccctttttttctccccgggggggggttttgtacacattttccctttgggggggggcgggggaacaccaaccccctttttcggggggaaaagtttttttttgggtttttaacccccaaaatttgtttaagggggga

SEQ ID NO: 509709 - DNA, 720 bp, Homo sapiens
gtattttaatagagatttcagatgaatctgtagatagctttgggtagtatgatcattataaaaatatgaattcgttctattatgagcatgaaatgtctttctattggtttgtatccaatttgatttctttcatcagtgttttgtagttttccttatagtgttgctttcacctccgttggttaaatttattcctaggtcttcttttttccagtagctattgtaaagtgggatagccttcttgatttctttttaattagtttgctctttgtgtatagaaatgttactgattgtttatgtggattttgtatcctgcaacgtttaatgaatttatcacgttctaacaagttggtagagtctttagttgcttttcagtatataagattatgtctgcaaacggagatgatttgactttgctccttttcaatgcagatgccctttgatttctctcttgactagttgctctggctaggacttccagtgccagtgtggaataagagtgctgaaagtaggtatgcttgttaggtaccagtactgggaggcaaagcttacagttgttatccccatttagtataattgttcactgtcagttagtcatatataaccttaatcatgttgaggtactttcttgtctatcctaagttattgagaattcttattatgaagggatgatggaatgtcatcaaaatgctttacttggcatctatttagaggaatcatatg

SEQ ID NO: 509710 - DNA, 857 bp, Homo sapiens
  misc_feature (33)..(33): n is a, c, g, or t
  misc_feature (44)..(44): n is a, c, g, or t
  misc_feature (65)..(66): n is a, c, g, or t
  misc_feature (72)..(73): n is a, c, g, or t
  misc_feature (88)..(89): n is a, c, g, or t
  misc_feature (133)..(133): n is a, c, g, or t
  misc_feature (142)..(142): n is a, c, g, or t
  misc_feature (147)..(147): n is a, c, g, or t
  misc_feature (235)..(235): n is a, c, g, or t
  misc_feature (246)..(246): n is a, c, g, or t
  misc_feature (252)..(252): n is a, c, g, or t
  misc_feature (255)..(255): n is a, c, g, or t
  misc_feature (260)..(260): n is a, c, g, or t
  misc_feature (316)..(316): n is a, c, g, or t
  misc_feature (320)..(320): n is a, c, g, or t
  misc_feature (348)..(348): n is a, c, g, or t
  misc_feature (361)..(361): n is a, c, g, or t
  misc_feature (370)..(370): n is a, c, g, or t
  misc_feature (379)..(379): n is a, c, g, or t
  misc_feature (384)..(384): n is a, c, g, or t
  misc_feature (417)..(417): n is a, c, g, or t
  misc_feature (426)..(426): n is a, c, g, or t
  misc_feature (591)..(591): n is a, c, g, or t
  misc_feature (593)..(593): n is a, c, g, or t
  misc_feature (596)..(596): n is a, c, g, or t
  misc_feature (673)..(673): n is a, c, g, or t
  misc_feature (707)..(707): n is a, c, g, or t
  misc_feature (726)..(726): n is a, c, g, or t
  misc_feature (728)..(728): n is a, c, g, or t
  misc_feature (754)..(754): n is a, c, g, or t
  misc_feature (775)..(775): n is a, c, g, or t
  misc_feature (797)..(797): n is a, c, g, or t
  misc_feature (854)..(854): n is a, c, g, or t
tctcatttaacttttttaatgggtctcaaaaanctgtgaaaaanttttggtcaagttgtttccannaaaaannactgattttaaaaannaaaaacttaaaactgccacacgcaaaaaagaaaaccaaagtggnccacaaaanattcncctttccttctgaaggttttacgatgcattgttatcattaaccagtcttttactactaaacttaaatggccaattgaaacaaacagtnctgagaccgtncttccnccnctgantaagagtgggggggcagggattagggataatattcatttagccttctgagccttcngggnagacttggggaccttgccagccccagcngccttcttgtccnctgctttgntgacacccnccgcnactgtctgtctcaaatcacgaacagcaaagcgncccaaaggnggatagtctgagaagctctcaacacacatgggcttgccagggaccatatcaacaatggcagcctcaccagacttcaagaatttagggccatcttccagctttttaccagaacggcgatcaatcttttccttcagctcagccaacttgcatgcgatgtgagcgcgngnggnaatccaatacaggggcatagccggcgcttatttggcctggatggttcaggataatcacctgagccgtgaagccagcngcttccattggtgggtcatttttgctgttaccancaacgttgccacgacgaananccttgacagacacattcttgacattnaagcccacattgtccccaggnagagcttcactcaaagcttcanggtgcatttcgacagaatttacttccgttgtaacgttgactggagcaaaggtgaacncca

SEQ ID NO: 509711 - DNA, 237 bp, Homo sapiens
caggagaattgcttgaacccgggaggtggagtttgcggtgagccgagattgcgccactgcactccagcctgggcgacagagcaagactctgtctcaaatcaaaaaaaaaaaaaaaaggtcccccttggtgtttctttttacctttttctttaccctttaacttgtcgagggccctttagttggttcccatatcttggctatggaaaccggtgttgcggaaaacttggggtgcaggca

SEQ ID NO: 509712 - DNA, 291 bp, Homo sapiens
cagactcgtggtctttgatttctcatttagatgtgtgacgaagatactccacctgtaaggcaagtatgcaatgcacgaagccgtgtatttgcgagggctccagtttgggcatattgtaccgtgtgcgcgtaaagcttcacacagaggttcgggcagcggatgtaactgtgggatgcactgggtacaccacccagaaacagggcttttggcacatttggaggtttctacccgacactattggtttactcaacatgcaggtggcacttgggcagggcaaggtcatcttcttat

SEQ ID NO: 509713 - DNA, 640 bp, Homo sapiens
ggtgactggctgctctgaaaagccatctttgcattgttcctcatccgcctccttgctcgccgcagcgcctccgccggcgcctcctccgccgccgcggactccggcagctttatcgccagagtccctgaactctcgctttctttttaatcccctgcatcggatcaccggcgtgccccaccatgtcagacgcagccgtagacaccagctccgaaatcaccaccaaggacttaaacggagaagaaggaagttgtggaagaggcagaaacactggaacgagacgcccctgctacacgggaatgctaatgaggacacacctggggagcaggacgtgctgaaccaatgacggtagaccgaagaacgacggaaagacggtgggcgcaggacaccgacggaggacggaccacgacacgaccggtcgactggtgaggacaaaggattggcagatgcaagatgaggaagctgagtcagctacgggccaagcgggcagctgaagatgatgaggatgacgatgtcgataccaagaagcagaagaccgagaggcatgacttagacagccaacaagcggaacaagttcaacctaccaaacacaaaaggccgccgtaactattcacctccattcccgtctcaaaagtctaagcgt

SEQ ID NO: 509714 - DNA, 1026 bp, Homo sapiens
ggtgcatgcaataatgcccagctaattttttgtatttttggtagagatggggtttcagtatgttgcccaggctggtctttaacccttcccacctgagccgaggctcaaacaatcctcctgccttggcctccccaaatgctaggattatggacgtgagccaccacacttggcctttatatttttattttagagatgggatcttgctgtgttgcttaggctgggctcaaactcttgggctaaagtggtcttcttgccccagcttcctgagtagctggactacaggtgtgtaacaccatgtctggccttttttcttttttttgataattttttttttttaagagtgggggtctggctgtgttgcccaggctagtcttgaactccggggctcaagtgatcctccccttttgggctcccaaagtgcggggattgcaggcaggagccattgacccagcctggggttctccttaaattggggtatcttcaacactttcagatctttaaattgggggcatgggggcatattctagcaggctcctcctagaaaaagaagagcggaataaactttaaatcacattcagtggcttaactaatgtgggctattattaatttaggagcatattaataaaatggtgaacggggtgttcacaacccagatttcagggtagagggggggcactgggcgccaaggcggtatattcacagcttggggagggccggagggggggaccaccgcgagagaaagactacgaccacacggcgacatgtgggaccccgcgttcataaaagaacagcaatgtggcgccggcggtgggacaccctgtgatgaaccaccagggaggggggggagggaaaacaaaaccgcgcgagcagagtggcgagaagtatgctcaccgagcatgttaaaaaagagagtgatcaacagaacacagggcaacacaatagtgctgagtctgcactcaaacacgcatcttggtttcgtcttctctctttctgcttttctccttcttttttttttcttttcggtca

SEQ ID NO: 509715 - DNA, 93 bp, Homo sapiens
ggccataaatcgccagggtattactatggttcggggaggtattcggtccacttcgacccctggggccagggaaccctggtcaccgtctcccca

SEQ ID NO: 509716 - DNA, 371 bp, Homo sapiens
tccactagtgtaggcccattttggtaaatcacttggctagtttattcagagagctgtgggcatagtagtttttctttctaccttttttttttttaagacagagtttcactgtgtggcccaggctggagtgcaggggtgatctgggctcactgcaacctccgtctcccagttcaagcaattctttcacctcagctccctgagtagtccagcgcctgggactacaggcacgggccaccacgcctggcggttttggaattttttaatagagagggggtttaaccatcttggccaggctggtctcaaactcctgacccgaagggatcggcttgcctctgccttccaaagtgctgggataacaggggtgagccacc

SEQ ID NO: 509717 - DNA, 779 bp, Homo sapiens
gatggtactgaagagcccatgtatactacttctgcagttatccatgtcagaaaattttcagacatgcttgatgctggtttaccactagaaagtgctgagaaactagcatgaaatttacgttgcagggctagcttgcacataatgtgatttagatgaaagagctattgaagctttaaaagaattcaatgaagacaggtgcatggctagttcttcaatcagtttaaagacgagtgatctcttctcgatgttcagaacaaaagtgcctttttcatgtggagtcatgtaagacttacaggcgagagagaaaaacaagggaccaaagtagctagatactagtaaaggaccagatgaggcaaaaacttacaggcatttctgtgggaaagaacaggtctacacacttgatgtgaccactggacacgaggaagtatggaggaccatcctccagattccgtttacttcaggtcagcagggcttctgtagtgcactgagatatttgtgggaaagatcccaagagatctagtttgaggatgaatcttgttccatgtattccgaagaaagcgggacgcgtatatagggactctgtccgtcttaaatggatgtgatccaagttcactggtctcaaagtagaggttcatagcgttgtcactttttgtagcaaaaaaacgcacgtcagggaggctgtttaactgaatttaagtcgggaaattcgtccggaaacatattggggtctggcctcatgcccacaaaggctcgggggccaacccaaaataaccaggacc

SEQ ID NO: 509718 - DNA, 460 bp, Homo sapiens
ggttaccatgttatatggctccccagttatctgactcagtgtaatgtagagcctgagctctgttctatcttgtctgattgctaactcctggctcaaatgcccagtccttatgctctacctggagcaggtgattccagggtatagaggggattcctgatgggacgaatgaggaagaatcaggccttgccccacaattgaggtgagcctatgtatgatgctcacctacatgtgacgtggatcaggcctagatgcatgccattgttcgttccaaagtacctccctctaacttgtggattgtctctgccttggtggatgcctgtgagcagtgaagctatagcctagtaatgtccaaatcacagaaataggatgattgcttggttaaattgttgggtacttaaaggtaaggaagagacgtactgaggcgtcaattctactcatcttgtagaagtgtagcaataat

SEQ ID NO: 509719 - DNA, 476 bp, Homo sapiens
ccccgggggggggcccgttttaaaattaggggttcccccgggttccagaatttgggcccaaaatgaagtgtcctttcctttggaaaaaaaatgtgaatcggtcattatgggaagggcccaaatgggcccttgaaaaaaatgccccccttttgtgtgttttctttgagcccctttccttaaaggagcgggtgaaacccttcaaaaattggggtgccccggtgcccaatttgcccaaaatgggagcccccaattttggttgggggaaatttttttttgccaagccccccttgggagccagtgataataaaagttaaccctggggttattttcccaaaaccgggggggtgatttcctgggtcccaaagcaagggcatgcatgtggggttttcctttcccttttttaaaagtggtcccaaaccacccctttaggttttttgtttggccccttcccttcaaaaaaaaaaattggggcccca

SEQ ID NO: 509720 - DNA, 172 bp, Homo sapiens
ataacatcctggacagtacactccatgcaggtgatggggatccccatacaaggacaaatgccacggattagatcattctccccagatgagggaaagatgcagacaggtggagaatggacatgagatgagaaaacgctgagagaagtggcttaagatgttcaacaagaggcag

SEQ ID NO: 509721 - DNA, 126 bp, Homo sapiens
  misc_feature (20)..(20): n is a, c, g, or t
gagattggtaatcatagtcnaagggcttcccttggttcgccactcatctatttgtaacttggcttctttttttgttctgcttaaaaatttcaattctcgtggtattaccagagtagaaggagagag

SEQ ID NO: 509722 - DNA, 847 bp, Homo sapiens
ccactgcgacgccgctgcactcatacaccttatttcacgacctcactaatatctctgtcgcactacttgccgcctcacatcacatcaggtaagcttacagatgctttgcctgctaaagtggaaggctgaaaggagcataaccacaagagtgctggagagatggatgtgggcggcgtttgttttatgtacttacaaaagaagagctgcccgtagcatatgaatcttcggctcaattagacaaacttgtacagaataaaaagatctttctcaagatactgaccacccccctgaagcggttaataattgaccactcatcaactctcgattttaccacataaatactcacctcccaccagctaacaactgctactgagccctaactccgcattgcgtcgatgtgttatgagggcttagttcatctcctctatcactagcacagttgaatcggtttcatattcttatcgcaccccactgtatccaatcccccatcttctatcttcattatcctcctacctccctaccccgtccaactccaacttccaccccttagtttttgattgccgtctttttctttatttaagttacatcttcgcctttgtctctttccctgcgggttgctggttggagttcttttttctccccgccacctcccatcgatatacgtttgtcccccccccccctccctccattaacttaaatatacttaacacatcaagttacgccccccccgcaacccccctccatatctctagtgtgctgtatattctgttttccggtgatcctgcactttgtgtctcttaccacttactccttctttcctccccccgtatcttaacattttttatat

SEQ ID NO: 509723 - DNA, 247 bp, Homo sapiens
ggatcccccacacacctgagtcactaaaattattttctttaagcatcactaactgtatcagaaataatcacatgggaaaagctttaaaacacaacataggaattgattaaaattttttaaacaaaaactacttgggaggctgaggtagagaggatcacctgatgccctaggagtttgacggctacagctgagccatgatcatagccactcgtactccacgcctggtgcaacagtagcgagacctcat

SEQ ID NO: 509724 - DNA, 307 bp, Homo sapiens
gccggtccagtcggtctaccatactgaccgagatcactattaacgttcgtctttctccctaaactctatgtaaatgaaagaagaaacaaatatatgacatccatgagatagattcagtgtgatagaatcataagaatgtatgttttccctaagtgactaaaaagatacttttaaaaaataaagaattctggccaggccaggcatggtggctcacgcttgtaatcccagctgtttgggaagctgaagtatgtagatgacttgagcccaggagtttgagaccaggctgggaaacatggtagaaccgact

SEQ ID NO: 509725 - DNA, 177 bp, Homo sapiens
gtcgactgacgctgtaccggtaccccctgtatatagcctccacattgactctgtaccggtaccccctgtatatagcctccacattgactctgtaccggtaccccctgtatatagcctccacattgtctctgtactggtaccccctgtatatagcctccacattgactctgtactggg

SEQ ID NO: 509726 - DNA, 461 bp, Homo sapiens
cttatatttaggctgtataccttaccggtgttgtctgtcgttatgtttttactgtagtgtgttgagacaggatctgactccaggctggactgcagtggtgtcatctcagctcactgcaacctccacctcccaggcccaagcgactctcctgcctcagcctcccaagtagctggaactacatatgcatgccactatgcccagctaatatttttacgtgttttttgtggcgatgggttttcgccatgtagcccaggctgttcccaaactcgagctcacgaaatcggaccgacttagcctcccacaatgtggggattgcaggcgtgagccaccacacctggcctgtatctttaagtttatcagtacatcctgcgaaacattggtgttagagcaccccagtcctacaggctacttactattccttaattatctgatcaaacatgtgcctggtaaaggtatgctgt

SEQ ID NO: 509727 - DNA, 523 bp, Homo sapiens
gtggtaaagcctcactatgggtctggcagcatcaggatcacactgacagggggtctcagacaaagttgtattgcatgcaagctgatgcctgtaccattcggtgtcttagtcactaagtgctttccagtggtcatgagtgcgtccattaatatcaatggcaaagtccgtatctttacatgctgcattaaacgcagaatcatttacgggttttccatcaggaaccttataccttctaaacgagtgcacagtagtcttctaagtaggcaggattcagccgttcgacatcagtgatatcattataatcggtcgcatcaggatcatccacattaatggcaatgagttacgagtcggttgccgcttcgtcaatcatagcgcaatatgcctagaactttcacgccaattatttcacctcttgcagataccttgcgtccaagtttcacacacatcaattgggtcattgtcaccacaacagccagtatgtttatcattgtgccctgggtcttcccaagtctgagggatggac

SEQ ID NO: 509728 - DNA, 427 bp, Homo sapiens
  misc_feature (194)..(194): n is a, c, g, or t
ccttaaattctcaatctatccactctacaacatctccacctcacaaccactattgtctcacccaaattcatctccatatgtgctatgatttgaatgtttgtgtccccttcaaactttatatgaaaacatataaaatgtgacagttttaggaagaggacctcaaggaggggagtaggccgtgagagctctgtctncatgaatgggattaatgcccttataagagagcctgagggagtgaattcagcccctttttgccttttcatcccttctgccaggtgaggacacagcaatcctccagaggatgcagcaacaagacaccatcttggaagcagagcagccctcaccagacaccaaatcggccagcccattgatcttagacttcccagcctccagaactatgaaaaataaatttcttttgtttataaaa

SEQ ID NO: 509729 - DNA, 1018 bp, Homo sapiens
  misc_feature (521)..(521): n is a, c, g, or t
ggcctctggcacctggggcagaccgaagcccgtcggagttttccgaccgcgcgctgacggctgctgcgcccgcgggctccccagtgacccgagtgcccgcgctggtgccgcctgccgagctgggaggtggtgacgccatgaccccgtaggtcagagaccccacggctgccgcgccctgggactgcccagcggggcagagctctcgtctctcgcccaatcgatccctatttcggccgccatctgctgtcgctggaggtcccctggttggccatggctgtgtgtcgtggggcaagaggagcttaccgtgatacgtgcgaggttgccttgaggatctaatgatctaagccaatgatactaccactgggctatctcctccgtactgccatagtggactagcccatgcaagctagcagtcaaggtagagtaggtccgctgggagaagagttgactggactacacctccttccggcaccaacgatggctcactcggtcgtggcttggagtaactgtggactgcttantgcgtgggcaggttcaatccgcaggactatctctcgggaactggcggtcgaacatgtctgggacattcggaggagccaacatgcccaacctgtaccctgtgggcccctggggctggctagcacaccgagtgcccccatgtgcggctttgggcagacccgccatctgccctagcaatctgttccttcccgtatgggatgtatccaccacccagggaggaaaccgacgccgtccaggaatgccctcattatccggccatacccagggggcccctgtgccagggtcatgcccaatggcaggcggcccggataaggagtgcccaagggggccctagcctggggcagccatccagtgatctaaccctggtcaaaggctccagtgcacactcccttgggcaagaaggcaagccaagtagccgaagatacccaaggatacccgagggccgggactgtaaaaccccggttgtggcgccactcgccaggtggaaagcaggggacca

SEQ ID NO: 509730 - DNA, 1001 bp, Homo sapiens
  misc_feature (634)..(634): n is a, c, g, or t
gtattaagggtactggagcatatggcagggggcactgcttgagatctgcccatgtctctaccagggccttccagtcggcgaccgcattgagcgtcggtgctggagacagctgggaggctctggactgcacagaggatccaggacggggtcccgcaaacatctccaacccagctgtgcatttggcacggacatctcggcccaacacccggagctgcggactcatgcccaggccaagggctcgatcggatgggcagggtgccctgggactgtgctcagatcttctgcgctgacccaggcagcctgcgcgcatggaggctgccaaggcccgcttccaggacagggcgggacgctcgctgcggcaaacggcaacgggggcatcacggcagaggtgatgatgggcatcctcagagacaaggagagtggtatctgtatggactcgggaggctttcgcaccacggccagcatggtgtctgtcctgccccaggatcccacggcagcccatgcgtgcactttcattagccgcacacgtccagagccgcagtccaggtctagctgcttcaaacctcttcatacttcaggggtgaggggtaggcccaggcccagcgaggtgcatgtgcccccacttttggagcancaagatccctgtatcggactcctgccgccgattccagactcaggtagatcgtcggcataccctctaccgtggacaccaggcagcctggggctgatggagagagatcaggatcgggggcagcagctccagcagaaacagcaggatctggagcaggaaggcctcgaggccacaacaggggctgctggccggcgagtgggccccacgcctctgggagctgggcagcctcgtccaggccttcgtgaagagggagagccaggcttatgcgtaagcttcatagcttctgctggcatggggtggacccaggacccctggggcctgggtgtcctgagtggtggtaaagtggagcaataacttcacggtcatgaca

SEQ ID NO: 509731 - DNA, 189 bp, Homo sapiens
  misc_feature (189)..(189): n is a, c, g, or t
ccacctcagcttccagagtagctatgatcacagacacatgccaccactcgtctaatttttctatttttggtagagatgggggtctcactatgttgcccaggcgggtcttgaactgctggccttaagcagtcctcccgcctcggcctcccaaagggcggggattacaggtgtgagccacatccgtacggn

SEQ ID NO: 509732 - DNA, 119 bp, Homo sapiens
tactttccacagggtaaaagaagttgagttgagacgaaagatatattgaataaaggcagataatatttgtaaattgactaatagaaagtcgttaccatctttattagaagctgaacctg

SEQ ID NO: 509733 - DNA, 165 bp, Homo sapiens
agcaggtcaaccccccagaaggaaaagaatgtactcctgaggtggaggagggtgttcctcccacctcggatgaggagaggaggcaattcaggagcgagaactttcaggactgcagtaatttatcgaatcagattataaagtaactaaatatgtcccaagctgaca

SEQ ID NO: 509734 - DNA, 660 bp, Homo sapiens
atgggtcagaggggcgtccacttcgtatgtgctgtggccccccatcgtgtagggccctgtttcgttggccgggccccccccaccggaggggtcacacattttcagagtcgccctgcctgggggaattacactgtgggcggttctcccacgcacggacgtatacgcggtcgttaacaagtaagcaagataattttttatgcgagaggcctcacccactccctgtgggtctacgtcacacactcggagcaagtgtctccacccccccaagtgtcgctccactcacactccactactgttcctgtgtgcaccacgagtcgtctcggccgtgcatgtgtatatatagtcatgtgtcaccacacaagatatgatgtgtgggcacgtgaaatattacacaaggcatctcccacaaaaaggttctgtatgttctgtgtgtgacacacaatgagacctccacacacactttggtgtttgccgcacacacaactatcttgtcttccgccaactgtgaggaggattaacacccacgtgtggtggttataacgcgtggtagggagcgctaatagacggtgcggggagtacgccgttgcggtgttctatctatgacgccagagctacgcattacaggtctttatatagccgtcaaacaattagacaaaaaac

SEQ ID NO: 509735 - DNA, 990 bp, Homo sapiens
cgttttgtgtcgcacagcaagggtgcgcgtatccgcctcgccatgtgcccgttgttgttcacaggcgcacatgtggccctaattggggtgcggaaaaagggttcccccctcatccggttggtgtctcccgaggaattcctcgctttccccagagcggggtcctttctcaagaaagtgggggtcccccccctccgaagccccggccgtatgaacggcgtgacacccccggtttacgacgagaccactgtgtgttctggaaagaaagaagaaaaaatttggccttcaggaaagaccatgcgggcagggtgatttaacccgacttctgcgctggccaagaccacacacattacgtgtaaccagacagtggttctggttagcatgcccaagccaacgagcgtgcgcgtgaatatatttaaagggctatttcattgtatgtgagacaacaatattttcccccagaaggtctggatgggtgggccactcctctatagaagcgcactcctcgtcgtcgcccccgagaatgattggtcccacaatggcagtggcacttgtgaaaaacttatggtcacaccccgccggagggcctcttatccccccctgtacatagagcaggagcggaccgctgtagatacccttattgaagcatggggaaactgcgttatcatagggtgcgtactctcccaggcttgactcccgccccacgttacctttatatgggaagactatcgtgttgtggggggcaaaagtgagtcgcacacacagccccaccacggattctggcggcaattattccttttcggacgacgccccacaaatagttgtacagagctgacaagcacaacgaccaggcacattggggcaataattctaatataaattctaatttacgaatgtgcttcctgcatttctaggctaccatagaaaaaatttgtttcccccaaacatacacccctttgcaccccacaaaacaaaaaaaccggaacatagaaa

SEQ ID NO: 509736 - DNA, 118 bp, Homo sapiens
tggtgtctgatgcctaaaatagatctcaatacgtgggttttgtcgtggttttgtgtggagtgtattgggttttggtgttgttttttgagaccaggtcttatctgtcagacagctggag

SEQ ID NO: 509737 - DNA, 155 bp, Homo sapiens
tacccccattttctatttgccaataccttttctggaatgtgctttttttgtgtacacatttttatccattttacatcaaaagcagtgtaagtgtgaatattactgtttcttatgtacaaggaacacaataaataatatggaaattatatatttat

SEQ ID NO: 509738 - DNA, 87 bp, Homo sapiens
  misc_feature (55)..(55): n is a, c, g, or t
  misc_feature (68)..(68): n is a, c, g, or t
gaattcggcacgagtgcacccggtgagctgtgtcaccatgtgggtcccggttgtnttcctcaccctgnccgtgacgtggattggcgc

SEQ ID NO: 509739 - DNA, 276 bp, Homo sapiens
gcttgcaacttgaggcacccaagggtgatgcacgaaccaatgccggaagtcttctttacggcatttggtgccagcacgttggatcatgagctgcgtctgtatgtgcgtgaactgcgtgaccgtagtcgtactgtcgatgagctgaaccgtactatcgatcagctgtgccgtgaaaacgacatcaacattgcctttaaccagcttgaagtgcatctgcacaacgagaagggcgatgaggtgacggaagtaaaacgcgactacaaaggcgatgacccg

SEQ ID NO: 509740 - DNA, 258 bp, Homo sapiens
cgcatcggtaagagacaccaaaaaggaacgatgaaagatactagattactcaagttaaaactgttaattcattaagagttatacacatcgcagtgcactgacaccatcacttatagtaaacacgcaaaatatatttgttattcagcaactgtgtggtatactgtaaccacattcatggcaagcatttatggcatttccattatgttcactcagtagggcaacatttcatacaggcaaacaaagtatccaaattcatat

SEQ ID NO: 509741 - DNA, 117 bp, Homo sapiens
accaggatacgggggtcaggtacgaaggagaaatgtaggtcacatggtctcaaagagggaatgagtgggaaggcaagattcttagtttctaagtctgcattccagtctagaagagtt

SEQ ID NO: 509742 - DNA, 130 bp, Homo sapiens
  misc_feature (58)..(58): n is a, c, g, or t
acttcaatcccgtgagccatcatgaatgacaatgaagacacaaactggcatggtgagnaggtacccgatccctgagcctccgagcgctgccggcgttgtctcttcataattggctcaccgcagattcaat

SEQ ID NO: 509743 - DNA, 110 bp, Homo sapiens
tgctgcagctcgtgtactattccaggtaagggggtggtccgcgccccttggggccctgggagcctgatcccagagctcatatctggacttttccccatcgtcactggtcc

SEQ ID NO: 509744 - DNA, 145 bp, Homo sapiens
ggagacctttactgtcaccgcttactctttcctacccttatatccagaaacaatgacctccagtgcatacttgtgaatctttgctttatggcctttccaccatagttgcccactccctctccttcagacttcgggtaccgagctc

SEQ ID NO: 509745 - DNA, 168 bp, Homo sapiens
tctgcatctgaccaggcgctgtacctgcactactcctcaggcctggctacgtcgcgtttcgcgcagtcacatcgcatatgctctcttctctggctcacgtaatctctcacgctcgcagtctacacagatcgtgcacgtacgtctcgaggtacacgttagtagtcgacg

SEQ ID NO: 509746 - DNA, 535 bp, Homo sapiens
  misc_feature (168)..(168): n is a, c, g, or t
tttttggttgattttggcttcctaaatgacaaccatgagcccctcctaaagaggcaggtggcaagcgcccaatcaaaacccaagcgctttgggtcctaaaaatggaaggcttccttccttcccaatctccctgccagggcccacagtgtggccctagccctcccctcncgggaatgtagaacggagaccccgccagggttgggccggggccttatactcctgggcccctcccaaccgtgccctgtgtgttggctttgtggccgaccaagtcccaattggcttttcgcccaaaaaagggctggtatttctcctctgtccttggaggtgatttccccctgaccccctcccccaggtgagtgaccacctgggtgccagtccacggtgtttccccctcataaacaaatgtgtttgccccatagttcctctcacccgctgtgtgtatagggaatgaatgtgtgtatgaatggagcttgtcatgtgtgcatgagagtaagtttgcgttttgcataaaggactattggcgacctgttttaaa

SEQ ID NO: 509747 - DNA, 1156 bp, Homo sapiens
gaagaagaaccgagactagcctctggcctccaaggattcccagaagcagctgctctgtggggcagctgtgggcacccgtgaggatgacaaataccgtctggacctgctcacccaggcgggcgtcgacgtcatagtcttggactcgtcccaagggaattcggtgtatcagatcgccatggtgcattacatcaaacagaagtacccccacctccaggtgattggggggaacgtggtgacagcagcccaggccaagaacctgattgatgctggtgtggacgggctgcgcgtgggcatgggctgcggctccatctgcatcacccaggaagtgatggcctgtggtcggccccagggcactgctgtgtacaaggtggctgagtatgcccggcgctttggtgtgcccatcatagccgatggcggcatccagaccgtgggacacgtggtcaaggccctggcccttggagcctccacagtgatgatgggctccctgctggccgccactacggaggcccctggcgagtacttcttctcagacggggtgcggctcaagaagtaccggggcatgggctcactggatgccatggcagaagagcagagcagccagaaaacgaatatttcaggagggggcattaaccgggcagaattgcgccagggtggtgtccggggtcccatccggggcccaggtccccttcagcaattccggggcctaactcattaagaggcgttccacacggttgccacggcatccgggcccgcaactgtgtgtgcttcgggacacggttgtgtcaggggagtgccgatttgcaccgcgctgtctgggcccaatatagcggggggggcacaggcgcggaagcactcttcaacaagcaggggctacgtagggcaaccgggaggaggccaccgactggactgggtgggagtcgagcgcccacgaccaaacgtgtggaggagcccactcaacacagcagggtgcgacaacaagacacaacgctcgcaaccacctaactaaggaaaggagtaacggataaacacaccactacaccaataagagcgagaggcgagcgcgaagtgcatcaacctgaacaagcgagagttgtagctaataaacactgagcaactacgctcacatagctgccccggccgacgctcacggcgccca

SEQ ID NO: 509748 - DNA, 171 bp, Homo sapiens
tggcctttggttcagccctgcttggggggttcccccgtggacaccctgttgactttgcacttccctcccgggccccgcacccccgaaccgacccccgatcgaccggccccgctgttgccttgtaagccatagggcatgggcgctttcagaataaacaggccctgcctggga

SEQ ID NO: 509749 - DNA, 355 bp, Homo sapiens
cttgtggccatatgtgaatactcctcaactcacctataacccgtaaaccacattggtgtctggctcatcattctgtcacaggtttcccaaaagtccacaggtgaattttgaatggtcaccttatctatccccagaaaggccagcttttccttgcaaccacttcacctcaaaggtcagttagtagtcctgtgccttctatcctactcgacattaaaatgcacaaggaaaccaaatatagctacaactcagaggaaaatctggttgctctgggcacagttcagagctctcaacagtgctataggctctgtggttaactctgtcacttgtgaccctcactcgtgccgaattcctacag

SEQ ID NO: 509750 - DNA, 188 bp, Homo sapiens
tggggccccagcccttcctttgctcccccccccccaaagtttgtttggggggttatagggggaactgcagttcctcctttggaatgtagactggatatgtttaataactccccttttctatccttgctcaaaatgtgggataacgcgatggctgtgaccctgggtggaaattaaacttgttttatgca

SEQ ID NO: 509751 - DNA, 761 bp, Homo sapiens
ctggcagcgctccggctgcacctcctgtgtgcgcgccgctgcgtgtgccacaggcccctcgaccctttgaccaccgccctcgggcctgcgcgtccggcagccgggaccggtgatggctgcttggactgactggccgtctcctcccagacccctctgtccctgcctggggctcgctggggctgcggcgcctgcccgagctgcatgtggggctggttgctgctcccgagcccagagcgagcggccctcggtgcccccgaggcggtgccccgccgcgccagaggtacggaggaggagctggcgtggccgtggccaggctccccacgcgccgcaaggcctcggaggcacgggctccccggagggggaccttggggcgtcccagcccaggacggaaggacccggaaggcagaagcggagccgggagtcgaggccgagccaggtggccccccgcttgcccccggccgggcggccgtggttggcgtggtcccctggcggggctggccatggcgccagcgggccggactccgggggccggtcgggccgtgcggaactggcggcgaacgcgagcccagaagggccaccggggcaggacagcccgggaggggcgcaggccgggggccccccgagggaaggtctcgccagcagccgcctctgggccacaggttgggcagcctgcgggggggccaacccgcgtgaaggccaccctcgggagggccacccagggggcgggaaacaagcggcgccccggggcaggccgccacagg

SEQ ID NO: 509752 - DNA, 1241 bp, Homo sapiens
ggtcgccagccgagccacatcgctcagacaccatggtggaacggtgaaggtcggagtcaacggattaggtcgtatgtggtgcgccatggtcaccaggcctgcttgtaactctgtgtaaagtggctatttgttggccactcaatgatcccctgtcattgacctcgaaactacatggttagagcatgtatcgcagagtatgattccacacgcatggtcaaatgccatgggctaccgcgtcaaggctgtagaacgggaagcttgtcatcaacatggaaatcccatcagcgatctatccaggagcgagatccctccaaaagtcacgtggggcgatgctggcgcatgagatacgatcgttgggagatccacttggacgtcgtatcagccgacacagtggaagaacggctcgggagcatcactttattgcaagggcgtgtgatgccgaaacatgggtccactcagtactcgtgaaccccgtgctgccttgagtgacccgccagtgtaccgggtcacttggggtggtcgaaagcccatggaagtaacgtcatggagcaaaccacgcggctacaaaggcactacgatacgagacgagaattgcctcggtcccctggtcgaaccccacgcacaatgtgcactatgaggacactcccacctagtggagacgaagggatcgagccgagtggagcagaaccattaagggtgaatactgtctgtgcaaacgggaacttgcaattggacactcagcaggttaccaattgcaccagtttccactcttgggcctaggacactaaggaacatggaacttcgcttgggaaataggggcacagcgcctgcacctagtgcgtaagcaaatgtcggtcgacggcgagtatgaactctgggacaccacggcagcagtgcaggataccattcccaagcagaaaaccacatgagaattgcctcctcttagccccttttgtaagatttggagagcaggctatatgaccgaaacagaccgggcccatttgcgtccaagtggcaaaaaatgtgcgtcccaaccttcggcgcccgttgggatggcgattggagcagcctgtgggtgaacaagcgactccaccatgtgtggacgatttggaggcagccgttgacgcgaggttgagatcacccaggaacacttggggcacaacacgatgcgatagaccaaagctaggaggtctgacaagcctgtggagaccccttggaccacagtcctaacacacacaaag

SEQ ID NO: 509753 - DNA, 935 bp, Homo sapiens
  misc_feature (1)..(1): n is a, c, g, or t
  misc_feature (155)..(155): n is a, c, g, or t
ngcggttttgcgcggagtttccgcaccgctccggtggttgcgggggtgcccggtgcctccccccgccggttgggtggcccaatgtgatttcggccagggtatcccagtgttcagaggtcgtgggcctgggggccccgatggccgccgtggcggcngttcgccggtgttgtgtgcccccggcctgtgggccggttcccccgcggggtgccccggtcctccagagtcaagtcgtgtggccgcaggagacgtgttcggccctctgtggttgaagagccggcgcaggccccccccatttcctatagtgttttgcgtgggccgcccctcttgtcatgtggcgtctccggcggccccccctgtcttggagggcttcttgcaggaattcaccccgagcaggggcagccattctggtgttgcggtatttggccaccccctttctgtcggggggcttacccactcaccccggcgcaccaacaaggtgtcttggggacagttccagacgctcccacgcggtcttccccggtccgctgcgtaagaaggcgctccagcagcgatatgtgtttccccggctgggcagtgcttctccccccccctttctatccctctgtggtgggaagacctgtgtctcaaagctgtctgctattaacaggggcccgagtatacaacaaggtcgtgtcaacaaccaggccggtctatgggaacgagcacacgagtactgttcaactcctctgctcagacgagtcaatggagatgtcttttgtgcggacgccccatgtcgaggtttgtactgtatttggtggtccgcgatccagtgcgagacgggtccttatcaagcacgcccggtaccttttgcacgggcccaatcccttgccccccgacatttgcaccccgaagtttcgagcccccttacaaaatgttaaaaacaaaaaaacataaca

SEQ ID NO: 509754 - DNA, 869 bp, Homo sapiens
gctgcctttctgggtagacatgaattaaactcactagaagtttcagccagatttcttcctgaatggttcagacagttgcaaagaccagactataggctcgctttgtttagtgcatcttccaacaggcagtcattgttcatgtccctccagaaaaacttaaaatttttcagcaattggctgaccattacacttattcaatataaaacttttataaatattcccctacttctatataacagaaagaaaaacccaggcaaattttaaatgagccatatttgttgatataatttttagcccaattctaatgcaatgagaaaaattaattttactaaacttgattctgtagaaaagtaatagctgtttagcactcccttattcaaagaacaaatttcagtatttctctgaacatacttttcttcatgtagtcaaatcacatctacatactctcacggaaccgttgacctggttttcctaacgtacgtctatattactaggaacacgcatttagtctccatactttaaccatactctaagctgtaaatgtccaggagttggagctgtaagccaaacggacctcctcttggaaatgcctgttttaacaccatcaaatggtattgactcctttagcctcatgcagtgccatttatatggaatcatttcaaccatactgcacaggttaccgactattgatactcggttaggagaggaggtcgaacagtccgtactctcgtgctcaacgcattgcactcggctcactaacacccatgggcaagcgacacctgcaaagctctgtggcaaccagcggagtgcaccccgctgtcaacagcctcatcaaaacaagcgagaacaaaacgcccaactggcccaac

SEQ ID NO: 509755 - DNA, 1169 bp, Homo sapiens
  misc_feature (1127)..(1127): n is a, c, g, or t
  misc_feature (1160)..(1160): n is a, c, g, or t
ggacatgcttgggagaatcaaaaaggtcttcatctggattataagatagatcagcaagcccagctccagagtttacatattgaatggtgggtcagaaatgcagatgttcaagtgttcgaggaaacccacctgcgtacaagaggtgtaccagccccagcaataaccaggggaaggggaggagttacagccggccagttggagttgtagtacacgagggacgccaactcccagaggagtcctgtccacccgagggccagtgagtcggggaagaggacttctcactcccagagcaagaggagtccccccaactgggtacagacctccaccgccacccccgacacaagagacttatggagaatatgactatgatgatggatatggcactgcttatgatgaacagagttatgattcctatgataacagctatagcaccccagcccaaagtggtgctgattactatgattacggacatggactcagtgaggagacttatgattcctacgggcaagaagagtggactaactcaagacacaaggcaccttcagcgaggacagcaaagggcgtctacagagaccagccatatggcagatactgattgtactgtctgatgttgtgaaatagccaatctccaccagtcctgtatactgttcaaagtaatttttttctatgaacaatccctttttaaataaatcaaaatgcttaaaatctgaatggatggaacttaaaactactttgttgaaacatcaacctgggcagaaaaaaaaaaaaaaaagacatgtaaaattttgttatttccagtctgtatatgaaaaaataggtcatcaaaaggaaaaaaaataactttgattaactagtgttaaacaaaaaataggtttactaaatatgttaatctattcttttaacataagcctcacctttcattttaaaggtttccatagaatttagttattttatctttcagccatatgctagtttttttttctcttgccaacatgcgtaaaaagggaagccaattacaagtgcaaataatgtggtattcttttgtaactcaagtcttgaaatgttctgtagtgttaagcaaagtctcctcttgcttgatactaaataaacttttgaaagaattttgngtgtgtgagctaacaatttcatgggtttttttntattaaaaa

SEQ ID NO: 509756 - DNA, 861 bp, Homo sapiens
  misc_feature (37)..(37): n is a, c, g, or t
  misc_feature (41)..(41): n is a, c, g, or t
  misc_feature (44)..(44): n is a, c, g, or t
  misc_feature (819)..(819): n is a, c, g, or t
  misc_feature (852)..(852): n is a, c, g, or t
tgctcacaagtctcaacttaattacggtgctctcttnttanccnccgctacaggactatgatgatggatatggcactgcttatgatgaacagagttatgattcctatgataacagctatagcaccccagcccaaagtggtgctgattactatgattacggacatggactcagtgaggagacttatgattcctacgggcaagaagagtggactaactcaagacacaaggcaccttcagcgaggacagcaaagggcgtctacagagaccagccatatggcagatactgattgtactgtctgatgttgtgaaatagccaatctccaccagtcctgtatactgttcaaagtaatttttttctatgaacaatccctttttaaataaatcaaaatgcttaaaatctgaatggatggaacttaaaactactttgttgaaacatcaacctgggcagaaaaaaaaaaaaaaaagacatgtaaaattttgttatttccagtctgtatatgaaaaaataggtcatcaaaaggaaaaaaaataactttgattaactagtgttaaacaaaaaataggtttactaaatatgttaatctattcttttaacataagcctcacctttcattttaaaggtttccatagaatttagttattttatctttcagccatatgctagtttttttttctcttgccaacatgcgtaaaaagggaagccaattacaagtgcaaataatgtggtattcttttgtaactcaagtcttgaaatgttctgtagtgttaagcaaagtctcctcttgcttgatactaaataaacttttgaaagaattttgngtgtgtgagctaacaatttcatgggtttttttntattaaaaa

SEQ ID NO: 509757 - DNA, 432 bp, Homo sapiens
tgtcttctcagcatgactctgcaaacgacgggctttagcctcacccaggcaacatgattcccttcctcctctcccacattcactgtcccagtcagcagtgctgttttcttagcaggacgagtgtgaaatccagggcggcatttgatttcccttggatttttcattcgaatttaccctcaaggataagaagggaagcaaggagggagagaggccaagcttgggccacgcacagcgtgagcagtcctcagttccactcctgctcactgcatccagactgcagtcatcgtacgttgagctgggcttcacacataccagatgaccaatctggctgagccagcgtgagatccacatgtgggagggcacaggcccatgtgttggggccagggagtcactggaggctggtgcctggagcacccacagttccctgtactt

SEQ ID NO: 509758 - DNA, 887 bp, Homo sapiens
  misc_feature (173)..(173): n is a, c, g, or t
agcggatctgagactcgggtaatctggatgggagctgtggtcttgtatgctcagcgaggccgcgggagaagacccgggagagagctaggccgaggtccagccgacgcgagatctgcgtgcccgagcccgtcgttacagcactagaagacacgctcgtatcccgggcctggggntgaggcagagcagaccaccgtccggtgagcaagcgcgggcgaagacgcagcggtgcgcccactatgccccaacgagccaccacaagggcccccgcggcggacagccagaaaagcgcagcgaagagaaaagcgccaacccgcggaggcccggagtgcaagcgataagaggaaaccatctcgacacaagcatggaggcagcaggcaccggaggtgaagcagtggacgccgggcagacgcgccgagggggccagacgaagagcagttccagccggggcccccactgccgtgcatggacaccggggaccccgggcaccgctcaactgggcagcgccatgcacgccaacagacagacgtggagtgaggtgggtaggggcgaagcggggcgcacagttggtggcaaagaggagcgatgcacttgagttgaattccggtggttcaccaacatagaggggaccagaacgattacacccacgcagagataggttacccggtgagccccaaaccaggagactgtctgaaggacacgctaatggctgggacccagaagccactttggacgcggtcggaaccgggcgcaagcccaagggtgggaaggacctgagacaacctggtgagcgaaccaacagagacggggacccaagcgggcagtgaactagaccgaaacacaggcactggcagagaccggatcaatcacttaacacgcggaccacaccg

SEQ ID NO: 509759 - DNA, 889 bp, Homo sapiens
gcgttgttgcctgagatgaagttggcgcccttgtgttgacattggatcctatactgtgagagctggttatgctggtgaggacgtgcccaaggtggagttctcctacagctattggtatggtggtaagaaagagatgacggaagtcacattaatggtcatagatgtcgacaaggcaaacaaggcggtcccaccatactagcataggatactaatgctctgcgtgttccgacgggatgaatatggaggccatttcacctctaaaaaatgggatggttgaggactgggatagtttccaagctattttggatcatacctacaaaggtgcatgtcaaatcagaagccagtctccatcctgttctcatgtcagaggcaccgtgaatactagagcaaagagagagaaactgacagagttcactgtttgaacactacaagcatcccgtgcttcttcctttgcaaactgcagtttttgacagcatttgctactggtcgttctactgggctgattttggacagtggagccactcataccagtgcattccagtccagatggctatgtccttcaccaaggcattgtgaaatcccctctgctggggacttattactatgccggtgcggcagaactcttccaagaaaatgaatatgcatggccccgccatatatgatggctcaaagaaggggttcgtgaaggtctcccgcagggtggaaagaaaagagaggtggctcaggtaccggggctggcccctaccattggtctgggttgtccgcgattccacgtcggtctacagtgtccatcactctttgcacacgggggccgattcgcctgtggtttatccccaggtcacggggtggggggggccaaaccacaggatgtcccagataggtttgacaa

SEQ ID NO: 509760 - DNA, 506 bp, Homo sapiens
gagggaagaaagcggcgattgtcttttattggaattcctggaaacattggtttgttgttaattattattactgttactaatttcttagagggtgatgttattcattttatctggcagggtgctgtggccaagagtttttaggtgtagctgtagggcctcagtgggaaaatagttttaggttggggtggcttttctattacccaggtttttagaatccttaattctaacaagggccccctgggggtaaaggtgggccttacctaagaccacttttaccagttggggcaggagatttttgaggtgaacaacttgcctgtggaattgtggcaggaactgtttccactcacagcctgaaattttcctgtgtcccaaaccccagggggccccagcaggtttgaacctacacctgaggggtaccagcaggggggggtttgggtttgccctgcaaaaaatgggggccagcccccttttcccccaaataaagcccaataaagcctgagaagtga

SEQ ID NO: 509761 - DNA, 940 bp, Homo sapiens
  misc_feature (898)..(898): n is a, c, g, or t
  misc_feature (931)..(931): n is a, c, g, or t
caggctatggaaatacccgggggataccagtaatttttgccaaaaaggccttcccagttaattgtaacaagtcaaggttttgacacacagtctgaaattaggcgcagtgattttttaattacccccgctccggactatgatgatggatatggcactgcttatgatgaacagagttatgattcctatgataacagctatagcaccccagcccaaagtggtgctgattactatgattacggacatggactcagtgaggagacttatgattcctacgggcaagaagagtggactaactcaagacacaaggcaccttcagcgaggacagcaaagggcgtctacagagaccagccatatggcagatactgattgtactgtctgatgttgtgaaatagccaatctccaccagtcctgtatactgttcaaagtaatttttttctatgaacaatccctttttaaataaatcaaaatgcttaaaatctgaatggatggaacttaaaactactttgttgaaacatcaacctgggcagaaaaaaaaaaaaaaaagacatgtaaaattttgttatttccagtctgtatatgaaaaaataggtcatcaaaaggaaaaaaaataactttgattaactagtgttaaacaaaaaataggtttactaaatatgttaatctattcttttaacataagcctcacctttcattttaaaggtttccatagaatttagttattttatctttcagccatatgctagtttttttttctcttgccaacatgcgtaaaaagggaagccaattacaagtgcaaataatgtggtattcttttgtaactcaagtcttgaaatgttctgtagtgttaagcaaagtctcctcttgcttgatactaaataaacttttgaaagaattttgngtgtgtgagctaacaatttcatgggtttttttntattaaaaa

SEQ ID NO: 509762 - DNA, 354 bp, Homo sapiens
  misc_feature (250)..(250): n is a, c, g, or t
aaaattcgcggccgcgtcgactattctgtatgtctgaaatctgtatggcactgactttttttgtttttgttttgttttgagatggagtctcgctccgtcgcccaggctggggtgcagtggcgcaatctcggctcactgcaagctccgccttccgggttcacgccactctgcctcagcctcctgagtagccgggaccacaggcgcccgccacctcgcccagccaattttttgtatttttagtagagacggngctccaccgcattagccagggtggtctcaatctcctgacctcgtgatccgcccgcctcggccccccaaagtgctgtcgacgcggccgcgaatttagtagtagta

SEQ ID NO: 509763 - DNA, 821 bp, Homo sapiens
gagtgctgccaacgcccggtgaagaagctgaggtcttcatcagattgaaatatttagaagtggatacaaaaactatttcagcgaatgcagacaattaagtgtgtcgtgtgggcgagtggtgtctgttggtaaaacatgtctcctgatatcctacacaataaagcaaatgtccatcggaatatgtaccgactgtttatgaaaattagtgcagttcacagttatgagttgggggagaaccatatactcgtgggactttgttgatagctgcagggcaagaggattatgacagattaggaatcgatgagtgatccacaaaaagatgtatttgctagtctgtaggtcagtggtctctccatcttcattggaaaacgtgaccgatgagtgggtgcctgagataactcaccatgtgcaatagactccttgtctggctggtgggggactcaaattcgattctcagagatgacccctctagtattgagaaagttgccaagaacaaagagaagcctatcactcgagagactgtgaaaagcttggtcacgggatctgaaggctgtcaacttatgtggagtgttctggactttacacagacagggcctaatgagtgtatttggccgaatggaatattggctgccgtggagcatctagaatcgagaagagcggaggggtgggtgtattgactttctgaaggagttttggacaggtgggtcggatcaaagaaaggatggtaatgattacgtaaaaaaaatggtttgggatggaagcgataaataggtttgaccaaaacgaatttgtttttccctaaataaaatatgttaaaaaaa

SEQ ID NO: 509764 - DNA, 197 bp, Homo sapiens
  misc_feature (154)..(154): n is a, c, g, or t
tagctcggtcctgactccttacacttcgtcggggacttccggactaggccgacgacacgtgttgacggttgcggtctgttacgtacgtactacgtgactgccacgcacgctacggacctgggacgacgactacggacgacacgtacggacctgnctgctaacttacgcgaccggactacacgaccgacacgacgggg

SEQ ID NO: 509765 - DNA, 859 bp, Homo sapiens
  misc_feature (27)..(28): n is a, c, g, or t
  misc_feature (40)..(40): n is a, c, g, or t
  misc_feature (817)..(817): n is a, c, g, or t
  misc_feature (850)..(850): n is a, c, g, or t
tttattactatatttggcaaagtaacnnacaaaagaagcnacacgcctaaggactatgatgatggatatggcactgcttatgatgaacagagttatgattcctatgataacagctatagcaccccagcccaaagtggtgctgattactatgattacggacatggactcagtgaggagacttatgattcctacgggcaagaagagtggactaactcaagacacaaggcaccttcagcgaggacagcaaagggcgtctacagagaccagccatatggcagatactgattgtactgtctgatgttgtgaaatagccaatctccaccagtcctgtatactgttcaaagtaatttttttctatgaacaatccctttttaaataaatcaaaatgcttaaaatctgaatggatggaacttaaaactactttgttgaaacatcaacctgggcagaaaaaaaaaaaaaaaagacatgtaaaattttgttatttccagtctgtatatgaaaaaataggtcatcaaaaggaaaaaaaataactttgattaactagtgttaaacaaaaaataggtttactaaatatgttaatctattcttttaacataagcctcacctttcattttaaaggtttccatagaatttagttattttatctttcagccatatgctagtttttttttctcttgccaacatgcgtaaaaagggaagccaattacaagtgcaaataatgtggtattcttttgtaactcaagtcttgaaatgttctgtagtgttaagcaaagtctcctcttgcttgatactaaataaacttttgaaagaattttgngtgtgtgagctaacaatttcatgggtttttttntattaaaaa

SEQ ID NO: 509766 - DNA, 167 bp, Homo sapiens
  misc_feature (44)..(44): n is a, c, g, or t
  misc_feature (83)..(84): n is a, c, g, or t
ctctttccctaagcagcctgaggtgatctgtgaaaatggttcgntaattcacttgaacccggagaaaccccacgaaatcatgnnaaatcaaagaggttccaatcttcgtgttcacttttagaacactcgtgataactgctcaggccatacaagggtatgcatatacg

SEQ ID NO: 509767 - DNA, 1110 bp, Homo sapiens
  misc_feature (1068)..(1068): n is a, c, g, or t
  misc_feature (1101)..(1101): n is a, c, g, or t
ggacatgcttgggagaatcaaaaaggtcttcatctggattataagatagatcagcaagcccagctccagagtttacatattgaatggtgggtcagaaatgcagatgttcaagtgttcgaggaaacccacctgcgtacaagaggtgtaccagccccagcaataaccaggggaaggggaggagttacagccggccagttggagttgtagtacacgagggacgccaactcccagaggagtcctgtccacccgagggccagtgagtcggggaagaggacttctcactcccagagcaagaggagtccccccaactgggtacagacctccaccgccacccccgacacaagagacttatggagaatatgactatgatgatggatatggcactgcttatgatgaacagagttatgattcctatgataacagctatagcaccccagcccaaagggcaagaagagtggactaactcaagacacaaggcaccttcagcgaggacagcaaagggcgtctacagagaccagccatatggcagatactgattgtactgtctgatgttgtgaaatagccaatctccaccagtcctgtatactgttcaaagtaatttttttctatgaacaatccctttttaaataaatcaaaatgcttaaaatctgaatggatggaacttaaaactactttgttgaaacatcaacctgggcagaaaaaaaaaaaaaaaagacatgtaaaattttgttatttccagtctgtatatgaaaaaataggtcatcaaaaggaaaaaaaataactttgattaactagtgttaaacaaaaaataggtttactaaatatgttaatctattcttttaacataagcctcacctttcattttaaaggtttccatagaatttagttattttatctttcagccatatgctagtttttttttctcttgccaacatgcgtaaaaagggaagccaattacaagtgcaaataatgtggtattcttttgtaactcaagtcttgaaatgttctgtagtgttaagcaaagtctcctcttgcttgatactaaataaacttttgaaagaattttgngtgtgtgagctaacaatttcatgggtttttttntattaaaaa

SEQ ID NO: 509768 - DNA, 473 bp, Homo sapiens
gagctaagggctacccacaggatggtcatattgaaaactggggttttcatgctcggggaaggtggtggtagtgaaagggcacatacattcttgcccactgtgcaacaggcaggggcaagaggtgggatgggtcagtagtcacatgataaatcccccggggcctctgaaatcacattctggtaacttccactttgtgaaaaggagttagtttttactcctctcctttcccgtgtcttctccattttcaggtgggacagatctgcatgatatttgggcatctcaaaactgacgagcccaaaactgaccatgagtcacacccccagatgtgttctctaactactccctagctctgtgactttgtttccccagttgactgagccagaaacctgggactcatcctagatgagtcttctcttctcccttctctgtcccacgtccaatcaatgatcgaattccagggtagcccttaactg

SEQ ID NO: 509769 - DNA, 649 bp, Homo sapiens
agaaacccgttatcgaactatgagaagtgaaaggggatcaagttattagagttggcagtttgtgaaaaacacttatcctttgagcaaaatggaacttcggggcataaaggaggatgtctcgtccatttgaggtagtatgtttcagaggtgaatcatgtcttaataccggtaaatctcgtcaactatggtcgcacaccgaaaaaggttaggtgtcaccttgtgttcaagaagatttacttctatcaggttcttgttatgacacaagccatgcattatcccataggttcggcaaacataagaatatgtgcataatttgtcaccaacaagggtataaagtactgcgcagcaatttaaagctgtctgttcatcacacatgttttgggtaatcacgaaatcctggtaccaatttaagttatctataaatgacatgtgctgtatctactaagcacaggctttcggctggtaggctttcaatattattctcccaatctgttaacccatgaccagcctcactagggtgtgcatttcctagagtggcacccctgtaatgaacccagctaaagagtgatgttagcgcaataatggtcactcgctctatcgctctctctctctctctctctctctctctctcgtgccgaatttcctgcag

SEQ ID NO: 509770 - DNA, 899 bp, Homo sapiens
  misc_feature (857)..(857): n is a, c, g, or t
  misc_feature (890)..(890): n is a, c, g, or t
agtagaataattattcccccgaaaaggacgtacaaggtaactctcatcgtcagggtttttaaataaatataattatgagacaagtatttttttgtaaccacgtacagacttatagagaaaaaggcaccgctagaataccaggttaattttatttgtaccagtagggcccccagccaaaataggggtgattccactcatacggaatggactcagtaagggactatgattcctcgggcaagaagagtggactaactcaagacacaaggcaccttcagcgaggacagcaaagggcgtctacagagaccagccatatggcagatactgattgtactgtctgatgttgtgaaatagccaatctccaccagtcctgtatactgttcaaagtaatttttttctatgaacaatccctttttaaataaatcaaaatgcttaaaatctgaatggatggaacttaaaactactttgttgaaacatcaacctgggcagaaaaaaaaaaaaaaaagacatgtaaaattttgttatttccagtctgtatatgaaaaaataggtcatcaaaaggaaaaaaaataactttgattaactagtgttaaacaaaaaataggtttactaaatatgttaatctattcttttaacataagcctcacctttcattttaaaggtttccatagaatttagttattttatctttcagccatatgctagtttttttttctcttgccaacatgcgtaaaaagggaagccaattacaagtgcaaataatgtggtattcttttgtaactcaagtcttgaaatgttctgtagtgttaagcaaagtctcctcttgcttgatactaaataaacttttgaaagaattttgngtgtgtgagctaacaatttcatgggtttttttntattaaaaa

SEQ ID NO: 509771 - DNA, 220 bp, Homo sapiens
cttttgggtctttgctgtttgtttgctctcgttctttttcttgagacagccttggtctgttgctcaggctggtggtgcagtggcttgatctcatctcactgcaacctctgcctcccaggttcaagcgattctcctgactcagcctcccgagtagctgagaccacaggtgcctgccaccatccctcctaatttttgtattttttgtaaagctgagcaaaga

SEQ ID NO: 509772 - DNA, 113 bp, Homo sapiens
gccctactttatttctttttgcctaacttttatttttttgcgtgcaaagcctttaattagaatgttgtattttttacatcatgcataacttcacatttgtgattaattagtaa
